United States Patent Application Publication US 2007/0009899 A1 - sequence listing, part 2

SEQ ID NO: 3255 - DNA, 387 bp, Canis familiaris
  misc_feature (6)..(6): n comprises a, c, g, or t, or includes no nucleotide
  misc_feature (209)..(209): n comprises a, c, g, or t, or includes no nucleotide
  misc_feature (279)..(279): n comprises a, c, g, or t, or includes no nucleotide
  misc_feature (341)..(341): n comprises a, c, g, or t, or includes no nucleotide
  misc_feature (355)..(355): n comprises a, c, g, or t, or includes no nucleotide
  misc_feature (359)..(359): n comprises a, c, g, or t, or includes no nucleotide
  misc_feature (365)..(366): n comprises a, c, g, or t, or includes no nucleotide
  misc_feature (368)..(368): n comprises a, c, g, or t, or includes no nucleotide
  misc_feature (379)..(379): n comprises a, c, g, or t, or includes no nucleotide
  misc_feature (382)..(382): n comprises a, c, g, or t, or includes no nucleotide
  misc_feature (386)..(386): n comprises a, c, g, or t, or includes no nucleotide
aattcnatcgtgacttgctagtagattagttgtgtgaaggtcaaggaaatggggaatctggtctgaggaataattcctaggtttttaggttaaattactgggtgagtgcgtgctgcagtgaatgatatatggacaataagttaaggggaaattaaagtttctctttgggccatgttaaatttgaaatgcctataaggcaattaaatggngatattaagtagtataattatgaatatgggctttgtcagcttatatatgtctttaaagtcaaggattggntgaagtaatttactaaatactgcgaagagaaggccaaagactaagttctgtagcattcctgncattagaggtcagnctgngaaggnngnaccagcaaaanagnctgng

SEQ ID NO: 3256 - DNA, 332 bp, Canis familiaris
  misc_feature (11)..(11): n comprises a, c, g, or t, or includes no nucleotide
  misc_feature (34)..(34): n comprises a, c, g, or t, or includes no nucleotide
  misc_feature (45)..(45): n comprises a, c, g, or t, or includes no nucleotide
  misc_feature (47)..(47): n comprises a, c, g, or t, or includes no nucleotide
  misc_feature (49)..(49): n comprises a, c, g, or t, or includes no nucleotide
  misc_feature (51)..(51): n comprises a, c, g, or t, or includes no nucleotide
  misc_feature (53)..(53): n comprises a, c, g, or t, or includes no nucleotide
  misc_feature (57)..(57): n comprises a, c, g, or t, or includes no nucleotide
  misc_feature (59)..(59): n comprises a, c, g, or t, or includes no nucleotide
  misc_feature (61)..(61): n comprises a, c, g, or t, or includes no nucleotide
  misc_feature (63)..(63): n comprises a, c, g, or t, or includes no nucleotide
  misc_feature (96)..(96): n comprises a, c, g, or t, or includes no nucleotide
  misc_feature (143)..(143): n comprises a, c, g, or t, or includes no nucleotide
  misc_feature (188)..(188): n comprises a, c, g, or t, or includes no nucleotide
  misc_feature (197)..(197): n comprises a, c, g, or t, or includes no nucleotide
  misc_feature (264)..(264): n comprises a, c, g, or t, or includes no nucleotide
  misc_feature (321)..(321): n comprises a, c, g, or t, or includes no nucleotide
  misc_feature (329)..(329): n comprises a, c, g, or t, or includes no nucleotide
agctaggaaanaggagcaaaccggtgtgggggtntccctctctcncncncncncgcncncncnccccttttttttttttttttttttttttttgcnccttttaattaccccctcttccgtttgcacccttcttcgagcttcangcagaacctgcgaatttccaagaggtggtggcacagcgggagcanagaggtgtnaggggtttggattgggggctttttttttttttttttttaatttcttgatttcaacatcttcccccancctccggccaccgccgccgcctcttacctgttcccgcgggcagccgcgcgctgcagncagatcanctt

SEQ ID NO: 3257 - DNA, 400 bp, Canis familiaris
  misc_feature (2)..(2): n comprises a, c, g, or t, or includes no nucleotide
  misc_feature (19)..(19): n comprises a, c, g, or t, or includes no nucleotide
  misc_feature (30)..(30): n comprises a, c, g, or t, or includes no nucleotide
  misc_feature (42)..(42): n comprises a, c, g, or t, or includes no nucleotide
  misc_feature (50)..(50): n comprises a, c, g, or t, or includes no nucleotide
  misc_feature (52)..(52): n comprises a, c, g, or t, or includes no nucleotide
  misc_feature (56)..(57): n comprises a, c, g, or t, or includes no nucleotide
  misc_feature (72)..(72): n comprises a, c, g, or t, or includes no nucleotide
  misc_feature (230)..(230): n comprises a, c, g, or t, or includes no nucleotide
  misc_feature (397)..(397): n comprises a, c, g, or t, or includes no nucleotide
antcacggtatcgtaaggnttatctgaatntacacgtccttntccttatntnctcnnctctacctcccggtnttgagcccagggtctgagcgtctaagggtccgatggcccaggacatgcgtggagctcagggaacagtgtgtgtggtgtagtgtggtgtagtgtggtgtagtgtggtgtggtgtgtagatgactccacagggcagggtcatgttgcctaagtgtctgtnacttgagcaggtgcctctgcagagggcgcggaggcagcgggcctgagctctggctgcagcgtgccctcaggccctgtaaccctgggcaccttaacgaaactcctgagccttttcctcttctgtgaacagaatgacgtcagcttgtccacaaagcacggttggaggtnctg

SEQ ID NO: 3258 - DNA, 357 bp, Canis familiaris
  misc_feature (238)..(238): n comprises a, c, g, or t, or includes no nucleotide
  misc_feature (249)..(249): n comprises a, c, g, or t, or includes no nucleotide
tgtgaccagcgcctggagtggtagccccccagcagggacagggccgggttccccacagggaggcgccccgccccgtgttgggtgctgcaccggatattccgggtggtgctggctgcagaggcctgctggtggatgtgctcgggcgggggactcatggagcccgcacagcaggcggaaggcactcggacacgtacactcagagggctggttcttgtttttgtcgctgttgtaattaatnagaatcgatcntgccttcgggagattagcaatctctcatctgatcagaagatagaggcgaattcccagtggtaggagctccgactggctgagctgtgagtgtgagtcagatcgaattcc

SEQ ID NO: 3259 - DNA, 362 bp, Canis familiaris
  misc_feature (9)..(9): n comprises a, c, g, or t, or includes no nucleotide
  misc_feature (274)..(274): n comprises a, c, g, or t, or includes no nucleotide
  misc_feature (284)..(284): n comprises a, c, g, or t, or includes no nucleotide
  misc_feature (316)..(316): n comprises a, c, g, or t, or includes no nucleotide
ggaattcgntctgcgtggtacccacttacaagagtctcaacacggaactgggtgggaaatgtgactctgcacacacacacacacacacacacacacacacacacacatacacagattgacctactccttgaatagtctggcgagttagttgaatttgaagagtttgttaaattatggggaaattttgggaggtcatctaagtgcaagaatgtttgacacagataatttgaatagagaagttcaaattatctgtggttgggcgtaatcatgcaangtaaggcggnagagctttatttctctctaatcctctgtgggnggtccacatgaatcacaccaggtggttgagtaggtttccacttaac

SEQ ID NO: 3260 - DNA, 330 bp, Canis familiaris
  misc_feature (320)..(320): n comprises a, c, g, or t, or includes no nucleotide
  misc_feature (325)..(326): n comprises a, c, g, or t, or includes no nucleotide
tggctagaacccaaggcatttccatgatgcctcagtagggaaggatttagtgatctagttttgccctttactccagtctctcactttacttgtgggtttttttttttcacatctcttaatttaaaatgaagatagtggcgcctactgacccatgcagatagagcaggtgagagcaaagaaaccgacaagtgacatttccaggaggcaccaaaattaggcttcctgttgacccacatggctacttcctcattcccctgcagagcatgagatctcgaggtcagagtagagggaagaaagaagtagatggggaagaattttangagcnnagag

SEQ ID NO: 3261 - DNA, 886 bp, Canis familiaris
  misc_feature (38)..(38): n comprises a, c, g, or t, or includes no nucleotide
  misc_feature (127)..(127): n comprises a, c, g, or t, or includes no nucleotide
  misc_feature (129)..(129): n comprises a, c, g, or t, or includes no nucleotide
  misc_feature (175)..(175): n comprises a, c, g, or t, or includes no nucleotide
  misc_feature (206)..(206): n comprises a, c, g, or t, or includes no nucleotide
  misc_feature (290)..(290): n comprises a, c, g, or t, or includes no nucleotide
  misc_feature (338)..(338): n comprises a, c, g, or t, or includes no nucleotide
  misc_feature (433)..(433): n comprises a, c, g, or t, or includes no nucleotide
  misc_feature (435)..(435): n comprises a, c, g, or t, or includes no nucleotide
  misc_feature (437)..(437): n comprises a, c, g, or t, or includes no nucleotide
  misc_feature (461)..(461): n comprises a, c, g, or t, or includes no nucleotide
  misc_feature (463)..(463): n comprises a, c, g, or t, or includes no nucleotide
  misc_feature (824)..(824): n comprises a, c, g, or t, or includes no nucleotide
  misc_feature (866)..(866): n comprises a, c, g, or t, or includes no nucleotide
  misc_feature (870)..(870): n comprises a, c, g, or t, or includes no nucleotide
  misc_feature (874)..(874): n comprises a, c, g, or t, or includes no nucleotide
aattcgatctgttcagccctcaggtcaggaggattctnattccttggactgaaagacagacagacagacagaccccgcactccctttagccttgcttcctaggctccccaagggctttctgcctcantnacgttaggggagccgcaaggaggtgtggccacaggctccaggtccnggggaaggggaggcctgggccctgcccccgnatccatacagaagcatatatttacagggacaccccaatacagacacgtacaagtacacaccaagcatgcacacatgcccataantacacacacacacgcacaaacatgtaccgttccacaggcaggctctgnatcctggcatcactgggtgaacatctacgggggcctcggttggggtgtctcacccctcctacaactacaggtcttactgccccccagccctgggntngnggtgagtggggcaggagcaggtgntngaagcaggtgcttctaggaactctgaaacggaagagcaggatcctaggactgccttagccactcctatgccctctccccatccccctccctctgtgccaaagacgttccttgtctcctgtctcccctctctcctccttcctttactaacaggactctcgggctgaggctgggcatgtggccgaagactacctgtctcagcttcccttgcagctacctgtggccatatgactaaggctcggccagtaagatggaatcagaagtgaccatgccatttccagctcatgcccttgacaggaaagggcatgtgcttctcctgccattctctgctcttcccgggctgggatgcacatgtgatggtgngactaaagcaaccactctatccagaattggaaggtgcacatntagnagcncagatcaagctt

SEQ ID NO: 3262 - DNA, 833 bp, Canis familiaris
  misc_feature (341)..(341): n comprises a, c, g, or t, or includes no nucleotide
  misc_feature (348)..(348): n comprises a, c, g, or t, or includes no nucleotide
  misc_feature (398)..(398): n comprises a, c, g, or t, or includes no nucleotide
  misc_feature (401)..(401): n comprises a, c, g, or t, or includes no nucleotide
  misc_feature (452)..(452): n comprises a, c, g, or t, or includes no nucleotide
  misc_feature (806)..(806): n comprises a, c, g, or t, or includes no nucleotide
aattcgatctgaggtcggtgtccaggtaggcaaagaccagtctagtttttgtatgtgtgtgaatgggctgacctttgggggccagaaaggctctattatccaggattcattgctgccggttgggacttcaccatggagcttcctaccaagagcactgggggtgttctcacttccagtgttgctgtcaccatgactgccaagacgctagtcctgctgaggggcagagatgtccacagtggtatgatcaacaagaaatcttatgcagtgacctcccacctacagcattcccagtgctgacctcatctgtccctttcccccacaccactccccactgcttttgnacccctntccttcccatacacacacacacacacacacacacacatacacatttttanttntttttactttgtgcggccattactcccacacccctattgctgcccaaaatncacatgggctgagggctggggctggatgaacagacaccactctctactcatacccctcctttgtgtggttggaaaatgtattttgcattttgtgtggtttttttttctgcataaaaaatgattctactaatacatcttttgaagatcatgaacaatgtgagagtgtgaagtgggtgaggagcaatttaaaaagaatggtcaagtaccaccttgcagaggtggtaacctatgagcagagagcagatgacaagaagcaaccagggctaggggagcagaaagcagcgcccccccctccccccagcacagaaacggcccacagagcacccacagatctgcgtgttacagtaatggaangggagtcctgatggctggagagcacag

SEQ ID NO: 3263 - DNA, 704 bp, Canis familiaris
  misc_feature (64)..(65): n comprises a, c, g, or t, or includes no nucleotide
  misc_feature (132)..(132): n comprises a, c, g, or t, or includes no nucleotide
  misc_feature (346)..(346): n comprises a, c, g, or t, or includes no nucleotide
  misc_feature (355)..(355): n comprises a, c, g, or t, or includes no nucleotide
  misc_feature (360)..(360): n comprises a, c, g, or t, or includes no nucleotide
  misc_feature (377)..(377): n comprises a, c, g, or t, or includes no nucleotide
  misc_feature (379)..(379): n comprises a, c, g, or t, or includes no nucleotide
  misc_feature (387)..(387): n comprises a, c, g, or t, or includes no nucleotide
  misc_feature (390)..(390): n comprises a, c, g, or t, or includes no nucleotide
  misc_feature (395)..(395): n comprises a, c, g, or t, or includes no nucleotide
  misc_feature (397)..(397): n comprises a, c, g, or t, or includes no nucleotide
  misc_feature (502)..(502): n comprises a, c, g, or t, or includes no nucleotide
  misc_feature (513)..(513): n comprises a, c, g, or t, or includes no nucleotide
  misc_feature (536)..(536): n comprises a, c, g, or t, or includes no nucleotide
  misc_feature (541)..(541): n comprises a, c, g, or t, or includes no nucleotide
  misc_feature (561)..(561): n comprises a, c, g, or t, or includes no nucleotide
  misc_feature (600)..(600): n comprises a, c, g, or t, or includes no nucleotide
  misc_feature (608)..(608): n comprises a, c, g, or t, or includes no nucleotide
aagcttgatctgtgcctatgacttcacaactaagagcagtgggcttatcagagggaagagtctnntgggtgctacagaactacataaaggcacgctcaagttagtggcatatatcaagagcatacgcatgtnaagacgaccatataagcagagaactaaagatcaataaaagctgactaagtcagagtgaggtttttattgaaatgtcagaagacctcgacttggcttagaccctatccttgaaacttgagctccacactggagttcatgcatgaaagagaaagaaggaagaagtgttctaaagccatgccaaaccctttttttttttttaagattttatttattnattcatggncacanacacacacacacacacncncacactgnggnagtgncngagttgagaataacttttaaaaatgaaaataaccaaatcttatatgtaaatcttcatatgaaaataaccaaataactattttttataggtcattctatttacacnaggtgacaganattctgaaatggagccaagatancttgnagccttcccagtatgacggnaggattcagcagaatatagttggagacagttatttgaanacaaacanacaaacaaacaaacaaacatatttagaccctcaagagttaagactcctccaaaattcaagaaaacagccagctttttccttaactcagatcgaatt

SEQ ID NO: 3264 - DNA, 753 bp, Canis familiaris
  misc_feature (108)..(108): n comprises a, c, g, or t, or includes no nucleotide
  misc_feature (318)..(318): n comprises a, c, g, or t, or includes no nucleotide
  misc_feature (330)..(330): n comprises a, c, g, or t, or includes no nucleotide
  misc_feature (705)..(705): n comprises a, c, g, or t, or includes no nucleotide
aattcgatctggctctaaagactttccagagtttggttagttgatcttgaactgggactatacttgcgcagtaatacctgagacactgtttcctgcactatgcttctntttgttcatcaataaaagttttcacaggcccactctgcagcagtcctgtgcaaggaaccagagtacacaggtaactcggtcccagtctctgctcagagttttgagcagaaaacaagacaaagaatgcatcagtgttttctggacgagtgtcctagggatgaatgagggagatgtctgaggggacgtgtgcctgagtaaaagcgcagatgntacaaccccacnctgcacatatgcccatgcccacaaatgtacccatgcacacactgtacacacagacacacatctgcacatatgcacatattgcaaatgcatacacacatgcacgcaggctactagacattatatatggacagtatgagggagttcgtgaggccgtgattgcacagggagggctcctgaggtgttcagtccacgcgaaggaatgtggcagctttctgcttcccatccctactccagactcatccacactggctgccctgcattttccaaaacaacaggaccgtccagctctaagaccttgtctttcgttgattttcactctctcatgtcactcagctaatgctctttcaaatttgggattggacatcattcttcctnacaagcttacagcaactcctccatgtaaagtgaggggtatcagcttcc

SEQ ID NO: 3265 - DNA, 371 bp, Canis familiaris
  misc_feature (12)..(12): n comprises a, c, g, or t, or includes no nucleotide
  misc_feature (30)..(30): n comprises a, c, g, or t, or includes no nucleotide
  misc_feature (87)..(87): n comprises a, c, g, or t, or includes no nucleotide
  misc_feature (238)..(238): n comprises a, c, g, or t, or includes no nucleotide
  misc_feature (241)..(241): n comprises a, c, g, or t, or includes no nucleotide
  misc_feature (261)..(261): n comprises a, c, g, or t, or includes no nucleotide
  misc_feature (266)..(266): n comprises a, c, g, or t, or includes no nucleotide
  misc_feature (284)..(284): n comprises a, c, g, or t, or includes no nucleotide
  misc_feature (306)..(306): n comprises a, c, g, or t, or includes no nucleotide
  misc_feature (335)..(335): n comprises a, c, g, or t, or includes no nucleotide
ccttcgatctgngatcctgctgttacccgnggggtggaagggtctctgctgtttccaaactggacttttctgggttctgtttgtttnaaatactgtcttcaatggagcaccttagaatctcttttctctttgattcataaatgcactgagcatcaaacaatgacttaatgaggcctgataaagcgccacatcgagttgttctacacctgcagactgctcttctttgaaggttttcagntgncctacttacctaggctaggngctgnacagttaaagctctcagnggcaatcaactgtaaataggcnggctatgtttaacataatcccctccagangactctctctcctgcggtcactgtaatcaaccccgt

SEQ ID NO: 3266 - DNA, 449 bp, Canis familiaris
  misc_feature (9)..(9): n comprises a, c, g, or t, or includes no nucleotide
  misc_feature (203)..(203): n comprises a, c, g, or t, or includes no nucleotide
  misc_feature (420)..(420): n comprises a, c, g, or t, or includes no nucleotide
  misc_feature (431)..(431): n comprises a, c, g, or t, or includes no nucleotide
acacaaggnttaagttaacaaaaaagggaacacactgtgcttttgacactaagctaaatgcacctctgggagaaaacagggactgcctaaaaggtagaacttagtaaatccaaggcctcaggtgctggtgagatcagtgggtacatgtgacaaaagacaaagctgaatgtgtttggagggattcaaatgcctactttaaaagnaatataaatgaaaaagaacagaaatatgaagtgtgcatacagccttgtgtgtgtgtgtgtgtgtgtgtgtgtgtgtgtgtaagaaggggagcagtgggcttatacaaagtctcatgctggtctgtcctttatatctgtcaaagtcctttctccttcattatctatatctcctctccatcccctctcttcctcaattcccccaatctctccattttgnagatcagcctnacgataccgtcgacctca

SEQ ID NO: 3267 - DNA, 935 bp, Canis familiaris
  misc_feature (25)..(25): n comprises a, c, g, or t, or includes no nucleotide
  misc_feature (34)..(34): n comprises a, c, g, or t, or includes no nucleotide
  misc_feature (53)..(53): n comprises a, c, g, or t, or includes no nucleotide
  misc_feature (74)..(74): n comprises a, c, g, or t, or includes no nucleotide
  misc_feature (86)..(86): n comprises a, c, g, or t, or includes no nucleotide
  misc_feature (195)..(195): n comprises a, c, g, or t, or includes no nucleotide
  misc_feature (498)..(498): n comprises a, c, g, or t, or includes no nucleotide
  misc_feature (501)..(501): n comprises a, c, g, or t, or includes no nucleotide
  misc_feature (514)..(514): n comprises a, c, g, or t, or includes no nucleotide
cccacggggtggagcgctctagaanactagtggnccccccgggctgcaggagntgacacataacattaaccgtnacggtgggtgtnatgtctgtttttatcaggtcctaccagtgtgttgctatgactgtgcattcagagattattcgagccagagccaaatggtcttcctgtatccttttgtggagggtctttnacttactctctctctctctccctctcttttttttctctctctctctcttatacacacacacacacacacacacacacacacaggcatgcacacactcacctgctcttcactgagagcccaccaggcacaaagggacttactggatgcttttctctgtggcctgagggaacctctcctggccacccgattactattcttgttcccttatgtgtatttcctcttttagcaaattctgtcctctctgtttaaaaatgaccccactaataatgctaccttctgtatcaggatatagtttggtcaaanganagaaaccaaactnctggtgggtgacatagaacaagggaattagggttagagctggttacagttgtgggagctggtggagccagcttgcctctgtgtccggtgttcagcttggcatccctaaagatcactgagactgatgttgggaggggaggctaggcaaggatgagagccaggacactctgtctctcaccacctgtaacctcacaggtatgggtgactgggggagaagctgaccctcgccctggaaccacaccctcaggccctgggcctggagaaacggaaagaggagatgtgccaggagctgggggagccagtagtctgggtatgcccccagcaacagagggagctgatagatcagggatgacatgcagagctgaccctgtgcctggggcggtgaactgactctcagaaggcaagacacacagatcaagctt

SEQ ID NO: 3268 - DNA, 427 bp, Canis familiaris
  misc_feature (8)..(9): n comprises a, c, g, or t, or includes no nucleotide
  misc_feature (12)..(12): n comprises a, c, g, or t, or includes no nucleotide
  misc_feature (16)..(16): n comprises a, c, g, or t, or includes no nucleotide
  misc_feature (23)..(23): n comprises a, c, g, or t, or includes no nucleotide
  misc_feature (39)..(39): n comprises a, c, g, or t, or includes no nucleotide
  misc_feature (42)..(42): n comprises a, c, g, or t, or includes no nucleotide
  misc_feature (80)..(80): n comprises a, c, g, or t, or includes no nucleotide
  misc_feature (99)..(99): n comprises a, c, g, or t, or includes no nucleotide
  misc_feature (155)..(155): n comprises a, c, g, or t, or includes no nucleotide
  misc_feature (223)..(223): n comprises a, c, g, or t, or includes no nucleotide
  misc_feature (233)..(233): n comprises a, c, g, or t, or includes no nucleotide
  misc_feature (265)..(265): n comprises a, c, g, or t, or includes no nucleotide
  misc_feature (311)..(311): n comprises a, c, g, or t, or includes no nucleotide
  misc_feature (364)..(364): n comprises a, c, g, or t, or includes no nucleotide
  misc_feature (376)..(376): n comprises a, c, g, or t, or includes no nucleotide
  misc_feature (382)..(382): n comprises a, c, g, or t, or includes no nucleotide
  misc_feature (404)..(404): n comprises a, c, g, or t, or includes no nucleotide
  misc_feature (413)..(413): n comprises a, c, g, or t, or includes no nucleotide
  misc_feature (417)..(417): n comprises a, c, g, or t, or includes no nucleotide
ggaattcnntcnatancattatnatattatattataacnatntgtttatatgctataatctcctggatatttactacttnatgagagaagctgtgtttnacgtatctttacatgaccaacaaccaaagcagaatagctacttactattccatttnatgaatgattcataggtaagaaatcaagcagtaacgtgcatagatttctgtcctttccaaaggtcagnccaaacgganctacatacagctcagtgttgtgtgcccatctnaggccgctgataccggtgttgtgttatcagtagtgttgtagctggnctggcccttgtggttcttgtgattgcaagatgccctcagcaataacctcaggnaaactttgaaancaaaantgtgtgtgtgggtgtgtgtggnggagcatgntggngggggtttac

SEQ ID NO: 3269 - DNA, 461 bp, Canis familiaris
  misc_feature (45)..(45): n comprises a, c, g, or t, or includes no nucleotide
  misc_feature (88)..(88): n comprises a, c, g, or t, or includes no nucleotide
ctgggaccacacagtgagatcgttatctgggttttgtctcgaggnagaagagtggggcagaaggtccctggggttcgagggtgcgagnccagggtttcagggactcactcttagtgagctttaaacctaagagcagaaatttaaagtgaaaagagagaaaaaaagcaagtggcccaaatggtcagttatggaaatcaaccaacatttctaaaactaaggaggggtagaggaggggcggaagctcttgatctagtcttgtttatttaagccatcttttgagtagatgcctctttggagtgaccatttcagccaccaaagcttaaatcaggcatcacattccaaaaataaaaaccaacagtcaggattcacattacatcacacgcactgtcttctgctcaactcaacccatcgcctgccttcaaggaaccaggggctgtttagatttttcagtcatcaagctt

SEQ ID NO: 3270 - DNA, 835 bp, Canis familiaris
  misc_feature (2)..(2): n comprises a, c, g, or t, or includes no nucleotide
  misc_feature (8)..(8): n comprises a, c, g, or t, or includes no nucleotide
  misc_feature (10)..(10): n comprises a, c, g, or t, or includes no nucleotide
  misc_feature (13)..(13): n comprises a, c, g, or t, or includes no nucleotide
  misc_feature (26)..(26): n comprises a, c, g, or t, or includes no nucleotide
  misc_feature (29)..(29): n comprises a, c, g, or t, or includes no nucleotide
  misc_feature (43)..(43): n comprises a, c, g, or t, or includes no nucleotide
  misc_feature (63)..(63): n comprises a, c, g, or t, or includes no nucleotide
  misc_feature (68)..(68): n comprises a, c, g, or t, or includes no nucleotide
  misc_feature (111)..(111): n comprises a, c, g, or t, or includes no nucleotide
  misc_feature (199)..(199): n comprises a, c, g, or t, or includes no nucleotide
  misc_feature (426)..(426): n comprises a, c, g, or t, or includes no nucleotide
  misc_feature (438)..(438): n comprises a, c, g, or t, or includes no nucleotide
  misc_feature (441)..(441): n comprises a, c, g, or t, or includes no nucleotide
  misc_feature (448)..(448): n comprises a, c, g, or t, or includes no nucleotide
  misc_feature (464)..(464): n comprises a, c, g, or t, or includes no nucleotide
  misc_feature (467)..(467): n comprises a, c, g, or t, or includes no nucleotide
  misc_feature (489)..(489): n comprises a, c, g, or t, or includes no nucleotide
  misc_feature (491)..(491): n comprises a, c, g, or t, or includes no nucleotide
  misc_feature (497)..(497): n comprises a, c, g, or t, or includes no nucleotide
  misc_feature (518)..(518): n comprises a, c, g, or t, or includes no nucleotide
  misc_feature (551)..(551): n comprises a, c, g, or t, or includes no nucleotide
  misc_feature (567)..(567): n comprises a, c, g, or t, or includes no nucleotide
  misc_feature (580)..(580): n comprises a, c, g, or t, or includes no nucleotide
  misc_feature (590)..(590): n comprises a, c, g, or t, or includes no nucleotide
  misc_feature (601)..(601): n comprises a, c, g, or t, or includes no nucleotide
  misc_feature (605)..(605): n comprises a, c, g, or t, or includes no nucleotide
  misc_feature (619)..(619): n comprises a, c, g, or t, or includes no nucleotide
  misc_feature (645)..(645): n comprises a, c, g, or t, or includes no nucleotide
  misc_feature (664)..(664): n comprises a, c, g, or t, or includes no nucleotide
  misc_feature (677)..(677): n comprises a, c, g, or t, or includes no nucleotide
  misc_feature (684)..(684): n comprises a, c, g, or t, or includes no nucleotide
  misc_feature (693)..(693): n comprises a, c, g, or t, or includes no nucleotide
  misc_feature (745)..(745): n comprises a, c, g, or t, or includes no nucleotide
  misc_feature (759)..(759): n comprises a, c, g, or t, or includes no nucleotide
  misc_feature (776)..(776): n comprises a, c, g, or t, or includes no nucleotide
  misc_feature (794)..(794): n comprises a, c, g, or t, or includes no nucleotide
  misc_feature (807)..(807): n comprises a, c, g, or t, or includes no nucleotide
  misc_feature (812)..(812): n comprises a, c, g, or t, or includes no nucleotide
  misc_feature (829)..(829): n comprises a, c, g, or t, or includes no nucleotide
cngataanancgncgacggtatcganaantcgataagcttaanctgtcccaggaccagagcancaggnaggcaccccagattccctagcacacccccccaagatgtatganttagctgatagaggctccttccacggaggtacgggcaacagcttcagggaagcaggagatggggcccttggctctgggctcttctgantcgcgcacacacacacacacacacacacacacacacatacacactctttcctccagccactgagctgcagacgtatccttccttctagggctggaatcttatttggagctccctaaaggccaccttaaaaatgagaaaaggcaggtgcttgaaaactctcttgagaaatctgccaataccactactaaacgggcctctatagtgtgccaggtatcatcctcaccccngtgaggtgacanctncctgggnggtctctgtccagggnggngaggaggccccacacaggaagngncacatntcagagaggcaagtcaatgancaggtcaagggtggcagtgtctttttcacagcntctgttcacagcgatnctcatgagccttnagagtggctncagcaaggctnccanacttcgctgggtangcaggtgggaaaacagtgggcttacnagaatcatccactgtcttnaaggcactgtgtntccacanacagaaaanaatgggacaaggcacggacattaggaaccagcccagaaccatggtgtaccangcaggctgaaatanaaatgatgaaaatgagnacagtagctgagcagaangaaatcctgcagnccggnggaaccactagttctanacggcg

SEQ ID NO: 3271 - DNA, 328 bp, Canis familiaris
  misc_feature (90)..(90): n comprises a, c, g, or t, or includes no nucleotide
  misc_feature (101)..(101): n comprises a, c, g, or t, or includes no nucleotide
  misc_feature (103)..(103): n comprises a, c, g, or t, or includes no nucleotide
  misc_feature (150)..(150): n comprises a, c, g, or t, or includes no nucleotide
  misc_feature (178)..(178): n comprises a, c, g, or t, or includes no nucleotide
  misc_feature (182)..(182): n comprises a, c, g, or t, or includes no nucleotide
  misc_feature (201)..(201): n comprises a, c, g, or t, or includes no nucleotide
  misc_feature (261)..(261): n comprises a, c, g, or t, or includes no nucleotide
  misc_feature (279)..(279): n comprises a, c, g, or t, or includes no nucleotide
  misc_feature (298)..(298): n comprises a, c, g, or t, or includes no nucleotide
  misc_feature (326)..(326): n comprises a, c, g, or t, or includes no nucleotide
aagcttgatctgtcccaggaccgcagcaaggtcatggccacttcctgttcctaggaagaagctccattcaggaccagccagattccaggntgctgtgtgtntntgtgtgtgtgtgtgtgtgtgtgtgtgtgtgatcgtggcagagtaggngtgtgttgtgtgtatacacatgggagtntgtntatgtatggtgcgtgtgtnttgtggggatgcaggtggctgacaggcaggtcaaagtgccagcgggtgaggcgtgcagtnggaagaaaggtcataggncctgtgggtgtggtctctnctcctccccaaggtccagagcaatgggnca

SEQ ID NO: 3272 - DNA, 350 bp, Canis familiaris
  misc_feature (7)..(7): n comprises a, c, g, or t, or includes no nucleotide
  misc_feature (107)..(107): n comprises a, c, g, or t, or includes no nucleotide
  misc_feature (231)..(231): n comprises a, c, g, or t, or includes no nucleotide
  misc_feature (289)..(289): n comprises a, c, g, or t, or includes no nucleotide
  misc_feature (330)..(330): n comprises a, c, g, or t, or includes no nucleotide
  misc_feature (333)..(333): n comprises a, c, g, or t, or includes no nucleotide
  misc_feature (337)..(337): n comprises a, c, g, or t, or includes no nucleotide
  misc_feature (339)..(339): n comprises a, c, g, or t, or includes no nucleotide
  misc_feature (343)..(343): n comprises a, c, g, or t, or includes no nucleotide
gcattancattattttatagaacgaggtgtaaattataacctacacatttgcagcgcaaaccgaggtttgcacatgtgctgcctccgtgaccaccggccaggtcaangcaggaaacatgcccagtgccccccgaagcctccccagggcccctccctctgtcagcctcctttcagacttctgtcctcatgcattaggcttgcctgctcttcatcttgacatccatggaatcncacagaatgtcctcccttgtgtctggatcttgtgccccacttcctggccctgggattnactcgcatggatgtgtgggccggtggttccttcttttgctnatnctgnancacntttccac

SEQ ID NO: 3273 - DNA, 401 bp, Canis familiaris
  misc_feature (80)..(80): n comprises a, c, g, or t, or includes no nucleotide
  misc_feature (198)..(198): n comprises a, c, g, or t, or includes no nucleotide
  misc_feature (369)..(369): n comprises a, c, g, or t, or includes no nucleotide
aattcgatctgtggcccagccctcgagcaacagtcctggaagacaggtccacctgcttgaggccattaggattgcctgcnttgtccacaacggcaaagagtagggagagtcaggtgcacgctgctcttcccggcctgggcctagagctcaggtgtgcagtcccgctcacccacacagaagatgcgccctgcggccggncggtgaacacgcagcagcacctcccccatgtgtgtgcactgaccatcagtaggtcattgcgcaggtgttagacatgtagtagcatagagtctggggaggaagttctgggctagcgctgtgcattcataaatagccttctggacgatgagaggggaagaagaaagaaaaggnccaggtaatagtttttccataatatcctctct

SEQ ID NO: 3274 - DNA, 480 bp, Canis familiaris
  misc_feature (28)..(28): n comprises a, c, g, or t, or includes no nucleotide
  misc_feature (32)..(32): n comprises a, c, g, or t, or includes no nucleotide
  misc_feature (142)..(142): n comprises a, c, g, or t, or includes no nucleotide
  misc_feature (272)..(272): n comprises a, c, g, or t, or includes no nucleotide
  misc_feature (454)..(454): n comprises a, c, g, or t, or includes no nucleotide
  misc_feature (466)..(466): n comprises a, c, g, or t, or includes no nucleotide
  misc_feature (468)..(468): n comprises a, c, g, or t, or includes no nucleotide
  misc_feature (470)..(470): n comprises a, c, g, or t, or includes no nucleotide
  misc_feature (473)..(473): n comprises a, c, g, or t, or includes no nucleotide
  misc_feature (476)..(476): n comprises a, c, g, or t, or includes no nucleotide
tgaagttagagccgacccgcttgtgccncacncatgcacacacactcacacacatattccacacacccaatgaactcacgtgtgcacatactcagatacatgcatgcacacacttatacagtcacacactttgtcccacgantggcccctcctgtcttctgcccttctaagcttctgatgagaaggaaaaggaagtagcaggagaacaggaggagggggagagtggagggcagaggagaagtcagtcagctattttaaggacatgaaagtcncctcataagtcattacagtctccttgccagttcatttccgttcgaatgaagttgaaaggtaatctggtaagtttcattatctctgcatataattcataagtttagatgaattaccatgacatagtgtgtaggaggatttcaaggtctggcaaggtgacaattacaggacctcactgtgcatnacagggatccanangnctncanaccc

SEQ ID NO: 3275 - DNA, 802 bp, Canis familiaris
  misc_feature (10)..(14): n comprises a, c, g, or t, or includes no nucleotide
  misc_feature (57)..(57): n comprises a, c, g, or t, or includes no nucleotide
  misc_feature (358)..(358): n comprises a, c, g, or t, or includes no nucleotide
  misc_feature (399)..(399): n comprises a, c, g, or t, or includes no nucleotide
  misc_feature (428)..(428): n comprises a, c, g, or t, or includes no nucleotide
  misc_feature (448)..(448): n comprises a, c, g, or t, or includes no nucleotide
  misc_feature (500)..(500): n comprises a, c, g, or t, or includes no nucleotide
aattcgatcnnnnncacatgtatcagctcatcagaccatttccaaattggacagttngggtgactgaggcacagagaggctggctcacctgagtcacataactggcaatgggatggtacggattcagggctgtcccatattgttttactctttccccggggcttagaggattagacccttatgaagtgatggcacctctggcaacaaaggagaagcagaaattactgtggaggttgaagaaggttcagttcaaggtttcaaagggacagagggctggtgaccacatccaacaagcagttagagattgagaattggggccattttactctgtcctcccagccttggagagggttctggncaaaatgcttctataactccagcattgcaatcaaggcaaanaaatggcttcctctacgccttcccaaganacacgcacacacccatgcanacacgcatgcgtgcatgttcacacacacacaagacacattgccagtgcacanacatgcatgcatgctggcatcggcatgcacgctgacacatagacacacactgtgacacacacaacacatggcaggtaacatggactgcctctggctgtagaagtgctttcaagcgcctttctttcttgtccttgcctggagtttacagcacttggaaaatgtcaggcgtgggaggccttctagtcttgggttaggttaaaactccctctacatatttggagggcgtccaggccctgcgagctcattcacagagcagataacagtgaccttgctggtgagggaggacagcccagatcaagctt

SEQ ID NO: 3276 - DNA, 320 bp, Canis familiaris
  misc_feature (5)..(5): n comprises a, c, g, or t, or includes no nucleotide
  misc_feature (48)..(48): n comprises a, c, g, or t, or includes no nucleotide
  misc_feature (53)..(53): n comprises a, c, g, or t, or includes no nucleotide
  misc_feature (60)..(60): n comprises a, c, g, or t, or includes no nucleotide
  misc_feature (247)..(247): n comprises a, c, g, or t, or includes no nucleotide
  misc_feature (264)..(264): n comprises a, c, g, or t, or includes no nucleotide
ttccnggtgcggccggtctatgactagtggtccccgggtgcaggacgntctgntgaagcncctgagggccagagactcagctagtcatgccctatcgtcagctcctatacccacctggcaggtgggagatgcccaagaaaaggtcagtaaatgaatggacggccctatctcagacagaaaggatatctttctgttctttcatttttttcatcatggtaagtgtgccctttaatgcccatcccttatnatgcccaccccccaccnccctcccctcccgtaaccaccagtgtgttctctagaattaatctgtttcttggctt

SEQ ID NO: 3277 - DNA, 397 bp, Canis familiaris
  misc_feature (4)..(4): n comprises a, c, g, or t, or includes no nucleotide
  misc_feature (8)..(8): n comprises a, c, g, or t, or includes no nucleotide
  misc_feature (32)..(32): n comprises a, c, g, or t, or includes no nucleotide
  misc_feature (38)..(38): n comprises a, c, g, or t, or includes no nucleotide
  misc_feature (63)..(63): n comprises a, c, g, or t, or includes no nucleotide
  misc_feature (134)..(134): n comprises a, c, g, or t, or includes no nucleotide
  misc_feature (189)..(189): n comprises a, c, g, or t, or includes no nucleotide
  misc_feature (215)..(215): n comprises a, c, g, or t, or includes no nucleotide
  misc_feature (251)..(251): n comprises a, c, g, or t, or includes no nucleotide
  misc_feature (291)..(291): n comprises a, c, g, or t, or includes no nucleotide
  misc_feature (295)..(295): n comprises a, c, g, or t, or includes no nucleotide
  misc_feature (298)..(298): n comprises a, c, g, or t, or includes no nucleotide
  misc_feature (324)..(324): n comprises a, c, g, or t, or includes no nucleotide
  misc_feature (345)..(345): n comprises a, c, g, or t, or includes no nucleotide
  misc_feature (393)..(393): n comprises a, c, g, or t, or includes no nucleotide
acanacanacatacaccacatcccctttgttnactcanccatcgacggacacttgggctgttnccagagtttggttattgtaagtaatgctgcaataaacataggagtggaaaggatatctttcttagactgtncccctaaaatacatccccagagattattgaggcaaggcttgaactgaatgaaaanccatgggatttctgcaccccatccanaatgtgttcggtgagtgggaaaggcttaaatgtaancccaatttaaattactgcaccgcggtaaaatcaatcacgnatgntgnccctgggaccccatcaccgcccaccnctcatcctccacaggggcatncgctctggtctgcaagctcaggcccacgggaacagagtgtcagatcangctt

SEQ ID NO: 3278 - DNA, 423 bp, Canis familiaris
  misc_feature (16)..(16): n comprises a, c, g, or t, or includes no nucleotide
  misc_feature (23)..(23): n comprises a, c, g, or t, or includes no nucleotide
  misc_feature (51)..(51): n comprises a, c, g, or t, or includes no nucleotide
  misc_feature (53)..(53): n comprises a, c, g, or t, or includes no nucleotide
  misc_feature (176)..(176): n comprises a, c, g, or t, or includes no nucleotide
  misc_feature (208)..(208): n comprises a, c, g, or t, or includes no nucleotide
  misc_feature (257)..(258): n comprises a, c, g, or t, or includes no nucleotide
  misc_feature (264)..(264): n comprises a, c, g, or t, or includes no nucleotide
  misc_feature (271)..(271): n comprises a, c, g, or t, or includes no nucleotide
  misc_feature (274)..(274): n comprises a, c, g, or t, or includes no nucleotide
  misc_feature (281)..(281): n comprises a, c, g, or t, or includes no nucleotide
  misc_feature (293)..(293): n comprises a, c, g, or t, or includes no nucleotide
  misc_feature (298)..(298): n comprises a, c, g, or t, or includes no nucleotide
  misc_feature (301)..(301): n comprises a, c, g, or t, or includes no nucleotide
  misc_feature (315)..(315): n comprises a, c, g, or t, or includes no nucleotide
  misc_feature (318)..(318): n comprises a, c, g, or t, or includes no nucleotide
  misc_feature (328)..(328): n comprises a, c, g, or t, or includes no nucleotide
  misc_feature (330)..(330): n comprises a, c, g, or t, or includes no nucleotide
  misc_feature (337)..(338): n comprises a, c, g, or t, or includes no nucleotide
  misc_feature (345)..(345): n comprises a, c, g, or t, or includes no nucleotide
  misc_feature (351)..(351): n comprises a, c, g, or t, or includes no nucleotide
  misc_feature (380)..(380): n comprises a, c, g, or t, or includes no nucleotide
  misc_feature (385)..(386): n comprises a, c, g, or t, or includes no nucleotide
  misc_feature (396)..(396): n comprises a, c, g, or t, or includes no nucleotide
  misc_feature (401)..(401): n comprises a, c, g, or t, or includes no nucleotide
  misc_feature (412)..(412): n comprises a, c, g, or t, or includes no nucleotide
  misc_feature (419)..(419): n comprises a, c, g, or t, or includes no nucleotide
ctggtagaatacgcanttttttntgcagggcagaggctggaggggcgtgtntntgtgtgtgtgtgtgtgtgtgtgtgtgtgtgtggccgtggagaactccaccgacacccccgcgagcaccccctgccccctgccagcagggaaaacctgataaaaagaacttcaaaggcatcttnaaagagaaattggcctgcagaggactagcctnaggggcgctccttgagggcctgggccagagccagccccccccccccccnnatgggntcagggnggnaattttnggagaagcaganctgcnttncgagacagcaactncangtggagctancnagagagnncctcctngatttngaaaaataacataccatcaagagactccncccanntccacacaanattcnctttttgttanccatttncccc

SEQ ID NO: 3279 - DNA, 408 bp, Canis familiaris
  misc_feature (33)..(33): n comprises a, c, g, or t, or includes no nucleotide
  misc_feature (35)..(35): n comprises a, c, g, or t, or includes no nucleotide
  misc_feature (47)..(47): n comprises a, c, g, or t, or includes no nucleotide
  misc_feature (51)..(51): n comprises a, c, g, or t, or includes no nucleotide
  misc_feature (53)..(53): n comprises a, c, g, or t, or includes no nucleotide
  misc_feature (236)..(236): n comprises a, c, g, or t, or includes no nucleotide
  misc_feature (282)..(283): n comprises a, c, g, or t, or includes no nucleotide
  misc_feature (285)..(285): n comprises a, c, g, or t, or includes no nucleotide
  misc_feature (292)..(292): n comprises a, c, g, or t, or includes no nucleotide
  misc_feature (319)..(319): n comprises a, c, g, or t, or includes no nucleotide
  misc_feature (349)..(349): n comprises a, c, g, or t, or includes no nucleotide
  misc_feature (352)..(352): n comprises a, c, g, or t, or includes no nucleotide
  misc_feature (374)..(374): n comprises a, c, g, or t, or includes no nucleotide
  misc_feature (377)..(377): n comprises a, c, g, or t, or includes no nucleotide
  misc_feature (391)..(391): n comprises a, c, g, or t, or includes no nucleotide
  misc_feature (398)..(399): n comprises a, c, g, or t, or includes no nucleotide
gacctcccggcaagcacccagcatttttaactntnagcttgtttgtntttntntgtgtgtgtgtgtgtgtgtgtgtgtgagtgtgtgtgtagctaagagccttgggctggctgcatgctaatttgcccccattgtttcagggtgactggctttctagtatttaggaacaaagcctttttgcataagcccctacctacaattattttatgtttacttcaagggccatcatcttatcnttatttgccactatatgaggggatgccagagcttctttgtctcccnngnaaaggcngtagattacagacaggatttagcacgntaccaggacactcctgtttcatttaaaggnatnttacaaatgttttgtgggcccnggnctagaccaacacanggctttnnccagccctc

SEQ ID NO: 3280 - DNA, 416 bp, Canis familiaris
  misc_feature (72)..(72): n comprises a, c, g, or t, or includes no nucleotide
  misc_feature (215)..(215): n comprises a, c, g, or t, or includes no nucleotide
  misc_feature (226)..(226): n comprises a, c, g, or t, or includes no nucleotide
  misc_feature (234)..(234): n comprises a, c, g, or t, or includes no nucleotide
  misc_feature (247)..(247): n comprises a, c, g, or t, or includes no nucleotide
  misc_feature (270)..(270): n comprises a, c, g, or t, or includes no nucleotide
  misc_feature (294)..(294): n comprises a, c, g, or t, or includes no nucleotide
  misc_feature (299)..(299): n comprises a, c, g, or t, or includes no nucleotide
  misc_feature (319)..(319): n comprises a, c, g, or t, or includes no nucleotide
  misc_feature (338)..(338): n comprises a, c, g, or t, or includes no nucleotide
  misc_feature (353)..(353): n comprises a, c, g, or t, or includes no nucleotide
  misc_feature (368)..(368): n comprises a, c, g, or t, or includes no nucleotide
  misc_feature (370)..(370): n comprises a, c, g, or t, or includes no nucleotide
  misc_feature (410)..(410): n comprises a, c, g, or t, or includes no nucleotide
  misc_feature (414)..(414): n comprises a, c, g, or t, or includes no nucleotide
ctgagaagacccccccactaccccacgaacacacacacacacacacacacacacacacacatacacacacgntctccggaggccacactgagttatggtgctggcctccgttcctttgctgttgttcatcttccctctgctcggaatgctctcttcccgtcttcagcctttccagtctttgtaactcatcgaagcccagcttacccgatgccgcntccaggaaggnccccttgnccacctcctaagntgggtcaagcgccccctctgggntcccataggcctgagcatccctanatctncatggggagaggtctccctnttggtctgtctcccagaancagggtcaaggcagntcaagagcaggacgnangtgtgatcctctctgggtccccagcctccaagaagaggcnaagnat

SEQ ID NO: 3281 - DNA, 837 bp, Canis familiaris
  misc_feature (8)..(8): n comprises a, c, g, or t, or includes no nucleotide
  misc_feature (49)..(49): n comprises a, c, g, or t, or includes no nucleotide
  misc_feature (87)..(87): n comprises a, c, g, or t, or includes no nucleotide
  misc_feature (123)..(123): n comprises a, c, g, or t, or includes no nucleotide
  misc_feature (164)..(164): n comprises a, c, g, or t, or includes no nucleotide
  misc_feature (254)..(254): n comprises a, c, g, or t, or includes no nucleotide
  misc_feature (341)..(341): n comprises a, c, g, or t, or includes no nucleotide
  misc_feature (351)..(351): n comprises a, c, g, or t, or includes no nucleotide
  misc_feature (365)..(365): n comprises a, c, g, or t, or includes no nucleotide
  misc_feature (370)..(370): n comprises a, c, g, or t, or includes no nucleotide
  misc_feature (393)..(393): n comprises a, c, g, or t, or includes no nucleotide
  misc_feature (420)..(420): n comprises a, c, g, or t, or includes no nucleotide
  misc_feature (435)..(435): n comprises a, c, g, or t, or includes no nucleotide
  misc_feature (438)..(438): n comprises a, c, g, or t, or includes no nucleotide
  misc_feature (466)..(467): n comprises a, c, g, or t, or includes no nucleotide
  misc_feature (487)..(487): n comprises a, c, g, or t, or includes no nucleotide
  misc_feature (494)..(494): n comprises a, c, g, or t, or includes no nucleotide
  misc_feature (502)..(502): n comprises a, c, g, or t, or includes no nucleotide
  misc_feature (509)..(509): n comprises a, c, g, or t, or includes no nucleotide
  misc_feature (516)..(516): n comprises a, c, g, or t, or includes no nucleotide
  misc_feature (574)..(574): n comprises a, c, g, or t, or includes no nucleotide
  misc_feature (584)..(584): n comprises a, c, g, or t, or includes no nucleotide
  misc_feature (589)..(589): n comprises a, c, g, or t, or includes no nucleotide
  misc_feature (603)..(603): n comprises a, c, g, or t, or includes no nucleotide
  misc_feature (809)..(809): n comprises a, c, g, or t, or includes no nucleotide
ggtatgtnacttggtctggaaggttgtagaatcttcactcctacatctnatgccttggtggtgatggccgactgcctactgcctgcnagtcccaaggtagcttgacttaacatgatgcttggnatcctcccagaaggtgtgttccatgaatcctatggcttggnctcagaagtccagaatgtcccttgtaccagtttaggtcaccaaggctgagttgggttcaagaagtggcctgcacgtctggggtgggaagnagctggtggtggctggccaccacggagagtacctggactccggatccagacttgtagctcaaatccccgctctgccacckaaccygnagtaaagtantgtgagtctgaggncacynctktggtcttcattttccccccnatctgkgcaaaagtgagataawgagcnttctatccaatatgnaantagatgaattttcacgrkaggcaagaannaagtgaattttaatgyactnttttttnaaatatgngggtganactgcanaattgcaatataatacaatagaggaaaaaaggaaaaaagagactggtggggagccccnaggcctggcntcttntttttttttttttncctaggcctggcttctaatgaagactgtggatcttaagccattcacctcttggccatcagtctcccttttgttttccaagagggatggggagatggtgactgggattccttccagccctggcctctgggagagcctctgaatatagagggggagcttgtgggacagtgggagatgcagtgtgtggtgtgtgtgtgtgtgtgtgatntctctttccttccaggggcaccagatca

SEQ ID NO: 3282 - DNA, 399 bp, Canis familiaris
  misc_feature (358)..(358): n comprises a, c, g, or t, or includes no nucleotide
  misc_feature (370)..(370): n comprises a, c, g, or t, or includes no nucleotide
  misc_feature (379)..(379): n comprises a, c, g, or t, or includes no nucleotide
  misc_feature (387)..(390): n comprises a, c, g, or t, or includes no nucleotide
aattcgatctggaaacttatctctgcctcagggctttgcatctgccatgacttctgcctgaaactctccacagcttcttatcatcttcaggtacaatcttgaatcacttcctctaaaatatttcctcatcagaccaaataaaatgaggctctggttttattcctcatggctctccaccttttttttccccatagctccttccacaatttatacataggtagtgctgtgcacaggggtccccatcaccaccagaaaataacacagcatcagggaaaaacagcctgtgtaacgagaagggcacatcactttggggggtttcttccctcccaaatccacagtcttcagtccaatcatgggnaacacacaacancacacacancaccccannnnccattcagg

SEQ ID NO: 3283 - DNA, 400 bp, Canis familiaris
  misc_feature (160)..(161): n comprises a, c, g, or t, or includes no nucleotide
  misc_feature (354)..(355): n comprises a, c, g, or t, or includes no nucleotide
  misc_feature (369)..(369): n comprises a, c, g, or t, or includes no nucleotide
  misc_feature (376)..(376): n comprises a, c, g, or t, or includes no nucleotide
  misc_feature (380)..(380): n comprises a, c, g, or t, or includes no nucleotide
  misc_feature (394)..(394): n comprises a, c, g, or t, or includes no nucleotide
gaccctggattggagacaagacatccggtgggagctggggtaccaggatacaatttgtagttcatctgatgctcctgtgcctgtgtgggtcccttagttttgaccgtgaccgtgaaccctcctcacatcagacattaaacctcagggaacacagcacgannggtgcccgggaactccggactgtctttgcaactctcctctaaatctaaaagttacttcaaaataaaaagtggaacatacaaacacaaagcaaacacgcactggtgatttccatcctggacgcaccctcagttggagaagggaaagcagaatctccagcagaagctgggtaccctgctcgcagcagcactgttnnggaactcagtcaancttatangatnccgtcgacctcaanggggct

SEQ ID NO: 3284 - DNA, 310 bp, Canis familiaris
  misc_feature (6)..(6): n comprises a, c, g, or t, or includes no nucleotide
  misc_feature (26)..(26): n comprises a, c, g, or t, or includes no nucleotide
  misc_feature (76)..(76): n comprises a, c, g, or t, or includes no nucleotide
  misc_feature (148)..(148): n comprises a, c, g, or t, or includes no nucleotide
  misc_feature (174)..(174): n comprises a, c, g, or t, or includes no nucleotide
  misc_feature (184)..(184): n comprises a, c, g, or t, or includes no nucleotide
  misc_feature (216)..(216): n comprises a, c, g, or t, or includes no nucleotide
  misc_feature (240)..(240): n comprises a, c, g, or t, or includes no nucleotide
  misc_feature (272)..(272): n comprises a, c, g, or t, or includes no nucleotide
  misc_feature (280)..(280): n comprises a, c, g, or t, or includes no nucleotide
  misc_feature (303)..(303): n comprises a, c, g, or t, or includes no nucleotide
  misc_feature (308)..(308): n comprises a, c, g, or t, or includes no nucleotide
ctgctntgcacacataaacgccccangtcacacccactgacatgtacattcatctgctcacgtgacaccacctgantcatgcacacacacacacacacacacacacactgtctcacacacctctccagcaacatatttccagttccanctcagccttctgttccagagatctgngctggacctncactctgcacctctgcatggtaacctgcacanacgtgcatgccctcggcctcagtntcctgcctctgtgtgtgctggaagtgcacccnctcaaggngcagacaggctctggaggtgggngcagnga

SEQ ID NO: 3285 - DNA, 690 bp, Canis familiaris
  misc_feature (150)..(150): n comprises a, c, g, or t, or includes no nucleotide
  misc_feature (254)..(254): n comprises a, c, g, or t, or includes no nucleotide
  misc_feature (257)..(257): n comprises a, c, g, or t, or includes no nucleotide
  misc_feature (364)..(364): n comprises a, c, g, or t, or includes no nucleotide
  misc_feature (374)..(374): n comprises a, c, g, or t, or includes no nucleotide
  misc_feature (460)..(460): n comprises a, c, g, or t, or includes no nucleotide
  misc_feature (478)..(478): n comprises a, c, g, or t, or includes no nucleotide
  misc_feature (675)..(675): n comprises a, c, g, or t, or includes no nucleotide
  misc_feature (687)..(687): n comprises a, c, g, or t, or includes no nucleotide
ctgccagtgtagcttcctgtaagagatgggctgtctcaggtgccagaacacacttttcttcccaagttgccagacagtaatagcttggagggcagagactgtgtcccttctcttaaaaaaaattaaaatatattcatatatatatatgtntgtgtgtgtgtgtgtgtgtgtgcgtatttattatatatatatttccttttctgtcttttgttctttccagcctgtagttagttactggtggcacctgtaccagnatnacccagaaggctggttcaaatgtaggtttctgggctcctgcttgcttcctgactcagtaggtttggggcccggggcatctttggcatgctcttggatgatggggagnccattgtctnaaagggccagactcccagggccccagcttccagggtcatggctacagttgatacccacagcttccatcccaaatctggggttcttncctgcccacctcagtggncttccctgtgcagcacacctgagtaggacctctatcaatgccttgaaatcgctccacctggaagtcgtgaagatgagctggggtcacctgtaaatatacaaggcctctggggaaggggataaagtgcaagcaagcatcgtatactctgggctcagtgcaaggacagaaggtctgaggatggaggccccggcacaaanctctctcatggnccc

SEQ ID NO: 3286 - DNA, 433 bp, Canis familiaris
  misc_feature (11)..(12): n comprises a, c, g, or t, or includes no nucleotide
  misc_feature (329)..(329): n comprises a, c, g, or t, or includes no nucleotide
  misc_feature (393)..(393): n comprises a, c, g, or t, or includes no nucleotide
  misc_feature (408)..(408): n comprises a, c, g, or t, or includes no nucleotide
  misc_feature (416)..(416): n comprises a, c, g, or t, or includes no nucleotide
  misc_feature (420)..(420): n comprises a, c, g, or t, or includes no nucleotide
  misc_feature (422)..(422): n comprises a, c, g, or t, or includes no nucleotide
  misc_feature (424)..(424): n comprises a, c, g, or t, or includes no nucleotide
  misc_feature (428)..(428): n comprises a, c, g, or t, or includes no nucleotide
aattcgatctnngtagagggtggattataagagcccaactcctaaaaggtcaatctgtcaaattcatagtgtaggtaggtgaccagagctttccctggtcagctctgaggagggctggaaattgggaggatttgctctctctgtcaagactcctggctccagctccccccattctcattcttggatgctcattggccctcaccctgatggtacttcagaaagtgctcagggtgctgcttctcttccaattccattgaaatttcattggtttcatgatttcattgaaaccaacctactttcttgccttcccccttaagactctgcactcnttaaaaataatccgatcaactaaatctagttgctgtagactgcatgtgtgtgcatatgtttgtntgtggtgtgtgtgtntgtgtgtntgtntntntagnagcac

SEQ ID NO: 3287 - DNA, 427 bp, Canis familiaris
  misc_feature (7)..(7): n comprises a, c, g, or t, or includes no nucleotide
  misc_feature (323)..(323): n comprises a, c, g, or t, or includes no nucleotide
  misc_feature (376)..(376): n comprises a, c, g, or t, or includes no nucleotide
  misc_feature (390)..(390): n comprises a, c, g, or t, or includes no nucleotide
  misc_feature (401)..(401): n comprises a, c, g, or t, or includes no nucleotide
  misc_feature (404)..(404): n comprises a, c, g, or t, or includes no nucleotide
  misc_feature (407)..(407): n comprises a, c, g, or t, or includes no nucleotide
aagaagntgttcctactctcttagtccagtgacactgctgtgagtgttggttttggaaaaaaaacatgaaagagccaatggtgcatacccaagtccaaaggtcctaaatgacgtaagcttcaggactattgattaaaacactctaaatgtttttattgttgcaagagacctcaaagatggcagaagacacatagtgtcagaggtttgaagggcttctcatcttctttgtatagtggcatcactgaggaatgttcttcgcagcaattgtggctgtgctgtcctgccctccacctccccatctccaagcatccagtccaggggancagtctgaggacatcataggcctccttctagctctccgtctctggtaagggtnatttacctagaccnagtggcttttnagnggncaaggaaagttatcaagctt

SEQ ID NO: 3288 - DNA, 398 bp, Canis familiaris
  misc_feature (38)..(38): n comprises a, c, g, or t, or includes no nucleotide
  misc_feature (63)..(63): n comprises a, c, g, or t, or includes no nucleotide
  misc_feature (176)..(176): n comprises a, c, g, or t, or includes no nucleotide
  misc_feature (197)..(197): n comprises a, c, g, or t, or includes no nucleotide
  misc_feature (240)..(240): n comprises a, c, g, or t, or includes no nucleotide
  misc_feature (283)..(283): n comprises a, c, g, or t, or includes no nucleotide
  misc_feature (317)..(317): n comprises a, c, g, or t, or includes no nucleotide
  misc_feature (334)..(334): n comprises a, c, g, or t, or includes no nucleotide
  misc_feature (353)..(353): n comprises a, c, g, or t, or includes no nucleotide
  misc_feature (361)..(361): n comprises a, c, g, or t, or includes no nucleotide
  misc_feature (363)..(363): n comprises a, c, g, or t, or includes no nucleotide
  misc_feature (372)..(372): n comprises a, c, g, or t, or includes no nucleotide
  misc_feature (392)..(392): n comprises a, c, g, or t, or includes no nucleotide
ctgaggaggcatctaacaaactctgctctgccccctgnaggccccttcggaaccgtgaacgtnaacaccaccggcttggttctgtgtaccccccagaaccacaaatcctgcaagtggagggcccccagtggtagtctgatagctccttctcctacaaggcagggttccctcctganaccccaaggcaagtggccttnaacccacacacacagacacacatgcacacacacacacggggtnagcaatggttgctcatgttcaacctacacaaccatgttctttnttccccacgacgcatgcactggtcctaaccgggnttcacattgattcagtncgtttgggtttgaacatgncaccattngngtattagangctaacatgccccctttttngggcac

SEQ ID NO: 3289 - DNA, 401 bp, Canis familiaris
  misc_feature (70)..(70): n comprises a, c, g, or t, or includes no nucleotide
  misc_feature (358)..(358): n comprises a, c, g, or t, or includes no nucleotide
  misc_feature (375)..(376): n comprises a, c, g, or t, or includes no nucleotide
  misc_feature (378)..(378): n comprises a, c, g, or t, or includes no nucleotide
  misc_feature (382)..(383): n comprises a, c, g, or t, or includes no nucleotide
  misc_feature (385)..(386): n comprises a, c, g, or t, or includes no nucleotide
  misc_feature (391)..(391): n comprises a, c, g, or t, or includes no nucleotide
  misc_feature (398)..(399): n comprises a, c, g, or t, or includes no nucleotide
tctaaatgttagagaaaaaccttgattgagaagttaaaataatttgtctacatagttaaaaatggcagantttaaagtattctggctccagtaggctaatgacactaaaaacttcctaggtttactggcaattgactaaatgagacatatgatacctaactgttaggagtacggctatcttcaaagaatctagacagagttgctatgcaccctggctggcatcttggaaaacattaagatctgaatgggctacaggatattaaaaagttttaaatgtcttagtgatggctcctgcaaaattatgattaatgctgtccatgacattgtgtgtgtgtgtgtgtgtgtgtatatatatatntatatatatatattatnnanacanncnncgcgngccaccnnta

SEQ ID NO: 3290 - DNA, 393 bp, Canis familiaris
  misc_feature (14)..(14): n comprises a, c, g, or t, or includes no nucleotide
  misc_feature (17)..(17): n comprises a, c, g, or t, or includes no nucleotide
  misc_feature (60)..(60): n comprises a, c, g, or t, or includes no nucleotide
  misc_feature (65)..(65): n comprises a, c, g, or t, or includes no nucleotide
  misc_feature (79)..(79): n comprises a, c, g, or t, or includes no nucleotide
  misc_feature (88)..(88): n comprises a, c, g, or t, or includes no nucleotide
  misc_feature (355)..(355): n comprises a, c, g, or t, or includes no nucleotide
tctcccccctcccnaancacccagggggttttgtgcccaacctatcaagaaccactattnctttngggacttacttacnaaactatgncttctggcatcaaatcatttaaactacataagacagttgcaatattttcctgtagatagggtgctgagtgaggtctcagcagatagggactttaaggcctgtgaccatggacaaatcagtctttctaggcttcaaatttcttcatctaaggtcccctctagatcagaactctgtaattctaagtccccaggttagaaagagtctgtaggtagaagcctctggttttcgccatgccttgtaatgggcaactggcttctcagatgtgtnagagtcagagggtgggttacagtcatagctgactgcag

SEQ ID NO: 3291 - DNA, 641 bp, Canis familiaris
  misc_feature (2)..(2): n comprises a, c, g, or t, or includes no nucleotide
  misc_feature (21)..(21): n comprises a, c, g, or t, or includes no nucleotide
  misc_feature (66)..(66): n comprises a, c, g, or t, or includes no nucleotide
  misc_feature (77)..(77): n comprises a, c, g, or t, or includes no nucleotide
  misc_feature (86)..(86): n comprises a, c, g, or t, or includes no nucleotide
  misc_feature (121)..(122): n comprises a, c, g, or t, or includes no nucleotide
  misc_feature (390)..(390): n comprises a, c, g, or t, or includes no nucleotide
  misc_feature (418)..(418): n comprises a, c, g, or t, or includes no nucleotide
  misc_feature (420)..(420): n comprises a, c, g, or t, or includes no nucleotide
  misc_feature (431)..(431): n comprises a, c, g, or t, or includes no nucleotide
  misc_feature (488)..(488): n comprises a, c, g, or t, or includes no nucleotide
  misc_feature (564)..(566): n comprises a, c, g, or t, or includes no nucleotide
  misc_feature (574)..(574): n comprises a, c, g, or t, or includes no nucleotide
  misc_feature (579)..(580): n comprises a, c, g, or t, or includes no nucleotide
  misc_feature (586)..(586): n comprises a, c, g, or t, or includes no nucleotide
  misc_feature (638)..(639): n comprises a, c, g, or t, or includes no nucleotide
anttcgatttcaatgcatttnccttaagattcttctctataagtggccaaataatacaggattgtncaacaaaaganttccctttnattaaaaaatttcattatcacgaataggatatttnncctctttcacacacacacacacacacacacacacacacacacggcattgcaaaaccattgggaaaaagaactccaggcatttatttggctgccaacagagggaagaatgaatgtgaacattggctggtctactgactcctctataagccaatggtgttttggttaataccacaaaaagaatacataggtgattaaacactgggctttacccacatatgctcctgagcttattctagtgtggttattttcccaggaggccttataaaanctgtttttgaatcacctctttcattttncnggtggtatttncggcagttgggtataacaacttctctccccttcaggccaaagggttgggttccagangatgattctaggtagagaagaaagccaagatgttattgaacataccacttttaatggggacacatcttggaaggtnnncctggagngcacnnaatctnagcataatataatcccaatgcacactgacagtaatgcatgaacgagtcatcnnct

SEQ ID NO: 3292 - DNA, 588 bp, Canis familiaris
  misc_feature (10)..(10): n comprises a, c, g, or t, or includes no nucleotide
  misc_feature (15)..(16): n comprises a, c, g, or t, or includes no nucleotide
  misc_feature (37)..(37): n comprises a, c, g, or t, or includes no nucleotide
  misc_feature (300)..(300): n comprises a, c, g, or t, or includes no nucleotide
  misc_feature (320)..(320): n comprises a, c, g, or t, or includes no nucleotide
  misc_feature (322)..(322): n comprises a, c, g, or t, or includes no nucleotide
  misc_feature (326)..(326): n comprises a, c, g, or t, or includes no nucleotide
  misc_feature (328)..(329): n comprises a, c, g, or t, or includes no nucleotide
  misc_feature (459)..(459): n comprises a, c, g, or t, or includes no nucleotide
  misc_feature (492)..(492): n comprises a, c, g, or t, or includes no nucleotide
accaccaccntgatnnggccacaagaggaccttgtcntccccaggtagcccgagccccctggcagggctgacagcccagggagagaagtctagctgcacctgcctccctgtccaggcgcacactcaactgcatttactcgggcagactcaggaaggaacatttttaaaagctagacacattttggatcccaaaaggatttcctccaatgcttgtcagaaatcagaggaattcccaaaggagtctaaactccttagggtctctacagacaagagctggccttggaaagagctgtgcttgtntgtgtgtgtgtgtgtgtgtntntgtntnntctgagctcaggactgaggttcagaaactgggttttcatcccattcctgagtgacactgaaccagtttctctgcctctgtgaacctgtttttcctcatcagagagatcagggttttaatgctgtctcttnggtatcacaaagtaatacactcctactgataanaaaaaccccagtgccctggtcccagggcaggcagcattgcaattgcaccatctctgccccacccctcatagctctgatctgtgccccagatcgaat

SEQ ID NO: 3293 - DNA, 829 bp, Canis familiaris
  misc_feature (53)..(53): n comprises a, c, g, or t, or includes no nucleotide
  misc_feature (196)..(196): n comprises a, c, g, or t, or includes no nucleotide
  misc_feature (318)..(318): n comprises a, c, g, or t, or includes no nucleotide
  misc_feature (364)..(364): n comprises a, c, g, or t, or includes no nucleotide
  misc_feature (370)..(370): n comprises a, c, g, or t, or includes no nucleotide
  misc_feature (378)..(378): n comprises a, c, g, or t, or includes no nucleotide
  misc_feature (386)..(386): n comprises a, c, g, or t, or includes no nucleotide
  misc_feature (390)..(390): n comprises a, c, g, or t, or includes no nucleotide
  misc_feature (408)..(408): n comprises a, c, g, or t, or includes no nucleotide
  misc_feature (473)..(473): n comprises a, c, g, or t, or includes no nucleotide
  misc_feature (716)..(716): n comprises a, c, g, or t, or includes no nucleotide
  misc_feature (825)..(825): n comprises a, c, g, or t, or includes no nucleotide
aattcgatctggaactcatggcagttcacaaacaacctcacccctcatatctnagggcaaagcacaagaagtaacttgggggggaaagtcattttagtagaaaattcaacctgcctccgtcaaacagtaacttggctaattataagcttcatcccacaggcagttttgctcagaggcctttggggcccaagtgggncagatccgaatcagactctgtctggctcccagatacaaagagggccaaatgccaaacagctccaaatttcaaattcccctgggcagccaaaccagaggttgcctgggcccagaattaccagntcactcagggctgggaaacaatctcatcttgttttaatggttccanccacanaaatttanctcttggntggnagggtgtggtggcaaaanaaaaagagctagtgtttcagcaggggaaagactgaaagagagggagaatgacagagagtagagtncggctctgcacttcaaaaagaagcaaggcaggaataaagaaaaaaaaccttgaagagtgacaggggaaacattttttttaacagtacacatatgcctgcctgactgcacatgctctcacatggaccacacacaagtacacacacagacacacacacacacactccaccataaacctcagactgggaagcaactaagaagccatcaccaacctgactttgccaaatacttcacaaagtcggcancaacagcagcagcaaaagtgcctttgacaaagatcctctctgaccttcctttcctagccctgttataaactgcccccctccccctgctgttatcccaagccagatcaancctt

SEQ ID NO: 3294 - DNA, 1141 bp, Canis familiaris
  misc_feature (5)..(5): n comprises a, c, g, or t, or includes no nucleotide
  misc_feature (8)..(8): n comprises a, c, g, or t, or includes no nucleotide
  misc_feature (165)..(165): n comprises a, c, g, or t, or includes no nucleotide
  misc_feature (217)..(219): n comprises a, c, g, or t, or includes no nucleotide
  misc_feature (457)..(457): n comprises a, c, g, or t, or includes no nucleotide
  misc_feature (464)..(464): n comprises a, c, g, or t, or includes no nucleotide
  misc_feature (466)..(466): n comprises a, c, g, or t, or includes no nucleotide
  misc_feature (483)..(483): n comprises a, c, g, or t, or includes no nucleotide
  misc_feature (504)..(504): n comprises a, c, g, or t, or includes no nucleotide
  misc_feature (610)..(610): n comprises a, c, g, or t, or includes no nucleotide
  misc_feature (631)..(631): n comprises a, c, g, or t, or includes no nucleotide
  misc_feature (638)..(639): n comprises a, c, g, or t, or includes no nucleotide
  misc_feature (659)..(660): n comprises a, c, g, or t, or includes no nucleotide
  misc_feature (726)..(726): n comprises a, c, g, or t, or includes no nucleotide
  misc_feature (1116)..(1116): n comprises a, c, g, or t, or includes no nucleotide
  misc_feature (1118)..(1118): n comprises a, c, g, or t, or includes no nucleotide
  misc_feature (1127)..(1127): n comprises a, c, g, or t, or includes no nucleotide
  misc_feature (1132)..(1132): n comprises a, c, g, or t, or includes no nucleotide
tgcangtngtctctagaggatctgcatcgctgcctggggaagggtcctaggagagggaaacccttcagaaaccaacacccatcacagagggcttcacctgaggacatgccaggcccctgacatggaggttctgcagccccaggacccagctcgccaccttgctcngcgtgggcagcacagtgggcaggaaactcactagctaagcttctgaggctcnnnaaagtctcccaactccaccctgcttcctcttcacctatgtgtcccttcttgctctgagacagctttcccacttcccccctgggcctttctccctcggagatggctccggccagaggatgagactgaacccagatggtggagggagaattagcattggagccccactggagccatgaagggaactggaagaggtggaatattttaacacctggcatttagttcaacacatggcagaaantgtggcntnacaactagttggcaacnggcaagtgggttaattggctnaaataggcaaatggcaatttaggcactttacaacattattcttccaggatggaaagtttggccaacaacagttagttcactagcctatggctgggtcaaaaggcancaacttggcaccagggggcancacatgnnatattattttaggaggaggnnacatccatggagcattgaacacatatttccagggacaacaacaacacacaaccattccagaggganacaacaccacaacacaacaacacacatgcttccttgatgaaggagcgaacaacagaagaaagcatttcactctcaagtttggagactaaaagacactatggaggaaaggccttttaatcaaagccatcaagaagccacattagaagaatctaggttaacccaagccttaaatcgatgtgtaagacccagtcgaggaaggctccagcaccagataagcacagcatgggattgcagattgttcttctgataaagaccgagtagtggaaaacaaattgggcctggcacacagggccaggctgcagaaaaaggcgccactttcaggcctcaccattgttgctcccagtggaaaccattatctagggcacctgggtggctcagcagttgagcagntncggtcgggnccagnccgttctat

SEQ ID NO: 3295 - DNA, 930 bp, Canis familiaris
  misc_feature (4)..(4): n comprises a, c, g, or t, or includes no nucleotide
  misc_feature (9)..(9): n comprises a, c, g, or t, or includes no nucleotide
  misc_feature (18)..(18): n comprises a, c, g, or t, or includes no nucleotide
  misc_feature (36)..(36): n comprises a, c, g, or t, or includes no nucleotide
  misc_feature (101)..(101): n comprises a, c, g, or t, or includes no nucleotide
  misc_feature (153)..(153): n comprises a, c, g, or t, or includes no nucleotide
  misc_feature (447)..(447): n comprises a, c, g, or t, or includes no nucleotide
  misc_feature (463)..(463): n comprises a, c, g, or t, or includes no nucleotide
  misc_feature (477)..(477): n comprises a, c, g, or t, or includes no nucleotide
  misc_feature (533)..(533): n comprises a, c, g, or t, or includes no nucleotide
  misc_feature (566)..(566): n comprises a, c, g, or t, or includes no nucleotide
  misc_feature (787)..(789): n comprises a, c, g, or t, or includes no nucleotide
  misc_feature (825)..(825): n comprises a, c, g, or t, or includes no nucleotide
  misc_feature (895)..(895): n comprises a, c, g, or t, or includes no nucleotide
  misc_feature (909)..(909): n comprises a, c, g, or t, or includes no nucleotide
  misc_feature (921)..(922): n comprises a, c, g, or t, or includes no nucleotide
  misc_feature (925)..(926): n comprises a, c, g, or t, or includes no nucleotide
cgtncattnaagcccccngactcttattttcagctncaggtcataatctcagggctttgagattgagccattgtcaggctctgcactcagcacacaacacngcttgagattctttctccctctccctctgccccacctgcttgtgctctcttnctttctctctaaaataaatacataagtcttttttaaaaatttgaattcactatacctgtatacttaccccagtttaaccattaaagaaccagaccttgatgtggggcactgaaggtgaaggcaagaaaccatcaccaatttggagtctcttataaaaatgtctaggttggggaagagagggtcatgcttataattgtatcttttaaaaagtttattttacttaaattcaattaattaacatatggctggtattattggttttcagagacagaagtcamgtggattatycaktcnttatataattacccantgstccattatatncakgtgccctccctaatggtccatcaacccaacttaccctatccaytacccccaancaaccttcagtttgttttatatgattaaagagntctcttacggtttgtctccctctctgatttcgatttgttttatttttccccctcttctcctatgatcctctgtttcgtattcttaaataccacatatgagtaagatcatatgataattgtctttctctgacttatttcacttaacataataccctgtagttccagtcacatcctttcaaatggcaagtttcattttttgatgactgagtagtattccactnnncgcgcgtgcgtgtgtaccactttttctttatccttncatctgtcagtggacatctgggctttttccatagtttggctcttgtggaccttgctgctataaacattgnggtctaggcccccnttggtcctccannagnncggc

SEQ ID NO: 3296 - DNA, 652 bp, Canis familiaris
  misc_feature (102)..(102): n comprises a, c, g, or t, or includes no nucleotide
  misc_feature (152)..(152): n comprises a, c, g, or t, or includes no nucleotide
  misc_feature (205)..(205): n comprises a, c, g, or t, or includes no nucleotide
  misc_feature (223)..(223): n comprises a, c, g, or t, or includes no nucleotide
  misc_feature (234)..(239): n comprises a, c, g, or t, or includes no nucleotide
  misc_feature (250)..(250): n comprises a, c, g, or t, or includes no nucleotide
  misc_feature (304)..(304): n comprises a, c, g, or t, or includes no nucleotide
  misc_feature (323)..(323): n comprises a, c, g, or t, or includes no nucleotide
  misc_feature (414)..(414): n comprises a, c, g, or t, or includes no nucleotide
  misc_feature (416)..(416): n comprises a, c, g, or t, or includes no nucleotide
  misc_feature (418)..(418): n comprises a, c, g, or t, or includes no nucleotide
  misc_feature (432)..(432): n comprises a, c, g, or t, or includes no nucleotide
  misc_feature (442)..(442): n comprises a, c, g, or t, or includes no nucleotide
  misc_feature (447)..(447): n comprises a, c, g, or t, or includes no nucleotide
  misc_feature (451)..(451): n comprises a, c, g, or t, or includes no nucleotide
  misc_feature (460)..(461): n comprises a, c, g, or t, or includes no nucleotide
  misc_feature (473)..(473): n comprises a, c, g, or t, or includes no nucleotide
  misc_feature (480)..(480): n comprises a, c, g, or t, or includes no nucleotide
  misc_feature (482)..(482): n comprises a, c, g, or t, or includes no nucleotide
  misc_feature (528)..(528): n comprises a, c, g, or t, or includes no nucleotide
  misc_feature (531)..(531): n comprises a, c, g, or t, or includes no nucleotide
  misc_feature (536)..(536): n comprises a, c, g, or t, or includes no nucleotide
  misc_feature (539)..(539): n comprises a, c, g, or t, or includes no nucleotide
  misc_feature (542)..(542): n comprises a, c, g, or t, or includes no nucleotide
  misc_feature (544)..(544): n comprises a, c, g, or t, or includes no nucleotide
  misc_feature (546)..(546): n comprises a, c, g, or t, or includes no nucleotide
  misc_feature (554)..(554): n comprises a, c, g, or t, or includes no nucleotide
  misc_feature (557)..(557): n comprises a, c, g, or t, or includes no nucleotide
  misc_feature (569)..(569): n comprises a, c, g, or t, or includes no nucleotide
  misc_feature (574)..(574): n comprises a, c, g, or t, or includes no nucleotide
  misc_feature (578)..(578): n comprises a, c, g, or t, or includes no nucleotide
  misc_feature (580)..(580): n comprises a, c, g, or t, or includes no nucleotide
  misc_feature (582)..(582): n comprises a, c, g, or t, or includes no nucleotide
  misc_feature (585)..(585): n comprises a, c, g, or t, or includes no nucleotide
  misc_feature (591)..(592): n comprises a, c, g, or t, or includes no nucleotide
  misc_feature (600)..(601): n comprises a, c, g, or t, or includes no nucleotide
  misc_feature (604)..(604): n comprises a, c, g, or t, or includes no nucleotide
  misc_feature (615)..(616): n comprises a, c, g, or t, or includes no nucleotide
  misc_feature (619)..(619): n comprises a, c, g, or t, or includes no nucleotide
  misc_feature (625)..(625): n comprises a, c, g, or t, or includes no nucleotide
  misc_feature (634)..(634): n comprises a, c, g, or t, or includes no nucleotide
  misc_feature (637)..(637): n comprises a, c, g, or t, or includes no nucleotide
  misc_feature (640)..(640): n comprises a, c, g, or t, or includes no nucleotide
  misc_feature (647)..(647): n comprises a, c, g, or t, or includes no nucleotide
  misc_feature (649)..(650): n comprises a, c, g, or t, or includes no nucleotide
tagaggatcttaagtgtttgtctaaattagctttgaaaattgtatacatctgcagtaactacaatctgaaacaagatagaaaatatttcctttataccaganaattcccttgtattgctcagtattcaattcttccattcccagctgagacntacatcaccatactttctttttgactgttcttcaactttatataaatgaagtnttattcattctatctctntcttatacccnnnnnnttggcttcacntgttcaacatggttggattttttggggggagttaattatatttatttatttttnagagagagtgctatgagcntgtgcatggaatggaggggcagagggagagagggaaagattttggagcaaacttccacactgtgtgtgggagccccatgtggagctggatncncntggaccctggaccnggcgattcangactngagntggaaaccnnagagtgggtcanttaaccntnttgagccaccccggtggccccaaaatgtttttttttaaaatccctntgngttgntgnagnancngttggggngtntttttttatggnggggngttncncnaantttggnnggcccaanngtnggttttccctnncgnttgttngtggggccnttnggntgttttncnntt

SEQ ID NO: 3297 - DNA, 1122 bp, Canis familiaris
  misc_feature (12)..(12): n comprises a, c, g, or t, or includes no nucleotide
  misc_feature (16)..(16): n comprises a, c, g, or t, or includes no nucleotide
  misc_feature (38)..(38): n comprises a, c, g, or t, or includes no nucleotide
  misc_feature (49)..(49): n comprises a, c, g, or t, or includes no nucleotide
  misc_feature (101)..(101): n comprises a, c, g, or t, or includes no nucleotide
  misc_feature (176)..(176): n comprises a, c, g, or t, or includes no nucleotide
  misc_feature (194)..(197): n comprises a, c, g, or t, or includes no nucleotide
  misc_feature (199)..(201): n comprises a, c, g, or t, or includes no nucleotide
  misc_feature (364)..(364): n comprises a, c, g, or t, or includes no nucleotide
  misc_feature (369)..(369): n comprises a, c, g, or t, or includes no nucleotide
  misc_feature (372)..(372): n comprises a, c, g, or t, or includes no nucleotide
  misc_feature (383)..(383): n comprises a, c, g, or t, or includes no nucleotide
  misc_feature (392)..(392): n comprises a, c, g, or t, or includes no nucleotide
  misc_feature (402)..(402): n comprises a, c, g, or t, or includes no nucleotide
  misc_feature (408)..(408): n comprises a, c, g, or t, or includes no nucleotide
  misc_feature (420)..(420): n comprises a, c, g, or t, or includes no nucleotide
  misc_feature (429)..(429): n comprises a, c, g, or t, or includes no nucleotide
  misc_feature (438)..(438): n comprises a, c, g, or t, or includes no nucleotide
  misc_feature (444)..(444): n comprises a, c, g, or t, or includes no nucleotide
  misc_feature (449)..(449): n comprises a, c, g, or t, or includes no nucleotide
  misc_feature (471)..(471): n comprises a, c, g, or t, or includes no nucleotide
  misc_feature (482)..(483): n comprises a, c, g, or t, or includes no nucleotide
  misc_feature (575)..(582): n comprises a, c, g, or t, or includes no nucleotide
  misc_feature (643)..(643): n comprises a, c, g, or t, or includes no nucleotide
  misc_feature (651)..(652): n comprises a, c, g, or t, or includes no nucleotide
  misc_feature (660)..(661): n comprises a, c, g, or t, or includes no nucleotide
  misc_feature (663)..(663): n comprises a, c, g, or t, or includes no nucleotide
  misc_feature (693)..(693): n comprises a, c, g, or t, or includes no nucleotide
  misc_feature (699)..(699): n comprises a, c, g, or t, or includes no nucleotide
  misc_feature (726)..(726): n comprises a, c, g, or t, or includes no nucleotide
  misc_feature (733)..(733): n comprises a, c, g, or t, or includes no nucleotide
  misc_feature (735)..(735): n comprises a, c, g, or t, or includes no nucleotide
  misc_feature (743)..(743): n comprises a, c, g, or t, or includes no nucleotide
  misc_feature (756)..(757): n comprises a, c, g, or t, or includes no nucleotide
  misc_feature (762)..(762): n comprises a, c, g, or t, or includes no nucleotide
  misc_feature (767)..(767): n comprises a, c, g, or t, or includes no nucleotide
  misc_feature (771)..(771): n comprises a, c, g, or t, or includes no nucleotide
  misc_feature (774)..(774): n comprises a, c, g, or t, or includes no nucleotide
  misc_feature (777)..(777): n comprises a, c, g, or t, or includes no nucleotide
  misc_feature (795)..(795): n comprises a, c, g, or t, or includes no nucleotide
  misc_feature (797)..(797): n comprises a, c, g, or t, or includes no nucleotide
  misc_feature (806)..(806): n comprises a, c, g, or t, or includes no nucleotide
  misc_feature (810)..(810): n comprises a, c, g, or t, or includes no nucleotide
  misc_feature (817)..(817): n comprises a, c, g, or t, or includes no nucleotide
  misc_feature (821)..(821): n comprises a, c, g, or t, or includes no nucleotide
  misc_feature (825)..(825): n comprises a, c, g, or t, or includes no nucleotide
  misc_feature (829)..(830): n comprises a, c, g, or t, or includes no nucleotide
  misc_feature (835)..(835): n comprises a, c, g, or t, or includes no nucleotide
  misc_feature (845)..(845): n comprises a, c, g, or t, or includes no nucleotide
  misc_feature (850)..(850): n comprises a, c, g, or t, or includes no nucleotide
  misc_feature (856)..(856): n comprises a, c, g, or t, or includes no nucleotide
  misc_feature (858)..(858): n comprises a, c, g, or t, or includes no nucleotide
  misc_feature (876)..(876): n comprises a, c, g, or t, or includes no nucleotide
  misc_feature (903)..(903): n comprises a, c, g, or t, or includes no nucleotide
  misc_feature (944)..(944): n comprises a, c, g, or t, or includes no nucleotide
  misc_feature (946)..(946): n comprises a, c, g, or t, or includes no nucleotide
  misc_feature (1017)..(1017): n comprises a, c, g, or t, or includes no nucleotide
  misc_feature (1074)..(1074): n comprises a, c, g, or t, or includes no nucleotide
  misc_feature (1089)..(1089): n comprises a, c, g, or t, or includes no nucleotide
  misc_feature (1099)..(1099): n comprises a, c, g, or t, or includes no nucleotide
  misc_feature (1101)..(1101): n comprises a, c, g, or t, or includes no nucleotide
  misc_feature (1114)..(1114): n comprises a, c, g, or t, or includes no nucleotide
gatccaagtgtntgtngtcagttcgagttgaccatggnccaagagttanccttggatggtagtcaggagcacaagttctgggtggaagtggggtttaaganttgaagaagggacagtctgtatttttttttctgtatgctttagtgggggttccttatgtgtcaggctctgctcanagtgctttacacacaacnnnncnnntgaacctcactacccaacaaccccaagggtaggtattgccactgtacccaatttacaaaggtaggaatggaggcctagagaggctgtcgggtcacatagccaaagtgatggagcaggctgtctgaccccagggctagtgcttctcagtcttttagcacacatnaaganatncacctgggagncacttattnacacagcttncctggnactctggccctncagagagtntggactatncaggtnacatncagtgtgggagcccaattattncgggcattttnnaacggagcttccctggtggatggctgatggctgaacggttccttggggccagcctcatatttaattgccaggtcccacacttcattacccannnnnnnncttagagagtttgacaatcaaggaaaaccctgtgggggccaatataagggatttttaacgngctccccnnttgatgannanacagacctgtccttgggccaccctcatatntatttncagggccacactcatacacacaacacngaggggntntctgggtntcatatctgcatnntcccnccatntctnttncancagagagggagacaaacncncctctttgngctngcaaacncagntgtnatcnntcctngttttctacngaaancaacangntaaaatcacgcatagccngtatgtgtgtgtgtgtgtgtgtgtgtnttgtgtgtggtgggggtagggaggctgaggtgaatcagaangnattgcttcgcgttccaatttgctgctccaagtaaacctccaatcttacccattcccttacagaacacaaancagggcagctaagaagagctagggcacctttgggacctgcagccctgttcccctgcntgcccactgggtgtnagctactctntntactaaggcccancgtggatc

SEQ ID NO: 3298 - DNA, 647 bp, Canis familiaris
  misc_feature (2)..(2): n comprises a, c, g, or t, or includes no nucleotide
  misc_feature (13)..(13): n comprises a, c, g, or t, or includes no nucleotide
  misc_feature (206)..(206): n comprises a, c, g, or t, or includes no nucleotide
  misc_feature (208)..(208): n comprises a, c, g, or t, or includes no nucleotide
  misc_feature (319)..(322): n comprises a, c, g, or t, or includes no nucleotide
  misc_feature (326)..(326): n comprises a, c, g, or t, or includes no nucleotide
  misc_feature (358)..(358): n comprises a, c, g, or t, or includes no nucleotide
  misc_feature (370)..(370): n comprises a, c, g, or t, or includes no nucleotide
  misc_feature (381)..(381): n comprises a, c, g, or t, or includes no nucleotide
  misc_feature (476)..(476): n comprises a, c, g, or t, or includes no nucleotide
  misc_feature (487)..(487): n comprises a, c, g, or t, or includes no nucleotide
  misc_feature (640)..(640): n comprises a, c, g, or t, or includes no nucleotide
cnagaggatcaanaactccaagtatttggagtccttggagggaagctattagccacagcactattctccctcccaaggaaggtgtgaactaaacactctgaactgggcagggaggagcattgcacactcaggcgtcttcagtgtggccactgaaccaacagcagagactccatgtatgcagataaccagacactgcactcattttntnagagtcacactggttgagttgctgctggatgttttaatatacacacatccatgtagatgagtccactcccaatttaggaaacccaatacacagcaagacagacagacagannnncttnacttctccactttagaaaagttcatgcccatnaaaaagcatttnaaaatagggtncagttttgtggactgtttggcccagtggcagttcacacagggcccagcccttcaaggggttcacccatggcctgggttttggacgcttctgtaantcaccatcttnaatttctccattttaccttgagtgtggtatttggccatggaagttcggatggaacatgcagatgcttccgaggtccagagcctttagtcacggcacagttcccagccctggcaacttccgggtttcccggggggggatctcaggtgtccaganccccccc

SEQ ID NO: 3299 - DNA, 494 bp, Canis familiaris
  misc_feature (3)..(3): n comprises a, c, g, or t, or includes no nucleotide
  misc_feature (7)..(7): n comprises a, c, g, or t, or includes no nucleotide
  misc_feature (10)..(13): n comprises a, c, g, or t, or includes no nucleotide
  misc_feature (35)..(35): n comprises a, c, g, or t, or includes no nucleotide
  misc_feature (195)..(195): n comprises a, c, g, or t, or includes no nucleotide
  misc_feature (224)..(224): n comprises a, c, g, or t, or includes no nucleotide
  misc_feature (226)..(226): n comprises a, c, g, or t, or includes no nucleotide
  misc_feature (229)..(232): n comprises a, c, g, or t, or includes no nucleotide
  misc_feature (257)..(257): n comprises a, c, g, or t, or includes no nucleotide
  misc_feature (423)..(423): n comprises a, c, g, or t, or includes no nucleotide
  misc_feature (449)..(449): n comprises a, c, g, or t, or includes no nucleotide
  misc_feature (490)..(490): n comprises a, c, g, or t, or includes no nucleotide
aangccnaannnnacgtcgactctagaggatctantatcattaaaacattactttggggtcacttttaatcactgcacttgaggcatggggtatatgttttaatggtctccccttaaactgaagccaaagtttaacaagttgatatccccggccctatagacgaatttactgttttctgctgagtgtagcttttnctgcaccgctagggcgcagaaagagtttnanagnnnnctggctctgtgctgcagaagctgcngtacacactctcagctcctcctgcagcagctgaggctgatataaatgtataaacaagcagaagctatatgtgacacacaccaccattcttaaaagcagaaagcaacaactcccaagccaagtttttggcttctggatggatgtggtgaagggccaggctttggctncagggggctgaggttagagggaaggnattcttggaccaaatggactcatttggctggaggtttaggnccac

SEQ ID NO: 3300 - DNA, 422 bp, Canis familiaris
  misc_feature (12)..(12): n comprises a, c, g, or t, or includes no nucleotide
  misc_feature (25)..(25): n comprises a, c, g, or t, or includes no nucleotide
  misc_feature (129)..(129): n comprises a, c, g, or t, or includes no nucleotide
  misc_feature (186)..(186): n comprises a, c, g, or t, or includes no nucleotide
  misc_feature (398)..(398): n comprises a, c, g, or t, or includes no nucleotide
  misc_feature (400)..(400): n comprises a, c, g, or t, or includes no nucleotide
  misc_feature (403)..(404): n comprises a, c, g, or t, or includes no nucleotide
  misc_feature (406)..(406): n comprises a, c, g, or t, or includes no nucleotide
  misc_feature (413)..(414): n comprises a, c, g, or t, or includes no nucleotide
  misc_feature (418)..(418): n comprises a, c, g, or t, or includes no nucleotide
  misc_feature (421)..(421): n comprises a, c, g, or t, or includes no nucleotide
ggttttggtaancatgtccaagacnagtggcgtccaaaatggaggccattgggcaactcctatgcactgctgctggagagagggattgctggtgcctccacctggctctgccatgggctgttactgctngacccttgttggaagaggagcaattaagcaacataacgaggaagggtaatgacacanttgagaaccaaatctctcgtacattgaaagcctgcagctttgaggcttctgaacattgaggggttagttacagagttgagtaggagtagaaagtgatagtaaaacattttatttgtgtataaaaaagatttgctaagtggatattcagaatattacttgggaagtatatggattcctacagcatatgggagtttacagggccccaggattcngngtnngngctcgannctcnaanc

SEQ ID NO: 3301 - DNA, 550 bp, Canis familiaris
  misc_feature (9)..(9): n comprises a, c, g, or t, or includes no nucleotide
  misc_feature (11)..(12): n comprises a, c, g, or t, or includes no nucleotide
  misc_feature (407)..(407): n comprises a, c, g, or t, or includes no nucleotide
  misc_feature (435)..(435): n comprises a, c, g, or t, or includes no nucleotide
  misc_feature (443)..(443): n comprises a, c, g, or t, or includes no nucleotide
  misc_feature (485)..(485): n comprises a, c, g, or t, or includes no nucleotide
  misc_feature (488)..(489): n comprises a, c, g, or t, or includes no nucleotide
  misc_feature (527)..(527): n comprises a, c, g, or t, or includes no nucleotide
  misc_feature (534)..(535): n comprises a, c, g, or t, or includes no nucleotide
  misc_feature (538)..(538): n comprises a, c, g, or t, or includes no nucleotide
  misc_feature (549)..(549): n comprises a, c, g, or t, or includes no nucleotide
gcatgccgngnngtcgactctagaggatccatctctcaagaacatacaaatgtcaaagagatggtgggtcatgatgagctgtgtgtcagcaagatgctcccctctgaagtatagaccctactccaaggttcactctgtctacctgactctttctatggtgagcctgttctctaggcacatatggcaatttccagccttgttttcttttggatagccctaatatttctgacaatctaccttttcaaacataattgtaaagaaagacacagtctaactttaacgtctcacagaaatggttcaagtacatctcaatctcattgggatatatccactcacacacacacacacacacacacacacttgtattaaaacttcataatttacatatggatttatccattcttccnagggcagataaatttagctttctaaagnaaaacatnaccaacaatattttggatcgttgctttttgaaattatccttnaanntgttgttgttggatgtggattagggaaacctgctggangcgcggnnatnaaagttaactna

SEQ ID NO: 3302 - DNA, 951 bp, Canis familiaris
  misc_feature (6)..(7): n comprises a, c, g, or t, or includes no nucleotide
  misc_feature (42)..(42): n comprises a, c, g, or t, or includes no nucleotide
  misc_feature (185)..(185): n comprises a, c, g, or t, or includes no nucleotide
  misc_feature (189)..(189): n comprises a, c, g, or t, or includes no nucleotide
  misc_feature (226)..(226): n comprises a, c, g, or t, or includes no nucleotide
  misc_feature (356)..(356): n comprises a, c, g, or t, or includes no nucleotide
  misc_feature (372)..(372): n comprises a, c, g, or t, or includes no nucleotide
  misc_feature (415)..(415): n comprises a, c, g, or t, or includes no nucleotide
  misc_feature (434)..(434): n comprises a, c, g, or t, or includes no nucleotide
  misc_feature (455)..(455): n comprises a, c, g, or t, or includes no nucleotide
  misc_feature (484)..(484): n comprises a, c, g, or t, or includes no nucleotide
  misc_feature (490)..(490): n comprises a, c, g, or t, or includes no nucleotide
  misc_feature (504)..(504): n comprises a, c, g, or t, or includes no nucleotide
  misc_feature (576)..(577): n comprises a, c, g, or t, or includes no nucleotide
  misc_feature (585)..(585): n comprises a, c, g, or t, or includes no nucleotide
  misc_feature (640)..(640): n comprises a, c, g, or t, or includes no nucleotide
  misc_feature (694)..(694): n comprises a, c, g, or t, or includes no nucleotide
  misc_feature (734)..(734): n comprises a, c, g, or t, or includes no nucleotide
  misc_feature (740)..(741): n comprises a, c, g, or t, or includes no nucleotide
  misc_feature (784)..(784): n comprises a, c, g, or t, or includes no nucleotide
  misc_feature (849)..(849): n comprises a, c, g, or t, or includes no nucleotide
  misc_feature (906)..(906): n comprises a, c, g, or t, or includes no nucleotide
  misc_feature (920)..(920): n comprises a, c, g, or t, or includes no nucleotide
  misc_feature (936)..(936): n comprises a, c, g, or t, or includes no nucleotide
  misc_feature (944)..(944): n comprises a, c, g, or t, or includes no nucleotide
  misc_feature (946)..(946): n comprises a, c, g, or t, or includes no nucleotide
gatcannggatgacgtcaggatgaatctgcaaccaagcaaantaaaaccacacctcaggttttccatattacagcaagaggccaaaataggtcaaagaacataaggcacctgatgggtttccctgcaccatttttggtgcattcatcaagtcaggacgcaacaggctacttaagctagagattgnatcngcggtacctttggcatccagttctggggctatacccnggatgaattaagaaaattcattaagccatgcaaattcatatttatatcaatgttaaatgagaagatttcatcttatacatagctcttcataaacagggaactatttttttcttttttttcaacttccttnaagttccacttagttnaacataccctggcaatattagttttagggcatagaatttaatnaattccatccacctacgtnacaacacacccagtggctcmntcaacaacmaatggcccttcttaataacnwatctnccccacctrgstcnatcccccaamacccckgtcccctccaagtaacactcagtttgttctctatggtcaaaagtctgttttctggnntgtctctnttttttttcccccatgttcattcattttgtttcttaaattccacatatgagtganagcatatggtatttgtctttctctgacttattttgcttagtataatactctctngctccacccacattctttttgatggctgagtaatattctntgtgannttgtgttacattattatccattcatcagctgatggatatttgngcttttcccataatttggctattgttgaaaatgctgctataaacattgggggtgcatgtatcctnttgagtgagtatttttgtattgctttgagtgaatacctaggatattcactaggtatnttcacaatgggccnttgctggatctcctangagagcancnaaaat

SEQ ID NO: 3303 - DNA, 846 bp, Canis familiaris
  misc_feature (2)..(4): n comprises a, c, g, or t, or includes no nucleotide
  misc_feature (7)..(7): n comprises a, c, g, or t, or includes no nucleotide
  misc_feature (9)..(10): n comprises a, c, g, or t, or includes no nucleotide
  misc_feature (12)..(12): n comprises a, c, g, or t, or includes no nucleotide
  misc_feature (39)..(39): n comprises a, c, g, or t, or includes no nucleotide
  misc_feature (48)..(48): n comprises a, c, g, or t, or includes no nucleotide
  misc_feature (67)..(67): n comprises a, c, g, or t, or includes no nucleotide
  misc_feature (264)..(264): n comprises a, c, g, or t, or includes no nucleotide
  misc_feature (266)..(266): n comprises a, c, g, or t, or includes no nucleotide
  misc_feature (269)..(269): n comprises a, c, g, or t, or includes no nucleotide
  misc_feature (278)..(279): n comprises a, c, g, or t, or includes no nucleotide
  misc_feature (290)..(290): n comprises a, c, g, or t, or includes no nucleotide
  misc_feature (293)..(293): n comprises a, c, g, or t, or includes no nucleotide
  misc_feature (295)..(295): n comprises a, c, g, or t, or includes no nucleotide
  misc_feature (298)..(298): n comprises a, c, g, or t, or includes no nucleotide
  misc_feature (300)..(300): n comprises a, c, g, or t, or includes no nucleotide
  misc_feature (318)..(320): n comprises a, c, g, or t, or includes no nucleotide
  misc_feature (324)..(324): n comprises a, c, g, or t, or includes no nucleotide
  misc_feature (330)..(330): n comprises a, c, g, or t, or includes no nucleotide
  misc_feature (340)..(340): n comprises a, c, g, or t, or includes no nucleotide
  misc_feature (345)..(345): n comprises a, c, g, or t, or includes no nucleotide
  misc_feature (353)..(353): n comprises a, c, g, or t, or includes no nucleotide
  misc_feature (360)..(360): n comprises a, c, g, or t, or includes no nucleotide
  misc_feature (376)..(376): n comprises a, c, g, or t, or includes no nucleotide
  misc_feature (380)..(380): n comprises a, c, g, or t, or includes no nucleotide
  misc_feature (387)..(388): n comprises a, c, g, or t, or includes no nucleotide
  misc_feature (391)..(391): n comprises a, c, g, or t, or includes no nucleotide
  misc_feature (409)..(409): n comprises a, c, g, or t, or includes no nucleotide
  misc_feature (419)..(419): n comprises a, c, g, or t, or includes no nucleotide
  misc_feature (428)..(428): n comprises a, c, g, or t, or includes no nucleotide
  misc_feature (462)..(462): n comprises a, c, g, or t, or includes no nucleotide
  misc_feature (528)..(528): n comprises a, c, g, or t, or includes no nucleotide
  misc_feature (535)..(535): n comprises a, c, g, or t, or includes no nucleotide
  misc_feature (557)..(557): n comprises a, c, g, or t, or includes no nucleotide
  misc_feature (751)..(751): n comprises a, c, g, or t, or includes no nucleotide
  misc_feature (753)..(753): n comprises a, c, g, or t, or includes no nucleotide
tnnntcngnngntttggttggcccgcccggataggaaanagggccggnccaaaagaacaccttggtngctagatagtcaggctctgttggaattcggtggttgattgctgggtccctaagttggagagctggcaccagtcatctgtacagggattcaggtctactgagtcctggttcaaggttcagtggtggggcttccaggcattgaggaataggagctggagtgtgtgtgtgtgtgtgtgtgtgtgtgtgtgtgtgtgtgtnantcngatggagcnngtgcagtgcangananctntnttgggaagaaagctagannntgtnattcangggggaaaangtaancagctacngggtatntaggaacttcaagtantctntgcctcnnaantctcccatcttttatgtncacaaacccnccctctttntctttatccggtcmggtttatycactcggcmgrntrrttacmttgccatctkgarttccctrgggattttgcmctccactctattccagraraaaaattnattcttnatcccaattytctttatgaaanaasaacgtttatttgaaacatacctcccacctatcctttcctggagggcgttattgactctgctgcatcatctcactctgcaagacatttctccttagagaaagctcaagaaatgctcagctgcttctcataaaggaagttcaaggcaagattcagacccaccgatccagaggcctatgttgttacctccaaantntcaattctgaacggggctcctggcctaacagtctgagacacttgccaattctaaatgaatgatttgctcttccaccggcattccattgtcctt

SEQ ID NO: 3304 - DNA, 725 bp, Canis familiaris
  misc_feature (7)..(7): n comprises a, c, g, or t, or includes no nucleotide
  misc_feature (11)..(11): n comprises a, c, g, or t, or includes no nucleotide
  misc_feature (17)..(17): n comprises a, c, g, or t, or includes no nucleotide
  misc_feature (23)..(23): n comprises a, c, g, or t, or includes no nucleotide
  misc_feature (28)..(28): n comprises a, c, g, or t, or includes no nucleotide
  misc_feature (158)..(158): n comprises a, c, g, or t, or includes no nucleotide
  misc_feature (160)..(160): n comprises a, c, g, or t, or includes no nucleotide
  misc_feature (339)..(339): n comprises a, c, g, or t, or includes no nucleotide
  misc_feature (431)..(431): n comprises a, c, g, or t, or includes no nucleotide
  misc_feature (546)..(546): n comprises a, c, g, or t, or includes no nucleotide
  misc_feature (613)..(613): n comprises a, c, g, or t, or includes no nucleotide
  misc_feature (660)..(662): n comprises a, c, g, or t, or includes no nucleotide
gggcacnatancaaaanaaaaancttcngcagtagtgtaaggaaatcatcaacaaatgaaaaaaacaacagcctatttattgggaggaaatatttgcaaatgttatatctgagaaagggttaatatccaaaatatataaagaactcattcaactcaantnccaaaaaaccaatctgattaaaaatgagcagaggacctgaatagacagttttccaaagaagacatccacatggccaacagacaacatgaaaagatgttcaatatcactcatcatcagggaaatggcaaatcwaaccacaataagacctcacctcatttatctgtcagaatagctagaanaaaaagactagaaataacaagcgttwgmarggatgtgggagaaaaggaaaattgtgtggcactcttggtggggaatataaaatgggagtagnccactatggraaagtgtakggaggttcctggagaaagttaaaagtataacyacyctatgrttcmgsmatttwmctyckgggtatttatctgragraaatgrgracmcatattcmnaaaggcacgtgracccctgtgttcattgcagcattatttacaatagccaagatacagtaagcaaccngagtatccaccaatagatgaatgaatggatagagaagaagttatatnnncctgtgatattacatagacataaaaaatataacatagccttttgcaaggccacagatggtctc

SEQ ID NO: 3305 - DNA, 953 bp, Canis familiaris
  misc_feature (9)..(9): n comprises a, c, g, or t, or includes no nucleotide
  misc_feature (27)..(27): n comprises a, c, g, or t, or includes no nucleotide
  misc_feature (37)..(37): n comprises a, c, g, or t, or includes no nucleotide
  misc_feature (41)..(41): n comprises a, c, g, or t, or includes no nucleotide
  misc_feature (108)..(108): n comprises a, c, g, or t, or includes no nucleotide
  misc_feature (134)..(136): n comprises a, c, g, or t, or includes no nucleotide
  misc_feature (155)..(155): n comprises a, c, g, or t, or includes no nucleotide
  misc_feature (157)..(157): n comprises a, c, g, or t, or includes no nucleotide
  misc_feature (288)..(289): n comprises a, c, g, or t, or includes no nucleotide
  misc_feature (376)..(376): n comprises a, c, g, or t, or includes no nucleotide
  misc_feature (396)..(396): n comprises a, c, g, or t, or includes no nucleotide
  misc_feature (408)..(408): n comprises a, c, g, or t, or includes no nucleotide
  misc_feature (448)..(448): n comprises a, c, g, or t, or includes no nucleotide
  misc_feature (458)..(458): n comprises a, c, g, or t, or includes no nucleotide
  misc_feature (464)..(465): n comprises a, c, g, or t, or includes no nucleotide
  misc_feature (469)..(469): n comprises a, c, g, or t, or includes no nucleotide
  misc_feature (541)..(543): n comprises a, c, g, or t, or includes no nucleotide
  misc_feature (546)..(546): n comprises a, c, g, or t, or includes no nucleotide
  misc_feature (576)..(576): n comprises a, c, g, or t, or includes no nucleotide
  misc_feature (622)..(622): n comprises a, c, g, or t, or includes no nucleotide
  misc_feature (769)..(769): n comprises a, c, g, or t, or includes no nucleotide
  misc_feature (791)..(791): n comprises a, c, g, or t, or includes no nucleotide
  misc_feature (807)..(807): n comprises a, c, g, or t, or includes no nucleotide
  misc_feature (812)..(812): n comprises a, c, g, or t, or includes no nucleotide
  misc_feature (832)..(832): n comprises a, c, g, or t, or includes no nucleotide
  misc_feature (849)..(849): n comprises a, c, g, or t, or includes no nucleotide
  misc_feature (860)..(860): n comprises a, c, g, or t, or includes no nucleotide
  misc_feature (865)..(865): n comprises a, c, g, or t, or includes no nucleotide
  misc_feature (869)..(870): n comprises a, c, g, or t, or includes no nucleotide
  misc_feature (882)..(882): n comprises a, c, g, or t, or includes no nucleotide
  misc_feature (925)..(925): n comprises a, c, g, or t, or includes no nucleotide
ccastaatncactactgggtacctacntaacccccanaaanagaaaacactaatttgaaaagacatatgtaccccaatgtttactgcagcattatttacaacagccangatatgaaagtaacccatgtccatcnnntgamaccwtmccatttgcnancamtgtggattacctggagggtattamgccaagtgaaataagtcagagcaaaatagacamatactgtatgatttcacttatatgtagaatcaaaaaagcagaacaaatgaacaaacaaccaaaaagcaganncccagacccataagtacagagaattctgtattggccagaaaggggaagtgggtkggggggacagacaaaaatggggtggaaggggangtgggraggtttcagccttnccaggtatagtnaagttcacmggggattaaaagttacagtcataggggaatnttagttcaanagaatnnggtnggggaccagaccaaaattggtgaagggaagtgggagttcagcattcccagggtatagtaagtcaccaggggnnntangacagcatagggaatatagtcaatagaatngtaagagcaatatgcagtaacacatggtagctacacttgtggtaangctggggtaacaacatagacctgctgaatcactatgttgtacacatgaaaccaacataacggtgtgtcaactatacttaaattttgaaaaggaactatctacagatgttaaagaacaaatttatatgttattacttggaatactttnttccgaagagattaaaagattnaaaattataaaatccngagtntcacaagtcctgccttattnacgtccacataaactancaagaccttanaaatnatcnngggcactcaganacccaagaagagagactgctatacaaatagtcctgatatctgngcctctatttacccacacactgcctaat

SEQ ID NO: 3306 - DNA, 954 bp, Canis familiaris
  misc_feature (8)..(8): n comprises a, c, g, or t, or includes no nucleotide
  misc_feature (25)..(26): n comprises a, c, g, or t, or includes no nucleotide
  misc_feature (34)..(34): n comprises a, c, g, or t, or includes no nucleotide
  misc_feature (190)..(190): n comprises a, c, g, or t, or includes no nucleotide
  misc_feature (194)..(195): n comprises a, c, g, or t, or includes no nucleotide
  misc_feature (197)..(198): n comprises a, c, g, or t, or includes no nucleotide
  misc_feature (366)..(366): n comprises a, c, g, or t, or includes no nucleotide
  misc_feature (393)..(393): n comprises a, c, g, or t, or includes no nucleotide
  misc_feature (409)..(409): n comprises a, c, g, or t, or includes no nucleotide
  misc_feature (435)..(435): n comprises a, c, g, or t, or includes no nucleotide
  misc_feature (463)..(463): n comprises a, c, g, or t, or includes no nucleotide
  misc_feature (482)..(482): n comprises a, c, g, or t, or includes no nucleotide
  misc_feature (496)..(496): n comprises a, c, g, or t, or includes no nucleotide
  misc_feature (500)..(500): n comprises a, c, g, or t, or includes no nucleotide
  misc_feature (503)..(503): n comprises a, c, g, or t, or includes no nucleotide
  misc_feature (508)..(509): n comprises a, c, g, or t, or includes no nucleotide
  misc_feature (928)..(928): n comprises a, c, g, or t, or includes no nucleotide
  misc_feature (948)..(948): n comprises a, c, g, or t, or includes no nucleotide
ttacctcngcttaaaggacctcatnngcactaangggcaaaggcaaaaattatgatactgaaaactcataagggaccagaatgaaaacggggatttcaatttatttatttaccatgagaaatctctgacacagattgggaattctagtgttaataacctggaggcgttctttccacgaatggaatggaantcgnntnnagaagctctctttgaaggtgcaagagaaacatcacaaggacgcaaagtctactttgcccaatgagcagtgagctctttcatcatggaaccccaggcagtcacgggcttgcttagccagcacggaatctggctggaattgttagctggccggggtccaatggacagacntggaacctatgtctcatctgggttctncatcccactatgtgtncattggaggacccatgttcttcaatncctggggttcagaatctcytaatggagnaattttaaagggckatcynctggtctctctgkntctnctnctctnnctytcwcaacaacacaacaacaacaacacacacaacaacaacacacaaacaggtaaccatgtaaaggtagtagatttgttcatcgttcaaattgtggtcatcttttcacaatatatatcaaaacatcaagctgtacatcttcagtatacacgctttttacatgtcaaagtcacctaaagctttaaagaaaacacaaaggccaggcaccaccccaggtgaatggaatcagaattcctggtggggaagccaggcattggttgacggaagtttcctgcgggccttggagcacccctgctttaactcactgtctctgctcttgctcatgcattgttcacaggacttttcttagtggacaaagttttccttatcctcacatttttggaggggtacctcacctggggattagacgaactgaaagngaaccaagcctggtataggnggccgg

SEQ ID NO: 3307 - DNA, 544 bp, Canis familiaris
  misc_feature (12)..(13): n comprises a, c, g, or t, or includes no nucleotide
  misc_feature (16)..(16): n comprises a, c, g, or t, or includes no nucleotide
  misc_feature (20)..(20): n comprises a, c, g, or t, or includes no nucleotide
  misc_feature (22)..(22): n comprises a, c, g, or t, or includes no nucleotide
  misc_feature (64)..(64): n comprises a, c, g, or t, or includes no nucleotide
  misc_feature (143)..(144): n comprises a, c, g, or t, or includes no nucleotide
  misc_feature (220)..(222): n comprises a, c, g, or t, or includes no nucleotide
  misc_feature (385)..(385): n comprises a, c, g, or t, or includes no nucleotide
  misc_feature (464)..(464): n comprises a, c, g, or t, or includes no nucleotide
  misc_feature (470)..(470): n comprises a, c, g, or t, or includes no nucleotide
  misc_feature (521)..(521): n comprises a, c, g, or t, or includes no nucleotide
  misc_feature (540)..(540): n comprises a, c, g, or t, or includes no nucleotide
tcttgcatgccnngangtcncnacaggatccatcaattatcctctattttgatgttacattgancagataagtcaagtcaagaaattaaaagtgtaattattgtacatccctccatgaaatctattaataaccataggttggnngtgaaaataatttcactttaaaatattctaagttcttactaatatgatgctaactttattaagcacccttcctacnnntccaaatgctgctctagatactgaggcataatgtcatgggctctcagtgagcttccaaattaatagaggaaagagacctgttattccacagttagaagggagtgacttctaaactggagctatgaatgatgagtaagaatatctagagtttggaggaggcatnaaggacagtggcaacaagggacagctggcagcgaaagttactctaatcccattggccaaatccataaagcctaatttcntctggnaaggcaaaaggaaaaggatattccacctttagggaggaaattaaaattaanttaaaaccagttgggaggnagga

SEQ ID NO: 3308 - DNA, 445 bp, Canis familiaris
  misc_feature (4)..(4): n comprises a, c, g, or t, or includes no nucleotide
  misc_feature (10)..(10): n comprises a, c, g, or t, or includes no nucleotide
  misc_feature (25)..(25): n comprises a, c, g, or t, or includes no nucleotide
  misc_feature (27)..(28): n comprises a, c, g, or t, or includes no nucleotide
  misc_feature (49)..(49): n comprises a, c, g, or t, or includes no nucleotide
  misc_feature (405)..(405): n comprises a, c, g, or t, or includes no nucleotide
  misc_feature (421)..(421): n comprises a, c, g, or t, or includes no nucleotide
  misc_feature (423)..(423): n comprises a, c, g, or t, or includes no nucleotide
cgcncgtagnttggattgggtctcncnnctagaggacgcccttttcagntaacacactttcctcatccagatttaagacattctttatctggcaaggtggggttatggtatgtgggaatagacattcaacatctgctttctctaccagagaaggacttttcttcatataggatatttttatggtatgcatttggaatatagttggatagttacaactggggttcttttgtttctcagaatttgtgatataggatgtatgaaatttgggtgtgagatatatatctcacaccaaatttgtgttgtgtatatatttgtgtatatatatatatatacacacacatacacatatatatacattcttaaattccttacacatacacatatgtataaattcccttaaaatynttgtgkgkgkgkggtnanatatatatatatatatatatat

SEQ ID NO: 3309 - DNA, 460 bp, Canis familiaris
  misc_feature (15)..(15): n comprises a, c, g, or t, or includes no nucleotide
  misc_feature (17)..(17): n comprises a, c, g, or t, or includes no nucleotide
  misc_feature (29)..(32): n comprises a, c, g, or t, or includes no nucleotide
  misc_feature (401)..(401): n comprises a, c, g, or t, or includes no nucleotide
  misc_feature (416)..(416): n comprises a, c, g, or t, or includes no nucleotide
  misc_feature (424)..(424): n comprises a, c, g, or t, or includes no nucleotide
  misc_feature (432)..(432): n comprises a, c, g, or t, or includes no nucleotide
ccaccaccacatatntnacatatataacnnnntgggaatatattggrargaagggywtgttttataagcagcaaccttgctatctgggatgtttaaaatgtccaggaatcctctgggcaactttttagtgctagttggtctactcaggctactatagtggaataccacagaatatgtgtcttaaataacaaaaatgtactttctccatgttctggaggctggaagatgaaggtcaaggtgcttggtgtttggtgaggccctttcattcttgcttatagagagtcaccttcttgctataacttttccacacggacttttctctatgtatactcctggtgtctctttttctaatgacaccagtcatactgggttaggtgtcttcctaatgacctaatttaacntcttttacggcctanggtccctncattagancaagggcaaacaaggacccccccccccc

SEQ ID NO: 3310 - DNA, 667 bp, Canis familiaris
  misc_feature (9)..(9): n comprises a, c, g, or t, or includes no nucleotide
  misc_feature (172)..(172): n comprises a, c, g, or t, or includes no nucleotide
  misc_feature (194)..(197): n comprises a, c, g, or t, or includes no nucleotide
  misc_feature (223)..(223): n comprises a, c, g, or t, or includes no nucleotide
  misc_feature (252)..(252): n comprises a, c, g, or t, or includes no nucleotide
  misc_feature (277)..(277): n comprises a, c, g, or t, or includes no nucleotide
  misc_feature (301)..(301): n comprises a, c, g, or t, or includes no nucleotide
  misc_feature (339)..(339): n comprises a, c, g, or t, or includes no nucleotide
  misc_feature (356)..(356): n comprises a, c, g, or t, or includes no nucleotide
  misc_feature (372)..(373): n comprises a, c, g, or t, or includes no nucleotide
  misc_feature (384)..(384): n comprises a, c, g, or t, or includes no nucleotide
  misc_feature (405)..(405): n comprises a, c, g, or t, or includes no nucleotide
  misc_feature (434)..(434): n comprises a, c, g, or t, or includes no nucleotide
  misc_feature (438)..(438): n comprises a, c, g, or t, or includes no nucleotide
  misc_feature (440)..(440): n comprises a, c, g, or t, or includes no nucleotide
  misc_feature (453)..(454): n comprises a, c, g, or t, or includes no nucleotide
  misc_feature (491)..(491): n comprises a, c, g, or t, or includes no nucleotide
  misc_feature (495)..(495): n comprises a, c, g, or t, or includes no nucleotide
  misc_feature (500)..(500): n comprises a, c, g, or t, or includes no nucleotide
  misc_feature (502)..(502): n comprises a, c, g, or t, or includes no nucleotide
  misc_feature (508)..(508): n comprises a, c, g, or t, or includes no nucleotide
  misc_feature (516)..(516): n comprises a, c, g, or t, or includes no nucleotide
  misc_feature (537)..(537): n comprises a, c, g, or t, or includes no nucleotide
  misc_feature (541)..(541): n comprises a, c, g, or t, or includes no nucleotide
  misc_feature (553)..(553): n comprises a, c, g, or t, or includes no nucleotide
  misc_feature (556)..(556): n comprises a, c, g, or t, or includes no nucleotide
  misc_feature (558)..(558): n comprises a, c, g, or t, or includes no nucleotide
  misc_feature (575)..(576): n comprises a, c, g, or t, or includes no nucleotide
  misc_feature (584)..(584): n comprises a, c, g, or t, or includes no nucleotide
  misc_feature (597)..(597): n comprises a, c, g, or t, or includes no nucleotide
  misc_feature (602)..(602): n comprises a, c, g, or t, or includes no nucleotide
  misc_feature (611)..(611): n comprises a, c, g, or t, or includes no nucleotide
  misc_feature (617)..(617): n comprises a, c, g, or t, or includes no nucleotide
  misc_feature (621)..(621): n comprises a, c, g, or t, or includes no nucleotide
  misc_feature (628)..(628): n comprises a, c, g, or t, or includes no nucleotide
  misc_feature (632)..(632): n comprises a, c, g, or t, or includes no nucleotide
  misc_feature (659)..(659): n comprises a, c, g, or t, or includes no nucleotide
  misc_feature (663)..(663): n comprises a, c, g, or t, or includes no nucleotide
gcatgcctnaggtcgactctagaggatccagcaatcacactactgggtatttacccaaagaatacaaaaacactacttcaaagggatacaagcacccttatgtttatagcagcattatttacaatgccaagagatggaagcagcccaagtgtgcatcaattgatgaatggcnaaagaagatgtggtgagtatannnntattatttggccataaaaagaatganatcttgtcatttgtaatgccatggatggnactagagggtagctagagaatatantgctaagttatgtaagttggttanagagagacaagtaccatatggactgctcatatgtggantctaagatataacacangtggagcaaaaagaannccaatgaaggngcggagaggaggaccatatgnaggacacagtactctttatactatagagnaatnanactggatggattnnccaggaggggaaagttggtgggggcttatggggttanattnggtgntngggggntttaaggnagtgggactgttgtggatggnggcnccggtgtttganccncnggttggtaccacttaannctattatnaccctggatgttnacctngcggttttnaaattnaaanccccttngganccccctcctgggtgccctttctttttngggnattg

SEQ ID NO: 3311 - DNA, 686 bp, Canis familiaris
  misc_feature (9)..(9): n comprises a, c, g, or t, or includes no nucleotide
  misc_feature (12)..(12): n comprises a, c, g, or t, or includes no nucleotide
  misc_feature (18)..(18): n comprises a, c, g, or t, or includes no nucleotide
  misc_feature (107)..(109): n comprises a, c, g, or t, or includes no nucleotide
  misc_feature (176)..(176): n comprises a, c, g, or t, or includes no nucleotide
  misc_feature (210)..(210): n comprises a, c, g, or t, or includes no nucleotide
  misc_feature (439)..(439): n comprises a, c, g, or t, or includes no nucleotide
  misc_feature (482)..(482): n comprises a, c, g, or t, or includes no nucleotide
  misc_feature (538)..(538): n comprises a, c, g, or t, or includes no nucleotide
  misc_feature (548)..(548): n comprises a, c, g, or t, or includes no nucleotide
  misc_feature (556)..(556): n comprises a, c, g, or t, or includes no nucleotide
  misc_feature (566)..(566): n comprises a, c, g, or t, or includes no nucleotide
  misc_feature (571)..(571): n comprises a, c, g, or t, or includes no nucleotide
  misc_feature (585)..(585): n comprises a, c, g, or t, or includes no nucleotide
  misc_feature (589)..(590): n comprises a, c, g, or t, or includes no nucleotide
  misc_feature (634)..(634): n comprises a, c, g, or t, or includes no nucleotide
  misc_feature (639)..(639): n comprises a, c, g, or t, or includes no nucleotide
  misc_feature (650)..(650): n comprises a, c, g, or t, or includes no nucleotide
  misc_feature (661)..(661): n comprises a, c, g, or t, or includes no nucleotide
  misc_feature (668)..(668): n comprises a, c, g, or t, or includes no nucleotide
  misc_feature (680)..(680): n comprises a, c, g, or t, or includes no nucleotide
gcatgccgncangttcgnctctagaggatctctctgttttagttccggttattgcgtgtgaatctacattaactgaaataaagaatcaaatttaaaatatataatannngagccaacaggtgtgtttccccactccttcctccaaaggcctgggctccatcttcctccgacccagngtggggactgggctttcaggccctgtgcttgttncagaaactagacagtttctgaaaagtgggttcccatgtttggagaatctgggaggcagaggctgctgctctgtcccccaaatgacatctgcaaaacttgcagactgttcgcagtgaatgagaaaactgccttctctcttcaaacaggtgcatctggaaaggggacattctcacagcctcttttgggaagatagcacatggaagcgtctttatattttcccaccttgttncccaaagggaacacattgggctccccatgggagtttcatggtncttcacatcctggccacctatgtgggaaagaaaagagggggaccagaaaggggggntcctgggtgnaagggagnaaagttcagncatgncccagttccctgtntggnnccctcattcatggtcccccattggttttcccaggggaaggggancattncccatgggaancattttccgtngagaaantggaagtttccnggggtt

SEQ ID NO: 3312 - DNA, 1063 bp, Canis familiaris
  misc_feature (161)..(161): n comprises a, c, g, or t, or includes no nucleotide
  misc_feature (386)..(386): n comprises a, c, g, or t, or includes no nucleotide
  misc_feature (391)..(391): n comprises a, c, g, or t, or includes no nucleotide
  misc_feature (403)..(403): n comprises a, c, g, or t, or includes no nucleotide
  misc_feature (411)..(411): n comprises a, c, g, or t, or includes no nucleotide
  misc_feature (439)..(439): n comprises a, c, g, or t, or includes no nucleotide
  misc_feature (452)..(452): n comprises a, c, g, or t, or includes no nucleotide
  misc_feature (457)..(457): n comprises a, c, g, or t, or includes no nucleotide
  misc_feature (465)..(468): n comprises a, c, g, or t, or includes no nucleotide
  misc_feature (476)..(476): n comprises a, c, g, or t, or includes no nucleotide
  misc_feature (520)..(520): n comprises a, c, g, or t, or includes no nucleotide
  misc_feature (532)..(532): n comprises a, c, g, or t, or includes no nucleotide
  misc_feature (560)..(560): n comprises a, c, g, or t, or includes no nucleotide
  misc_feature (562)..(562): n comprises a, c, g, or t, or includes no nucleotide
  misc_feature (1032)..(1032): n comprises a, c, g, or t, or includes no nucleotide
  misc_feature (1040)..(1040): n comprises a, c, g, or t, or includes no nucleotide
  misc_feature (1042)..(1042): n comprises a, c, g, or t, or includes no nucleotide
  misc_feature (1046)..(1046): n comprises a, c, g, or t, or includes no nucleotide
  misc_feature (1049)..(1049): n comprises a, c, g, or t, or includes no nucleotide
taaatgccgaaagataagaatagcaatattaaaaacagcctgtatcagggacactgttcacaatatgttgaaaacaaatctggagaaaaaaatacaaccctattcattctacttgagtgtacctaaccatgataagagaataatattaaaggccatggatntcaaatgacagagaacattcaagctagcacaatttggcataaggaaaagggtagtggcttttgatttaagagattctgattcaagtcttgactctgccattgattatctatattagtttgataaatatatgtaacttcttagaacctcagctgtatcatctgtaaaataaaaaaaacaatagtaattttgaatacatggactaccaactctattgtggattaaanaaatnaaggaaactttnccaccttnacctggatgtccatagggcacccctccngttcccttagttnccccnggaatttnnnncctatatnacgtaagttggccagatacggacctgagggcgccgttaataaantttagaaggtangggggaaggagtgtgtagcacaaggaangngtatttgttggtttttgtttaaggaaatgtaaaactgcacttagtttcaaaactttatgtttcccagtctctggtttgtattttaattttctttccaagggctatatgcataattaggattcctaaatgttcaggaataatttctaatggcaaagaaggaaaaatgttttagcagctataagaaaatgttagtgagtttaatacctagcaaatcccaccctccttttaactttctaacacttatggcacacataaaatcagcttgagaagtagaaaggtctcctccacataggttcccaaggagtttgaccttgatgctccactctcctgattaaatgtttgcactgaataatgaatcttccaagaatcaagctcctaaatggatgggacactaatactgcaccattttttcttcctgtgtggaccaccatgaatctcaaggtgactctttcagaatggaataatttatngttgctananattnacnggccaggtttggtc

SEQ ID NO: 3313 - DNA, 954 bp, Canis familiaris
  misc_feature (431)..(431): n comprises a, c, g, or t, or includes no nucleotide
  misc_feature (443)..(443): n comprises a, c, g, or t, or includes no nucleotide
  misc_feature (501)..(501): n comprises a, c, g, or t, or includes no nucleotide
  misc_feature (635)..(637): n comprises a, c, g, or t, or includes no nucleotide
  misc_feature (932)..(932): n comprises a, c, g, or t, or includes no nucleotide
  misc_feature (935)..(935): n comprises a, c, g, or t, or includes no nucleotide
  misc_feature (942)..(942): n comprises a, c, g, or t, or includes no nucleotide
gatcctcgcttaccttgctgttgtgcttttagcccctccccacttgcacttgattcgccatccagctaggctcctcccaattttctgattacagcagttcctcatgtcacaagtgactttgcctgttcttcctccttagaacgccgtcccccaccttcttacgttaccaaagttcttcatctttaaaagcccagcttgattttcatatctgcagagctgcctctcctgttctggtcagggtctcctggtccctctgaggtccaagacacacttggtccttgcttccaccacagcactttccttacaagcttttgttgatgctgctgaacacacctcactgtcccattagactttcccaggtctggagcagttggaataaatttcccacctggaattcttaaatatgtagttcttagccataacatgttaanggaaacaggatnacagtttagaaattcccaagcaaggaaattatggaaaaccactgtgsmaaaayttaancrggataatgggctggttaaagttttcaacacagtctgtaatcctaaaggcacggatgtagggtgacagttatctctgcaggtatataaagatggtaatagatgggtgtgttcaagtttctcaggggtcaaatnnnatacacaaagcatttcacaaggcattggcctaagcctaacttctattataggaaccccaacagatttgtcatgccccaaataatcctaagggcaaccattattaagtacacattacatgtcagtcacttgctaggtgctttacttgggtggtctcaacctgggaatccaagagtagtgcatgagttaggttttgctttgtagtaatatcctaacctcagcagtttacaacaacaaacatcttatttttctcactcatggcgctgtgggtcacctagggcaattctgtatcagggnccncctcagntctcctatgtgg

SEQ ID NO: 3314 - DNA, 475 bp, Canis familiaris
  misc_feature (39)..(39): n comprises a, c, g, or t, or includes no nucleotide
  misc_feature (46)..(47): n comprises a, c, g, or t, or includes no nucleotide
  misc_feature (108)..(108): n comprises a, c, g, or t, or includes no nucleotide
  misc_feature (199)..(199): n comprises a, c, g, or t, or includes no nucleotide
  misc_feature (461)..(461): n comprises a, c, g, or t, or includes no nucleotide
cctccctgcccatctcccttcacatcacaggccgcctgnacatctnnaacctccaggcctgctcctgtctctgcaagggtcagccacctgcagatatctgcagtgcanaccagttcccgacttcattccacacaaatgtgccccaggacagaagaggcctcctcccagtctttctaaggggcaaaagtcttcctttganttcgtctcgtacctagtgtcttctttgtacctaacaccaactgatagcaatttttattcctttgcctgtctcctttccaactccaggccaccctggtctcccagtgccagggagagttttgggcatacagcaggcatgcaaaggtgttaatggagagaaaaataaaattttaaatccctggaaaaacattctaaagaacaacggcttaacatggaaaagggcattyccattwaagggtaacacttataaaaaatttcagggncccttcaacccaat

SEQ ID NO: 3315 - DNA, 423 bp, Canis familiaris
  misc_feature (159)..(159): n comprises a, c, g, or t, or includes no nucleotide
  misc_feature (163)..(163): n comprises a, c, g, or t, or includes no nucleotide
  misc_feature (393)..(393): n comprises a, c, g, or t, or includes no nucleotide
  misc_feature (408)..(408): n comprises a, c, g, or t, or includes no nucleotide
  misc_feature (415)..(415): n comprises a, c, g, or t, or includes no nucleotide
  misc_feature (422)..(422): n comprises a, c, g, or t, or includes no nucleotide
agacagcagttaacgcactcatgacattcattctgtttccaggtcagcaggcatgtcccctatccctccctccaccagctggcccagctctaaccgtcacttgggactggcagcctctccttctgcactggtgggactgctgagggctggggctgggantganttatggctgcaagggccacagagcccaccgcagcaggaggcataggagccccgtggcttcacacacttaccccagggtcaggtgaggaacctccctccccaagtccacggaaggggcccccggacagggttgttgaccagtgcagacagtggaggagccacccaggccacgggaggaggactggtttctcagctatctgccccccacccaccaggttcctgcattcaccntctagcccaccattngggggcntgaggtna

SEQ ID NO: 3316 - DNA, 1046 bp, Canis familiaris
  misc_feature (75)..(75): n comprises a, c, g, or t, or includes no nucleotide
  misc_feature (213)..(213): n comprises a, c, g, or t, or includes no nucleotide
  misc_feature (223)..(223): n comprises a, c, g, or t, or includes no nucleotide
  misc_feature (226)..(227): n comprises a, c, g, or t, or includes no nucleotide
  misc_feature (443)..(443): n comprises a, c, g, or t, or includes no nucleotide
  misc_feature (477)..(477): n comprises a, c, g, or t, or includes no nucleotide
  misc_feature (506)..(506): n comprises a, c, g, or t, or includes no nucleotide
  misc_feature (519)..(519): n comprises a, c, g, or t, or includes no nucleotide
  misc_feature (533)..(533): n comprises a, c, g, or t, or includes no nucleotide
  misc_feature (542)..(542): n comprises a, c, g, or t, or includes no nucleotide
  misc_feature (547)..(547): n comprises a, c, g, or t, or includes no nucleotide
  misc_feature (558)..(558): n comprises a, c, g, or t, or includes no nucleotide
  misc_feature (562)..(562): n comprises a, c, g, or t, or includes no nucleotide
  misc_feature (702)..(702): n comprises a, c, g, or t, or includes no nucleotide
  misc_feature (745)..(745): n comprises a, c, g, or t, or includes no nucleotide
  misc_feature (749)..(749): n comprises a, c, g, or t, or includes no nucleotide
  misc_feature (815)..(815): n comprises a, c, g, or t, or includes no nucleotide
  misc_feature (964)..(964): n comprises a, c, g, or t, or includes no nucleotide
  misc_feature (1005)..(1005): n comprises a, c, g, or t, or includes no nucleotide
  misc_feature (1031)..(1032): n comprises a, c, g, or t, or includes no nucleotide
gcatgcctgcaggtcgactctagaggatcacgacctgagtcaaaatccaggtgcttaactgactgagccaccagngcgccctcaaaataaaaagacatttttactatgcttttcaccccacacatcctaggttctcagctctagtcgtttatcagtatcacccaggtattcttttgtttgaataacaacgttcttgtggggcctaagcgttanaacttttttntanncgtactaatatccgaacctctgggactggggctcatgcaatgtcatttttaaaagctccctaggtgatgctaataggcagccaaagttaagaagaactgtcatataaaaaagaaagttggagttgattataaggattttaggtttggaatacctgtctggcctcaaagagtggaataaatgtctcatcggaggaaaattttggactttggagattnaagggaatggaaaaaagaaagaaagtacaaaganggcaggaawatcytcmgagtgtgtgtgcntgtgtgtgtgwcngtgtgtgtgtgtgngtgtgtgtntctgnacctaggacmnttgnatawaacttagtgtttattaactaccttgggggctggaacatttttgctaatctgatgaaagctcggtctttaaaaaaatgtacatatatggaaatttcaggaacatcacacacttcctgacacccatgtcaaggacctntggtatagtcataaactttttaaactacttttataaataagcnggtnaaaaaaaaatcatctaaaagaaatgagagacctaagagggagtcttgattttgcccctaaagggtngtgtgaatctaaataaatcatctaagcttgctccctccagctttttcacaaagtgaaatttttatccacccatagaacaaggtgggtaatgtttttacaattttgtgaaacacaaaagatggaaagtcaatgaatatatgggaaagtantttgagaacttaagatttattattagggatgtgaagaattntcttaagtgggccggaattgatccgnngtgagccggcaaaa

SEQ ID NO: 3317 - DNA, 898 bp, Canis familiaris
  misc_feature (196)..(196): n comprises a, c, g, or t, or includes no nucleotide
  misc_feature (397)..(397): n comprises a, c, g, or t, or includes no nucleotide
  misc_feature (410)..(410): n comprises a, c, g, or t, or includes no nucleotide
  misc_feature (420)..(420): n comprises a, c, g, or t, or includes no nucleotide
  misc_feature (431)..(431): n comprises a, c, g, or t, or includes no nucleotide
  misc_feature (882)..(882): n comprises a, c, g, or t, or includes no nucleotide
  misc_feature (885)..(885): n comprises a, c, g, or t, or includes no nucleotide
  misc_feature (893)..(893): n comprises a, c, g, or t, or includes no nucleotide
ggacctgagtgaaatcaagagtctgaggcttaactgaccgagccacccaagcacctacctctcttatgatgaaaacttttaagatttgctttcttagcaactttcaaatacagtattattaactatagtcaccatgctgtatattacatccccaggatttatttgttttttttaagtagtagtttgtgccttttgnacaaccttcacccattttgcccaccctctgcttcccacgaattgacaaccatcaatgtgttctccatagctatgagttcagggagttttgtttgtttgcttttagacgccacatgttagtgaaatcatatggtatttgtcatctctttctgacttatttcacctggccataaacttcccccaaggtcccacccatgttgtncaacacatggatnaagcttttcnttctttttatnatatatggcaacacaacaacaacacaacacaacaacaacacccattttcctttaatctgttcatccatcagtggatacttgggttatttccatgtttggctattgtaaataatgctgcagtgaacatgggggtagagatacctttttgtgttagtgtttttatttcctttagataaatacccagaagtagaataggaacctccatagtgttttccatagtggctacaccaatttgcgtttccatcaataccacacaagagttccttttttccacatcctcgccaacatttctagtttcttatctttttggtaacagccattctagcagatgtgagatgatacctcattgtggttttgatttgcatttccctgatgatgagtgatggtgaacaccttttctatgtacctattggacatctatattttcttctttggcagggccttttctgtnatncttgcgangcaaa

SEQ ID NO: 3318 - DNA, 1095 bp, Canis familiaris
  misc_feature (1)..(1): n comprises a, c, g, or t, or includes no nucleotide
  misc_feature (5)..(5): n comprises a, c, g, or t, or includes no nucleotide
  misc_feature (26)..(27): n comprises a, c, g, or t, or includes no nucleotide
  misc_feature (32)..(32): n comprises a, c, g, or t, or includes no nucleotide
  misc_feature (35)..(35): n comprises a, c, g, or t, or includes no nucleotide
  misc_feature (38)..(38): n comprises a, c, g, or t, or includes no nucleotide
  misc_feature (49)..(49): n comprises a, c, g, or t, or includes no nucleotide
  misc_feature (52)..(52): n comprises a, c, g, or t, or includes no nucleotide
  misc_feature (58)..(58): n comprises a, c, g, or t, or includes no nucleotide
  misc_feature (90)..(90): n comprises a, c, g, or t, or includes no nucleotide
  misc_feature (99)..(99): n comprises a, c, g, or t, or includes no nucleotide
  misc_feature (113)..(113): n comprises a, c, g, or t, or includes no nucleotide
  misc_feature (136)..(136): n comprises a, c, g, or t, or includes no nucleotide
  misc_feature (170)..(170): n comprises a, c, g, or t, or includes no nucleotide
  misc_feature (187)..(187): n comprises a, c, g, or t, or includes no nucleotide
  misc_feature (203)..(203): n comprises a, c, g, or t, or includes no nucleotide
  misc_feature (212)..(212): n comprises a, c, g, or t, or includes no nucleotide
  misc_feature (217)..(217): n comprises a, c, g, or t, or includes no nucleotide
  misc_feature (222)..(222): n comprises a, c, g, or t, or includes no nucleotide
  misc_feature (247)..(247): n comprises a, c, g, or t, or includes no nucleotide
  misc_feature (374)..(374): n comprises a, c, g, or t, or includes no nucleotide
  misc_feature (387)..(387): n comprises a, c, g, or t, or includes no nucleotide
  misc_feature (392)..(392): n comprises a, c, g, or t, or includes no nucleotide
  misc_feature (435)..(435): n comprises a, c, g, or t, or includes no nucleotide
  misc_feature (444)..(444): n comprises a, c, g, or t, or includes no nucleotide
  misc_feature (455)..(455): n comprises a, c, g, or t, or includes no nucleotide
  misc_feature (460)..(460): n comprises a, c, g, or t, or includes no nucleotide
  misc_feature (480)..(480): n comprises a, c, g, or t, or includes no nucleotide
  misc_feature (482)..(482): n comprises a, c, g, or t, or includes no nucleotide
  misc_feature (497)..(497): n comprises a, c, g, or t, or includes no nucleotide
  misc_feature (558)..(558): n comprises a, c, g, or t, or includes no nucleotide
  misc_feature (564)..(564): n comprises a, c, g, or t, or includes no nucleotide
  misc_feature (870)..(870): n comprises a, c, g, or t, or includes no nucleotide
  misc_feature (908)..(908): n comprises a, c, g, or t, or includes no nucleotide
  misc_feature (932)..(932): n comprises a, c, g, or t, or includes no nucleotide
  misc_feature (951)..(952): n comprises a, c, g, or t, or includes no nucleotide
  misc_feature (960)..(960): n comprises a, c, g, or t, or includes no nucleotide
  misc_feature (975)..(975): n comprises a, c, g, or t, or includes no nucleotide
  misc_feature (995)..(995): n comprises a, c, g, or t, or includes no nucleotide
  misc_feature (1026)..(1026): n comprises a, c, g, or t, or includes no nucleotide
  misc_feature (1050)..(1050): n comprises a, c, g, or t, or includes no nucleotide
  misc_feature (1053)..(1054): n comprises a, c, g, or t, or includes no nucleotide
  misc_feature (1074)..(1077): n comprises a, c, g, or t, or includes no nucleotide
  misc_feature (1084)..(1084): n comprises a, c, g, or t, or includes no nucleotide
  misc_feature (1088)..(1088): n comprises a, c, g, or t, or includes no nucleotide
  misc_feature (1090)..(1090): n comprises a, c, g, or t, or includes no nucleotide
  misc_feature (1092)..(1092): n comprises a, c, g, or t, or includes no nucleotide
ngctncagtcgactctagaggatcanntcttncangangtgcagcatcnacncagaangaagagcttgctgtatccaaagaatttcctanaaattttanaattctaaccttgngtcatgttgctgactcagctgtnaaatgtgtagtgtttttccccaactcagctaatnactgtggaagaggaggnctgagattttgaccangaattcctncaganttttnttctcaacctcagggccttggaccnctgagaaatctgggaagtagtgaatggagacctccaacccacatcacacaagcatcaccatttgggctcttatttaaatccagtaaaatatgcagcatggataatgagctttgtatgtaaaacaccnacccacctctttnaaatnaaatgcattactattaaataaacaatccatatgttttaaaagnaccggaatnaaattatatcnttctncacatggtcttggtcagttncnaacacagggcagatnaaagctttcgatttcattttaaaaaatccatttcaaaggacmttagtggggtccacagaantctgtnccattggtggcttacgtaaaaggaccagttgcgccatataatggccaatgagattttttctgaagattaaagaagattctcaaatcaaaaaatggcagaagcacagagttcttattttatgagtaagtgcccaggggaaaatggcctccttgtgcttcaaagttcttcatcgctggaaagctgaaaagtagaaagaaaatagcctgtaaacgtgtgtgcacgtgcgtgtatatacatgtatatacacacacacacacacacacaaaatataccaacatcacacgtacatgtgatacccacctgtanacgcaggtgcatacgcatctaccacaggcatgtgcacntggatacatatgtgcacacatatncacacacgtcaagtggttnngcttctgnacgcaacacagatanaggaagtaaaggaatggcanacacctgggttttctgatgggatggaacttngagccggagctcagaaagctcgtntcnntcgggccacatgatttaccnnnngagccanaatnancnact

SEQ ID NO: 3319 - DNA, 834 bp, Canis familiaris
  misc_feature (26)..(26): n comprises a, c, g, or t, or includes no nucleotide
  misc_feature (247)..(247): n comprises a, c, g, or t, or includes no nucleotide
  misc_feature (423)..(423): n comprises a, c, g, or t, or includes no nucleotide
  misc_feature (454)..(454): n comprises a, c, g, or t, or includes no nucleotide
  misc_feature (470)..(470): n comprises a, c, g, or t, or includes no nucleotide
  misc_feature (506)..(506): n comprises a, c, g, or t, or includes no nucleotide
  misc_feature (808)..(808): n comprises a, c, g, or t, or includes no nucleotide
  misc_feature (821)..(821): n comprises a, c, g, or t, or includes no nucleotide
atgaacgtcgactctagaggatcttngcatagtttctaaactaagctagaatgctaaagctttggaataacaatgcagtcaaacaaaatgttcttgaatactaacattgatgtcaaggactttacaataatccctctattttattatgattttatcagaagaggaattagaaaaattgtaactatgtgacttaatccctaaaatgatcccaggaggggttttagcatagattggtatctccacttcnccaatgaaggaactgaggttcatagaggttagcataacctcccctagactgcggttgcgacaggcgtggaactcaggactttcaactacctcgrggcatcagttgattccccagttcacaattggctatgttcccagcaaactycacaaaaacttcccactttacatctctagasnaacacacacacacacacacacacacacacanacacacacacacacgncatccttcatccattaattcmtcttttaatgsmttncaacaagtgattatggratgctactctttgtcagattgctacgtaaattacatacatttggcaaataggaacttactcaattcctatcaccactatggaagatactgttaacatttttattttacttaagagaaaaccagaatcagagacctctgagcttctatcacagagctagaaatagctggtgaggttttcagataatgccctagaaatgtagactttttaagacataccccctttgtaaggaaattgtgtggattcaatgttgtttgaacttttcgtcattgcgttatattcccaangtggttccttggntcgggccttgtat

SEQ ID NO: 3320 - DNA, 598 bp, Canis familiaris
  misc_feature (13)..(13): n comprises a, c, g, or t, or includes no nucleotide
  misc_feature (232)..(232): n comprises a, c, g, or t, or includes no nucleotide
  misc_feature (257)..(257): n comprises a, c, g, or t, or includes no nucleotide
  misc_feature (405)..(405): n comprises a, c, g, or t, or includes no nucleotide
  misc_feature (432)..(432): n comprises a, c, g, or t, or includes no nucleotide
  misc_feature (440)..(440): n comprises a, c, g, or t, or includes no nucleotide
  misc_feature (445)..(445): n comprises a, c, g, or t, or includes no nucleotide
  misc_feature (476)..(476): n comprises a, c, g, or t, or includes no nucleotide
  misc_feature (495)..(495): n comprises a, c, g, or t, or includes no nucleotide
  misc_feature (549)..(549): n comprises a, c, g, or t, or includes no nucleotide
  misc_feature (569)..(569): n comprises a, c, g, or t, or includes no nucleotide
  misc_feature (585)..(585): n comprises a, c, g, or t, or includes no nucleotide
tgcttgcatgccnaccggtcgactctagaggatcttatagacaataaacatttgttcagcctgtattatcttattatttgttttatttttttttattatttgttttaaaattctgctaagacttccacttcttgcaaagattaagaacaaggaactcaattttgacctcccatctggggaaagaaaccaaacaaacaaccaagcaaacatcaaacaaaaatctccaaatttntttaatagggttcaaattttaaaanagaataaaagagattcaagtcacataatgtatattctatgataataatggaattacactggaagttgctaatacaaaaatccaaaaaaaatttagacatttggatgcaatataaaacatttataataaatcccacaagtttaaaaatnaaaaggggaattagggaggacttttangtggaatnaaaanggaggcttggacctcatttaaaaatattagncatataccccaggacgggnccaaagcagttcttggaggaaaaaaccagagctgggaggttttattttccagcnttatatcctgggttttaacntgggcggaattaattnatggtaaccggac

SEQ ID NO: 3321 - DNA, 600 bp, Canis familiaris
  misc_feature (5)..(5): n comprises a, c, g, or t, or includes no nucleotide
  misc_feature (35)..(35): n comprises a, c, g, or t, or includes no nucleotide
  misc_feature (161)..(161): n comprises a, c, g, or t, or includes no nucleotide
  misc_feature (179)..(179): n comprises a, c, g, or t, or includes no nucleotide
  misc_feature (218)..(218): n comprises a, c, g, or t, or includes no nucleotide
  misc_feature (369)..(370): n comprises a, c, g, or t, or includes no nucleotide
  misc_feature (423)..(423): n comprises a, c, g, or t, or includes no nucleotide
  misc_feature (463)..(463): n comprises a, c, g, or t, or includes no nucleotide
  misc_feature (472)..(472): n comprises a, c, g, or t, or includes no nucleotide
  misc_feature (510)..(510): n comprises a, c, g, or t, or includes no nucleotide
  misc_feature (517)..(517): n comprises a, c, g, or t, or includes no nucleotide
  misc_feature (543)..(543): n comprises a, c, g, or t, or includes no nucleotide
  misc_feature (550)..(550): n comprises a, c, g, or t, or includes no nucleotide
  misc_feature (554)..(554): n comprises a, c, g, or t, or includes no nucleotide
  misc_feature (569)..(569): n comprises a, c, g, or t, or includes no nucleotide
  misc_feature (586)..(586): n comprises a, c, g, or t, or includes no nucleotide
  misc_feature (588)..(588): n comprises a, c, g, or t, or includes no nucleotide
  misc_feature (593)..(593): n comprises a, c, g, or t, or includes no nucleotide
ctgcngtgcgactctagaggatcacagctcatgantctgcatgagtccgaccccttagttactccttccttcctaagatttctaccaggctatgaatcatggaggtgcacagcttgttaaaaggtccctctgtccaggcccctgcctttagccagccttgnccaaccaccaattaggtntccatttgtgcagatgtccagaaatgtccttaccctttngacatgcaccaaagataggtcttgcggtcctattttagaagccccccaccagggaagggcccactccaggagggtgcccaatttcactgccacctctcaggtctacttcttttccagttctttctatctctagctcactgttccacctgcnnccctggattccactccatttgtttcggacaaatatcccactaaactaactctncactttggccagggcaacaatggtaacaatgttcaacagnaacgatggntcctagagagaggggaaacagcatagcagtttaaaaanttggaanggggtttccgatggccaattccctcnggcgtancagngtgtggacccggggnggtttaacttaaacacntnggggnctccctt

SEQ ID NO: 3322 - DNA, 591 bp, Canis familiaris
  misc_feature (9)..(9): n comprises a, c, g, or t, or includes no nucleotide
  misc_feature (12)..(12): n comprises a, c, g, or t, or includes no nucleotide
  misc_feature (14)..(14): n comprises a, c, g, or t, or includes no nucleotide
  misc_feature (25)..(25): n comprises a, c, g, or t, or includes no nucleotide
  misc_feature (28)..(28): n comprises a, c, g, or t, or includes no nucleotide
  misc_feature (58)..(58): n comprises a, c, g, or t, or includes no nucleotide
  misc_feature (73)..(73): n comprises a, c, g, or t, or includes no nucleotide
  misc_feature (76)..(76): n comprises a, c, g, or t, or includes no nucleotide
  misc_feature (81)..(81): n comprises a, c, g, or t, or includes no nucleotide
  misc_feature (96)..(96): n comprises a, c, g, or t, or includes no nucleotide
  misc_feature (115)..(115): n comprises a, c, g, or t, or includes no nucleotide
  misc_feature (132)..(132): n comprises a, c, g, or t, or includes no nucleotide
  misc_feature (135)..(135): n comprises a, c, g, or t, or includes no nucleotide
  misc_feature (146)..(146): n comprises a, c, g, or t, or includes no nucleotide
  misc_feature (154)..(154): n comprises a, c, g, or t, or includes no nucleotide
  misc_feature (183)..(183): n comprises a, c, g, or t, or includes no nucleotide
  misc_feature (188)..(188): n comprises a, c, g, or t, or includes no nucleotide
  misc_feature (213)..(213): n comprises a, c, g, or t, or includes no nucleotide
  misc_feature (220)..(220): n comprises a, c, g, or t, or includes no nucleotide
  misc_feature (288)..(288): n comprises a, c, g, or t, or includes no nucleotide
  misc_feature (299)..(299): n comprises a, c, g, or t, or includes no nucleotide
  misc_feature (326)..(326): n comprises a, c, g, or t, or includes no nucleotide
  misc_feature (351)..(351): n comprises a, c, g, or t, or includes no nucleotide
  misc_feature (394)..(395): n comprises a, c, g, or t, or includes no nucleotide
  misc_feature (414)..(414): n comprises a, c, g, or t, or includes no nucleotide
  misc_feature (547)..(547): n comprises a, c, g, or t, or includes no nucleotide
  misc_feature (580)..(580): n comprises a, c, g, or t, or includes no nucleotide
  misc_feature (582)..(582): n comprises a, c, g, or t, or includes no nucleotide
tccactaantantntcactttgccnggncacaatgtacaatgtctacagagcggatgntcttagagagagggnganagcanagcagttaaaacttntgaactgggttctgatgcnaattctttctgcgtacnagntgtgtgacccngggctgtntacttaacaacatatgggcctctctttcngcatntgcaaagtgatgatactgatagacntccaganagttgtgggagcatcacgggagctgtcttagagggctttgggaggcttaaaagtaacgtggctggganaggacctaganagccaggcagttccagtctcttgaganttggccttttaacagacggacacangcacacatatgtgacccaccgcacagagtgacgacattaaacnnagtagagtatgcccggganaactttgcgtccatcacacacacacacacacacacacacacacacacacagcaggggaagaaagtacaaagaggaaaagcaggtgggtgagggcacaaaggaagcttgcctgcatgagctcctactcgaggcngtggtccatttgatggggccgcacaggtccgcngngagccggca

SEQ ID NO: 3323 - DNA, 697 bp, Canis familiaris
  misc_feature (13)..(13): n comprises a, c, g, or t, or includes no nucleotide
  misc_feature (24)..(24): n comprises a, c, g, or t, or includes no nucleotide
  misc_feature (146)..(146): n comprises a, c, g, or t, or includes no nucleotide
  misc_feature (154)..(155): n comprises a, c, g, or t, or includes no nucleotide
  misc_feature (171)..(171): n comprises a, c, g, or t, or includes no nucleotide
  misc_feature (190)..(190): n comprises a, c, g, or t, or includes no nucleotide
  misc_feature (196)..(196): n comprises a, c, g, or t, or includes no nucleotide
  misc_feature (204)..(204): n comprises a, c, g, or t, or includes no nucleotide
  misc_feature (215)..(215): n comprises a, c, g, or t, or includes no nucleotide
  misc_feature (218)..(218): n comprises a, c, g, or t, or includes no nucleotide
  misc_feature (225)..(225): n comprises a, c, g, or t, or includes no nucleotide
  misc_feature (229)..(229): n comprises a, c, g, or t, or includes no nucleotide
  misc_feature (232)..(232): n comprises a, c, g, or t, or includes no nucleotide
  misc_feature (237)..(237): n comprises a, c, g, or t, or includes no nucleotide
  misc_feature (254)..(254): n comprises a, c, g, or t, or includes no nucleotide
  misc_feature (257)..(257): n comprises a, c, g, or t, or includes no nucleotide
  misc_feature (260)..(260): n comprises a, c, g, or t, or includes no nucleotide
  misc_feature (263)..(263): n comprises a, c, g, or t, or includes no nucleotide
  misc_feature (274)..(274): n comprises a, c, g, or t, or includes no nucleotide
  misc_feature (291)..(291): n comprises a, c, g, or t, or includes no nucleotide
  misc_feature (318)..(318): n comprises a, c, g, or t, or includes no nucleotide
  misc_feature (327)..(327): n comprises a, c, g, or t, or includes no nucleotide
  misc_feature (349)..(349): n comprises a, c, g, or t, or includes no nucleotide
  misc_feature (355)..(355): n comprises a, c, g, or t, or includes no nucleotide
  misc_feature (362)..(362): n comprises a, c, g, or t, or includes no nucleotide
  misc_feature (383)..(383): n comprises a, c, g, or t, or includes no nucleotide
  misc_feature (387)..(387): n comprises a, c, g, or t, or includes no nucleotide
  misc_feature (391)..(391): n comprises a, c, g, or t, or includes no nucleotide
  misc_feature (395)..(395): n comprises a, c, g, or t, or includes no nucleotide
  misc_feature (408)..(410): n comprises a, c, g, or t, or includes no nucleotide
  misc_feature (413)..(413): n comprises a, c, g, or t, or includes no nucleotide
  misc_feature (428)..(429): n comprises a, c, g, or t, or includes no nucleotide
  misc_feature (436)..(436): n comprises a, c, g, or t, or includes no nucleotide
  misc_feature (439)..(439): n comprises a, c, g, or t, or includes no nucleotide
  misc_feature (445)..(446): n comprises a, c, g, or t, or includes no nucleotide
  misc_feature (454)..(454): n comprises a, c, g, or t, or includes no nucleotide
  misc_feature (460)..(460): n comprises a, c, g, or t, or includes no nucleotide
  misc_feature (464)..(464): n comprises a, c, g, or t, or includes no nucleotide
  misc_feature (471)..(471): n comprises a, c, g, or t, or includes no nucleotide
  misc_feature (482)..(482): n comprises a, c, g, or t, or includes no nucleotide
  misc_feature (485)..(486): n comprises a, c, g, or t, or includes no nucleotide
  misc_feature (493)..(496): n comprises a, c, g, or t, or includes no nucleotide
  misc_feature (500)..(500): n comprises a, c, g, or t, or includes no nucleotide
  misc_feature (504)..(505): n comprises a, c, g, or t, or includes no nucleotide
  misc_feature (512)..(513): n comprises a, c, g, or t, or includes no nucleotide
  misc_feature (518)..(518): n comprises a, c, g, or t, or includes no nucleotide
  misc_feature (521)..(522): n comprises a, c, g, or t, or includes no nucleotide
  misc_feature (532)..(532): n comprises a, c, g, or t, or includes no nucleotide
  misc_feature (534)..(534): n comprises a, c, g, or t, or includes no nucleotide
  misc_feature (541)..(541): n comprises a, c, g, or t, or includes no nucleotide
  misc_feature (545)..(545): n comprises a, c, g, or t, or includes no nucleotide
  misc_feature (556)..(556): n comprises a, c, g, or t, or includes no nucleotide
  misc_feature (561)..(561): n comprises a, c, g, or t, or includes no nucleotide
  misc_feature (566)..(572): n comprises a, c, g, or t, or includes no nucleotide
  misc_feature (603)..(603): n comprises a, c, g, or t, or includes no nucleotide
  misc_feature (660)..(660): n comprises a, c, g, or t, or includes no nucleotide
  misc_feature (664)..(664): n comprises a, c, g, or t, or includes no nucleotide
  misc_feature (668)..(668): n comprises a, c, g, or t, or includes no nucleotide
  misc_feature (672)..(672): n comprises a, c, g, or t, or includes no nucleotide
  misc_feature (680)..(680): n comprises a, c, g, or t, or includes no nucleotide
  misc_feature (684)..(685): n comprises a, c, g, or t, or includes no nucleotide
  misc_feature (690)..(690): n comprises a, c, g, or t, or includes no nucleotide
  misc_feature (693)..(693): n comprises a, c, g, or t, or includes no nucleotide
aaaaatcagttangtttctatacnctaacaatgaactatgtgaaagaggaattaagaaaacagtcccatatacaagcatccaaaacaataaaatgcttaggaataaatttaaggaaatgaaaaatctggcacactggaaagctgtnaagactgnnaaggaggacacaaatnaaatgggaaagatcttctnacactncactaatnaagaaaaattnaanattgttnaaangtnccgtnactaccaaaagctatcncanagnttncacggcagttncccacaaaacttcccanggatacttttcacagaattggaaggtnactgcggtncccacacaaaatccactgatanttttcncagagantgaggagagagtcccaaaacntgtntggngtcncacaaagaccccnnnatngccacagcaatcttnngtaagangancacagnnggagcgcnacacancccngcacacnatgtgagcagngtnntagttcnnnnaccncccnnagtgtgnntggancannatagagagcncngagatanatanataactgcgtnttcantcgannnnnnncatgcacgcactgtattccagggaatacatnacccttcaagttgcacgtgcctataaaaatttttctctgggagttgaattccagctntggnccgngccntaaaggtntatnncttgnganggca

SEQ ID NO: 3324 - DNA, 939 bp, Canis familiaris
  misc_feature (16)..(16): n comprises a, c, g, or t, or includes no nucleotide
  misc_feature (26)..(26): n comprises a, c, g, or t, or includes no nucleotide
  misc_feature (39)..(39): n comprises a, c, g, or t, or includes no nucleotide
  misc_feature (48)..(48): n comprises a, c, g, or t, or includes no nucleotide
  misc_feature (51)..(51): n comprises a, c, g, or t, or includes no nucleotide
  misc_feature (62)..(62): n comprises a, c, g, or t, or includes no nucleotide
  misc_feature (81)..(81): n comprises a, c, g, or t, or includes no nucleotide
  misc_feature (85)..(86): n comprises a, c, g, or t, or includes no nucleotide
  misc_feature (88)..(90): n comprises a, c, g, or t, or includes no nucleotide
  misc_feature (94)..(94): n comprises a, c, g, or t, or includes no nucleotide
  misc_feature (96)..(96): n comprises a, c, g, or t, or includes no nucleotide
  misc_feature (107)..(107): n comprises a, c, g, or t, or includes no nucleotide
  misc_feature (118)..(118): n comprises a, c, g, or t, or includes no nucleotide
  misc_feature (121)..(121): n comprises a, c, g, or t, or includes no nucleotide
  misc_feature (125)..(125): n comprises a, c, g, or t, or includes no nucleotide
  misc_feature (141)..(141): n comprises a, c, g, or t, or includes no nucleotide
  misc_feature (147)..(148): n comprises a, c, g, or t, or includes no nucleotide
  misc_feature (159)..(160): n comprises a, c, g, or t, or includes no nucleotide
  misc_feature (164)..(164): n comprises a, c, g, or t, or includes no nucleotide
  misc_feature (178)..(178): n comprises a, c, g, or t, or includes no nucleotide
  misc_feature (182)..(183): n comprises a, c, g, or t, or includes no nucleotide
  misc_feature (197)..(197): n comprises a, c, g, or t, or includes no nucleotide
  misc_feature (200)..(200): n comprises a, c, g, or t, or includes no nucleotide
  misc_feature (216)..(216): n comprises a, c, g, or t, or includes no nucleotide
  misc_feature (282)..(282): n comprises a, c, g, or t, or includes no nucleotide
  misc_feature (314)..(314): n comprises a, c, g, or t, or includes no nucleotide
  misc_feature (326)..(326): n comprises a, c, g, or t, or includes no nucleotide
  misc_feature (347)..(347): n comprises a, c, g, or t, or includes no nucleotide
  misc_feature (409)..(409): n comprises a, c, g, or t, or includes no nucleotide
  misc_feature (473)..(477): n comprises a, c, g, or t, or includes no nucleotide
  misc_feature (557)..(557): n comprises a, c, g, or t, or includes no nucleotide
  misc_feature (652)..(653): n comprises a, c, g, or t, or includes no nucleotide
  misc_feature (677)..(677): n comprises a, c, g, or t, or includes no nucleotide
  misc_feature (688)..(688): n comprises a, c, g, or t, or includes no nucleotide
  misc_feature (695)..(695): n comprises a, c, g, or t, or includes no nucleotide
  misc_feature (707)..(707): n comprises a, c, g, or t, or includes no nucleotide
  misc_feature (730)..(730): n comprises a, c, g, or t, or includes no nucleotide
  misc_feature (747)..(748): n comprises a, c, g, or t, or includes no nucleotide
  misc_feature (799)..(799): n comprises a, c, g, or t, or includes no nucleotide
  misc_feature (833)..(833): n comprises a, c, g, or t, or includes no nucleotide
  misc_feature (858)..(861): n comprises a, c, g, or t, or includes no nucleotide
  misc_feature (912)..(912): n comprises a, c, g, or t, or includes no nucleotide
  misc_feature (928)..(928): n comprises a, c, g, or t, or includes no nucleotide
cactcatcaattattnaacatacatnccttaagacctcngaactaaanttnaaagaaactanttctaactgaatgatgatnattnntnnngttngnagaaaagaaangattttccccnagnaaantcaagtttccttcgantggctnntccgcaatcanngctnagttgcggcctgantccnnaaagcttgcgtccntcnattctggaattatccnagaggaagagactccaacattcacacaaaagcatgttaagtgaattattccaaaaatgtgtatatnatggtcctttttagtagaaatgctgattctancattgctttatncatttttaccaaattttttgnacatagagaaggccagttattctttcatttagttaagaaattgagacagagaattaaaatanatggaatgagattaggtatcagtgtaataccatattatttatgccatggtattagtagagtccnnnnntcttttcttttggaaacaacatatgggatactgaagagagggagggtaagaaaactaatttttctggtgagatattagtnactatgttaagcaatttaaatgaatttaaattaaatatgattatttagaaaaagatgcttaataacataaaaaagattactataacattttgtgnnaaagtactatgcaatctctaacanataaaatacanaatacanagaagaaagccntatatattatataaaaaaatcanatttattataaagcccnnaatctatacaatgtgaaccccgcccaataatctagactcattacttaaccnttacttttccttgcttccctagtctgcaaagcangcatagcgtgcacatgcgtgcgcgnnnntataacgaatgaggtcacattaagtgcatttcatttgctttgctcactgtntctgctctttgcagtngggccccaggc

SEQ ID NO: 3325 - DNA, 600 bp, Canis familiaris
  misc_feature (5)..(5): n comprises a, c, g, or t, or includes no nucleotide
  misc_feature (7)..(7): n comprises a, c, g, or t, or includes no nucleotide
  misc_feature (12)..(12): n comprises a, c, g, or t, or includes no nucleotide
  misc_feature (14)..(14): n comprises a, c, g, or t, or includes no nucleotide
  misc_feature (223)..(223): n comprises a, c, g, or t, or includes no nucleotide
  misc_feature (421)..(421): n comprises a, c, g, or t, or includes no nucleotide
  misc_feature (434)..(434): n comprises a, c, g, or t, or includes no nucleotide
  misc_feature (490)..(490): n comprises a, c, g, or t, or includes no nucleotide
  misc_feature (544)..(544): n comprises a, c, g, or t, or includes no nucleotide
  misc_feature (557)..(557): n comprises a, c, g, or t, or includes no nucleotide
  misc_feature (585)..(585): n comprises a, c, g, or t, or includes no nucleotide
ccagntncacgncnactctagaggatctaaaaatgtcctcttgttgtccttcactgtccaggggacttgagtcaggcctaaaacccagggcagaatgaaagccctttcttgtgtgaatctcttttttgagcacaatagatgcaagcctagaatgggccttggttatgtcagcaatatcggcaaaaaagagcccattagttctaagagaaatcaacctctttcncaaggctaaagttatcttccgtctcagattcttgtacctgggtgtctggatggacacacacacacacacacacacactcttaaaaagaaaggataaagaggacgagaatgggtttggaggtccaggttagcccgtgagtggtcacagtattatccacgcaggaggcagctcgcttgtggactatgggcaacttcgatncccgaggggaganagtgtggaaatcagaaagggaatatttaattcaggttcgaggggaggggaagatgnctaaaagggaagggattgggagttggccagggggttcccagaacggtgggggtnaaggctgggctcngggtggcaacttggggggcatagcggtnctggcatttcagctg

SEQ ID NO: 3326 - DNA, 500 bp, Canis familiaris
  misc_feature (2)..(2): n comprises a, c, g, or t, or includes no nucleotide
  misc_feature (7)..(7): n comprises a, c, g, or t, or includes no nucleotide
  misc_feature (23)..(23): n comprises a, c, g, or t, or includes no nucleotide
  misc_feature (26)..(26): n comprises a, c, g, or t, or includes no nucleotide
  misc_feature (63)..(63): n comprises a, c, g, or t, or includes no nucleotide
  misc_feature (79)..(79): n comprises a, c, g, or t, or includes no nucleotide
  misc_feature (104)..(104): n comprises a, c, g, or t, or includes no nucleotide
  misc_feature (136)..(136): n comprises a, c, g, or t, or includes no nucleotide
  misc_feature (158)..(158): n comprises a, c, g, or t, or includes no nucleotide
  misc_feature (161)..(161): n comprises a, c, g, or t, or includes no nucleotide
  misc_feature (175)..(175): n comprises a, c, g, or t, or includes no nucleotide
  misc_feature (195)..(195): n comprises a, c, g, or t, or includes no nucleotide
  misc_feature (202)..(202): n comprises a, c, g, or t, or includes no nucleotide
  misc_feature (215)..(215): n comprises a, c, g, or t, or includes no nucleotide
  misc_feature (220)..(220): n comprises a, c, g, or t, or includes no nucleotide
  misc_feature (243)..(243): n comprises a, c, g, or t, or includes no nucleotide
  misc_feature (246)..(247): n comprises a, c, g, or t, or includes no nucleotide
  misc_feature (276)..(276): n comprises a, c, g, or t, or includes no nucleotide
  misc_feature (279)..(279): n comprises a, c, g, or t, or includes no nucleotide
  misc_feature (286)..(286): n comprises a, c, g, or t, or includes no nucleotide
  misc_feature (288)..(288): n comprises a, c, g, or t, or includes no nucleotide
  misc_feature (291)..(291): n comprises a, c, g, or t, or includes no nucleotide
  misc_feature (315)..(315): n comprises a, c, g, or t, or includes no nucleotide
  misc_feature (342)..(342): n comprises a, c, g, or t, or includes no nucleotide
  misc_feature (411)..(411): n comprises a, c, g, or t, or includes no nucleotide
  misc_feature (449)..(449): n comprises a, c, g, or t, or includes no nucleotide
  misc_feature (457)..(457): n comprises a, c, g, or t, or includes no nucleotide
  misc_feature (464)..(464): n comprises a, c, g, or t, or includes no nucleotide
  misc_feature (477)..(477): n comprises a, c, g, or t, or includes no nucleotide
  misc_feature (490)..(490): n comprises a, c, g, or t, or includes no nucleotide
  misc_feature (498)..(498): n comprises a, c, g, or t, or includes no nucleotide
cnttgantggttcaacaagtaanatnacgccaggagaagctgcttgtgactatggcaaccttncgatccgagggagtanttgtgaaatagaaggaatattaatnaggtcgaggggagggaagatgctaaacgatgngaatgggagtggctagaggctncantcggtggggtaagnctggctcctgtgcacgttgnggcatancggtcactgcatntacanctgtctcttgttcttcctggggnccnncttttctgctggatgccatcccaggttcnctnggacagncnccntcagaatgggggctacagacaaanatgaggcgagaaggtgcaatcattatncgccgccggcctctttgcttttaggaataacctgtctgaaatgtaccatctttgtcactttgtgctctnactcaggcatctctcactcagaagggtgaaaaccaatncctttgtnctcacgnggagctcgtgtgnacgtgctgccaanagtgagcnct

SEQ ID NO: 3327 - DNA, 818 bp, Canis familiaris
  misc_feature (28)..(28): n comprises a, c, g, or t, or includes no nucleotide
  misc_feature (40)..(40): n comprises a, c, g, or t, or includes no nucleotide
  misc_feature (57)..(57): n comprises a, c, g, or t, or includes no nucleotide
  misc_feature (64)..(64): n comprises a, c, g, or t, or includes no nucleotide
  misc_feature (73)..(73): n comprises a, c, g, or t, or includes no nucleotide
  misc_feature (81)..(81): n comprises a, c, g, or t, or includes no nucleotide
  misc_feature (84)..(84): n comprises a, c, g, or t, or includes no nucleotide
  misc_feature (95)..(95): n comprises a, c, g, or t, or includes no nucleotide
  misc_feature (130)..(130): n comprises a, c, g, or t, or includes no nucleotide
  misc_feature (138)..(138): n comprises a, c, g, or t, or includes no nucleotide
  misc_feature (145)..(145): n comprises a, c, g, or t, or includes no nucleotide
  misc_feature (149)..(149): n comprises a, c, g, or t, or includes no nucleotide
  misc_feature (176)..(176): n comprises a, c, g, or t, or includes no nucleotide
  misc_feature (179)..(179): n comprises a, c, g, or t, or includes no nucleotide
  misc_feature (183)..(185): n comprises a, c, g, or t, or includes no nucleotide
  misc_feature (192)..(192): n comprises a, c, g, or t, or includes no nucleotide
  misc_feature (194)..(194): n comprises a, c, g, or t, or includes no nucleotide
  misc_feature (217)..(218): n comprises a, c, g, or t, or includes no nucleotide
  misc_feature (220)..(222): n comprises a, c, g, or t, or includes no nucleotide
  misc_feature (224)..(224): n comprises a, c, g, or t, or includes no nucleotide
  misc_feature (237)..(237): n comprises a, c, g, or t, or includes no nucleotide
  misc_feature (248)..(248): n comprises a, c, g, or t, or includes no nucleotide
  misc_feature (260)..(260): n comprises a, c, g, or t, or includes no nucleotide
  misc_feature (315)..(315): n comprises a, c, g, or t, or includes no nucleotide
  misc_feature (330)..(330): n comprises a, c, g, or t, or includes no nucleotide
  misc_feature (400)..(400): n comprises a, c, g, or t, or includes no nucleotide
  misc_feature (435)..(435): n comprises a, c, g, or t, or includes no nucleotide
  misc_feature (470)..(470): n comprises a, c, g, or t, or includes no nucleotide
  misc_feature (480)..(480): n comprises a, c, g, or t, or includes no nucleotide
  misc_feature (545)..(545): n comprises a, c, g, or t, or includes no nucleotide
  misc_feature (581)..(583): n comprises a, c, g, or t, or includes no nucleotide
  misc_feature (598)..(601): n comprises a, c, g, or t, or includes no nucleotide
gatcatggccccagagtcctggtgtcgnaccaggcgtctngctccttagatggtagngcatctntcacttccnctaccccnccnccttcattatnttctctctcccagactcactcaaacaagtaaatantctctagnaagcagntaangacagatgtagtgcaacccgagttcgnctngcannnataggangncatttgcagaatacgtctttcanngnnntnctcgcatccaganaatacgtgctncatagacacgcncggaatgaaacatgtgattagaacttkggyarcackgatgtacaatactatactnacttkttctgraaangtgccytttaaagtgtggramgctgggatcttaggaggmcacakgaaactcaaccttgttggscagtganacgtcmagccaatgtagtcttcctcmaaaattgcnatttcytkaargtttwaaaagtttaggatttygrnggccyrcacntacgggwwaataattgcccctcttacgggaggtccctaacatccattaacgcacaacttcatctnttgtgaatcattgtgacattatgataataaagaaannnctacgtgtgtgtttnnnncagaccacatacaaatggcagctgtgagaacactcttctgaactccgtcctttctaaattcaagatacatgttgcaaagtcgcctcatgtgaaggtccaatatgaatttggacgtgtgtacacatacaaaggaatggagacagaagctctcgtcatagaccaatgaggaaaagaagagtaaatgggttggccagatcctctagagtcgacgtggcgc

SEQ ID NO: 3328 - DNA, 566 bp, Canis familiaris
  misc_feature (141)..(142): n comprises a, c, g, or t, or includes no nucleotide
  misc_feature (194)..(194): n comprises a, c, g, or t, or includes no nucleotide
  misc_feature (196)..(197): n comprises a, c, g, or t, or includes no nucleotide
  misc_feature (358)..(358): n comprises a, c, g, or t, or includes no nucleotide
  misc_feature (379)..(379): n comprises a, c, g, or t, or includes no nucleotide
  misc_feature (404)..(404): n comprises a, c, g, or t, or includes no nucleotide
  misc_feature (423)..(423): n comprises a, c, g, or t, or includes no nucleotide
  misc_feature (448)..(448): n comprises a, c, g, or t, or includes no nucleotide
  misc_feature (469)..(469): n comprises a, c, g, or t, or includes no nucleotide
  misc_feature (471)..(473): n comprises a, c, g, or t, or includes no nucleotide
  misc_feature (476)..(476): n comprises a, c, g, or t, or includes no nucleotide
  misc_feature (484)..(484): n comprises a, c, g, or t, or includes no nucleotide
  misc_feature (486)..(486): n comprises a, c, g, or t, or includes no nucleotide
  misc_feature (489)..(489): n comprises a, c, g, or t, or includes no nucleotide
  misc_feature (495)..(495): n comprises a, c, g, or t, or includes no nucleotide
  misc_feature (499)..(499): n comprises a, c, g, or t, or includes no nucleotide
  misc_feature (508)..(509): n comprises a, c, g, or t, or includes no nucleotide
  misc_feature (518)..(518): n comprises a, c, g, or t, or includes no nucleotide
  misc_feature (521)..(522): n comprises a, c, g, or t, or includes no nucleotide
  misc_feature (542)..(542): n comprises a, c, g, or t, or includes no nucleotide
  misc_feature (545)..(545): n comprises a, c, g, or t, or includes no nucleotide
  misc_feature (551)..(551): n comprises a, c, g, or t, or includes no nucleotide
  misc_feature (555)..(555): n comprises a, c, g, or t, or includes no nucleotide
  misc_feature (560)..(560): n comprises a, c, g, or t, or includes no nucleotide
atagaagctctgcttgtgaaattatagtctacctcagcttgtaaaccctcgccccgacaccattcatgtcatttctcggtacacaaagcaagagacgagagttccccaggacctgtcataaaattctcagcaagaatgacnngtcagtgttttaatgtgccaaacaagtctaataaatgcacttaaagtaccantnnaagggaatgggggtgggggggtaacattaaagtccccgtggcagtctggatgctgaatcatacaaagaggggagggggggatgggagacaaacgaagagattcagaaatgtggaatggctctcaatggtgtcattcacagagttccctggagcaggagctnggttctttcatccaatggatnacggtttcccacacttcagtggggncagggagggagaattcagnccacagagctggaagaaagggctgncagagaattaagggccggggncnnngtngaccccantnctnaacggngggncccagttannagccccagntannagccgtgtcaggggtttcanacnttctgntggnctttncaggga

SEQ ID NO: 3329 - DNA, 470 bp, Canis familiaris
  misc_feature (8)..(9): n comprises a, c, g, or t, or includes no nucleotide
  misc_feature (11)..(11): n comprises a, c, g, or t, or includes no nucleotide
  misc_feature (13)..(13): n comprises a, c, g, or t, or includes no nucleotide
  misc_feature (15)..(15): n comprises a, c, g, or t, or includes no nucleotide
  misc_feature (21)..(22): n comprises a, c, g, or t, or includes no nucleotide
  misc_feature (24)..(24): n comprises a, c, g, or t, or includes no nucleotide
  misc_feature (29)..(29): n comprises a, c, g, or t, or includes no nucleotide
  misc_feature (31)..(32): n comprises a, c, g, or t, or includes no nucleotide
  misc_feature (41)..(41): n comprises a, c, g, or t, or includes no nucleotide
  misc_feature (44)..(45): n comprises a, c, g, or t, or includes no nucleotide
  misc_feature (158)..(158): n comprises a, c, g, or t, or includes no nucleotide
  misc_feature (165)..(165): n comprises a, c, g, or t, or includes no nucleotide
  misc_feature (198)..(198): n comprises a, c, g, or t, or includes no nucleotide
  misc_feature (241)..(243): n comprises a, c, g, or t, or includes no nucleotide
  misc_feature (287)..(287): n comprises a, c, g, or t, or includes no nucleotide
  misc_feature (396)..(396): n comprises a, c, g, or t, or includes no nucleotide
  misc_feature (430)..(430): n comprises a, c, g, or t, or includes no nucleotide
ttttttcnntntngngctctnngncatcntnnatgagcccnatnnccgtcctttggagaagcatgtttagaatctaaaatacttcatgttgacccaatattaaaactgcaatttgtgtgtgtgtgtgtgtgtgtgtgtgtgtgtgtatgtgttttaantcctgtntgaagacttctatacaaaactgtgagcccgaanaaaagcagtggatgtcatggtgatagaagagaaaacaaagtannngtgcttgggaagcaccattatttttaataaagagttctatttanggatacctaattgctggtgtgttttgcccacaataatgtagacaccttttacggatggggtttactcctgctggcttgtattgagtggactgatccttgaaggggccancagaatgtgtgaagccccttgacacggcttgtanctgggctgtagctgggccccccgttaaattggggggcccc

SEQ ID NO: 3330 - DNA, 699 bp, Canis familiaris
  misc_feature (23)..(23): n comprises a, c, g, or t, or includes no nucleotide
  misc_feature (37)..(37): n comprises a, c, g, or t, or includes no nucleotide
  misc_feature (100)..(100): n comprises a, c, g, or t, or includes no nucleotide
  misc_feature (202)..(202): n comprises a, c, g, or t, or includes no nucleotide
  misc_feature (204)..(207): n comprises a, c, g, or t, or includes no nucleotide
  misc_feature (222)..(222): n comprises a, c, g, or t, or includes no nucleotide
  misc_feature (232)..(235): n comprises a, c, g, or t, or includes no nucleotide
  misc_feature (435)..(435): n comprises a, c, g, or t, or includes no nucleotide
  misc_feature (513)..(513): n comprises a, c, g, or t, or includes no nucleotide
  misc_feature (529)..(529): n comprises a, c, g, or t, or includes no nucleotide
  misc_feature (549)..(549): n comprises a, c, g, or t, or includes no nucleotide
  misc_feature (558)..(558): n comprises a, c, g, or t, or includes no nucleotide
  misc_feature (573)..(573): n comprises a, c, g, or t, or includes no nucleotide
  misc_feature (575)..(575): n comprises a, c, g, or t, or includes no nucleotide
  misc_feature (579)..(579): n comprises a, c, g, or t, or includes no nucleotide
  misc_feature (583)..(583): n comprises a, c, g, or t, or includes no nucleotide
  misc_feature (591)..(591): n comprises a, c, g, or t, or includes no nucleotide
  misc_feature (624)..(624): n comprises a, c, g, or t, or includes no nucleotide
  misc_feature (629)..(629): n comprises a, c, g, or t, or includes no nucleotide
  misc_feature (653)..(653): n comprises a, c, g, or t, or includes no nucleotide
  misc_feature (657)..(658): n comprises a, c, g, or t, or includes no nucleotide
  misc_feature (672)..(672): n comprises a, c, g, or t, or includes no nucleotide
  misc_feature (679)..(679): n comprises a, c, g, or t, or includes no nucleotide
tagaggatcctcaaagcagcggnatttgaaataaccnaaaactgaacctaactgaccataaattttagaatggacaaacaagccatgggatgttaatacnatagaatatttacaacaatgacattcaatgaggtactgttacctgcaacaatacagataaatcgcaaataaaatgttgaccactaaaccagaagagaaaaantnnnnactgtatgattcaanttatatcaannnnaaaacgatagcccaagaatcagtgtcaagaaaataaagtgtctctaggataaagtgatacaactacagaagggctgaacacaacagtctgggaaaaattcctggcttgtggtttggagctctctcccttttctaacaacccctgttataacactggaaattcaaaactttaaagtgggacagtggaaaggatttaaggantaaaaacttttcaaggatggttagaggaaaacttaggaataaacttttacattaagtactttaaataggatgtaaaanttttaaaggtggaaantaatttggaattttaaaatngggccccgntaaagggtaaacttntncttngganttaatccnggattgggctccaacctgggtttaaacgggacnggggnttaaaaggccgggtggttttttangggnntttccaggggtttnaggcctntggggggccccaaccttttt

SEQ ID NO: 3331 - DNA, 339 bp, Canis familiaris
  misc_feature (4)..(5): n comprises a, c, g, or t, or includes no nucleotide
  misc_feature (10)..(10): n comprises a, c, g, or t, or includes no nucleotide
  misc_feature (21)..(22): n comprises a, c, g, or t, or includes no nucleotide
  misc_feature (41)..(41): n comprises a, c, g, or t, or includes no nucleotide
  misc_feature (45)..(45): n comprises a, c, g, or t, or includes no nucleotide
  misc_feature (53)..(53): n comprises a, c, g, or t, or includes no nucleotide
  misc_feature (314)..(314): n comprises a, c, g, or t, or includes no nucleotide
  misc_feature (321)..(321): n comprises a, c, g, or t, or includes no nucleotide
aagnncaatnaatcaaacaannacattaaaaaagcacaagncaanaattcatncttcaagactatataaaaaaatagctcactgatgtgatatagaataactggcctaccaggcaattcaaactaggtttgtaagtaccatattggtcactttggcttataacaaaaataccagagaccgagtagcttaagtaacaaaaccttatttctagcagttctggaagttgagaagtaggagatgaggtgtcagcacatccagtgtctgatgaggacctgcttcctatcttagacacagccaccttctcactgatgctncatatgnykgaaagagrcmgrccag

SEQ ID NO: 3332 - DNA, 368 bp, Canis familiaris
  misc_feature (4)..(4): n comprises a, c, g, or t, or includes no nucleotide
  misc_feature (14)..(14): n comprises a, c, g, or t, or includes no nucleotide
  misc_feature (150)..(153): n comprises a, c, g, or t, or includes no nucleotide
  misc_feature (223)..(223): n comprises a, c, g, or t, or includes no nucleotide
  misc_feature (284)..(284): n comprises a, c, g, or t, or includes no nucleotide
  misc_feature (329)..(329): n comprises a, c, g, or t, or includes no nucleotide
  misc_feature (338)..(338): n comprises a, c, g, or t, or includes no nucleotide
grrnagaatatctntcttcctttacttataaggtcattaaccttatcatgggaggctcaccgtcatgacttgattccctctcaaagacctcacctctaaataccatcacattaggacttcaatatatgaatttggggagaaagacatttnnnnccatagcaggcatgaggttaatatttgctgaaaagtgaagaatgaccacatgcaatgtgataaagaaagngtcctctgaggagacaaaatttaagtacagaactgagaaattaaccccaaatatgaagtcngccatgcagagcattagtaaaacagcattctggcagagataagtncaagtttanaggtgctttaataggggccaatggatcctc

SEQ ID NO: 3333 - DNA, 497 bp, Canis familiaris
  misc_feature (35)..(35): n comprises a, c, g, or t, or includes no nucleotide
  misc_feature (196)..(196): n comprises a, c, g, or t, or includes no nucleotide
  misc_feature (198)..(198): n comprises a, c, g, or t, or includes no nucleotide
  misc_feature (377)..(377): n comprises a, c, g, or t, or includes no nucleotide
  misc_feature (399)..(399): n comprises a, c, g, or t, or includes no nucleotide
  misc_feature (416)..(417): n comprises a, c, g, or t, or includes no nucleotide
  misc_feature (454)..(454): n comprises a, c, g, or t, or includes no nucleotide
  misc_feature (459)..(459): n comprises a, c, g, or t, or includes no nucleotide
  misc_feature (475)..(477): n comprises a, c, g, or t, or includes no nucleotide
agagagcagcagaaagaaggaaggagggcagcatnttcttggaggtttagatgagggttgcacccgtgggctccgacatgtggagaaagtcagctctggctaggagattcgagtttaaatgtgtccttcacaaaaatatcagaacagcctggctttgtcagaccttgtgttatggacactcacaccatgtcatccnancttgtaccagaaagacaagcagaggaagtaagatttaagctcttttctgattaatgttctcggtgaggttaaaaatagccccacaacatgtttgagaaatagtcttttttccctagcgaacaacagggtcacgttacaactggatatacataatggcatattcagtggaagactttccnttacaaatacataacgccgtancaatgtttagatgttannctttagttagctatgtggagaatttacgggtttcaanggganttaaggtacacccagnnntaaaagggcttttctatggc

SEQ ID NO: 3334 - DNA, 450 bp, Canis familiaris
  misc_feature (4)..(4): n comprises a, c, g, or t, or includes no nucleotide
  misc_feature (8)..(9): n comprises a, c, g, or t, or includes no nucleotide
  misc_feature (32)..(32): n comprises a, c, g, or t, or includes no nucleotide
  misc_feature (46)..(46): n comprises a, c, g, or t, or includes no nucleotide
  misc_feature (48)..(48): n comprises a, c, g, or t, or includes no nucleotide
  misc_feature (79)..(79): n comprises a, c, g, or t, or includes no nucleotide
  misc_feature (83)..(83): n comprises a, c, g, or t, or includes no nucleotide
  misc_feature (90)..(90): n comprises a, c, g, or t, or includes no nucleotide
  misc_feature (117)..(117): n comprises a, c, g, or t, or includes no nucleotide
  misc_feature (146)..(146): n comprises a, c, g, or t, or includes no nucleotide
  misc_feature (153)..(153): n comprises a, c, g, or t, or includes no nucleotide
  misc_feature (177)..(177): n comprises a, c, g, or t, or includes no nucleotide
  misc_feature (187)..(187): n comprises a, c, g, or t, or includes no nucleotide
  misc_feature (191)..(191): n comprises a, c, g, or t, or includes no nucleotide
  misc_feature (194)..(194): n comprises a, c, g, or t, or includes no nucleotide
  misc_feature (199)..(199): n comprises a, c, g, or t, or includes no nucleotide
  misc_feature (205)..(205): n comprises a, c, g, or t, or includes no nucleotide
  misc_feature (209)..(209): n comprises a, c, g, or t, or includes no nucleotide
  misc_feature (217)..(217): n comprises a, c, g, or t, or includes no nucleotide
  misc_feature (224)..(224): n comprises a, c, g, or t, or includes no nucleotide
  misc_feature (237)..(237): n comprises a, c, g, or t, or includes no nucleotide
  misc_feature (248)..(248): n comprises a, c, g, or t, or includes no nucleotide
  misc_feature (254)..(254): n comprises a, c, g, or t, or includes no nucleotide
  misc_feature (265)..(265): n comprises a, c, g, or t, or includes no nucleotide
  misc_feature (267)..(267): n comprises a, c, g, or t, or includes no nucleotide
  misc_feature (273)..(273): n comprises a, c, g, or t, or includes no nucleotide
  misc_feature (279)..(279): n comprises a, c, g, or t, or includes no nucleotide
  misc_feature (284)..(284): n comprises a, c, g, or t, or includes no nucleotide
  misc_feature (290)..(291): n comprises a, c, g, or t, or includes no nucleotide
  misc_feature (316)..(316): n comprises a, c, g, or t, or includes no nucleotide
  misc_feature (320)..(320): n comprises a, c, g, or t, or includes no nucleotide
  misc_feature (323)..(323): n comprises a, c, g, or t, or includes no nucleotide
  misc_feature (333)..(334): n comprises a, c, g, or t, or includes no nucleotide
  misc_feature (444)..(444): n comprises a, c, g, or t, or includes no nucleotide
gggngggnntttttaaagtcccagaaatgtcnggcctttttataantntccccattttgtaaaatgtgaaacattaagnctantctcaantgcaattggggatattatttccaaaangaaatgctttggtaatggtctctcttcanattcacngggatgggtaagctgcttagaaanttagaaagcncggnganatttntaatangcangttgagcncaaagcngtgaagcacagantctgggcgctnctttangtcctgtcaantnggggtntttctntcagntattcnntgggggctgtttctagggacaggcnggcngantatgctgcannacagtgtcacagaggaggggaataaaaacaacaacaaaaaaccctctctttagacactacctccaagatgaaacctgaaatactcggtggcagaaatatttgccacaggncgacag

SEQ ID NO: 3335 - DNA, 585 bp, Canis familiaris
  misc_feature (53)..(53): n comprises a, c, g, or t, or includes no nucleotide
  misc_feature (61)..(61): n comprises a, c, g, or t, or includes no nucleotide
  misc_feature (126)..(126): n comprises a, c, g, or t, or includes no nucleotide
  misc_feature (136)..(138): n comprises a, c, g, or t, or includes no nucleotide
  misc_feature (191)..(191): n comprises a, c, g, or t, or includes no nucleotide
  misc_feature (345)..(345): n comprises a, c, g, or t, or includes no nucleotide
  misc_feature (360)..(360): n comprises a, c, g, or t, or includes no nucleotide
  misc_feature (377)..(377): n comprises a, c, g, or t, or includes no nucleotide
  misc_feature (389)..(389): n comprises a, c, g, or t, or includes no nucleotide
  misc_feature (401)..(401): n comprises a, c, g, or t, or includes no nucleotide
  misc_feature (409)..(409): n comprises a, c, g, or t, or includes no nucleotide
  misc_feature (427)..(427): n comprises a, c, g, or t, or includes no nucleotide
  misc_feature (463)..(463): n comprises a, c, g, or t, or includes no nucleotide
  misc_feature (469)..(469): n comprises a, c, g, or t, or includes no nucleotide
  misc_feature (475)..(475): n comprises a, c, g, or t, or includes no nucleotide
  misc_feature (520)..(521): n comprises a, c, g, or t, or includes no nucleotide
  misc_feature (547)..(547): n comprises a, c, g, or t, or includes no nucleotide
  misc_feature (552)..(552): n comprises a, c, g, or t, or includes no nucleotide
  misc_feature (565)..(565): n comprises a, c, g, or t, or includes no nucleotide
  misc_feature (583)..(583): n comprises a, c, g, or t, or includes no nucleotide
tagaggatctcccaaatcttgccccagtgcctaggttccatcctgctcctgtngggctggnatgcatgtctctccacgccttcctcccctgctctactgtctcctggcagccgtgtctacttcctnattttgtatnnncgtggaggctcatatcctatagaatttctaagaaaggacagatgggagctaanccttctcacttccacagaactaaaaatgactttattctactctaattcctaatggctttaactctcactgataatccttgtctgaagcagcgtttacttcattccaggctgcagactggtagattttcccatttctacttttcttccacatctnactagctgggccttncctgttataaaggaagnattttttatttnatttattttttnactcattnaactcaggtgtaaaactnactatggcccccaaaaagcaggagaatggcttagcnctttcnctctcncttagtttctaaccccttagttggaacaagtcgggggaaaccggnnaggcaaaaaagtcggggtggcctttncatgngggtaaatggatnaggccatccatggggggntt

SEQ ID NO: 3336 - DNA, 368 bp, Canis familiaris
  misc_feature (29)..(29): n comprises a, c, g, or t, or includes no nucleotide
  misc_feature (133)..(134): n comprises a, c, g, or t, or includes no nucleotide
  misc_feature (140)..(140): n comprises a, c, g, or t, or includes no nucleotide
  misc_feature (307)..(307): n comprises a, c, g, or t, or includes no nucleotide
  misc_feature (314)..(314): n comprises a, c, g, or t, or includes no nucleotide
  misc_feature (318)..(318): n comprises a, c, g, or t, or includes no nucleotide
  misc_feature (355)..(355): n comprises a, c, g, or t, or includes no nucleotide
atcaggtttcaagaaagagggtatcctangccacatgaccttatgactgatgaggaaaaaaatattagagcaggaacagtcacactctgagagctcttcaaaataccattttctacctcaagtgaagccttgnntcaacntatagaacttatctagaattggccaagaagtggcaatgtagcctactacaagtgtcaaaaacatcagggcacttgagctctaatcctacttaatagtgtccttggtcaagtgatttcactttctctgggactgtttttccatcataataaaaggagtatggatggantggattncatncaaccctggtgttctgtggactactctgctggagaanaaaggaaaaaata

SEQ ID NO: 3337 - DNA, 473 bp, Canis familiaris
  misc_feature (2)..(2): n comprises a, c, g, or t, or includes no nucleotide
  misc_feature (415)..(415): n comprises a, c, g, or t, or includes no nucleotide
  misc_feature (423)..(423): n comprises a, c, g, or t, or includes no nucleotide
  misc_feature (431)..(431): n comprises a, c, g, or t, or includes no nucleotide
  misc_feature (438)..(438): n comprises a, c, g, or t, or includes no nucleotide
  misc_feature (446)..(448): n comprises a, c, g, or t, or includes no nucleotide
  misc_feature (466)..(468): n comprises a, c, g, or t, or includes no nucleotide
yntcataaatrtggtggatcaaaacatacctggaaaaggaaattttccaacaaatgtcaactgtcaggaatgcaaaggaggcccttcagacatctggccccaaactgttagtcctggtagtgcatacattctgtggattcattagcagacataatggtaagaggatgccttgatattagtcatgaattgcagagctaatttcccacaggcaaagcctccaggaaaagttatcttaattaaaaaggaaaatagtttatcaaaattaaatattgccatgatgtagccatgggggacagataggaatatctttactcatgttttgcatcagagcccagaataataaatggatagttagtgctttcctactcatcttagtaagtgtactctcttagtgtcaaaattggtcatactttcntttaattntttcattnggccgcnagtccctnnnggagagcggcaataatcnnnaagaa

SEQ ID NO: 3338 - DNA, 870 bp, Canis familiaris
  misc_feature (37)..(37): n comprises a, c, g, or t, or includes no nucleotide
  misc_feature (200)..(200): n comprises a, c, g, or t, or includes no nucleotide
  misc_feature (206)..(207): n comprises a, c, g, or t, or includes no nucleotide
  misc_feature (302)..(302): n comprises a, c, g, or t, or includes no nucleotide
  misc_feature (355)..(355): n comprises a, c, g, or t, or includes no nucleotide
  misc_feature (373)..(373): n comprises a, c, g, or t, or includes no nucleotide
  misc_feature (409)..(410): n comprises a, c, g, or t, or includes no nucleotide
  misc_feature (428)..(428): n comprises a, c, g, or t, or includes no nucleotide
  misc_feature (552)..(556): n comprises a, c, g, or t, or includes no nucleotide
  misc_feature (644)..(644): n comprises a, c, g, or t, or includes no nucleotide
  misc_feature (682)..(682): n comprises a, c, g, or t, or includes no nucleotide
  misc_feature (742)..(744): n comprises a, c, g, or t, or includes no nucleotide
  misc_feature (842)..(842): n comprises a, c, g, or t, or includes no nucleotide
gatcttttttaaatagctcttttattgttgagtatgntgagataggagttttattcccaattaatattattttgaaaccatctctgaattctaaataactctggcgattatagaccatatccccttggagccactgtttgaggttacagtgctattggctgggccattgtgctttctacccagcatatcaaggtcatgtntgcctnnaataacaaaaggaaagtcacaaaaattctcactcatgaatattctccaaagagtgtttcaggtcgagtcaggggatagaaatattatatattccngactttggaagaggttggatatggtcaaaaatagattaaagcagcaaagtaanttatctcaataatttacngccagggaagcaattaacaatcttyctatttgtggnnagcamttcccaacaactnagagagakgtgtgtaacagtttggcattttaaaggcgttttgattccycagtccmwcmattgtcccaayccccaaattggtcaatttgggataacattaattcaggctgtaaagatggccctcnnnnnggaaggaaagaaggaggcgggagggaaggaattggatagatatgaggtatcccctggagttagttattgaataggtccttgcaaatcntggtcggttgcattgctttgttggcttgttgccttatntattttgttcctgaagtggttgctacaaaaaccctgacacaaacctctgaagagtgattnnnactcgcgcatggtccagaattgtgttattttaacaaaactttctagttcttgttgatttgggactctgaccccctgtatgtcgatatctagagcaacntcccaccattttgatgggcctcttgatc

SEQ ID NO: 3339 - DNA, 793 bp, Canis familiaris
  misc_feature (26)..(28): n comprises a, c, g, or t, or includes no nucleotide
  misc_feature (43)..(47): n comprises a, c, g, or t, or includes no nucleotide
  misc_feature (175)..(176): n comprises a, c, g, or t, or includes no nucleotide
  misc_feature (254)..(254): n comprises a, c, g, or t, or includes no nucleotide
  misc_feature (257)..(257): n comprises a, c, g, or t, or includes no nucleotide
  misc_feature (276)..(276): n comprises a, c, g, or t, or includes no nucleotide
  misc_feature (291)..(291): n comprises a, c, g, or t, or includes no nucleotide
  misc_feature (309)..(309): n comprises a, c, g, or t, or includes no nucleotide
  misc_feature (313)..(313): n comprises a, c, g, or t, or includes no nucleotide
  misc_feature (320)..(320): n comprises a, c, g, or t, or includes no nucleotide
  misc_feature (344)..(344): n comprises a, c, g, or t, or includes no nucleotide
  misc_feature (358)..(358): n comprises a, c, g, or t, or includes no nucleotide
  misc_feature (367)..(367): n comprises a, c, g, or t, or includes no nucleotide
  misc_feature (372)..(372): n comprises a, c, g, or t, or includes no nucleotide
  misc_feature (376)..(376): n comprises a, c, g, or t, or includes no nucleotide
  misc_feature (382)..(382): n comprises a, c, g, or t, or includes no nucleotide
  misc_feature (411)..(411): n comprises a, c, g, or t, or includes no nucleotide
  misc_feature (428)..(428): n comprises a, c, g, or t, or includes no nucleotide
  misc_feature (440)..(440): n comprises a, c, g, or t, or includes no nucleotide
  misc_feature (501)..(501): n comprises a, c, g, or t, or includes no nucleotide
  misc_feature (507)..(507): n comprises a, c, g, or t, or includes no nucleotide
  misc_feature (513)..(513): n comprises a, c, g, or t, or includes no nucleotide
  misc_feature (517)..(517): n comprises a, c, g, or t, or includes no nucleotide
  misc_feature (523)..(523): n comprises a, c, g, or t, or includes no nucleotide
  misc_feature (537)..(537): n comprises a, c, g, or t, or includes no nucleotide
  misc_feature (552)..(552): n comprises a, c, g, or t, or includes no nucleotide
  misc_feature (576)..(577): n comprises a, c, g, or t, or includes no nucleotide
  misc_feature (581)..(581): n comprises a, c, g, or t, or includes no nucleotide
  misc_feature (590)..(590): n comprises a, c, g, or t, or includes no nucleotide
  misc_feature (599)..(600): n comprises a, c, g, or t, or includes no nucleotide
  misc_feature (618)..(618): n comprises a, c, g, or t, or includes no nucleotide
  misc_feature (630)..(631): n comprises a, c, g, or t, or includes no nucleotide
  misc_feature (634)..(634): n comprises a, c, g, or t, or includes no nucleotide
  misc_feature (646)..(650): n comprises a, c, g, or t, or includes no nucleotide
  misc_feature (655)..(655): n comprises a, c, g, or t, or includes no nucleotide
  misc_feature (657)..(657): n comprises a, c, g, or t, or includes no nucleotide
  misc_feature (659)..(659): n comprises a, c, g, or t, or includes no nucleotide
  misc_feature (665)..(665): n comprises a, c, g, or t, or includes no nucleotide
  misc_feature (689)..(689): n comprises a, c, g, or t, or includes no nucleotide
  misc_feature (705)..(705): n comprises a, c, g, or t, or includes no nucleotide
  misc_feature (714)..(714): n comprises a, c, g, or t, or includes no nucleotide
  misc_feature (721)..(722): n comprises a, c, g, or t, or includes no nucleotide
  misc_feature (730)..(730): n comprises a, c, g, or t, or includes no nucleotide
  misc_feature (734)..(734): n comprises a, c, g, or t, or includes no nucleotide
  misc_feature (738)..(739): n comprises a, c, g, or t, or includes no nucleotide
  misc_feature (741)..(741): n comprises a, c, g, or t, or includes no nucleotide
  misc_feature (743)..(743): n comprises a, c, g, or t, or includes no nucleotide
  misc_feature (745)..(746): n comprises a, c, g, or t, or includes no nucleotide
  misc_feature (761)..(761): n comprises a, c, g, or t, or includes no nucleotide
  misc_feature (772)..(772): n comprises a, c, g, or t, or includes no nucleotide
  misc_feature (775)..(775): n comprises a, c, g, or t, or includes no nucleotide
  misc_feature (781)..(781): n comprises a, c, g, or t, or includes no nucleotide
ctcgcgtgtttctggcgtgcgtgaannngtgtgcacatgcacnnnnnggctcgtgtctgtcctacctggagtatgtatgtttatttgcctatttctcctgctgattcttctttctgctcttctcgtccttctgagtgtccccactctgtcccctgcttcacaggcccattccccnncttttgactggggagcacttcagaatacatctttctctcattgtgattccaccataggagctgactttttttttttcnctnggtcttttaacacagtgtnactttttctctcagngggacattccttaaagcnaatncctttcngaggccagcgcatcatcccaggtnccgttcccagttcnggacttttncacanaagnggcctnccctcccccttcccggatgtaacgggttncccccccccggaggccntggagcccagtnccgaaagtggcaaagcaccacagccccggggccagggcagcagatacccagggggaggtgnaaaacnggggcnccgnggtttntttcccccccctgncaagtaaatttcctncctccagggaatcccacggggganntttnggggggaangggaaaaanncggcaaaatattaaaaancggggacttggnnaanccaaaaaggggnnnnnggaancntngggggncccccaaggggggtttaccggggnaattttttgggaaaanaagggggcnaaactcnntggggganaggntttnncncncnntaaaggggggggggnccccccaaggnccnccctcnggagggggaaaa

SEQ ID NO: 3340 - DNA, 524 bp, Canis familiaris
  misc_feature (8)..(8): n comprises a, c, g, or t, or includes no nucleotide
  misc_feature (15)..(15): n comprises a, c, g, or t, or includes no nucleotide
  misc_feature (375)..(375): n comprises a, c, g, or t, or includes no nucleotide
  misc_feature (397)..(397): n comprises a, c, g, or t, or includes no nucleotide
  misc_feature (459)..(459): n comprises a, c, g, or t, or includes no nucleotide
  misc_feature (464)..(464): n comprises a, c, g, or t, or includes no nucleotide
  misc_feature (473)..(473): n comprises a, c, g, or t, or includes no nucleotide
  misc_feature (491)..(491): n comprises a, c, g, or t, or includes no nucleotide
  misc_feature (498)..(498): n comprises a, c, g, or t, or includes no nucleotide
  misc_feature (501)..(501): n comprises a, c, g, or t, or includes no nucleotide
  misc_feature (522)..(522): n comprises a, c, g, or t, or includes no nucleotide
gatccagncacctgnggccagccacactgaaggatggtctctgtccctttaaaggtcctttctttgtcctgtgtcctgaccaccatgtgcgactgaccaccagcccccggggtgcagggggcggcccccagcccctcaggcgagcctcgaggggtgcccagggagaggcagcctccgcagtggactcttctgctcccagccctggcacgtcctccgaggaggtggcagcggtggccgctccagaaacgttgattccatttcatcagtaggtaccgacctttgtttctctgcttcctgtcagtctcacgtgttgtcgggccacatggagttcgtctagcaggccagaggaggtggacaggggccccgcagaatggntggcatccctaatcctggccgnttccagcctgtgggccatgggcaaaccagggccagggcctggaacctcaagggctggccacntggcnggaggacanggacattctgttgggcanggccgtnctnggcaagaatgtgcagcttggnac

SEQ ID NO: 3341 - DNA, 489 bp, Canis familiaris
  misc_feature (28)..(28): n comprises a, c, g, or t, or includes no nucleotide
  misc_feature (30)..(31): n comprises a, c, g, or t, or includes no nucleotide
  misc_feature (37)..(37): n comprises a, c, g, or t, or includes no nucleotide
  misc_feature (39)..(39): n comprises a, c, g, or t, or includes no nucleotide
  misc_feature (42)..(42): n comprises a, c, g, or t, or includes no nucleotide
  misc_feature (67)..(67): n comprises a, c, g, or t, or includes no nucleotide
  misc_feature (91)..(91): n comprises a, c, g, or t, or includes no nucleotide
  misc_feature (95)..(95): n comprises a, c, g, or t, or includes no nucleotide
  misc_feature (128)..(129): n comprises a, c, g, or t, or includes no nucleotide
  misc_feature (154)..(154): n comprises a, c, g, or t, or includes no nucleotide
  misc_feature (159)..(159): n comprises a, c, g, or t, or includes no nucleotide
  misc_feature (180)..(180): n comprises a, c, g, or t, or includes no nucleotide
  misc_feature (194)..(194): n comprises a, c, g, or t, or includes no nucleotide
  misc_feature (210)..(210): n comprises a, c, g, or t, or includes no nucleotide
  misc_feature (257)..(257): n comprises a, c, g, or t, or includes no nucleotide
  misc_feature (283)..(284): n comprises a, c, g, or t, or includes no nucleotide
  misc_feature (317)..(317): n comprises a, c, g, or t, or includes no nucleotide
  misc_feature (328)..(328): n comprises a, c, g, or t, or includes no nucleotide
  misc_feature (351)..(351): n comprises a, c, g, or t, or includes no nucleotide
  misc_feature (388)..(388): n comprises a, c, g, or t, or includes no nucleotide
  misc_feature (390)..(391): n comprises a, c, g, or t, or includes no nucleotide
  misc_feature (470)..(470): n comprises a, c, g, or t, or includes no nucleotide
  misc_feature (477)..(477): n comprises a, c, g, or t, or includes no nucleotide
  misc_feature (479)..(479): n comprises a, c, g, or t, or includes no nucleotide
tgccaaggaagtgccactttggaggtcntnncttcangnttntgggcttgtttttgaaaaacctttngagggccaccaagctgcataatgngtgncccatagtagggaggtatgaggcagataaagcnnggggaaggcaagaacgggtggcatntaagntcctgcttcgtgtgtcccaangtggggcattaacntggcttggagcttccnggcagccaaagcaaagagagaaactcgatgccctgatgtttagaatntgggaaataacaggcaatggctcagnntgtgtcttaggctaatggagggaggtgtcccangatgccagccngaggcaggaagcaccagggctgngcagcatggggctccctgctggcagtgccacacaccngnngtgtgtagtgggggcaagtgctggaattcgcctgggtccctgggttctgctgacctgtccagcctactcagttttcagnttgccangnctctgagatc

SEQ ID NO: 3342 - DNA, 605 bp, Canis familiaris
  misc_feature (1)..(1): n comprises a, c, g, or t, or includes no nucleotide
  misc_feature (4)..(4): n comprises a, c, g, or t, or includes no nucleotide
  misc_feature (16)..(16): n comprises a, c, g, or t, or includes no nucleotide
  misc_feature (20)..(20): n comprises a, c, g, or t, or includes no nucleotide
  misc_feature (22)..(23): n comprises a, c, g, or t, or includes no nucleotide
  misc_feature (30)..(30): n comprises a, c, g, or t, or includes no nucleotide
  misc_feature (33)..(33): n comprises a, c, g, or t, or includes no nucleotide
  misc_feature (43)..(43): n comprises a, c, g, or t, or includes no nucleotide
  misc_feature (48)..(48): n comprises a, c, g, or t, or includes no nucleotide
  misc_feature (56)..(57): n comprises a, c, g, or t, or includes no nucleotide
  misc_feature (62)..(63): n comprises a, c, g, or t, or includes no nucleotide
  misc_feature (74)..(76): n comprises a, c, g, or t, or includes no nucleotide
  misc_feature (81)..(81): n comprises a, c, g, or t, or includes no nucleotide
  misc_feature (89)..(89): n comprises a, c, g, or t, or includes no nucleotide
  misc_feature (94)..(94): n comprises a, c, g, or t, or includes no nucleotide
  misc_feature (99)..(99): n comprises a, c, g, or t, or includes no nucleotide
  misc_feature (109)..(109): n comprises a, c, g, or t, or includes no nucleotide
  misc_feature (191)..(191): n comprises a, c, g, or t, or includes no nucleotide
  misc_feature (394)..(394): n comprises a, c, g, or t, or includes no nucleotide
  misc_feature (450)..(450): n comprises a, c, g, or t, or includes no nucleotide
  misc_feature (476)..(476): n comprises a, c, g, or t, or includes no nucleotide
  misc_feature (497)..(497): n comprises a, c, g, or t, or includes no nucleotide
  misc_feature (556)..(556): n comprises a, c, g, or t, or includes no nucleotide
  misc_feature (561)..(561): n comprises a, c, g, or t, or includes no nucleotide
  misc_feature (563)..(563): n comprises a, c, g, or t, or includes no nucleotide
  misc_feature (577)..(577): n comprises a, c, g, or t, or includes no nucleotide
  misc_feature (599)..(599): n comprises a, c, g, or t, or includes no nucleotide
nagnccatggttcagntacnannccagagnaancaaaaatacnaggtnggacattnngattnnatgccccaccnnngtgcntctgtccnacccngatantctagtgaantctctttcttgctaagccagcgggggtgagtttctactcctcacagctaaaacagccttcacggggatagtgacataaaatnatctctcagtgcatatggataaatgtgtttgcattcatcaaagtgatattcagtgggtctgtggtcaaataagtgttctcaccccttttgcacttgtcacttcatttggaatcacttggagctgggttcactctgcagtgtgaattcggggcttttgtgtgtggcttttccatatgataatgtcgagtatattttcagcccancctcaatccaaaggggcatcaccttaaggagatataattatagcagccatttggcngkycycttaacttaaaggacmaagcncaaaccagtgtggcyaagranattacamcytsgggrakgacaacccagggaccaasgcaggcmargaggggtcmgccmgnagagngncactgtacaacccntctgtagcactttatcctcagnggggag

SEQ ID NO: 3343 - DNA, 325 bp, Canis familiaris
  misc_feature (1)..(1): n comprises a, c, g, or t, or includes no nucleotide
  misc_feature (61)..(61): n comprises a, c, g, or t, or includes no nucleotide
  misc_feature (80)..(80): n comprises a, c, g, or t, or includes no nucleotide
  misc_feature (87)..(87): n comprises a, c, g, or t, or includes no nucleotide
  misc_feature (111)..(111): n comprises a, c, g, or t, or includes no nucleotide
  misc_feature (240)..(240): n comprises a, c, g, or t, or includes no nucleotide
  misc_feature (281)..(281): n comprises a, c, g, or t, or includes no nucleotide
  misc_feature (286)..(286): n comprises a, c, g, or t, or includes no nucleotide
  misc_feature (288)..(288): n comprises a, c, g, or t, or includes no nucleotide
  misc_feature (300)..(301): n comprises a, c, g, or t, or includes no nucleotide
  misc_feature (314)..(314): n comprises a, c, g, or t, or includes no nucleotide
  misc_feature (316)..(316): n comprises a, c, g, or t, or includes no nucleotide
  misc_feature (318)..(318): n comprises a, c, g, or t, or includes no nucleotide
nttgagagctcacaaggactgttgtataatattttttttacttgtgtagacagattgcagntgctttaataggttgtggnattaccnatgccggcatatccaacaaatccnaatatagtaagaaaaaagagcttcaattaccagtgaatcatattcaataatagccatttaaatccactgaaaacaaacttaggtaaaaacaatagcttgggttttttttttattttgtttgggtttttntgtttggtttttaattcaatgttaaccactcaattcacacnggccntnagtcccctctannagacgcgcatcantntnccccccc

SEQ ID NO: 3344 - DNA, 917 bp, Canis familiaris
  misc_feature (7)..(7): n comprises a, c, g, or t, or includes no nucleotide
  misc_feature (27)..(27): n comprises a, c, g, or t, or includes no nucleotide
  misc_feature (146)..(148): n comprises a, c, g, or t, or includes no nucleotide
  misc_feature (172)..(172): n comprises a, c, g, or t, or includes no nucleotide
  misc_feature (201)..(201): n comprises a, c, g, or t, or includes no nucleotide
  misc_feature (203)..(203): n comprises a, c, g, or t, or includes no nucleotide
  misc_feature (526)..(526): n comprises a, c, g, or t, or includes no nucleotide
  misc_feature (535)..(535): n comprises a, c, g, or t, or includes no nucleotide
  misc_feature (538)..(538): n comprises a, c, g, or t, or includes no nucleotide
  misc_feature (554)..(555): n comprises a, c, g, or t, or includes no nucleotide
  misc_feature (563)..(563): n comprises a, c, g, or t, or includes no nucleotide
  misc_feature (570)..(570): n comprises a, c, g, or t, or includes no nucleotide
  misc_feature (573)..(573): n comprises a, c, g, or t, or includes no nucleotide
  misc_feature (576)..(577): n comprises a, c, g, or t, or includes no nucleotide
  misc_feature (580)..(581): n comprises a, c, g, or t, or includes no nucleotide
  misc_feature (586)..(587): n comprises a, c, g, or t, or includes no nucleotide
  misc_feature (591)..(591): n comprises a, c, g, or t, or includes no nucleotide
  misc_feature (597)..(597): n comprises a, c, g, or t, or includes no nucleotide
  misc_feature (599)..(599): n comprises a, c, g, or t, or includes no nucleotide
  misc_feature (604)..(604): n comprises a, c, g, or t, or includes no nucleotide
  misc_feature (609)..(609): n comprises a, c, g, or t, or includes no nucleotide
  misc_feature (612)..(612): n comprises a, c, g, or t, or includes no nucleotide
  misc_feature (633)..(633): n comprises a, c, g, or t, or includes no nucleotide
  misc_feature (638)..(638): n comprises a, c, g, or t, or includes no nucleotide
  misc_feature (645)..(645): n comprises a, c, g, or t, or includes no nucleotide
  misc_feature (650)..(650): n comprises a, c, g, or t, or includes no nucleotide
  misc_feature (657)..(657): n comprises a, c, g, or t, or includes no nucleotide
  misc_feature (660)..(660): n comprises a, c, g, or t, or includes no nucleotide
  misc_feature (669)..(669): n comprises a, c, g, or t, or includes no nucleotide
  misc_feature (675)..(675): n comprises a, c, g, or t, or includes no nucleotide
  misc_feature (678)..(678): n comprises a, c, g, or t, or includes no nucleotide
  misc_feature (684)..(685): n comprises a, c, g, or t, or includes no nucleotide
  misc_feature (688)..(688): n comprises a, c, g, or t, or includes no nucleotide
  misc_feature (702)..(702): n comprises a, c, g, or t, or includes no nucleotide
  misc_feature (706)..(706): n comprises a, c, g, or t, or includes no nucleotide
  misc_feature (723)..(724): n comprises a, c, g, or t, or includes no nucleotide
  misc_feature (726)..(726): n comprises a, c, g, or t, or includes no nucleotide
  misc_feature (730)..(730): n comprises a, c, g, or t, or includes no nucleotide
  misc_feature (740)..(740): n comprises a, c, g, or t, or includes no nucleotide
  misc_feature (743)..(743): n comprises a, c, g, or t, or includes no nucleotide
  misc_feature (752)..(752): n comprises a, c, g, or t, or includes no nucleotide
  misc_feature (759)..(759): n comprises a, c, g, or t, or includes no nucleotide
  misc_feature (763)..(764): n comprises a, c, g, or t, or includes no nucleotide
  misc_feature (771)..(771): n comprises a, c, g, or t, or includes no nucleotide
  misc_feature (774)..(778): n comprises a, c, g, or t, or includes no nucleotide
  misc_feature (795)..(795): n comprises a, c, g, or t, or includes no nucleotide
  misc_feature (838)..(838): n comprises a, c, g, or t, or includes no nucleotide
gatcgcnttatagatttaaagacctgngctgactctctcgccccttcacgtaacgagcgttaaccacggttgttcactttgactcaggcactcatttagccaacaaatattttctgcatccctacaaaatgctacatataaagtannncaataaaatgggcacgtatacctngccttcatggtgataaggcccaatgagtntnagagagacacacatattaagccgctgggaggtcttccctgaggaagtgacattttatctagtttggagctgagttctgaagaatagctggtgttggctaggcaagaataatggtatacccagggcaactaagcgcagagagcatgtagccaggaaatagcattacagggcccctagtggggaaaccaagactggctattccagaaaccccaataccatccagactgggaccttggaatgtaaaagtccgagatcggatgttaaggatttwggaaaatcmctttaggcttgtccakttacccaaargrgwggmytggsggaatnttctaatantgnccccctttctccgcannttgggggnatatttnttnggnnccnnagganngggnaccggngntgttngatanganctgacataagagcagtgtgancaganccatatnggggngacccantangtatccttnaggatntanatcttnntgntgaagatgagcatnttcnatgatgatacaaggatnngnggtntagagaccanagngagacaatngcattcncttnnaataganggnnnnngagagaggaggagtagnagcaaagccagatgcatcacaggagccatgaacagggtgcatntcaagcatgagggaggagacgatgatgctgcatgctgtcgagagttctagagcgtcggtttacaggcggccatcggatc

SEQ ID NO: 3345 - DNA, 453 bp, Canis familiaris
  misc_feature (2)..(4): n comprises a, c, g, or t, or includes no nucleotide
  misc_feature (6)..(7): n comprises a, c, g, or t, or includes no nucleotide
  misc_feature (10)..(11): n comprises a, c, g, or t, or includes no nucleotide
  misc_feature (18)..(18): n comprises a, c, g, or t, or includes no nucleotide
  misc_feature (21)..(21): n comprises a, c, g, or t, or includes no nucleotide
  misc_feature (29)..(29): n comprises a, c, g, or t, or includes no nucleotide
  misc_feature (41)..(41): n comprises a, c, g, or t, or includes no nucleotide
  misc_feature (45)..(45): n comprises a, c, g, or t, or includes no nucleotide
  misc_feature (48)..(48): n comprises a, c, g, or t, or includes no nucleotide
  misc_feature (411)..(411): n comprises a, c, g, or t, or includes no nucleotide
  misc_feature (441)..(441): n comprises a, c, g, or t, or includes no nucleotide
gnnncnnttnntctttcngcncgcttcanggggatcatacnggcnacngtgatttctgttcattatctaatgacaggatggaacatgcttatttgactttcatgtttttatactcattctttgcctcagtggcaaagaaaactgattctcaaaaacagagcctaagaaatagatgaaaacctctcctggggaagctcagaatcaatggagaagcaagaatctggaattaagtacaaaaaggaaaaggattgggagaagagaggaaagatgaagaggtagtttgcaaaatatgttaaattattagaagtattcaaagttatgttatataacatatattatatgttagatgagaaaaagtaaactccagattctacaatgttttcctgactttagacaagcctcctcccaccnagaacytycakmcagcctcctccaccasancctcatcactct

SEQ ID NO: 3346 - DNA, 310 bp, Canis familiaris
  misc_feature (51)..(51): n comprises a, c, g, or t, or includes no nucleotide
  misc_feature (86)..(86): n comprises a, c, g, or t, or includes no nucleotide
  misc_feature (91)..(91): n comprises a, c, g, or t, or includes no nucleotide
  misc_feature (306)..(306): n comprises a, c, g, or t, or includes no nucleotide
aatgatgccttgtctcaatgtttggagtcatggaacagtttctgtaaagcngctttggaaaccgtctaataacatgactaaataantggcnacagatgctggcgtaaatgattttgctacctcagccgggaaatggtgttcatagtgtggttattttaatatatttgagatggcaatactattcaaagcccaacagaagcctgttacacttgcagtttctagttcaaggcagatgctggcatccgattcctgtcaaggagagtcattggattcagcttgcttgatcctctagagtcgacctgcagnatgg

SEQ ID NO: 3347 - DNA, 763 bp, Canis familiaris
  misc_feature (175)..(178): n comprises a, c, g, or t, or includes no nucleotide
  misc_feature (210)..(210): n comprises a, c, g, or t, or includes no nucleotide
  misc_feature (343)..(343): n comprises a, c, g, or t, or includes no nucleotide
  misc_feature (345)..(345): n comprises a, c, g, or t, or includes no nucleotide
  misc_feature (407)..(407): n comprises a, c, g, or t, or includes no nucleotide
  misc_feature (412)..(412): n comprises a, c, g, or t, or includes no nucleotide
  misc_feature (418)..(418): n comprises a, c, g, or t, or includes no nucleotide
  misc_feature (426)..(426): n comprises a, c, g, or t, or includes no nucleotide
  misc_feature (433)..(433): n comprises a, c, g, or t, or includes no nucleotide
  misc_feature (476)..(476): n comprises a, c, g, or t, or includes no nucleotide
  misc_feature (483)..(483): n comprises a, c, g, or t, or includes no nucleotide
  misc_feature (512)..(512): n comprises a, c, g, or t, or includes no nucleotide
  misc_feature (515)..(515): n comprises a, c, g, or t, or includes no nucleotide
  misc_feature (537)..(537): n comprises a, c, g, or t, or includes no nucleotide
  misc_feature (539)..(539): n comprises a, c, g, or t, or includes no nucleotide
  misc_feature (543)..(543): n comprises a, c, g, or t, or includes no nucleotide
  misc_feature (552)..(552): n comprises a, c, g, or t, or includes no nucleotide
  misc_feature (554)..(554): n comprises a, c, g, or t, or includes no nucleotide
  misc_feature (561)..(561): n comprises a, c, g, or t, or includes no nucleotide
  misc_feature (565)..(565): n comprises a, c, g, or t, or includes no nucleotide
  misc_feature (585)..(585): n comprises a, c, g, or t, or includes no nucleotide
  misc_feature (599)..(599): n comprises a, c, g, or t, or includes no nucleotide
  misc_feature (603)..(603): n comprises a, c, g, or t, or includes no nucleotide
  misc_feature (616)..(617): n comprises a, c, g, or t, or includes no nucleotide
  misc_feature (632)..(632): n comprises a, c, g, or t, or includes no nucleotide
  misc_feature (635)..(635): n comprises a, c, g, or t, or includes no nucleotide
  misc_feature (646)..(646): n comprises a, c, g, or t, or includes no nucleotide
  misc_feature (651)..(651): n comprises a, c, g, or t, or includes no nucleotide
  misc_feature (668)..(669): n comprises a, c, g, or t, or includes no nucleotide
  misc_feature (686)..(686): n comprises a, c, g, or t, or includes no nucleotide
  misc_feature (701)..(701): n comprises a, c, g, or t, or includes no nucleotide
  misc_feature (706)..(706): n comprises a, c, g, or t, or includes no nucleotide
  misc_feature (733)..(734): n comprises a, c, g, or t, or includes no nucleotide
  misc_feature (739)..(739): n comprises a, c, g, or t, or includes no nucleotide
  misc_feature (742)..(742): n comprises a, c, g, or t, or includes no nucleotide
  misc_feature (746)..(746): n comprises a, c, g, or t, or includes no nucleotide
  misc_feature (749)..(750): n comprises a, c, g, or t, or includes no nucleotide
  misc_feature (754)..(754): n comprises a, c, g, or t, or includes no nucleotide
  misc_feature (762)..(762): n comprises a, c, g, or t, or includes no nucleotide
ttacgtgttttagccatatcggaaatgggttatttaaatctcccactattattattcaagtgtgttacatctaccttcaattctgtcaggttttggctcgtgtattttggggctctgttattaggtgtaaacatttaataatcgtcacatctccctaatagaccatgtgccatannnnaattacatcttcatataagcccatcaactgtntgtggttttctttgccttatgaagttgtaatttttaaagatttattatttttttttatttggagacagggagagcacatgagtgggaagggccagagagggagagagactctcaagcagactcccacactggngncacagagcccaaggacggggtttcattccacacaattcgtgagatccacaaagtggagcttncaacnaaaagntggggcgncacaacnaaatgttcccacaacaggtgcccccaaaggtgtgttttaaaanagaccgnaaaggagttacaaacaacacactttgtancgnctttaaagtagccaaggggttnancttnaccagttcncnggacccnttgnggggattccagttaccacgngtttccttcccttncaancggagggcccccnncagaagttggggggncantcccccagggnggaanccccccagttccccggnncggggaaagtctagttncccccccgttggggnggganatttggccaaaaaagaaaccccgggtnnaaagnttncccnccnngaancgggaggnt

SEQ ID NO: 3348 - DNA, 1008 bp, Canis familiaris
  misc_feature (19)..(19): n comprises a, c, g, or t, or includes no nucleotide
  misc_feature (106)..(107): n comprises a, c, g, or t, or includes no nucleotide
  misc_feature (184)..(186): n comprises a, c, g, or t, or includes no nucleotide
  misc_feature (305)..(305): n comprises a, c, g, or t, or includes no nucleotide
  misc_feature (339)..(339): n comprises a, c, g, or t, or includes no nucleotide
  misc_feature (349)..(349): n comprises a, c, g, or t, or includes no nucleotide
  misc_feature (368)..(368): n comprises a, c, g, or t, or includes no nucleotide
  misc_feature (375)..(375): n comprises a, c, g, or t, or includes no nucleotide
  misc_feature (391)..(391): n comprises a, c, g, or t, or includes no nucleotide
  misc_feature (421)..(421): n comprises a, c, g, or t, or includes no nucleotide
  misc_feature (440)..(440): n comprises a, c, g, or t, or includes no nucleotide
  misc_feature (447)..(447): n comprises a, c, g, or t, or includes no nucleotide
  misc_feature (457)..(457): n comprises a, c, g, or t, or includes no nucleotide
  misc_feature (496)..(496): n comprises a, c, g, or t, or includes no nucleotide
  misc_feature (506)..(506): n comprises a, c, g, or t, or includes no nucleotide
  misc_feature (508)..(511): n comprises a, c, g, or t, or includes no nucleotide
  misc_feature (546)..(546): n comprises a, c, g, or t, or includes no nucleotide
  misc_feature (732)..(732): n comprises a, c, g, or t, or includes no nucleotide
  misc_feature (759)..(759): n comprises a, c, g, or t, or includes no nucleotide
  misc_feature (761)..(761): n comprises a, c, g, or t, or includes no nucleotide
  misc_feature (823)..(823): n comprises a, c, g, or t, or includes no nucleotide
  misc_feature (967)..(968): n comprises a, c, g, or t, or includes no nucleotide
  misc_feature (978)..(978): n comprises a, c, g, or t, or includes no nucleotide
gatctagggatgagaatgngattaggtggacagaaaggggattcttctttttaaatatttctctgaattgagtctcttgttaaaaaaagaaaatattacttgagtnnctaacccagtaattctacttttggtagttactttcagaaattagttttaaggacatcactccagatgcagataaaannntacatacaagagaatttaataatctttgtatttgtaaaagcaaaatattgaaagcaacctaagtattgaacaatagcaaagtggtttaataaattattaggcatccatatggatcaatnatgttcatgctattattaagaatccagatttttnatgaaaaganatctgacatgtgggggagnaacatgncaagggatgtgggatnaaaaattagaggagaaaactcaagtttttncccaaacgaccaatccaantgttccntgtggattancccccgggatgaaaatggtttccggctccgtgttccccnaacacttttnannnnatgatattggtttctgcttctgtgttctctacacnttttatatttaaaaatctatcaataatttgcttagaaaataaaagaaaaggggaaaatgtggtagcaaagagaatatggatgatgtctacatagttgctctgtcttgctttctgaggttcaatatttcactgaatctttgggctgggctagatagaagccctagatggaagaagattctctggccntctgtggcagaagatatgtctgctatntngtaggggttttgtttgtttgtttttgtttcattcagaacaacactgacatgcatccactcanataagtcatatttatcttgaccaactcatttagttgcaataaaatttttatgctttcatgtattgggtcacacacacacacacacacacacacacacacactattcttgtgttttccagaccacaagtgttgagaagtgtaaannaccccacatntggcagtttgaaagaaggcccgtcccagtc

SEQ ID NO: 3349 - DNA, 518 bp, Canis familiaris
  misc_feature (193)..(193): n comprises a, c, g, or t, or includes no nucleotide
  misc_feature (197)..(197): n comprises a, c, g, or t, or includes no nucleotide
  misc_feature (216)..(216): n comprises a, c, g, or t, or includes no nucleotide
  misc_feature (222)..(222): n comprises a, c, g, or t, or includes no nucleotide
  misc_feature (226)..(226): n comprises a, c, g, or t, or includes no nucleotide
  misc_feature (237)..(237): n comprises a, c, g, or t, or includes no nucleotide
  misc_feature (243)..(243): n comprises a, c, g, or t, or includes no nucleotide
  misc_feature (266)..(266): n comprises a, c, g, or t, or includes no nucleotide
  misc_feature (285)..(286): n comprises a, c, g, or t, or includes no nucleotide
  misc_feature (291)..(292): n comprises a, c, g, or t, or includes no nucleotide
  misc_feature (298)..(298): n comprises a, c, g, or t, or includes no nucleotide
  misc_feature (301)..(301): n comprises a, c, g, or t, or includes no nucleotide
  misc_feature (311)..(311): n comprises a, c, g, or t, or includes no nucleotide
  misc_feature (323)..(323): n comprises a, c, g, or t, or includes no nucleotide
  misc_feature (335)..(335): n comprises a, c, g, or t, or includes no nucleotide
  misc_feature (337)..(337): n comprises a, c, g, or t, or includes no nucleotide
  misc_feature (345)..(345): n comprises a, c, g, or t, or includes no nucleotide
  misc_feature (349)..(349): n comprises a, c, g, or t, or includes no nucleotide
  misc_feature (355)..(355): n comprises a, c, g, or t, or includes no nucleotide
  misc_feature (370)..(370): n comprises a, c, g, or t, or includes no nucleotide
  misc_feature (385)..(385): n comprises a, c, g, or t, or includes no nucleotide
  misc_feature (391)..(391): n comprises a, c, g, or t, or includes no nucleotide
  misc_feature (395)..(395): n comprises a, c, g, or t, or includes no nucleotide
  misc_feature (402)..(402): n comprises a, c, g, or t, or includes no nucleotide
  misc_feature (407)..(407): n comprises a, c, g, or t, or includes no nucleotide
  misc_feature (409)..(411): n comprises a, c, g, or t, or includes no nucleotide
  misc_feature (414)..(414): n comprises a, c, g, or t, or includes no nucleotide
  misc_feature (416)..(416): n comprises a, c, g, or t, or includes no nucleotide
  misc_feature (424)..(424): n comprises a, c, g, or t, or includes no nucleotide
  misc_feature (438)..(439): n comprises a, c, g, or t, or includes no nucleotide
  misc_feature (442)..(443): n comprises a, c, g, or t, or includes no nucleotide
  misc_feature (450)..(450): n comprises a, c, g, or t, or includes no nucleotide
  misc_feature (455)..(455): n comprises a, c, g, or t, or includes no nucleotide
  misc_feature (461)..(461): n comprises a, c, g, or t, or includes no nucleotide
  misc_feature (474)..(474): n comprises a, c, g, or t, or includes no nucleotide
  misc_feature (480)..(480): n comprises a, c, g, or t, or includes no nucleotide
  misc_feature (487)..(487): n comprises a, c, g, or t, or includes no nucleotide
  misc_feature (492)..(492): n comprises a, c, g, or t, or includes no nucleotide
  misc_feature (501)..(501): n comprises a, c, g, or t, or includes no nucleotide
  misc_feature (509)..(509): n comprises a, c, g, or t, or includes no nucleotide
  misc_feature (511)..(511): n comprises a, c, g, or t, or includes no nucleotide
  misc_feature (513)..(513): n comprises a, c, g, or t, or includes no nucleotide
  misc_feature (517)..(517): n comprises a, c, g, or t, or includes no nucleotide
cctgcggccttctcagcttatgcagatgacccctcacgctcagtggctttctaaaaccaaatacaggtttcccccaccattcaaaaagtagaaagttcctaatgaaatctttcaaagcaaaatggcctaaagcaaagagcgtccccagcttttcaaaagtttgtagtctgtgcgtttccgtttatgaaagacnggcnagtacagtaacagcaaganagtaanagtnccttttccatntctttnggataacaaacaggtactaatgncaggttttcacaaagcggnngtggnncctcantgnggaaactttntgggcaagtgtnagtgatcgcctnangaaccggncctnaaattnagcaggaagttgggnaagatgttggggggnacttgnggcnacaattncatanannnaananatttattnattacatcaaaacnnacnntcagggnacttnaagccntggttgtttttanaacccncaggatngtttncaatccctnggcccatngntnaaanc

SEQ ID NO: 3350 - DNA, 175 bp, Canis familiaris
tgatgtacaaattgcactgaacaataccaaaatcagccttaatgacaaactgtctcaactaaaaacatatgtgatacaatttgatcagtatattaaagataattatgatttacgtgattttaaaatagcagttgctaagattattgatcaaatcattgaaaaactgaaaattctt

SEQ ID NO: 3351 - DNA, 2262 bp, Canis familiaris
cgccgggtgggcgtgcgcctcaggccgccatttctcggcgtccgccgaggagccgccccctccccgggctcgcccgcgacccgagcgcccgcgccgccggctctccgcgcttcggtcgccagcccagtgagaaaaatgctgagcttcttccgtagaacacttgggcgtcggtcaatgcgtaaacatgctgagaaggaacgactccgagaagctcaacgagctgccacacacattcctgcagctggagactctaagtctatcatcacatgtcgggtttctcttttggatggtactgatgttagtgtggacttgccgaaaaaagccaaaggacaagagctctttgatcagataatgtaccacttggaccttattgaaagtgactattttggattgagatttatggattctgcacaagtagcacactggttagatggtacaaagagcatcaaaaagcaagtaaaaattggttcaccctattgtctgcatcttcgagttaaattttattcttcagaaccaaataatcttcgggaagagctaacccggtatttatttgttcttcagttaaaacaagatattctcagtggaaaattagagtgtccctttgatacagcagttcagttggcagcttataatctgcaagctgaacttggtgactatgatcttgctgagcatagtcctgaacttgtatctgagttcaggttcgtgcccattcagactgaagagatggagctggctatttttgagaaatggaaggagtacagaggtcaaacaccagcacaagctgaaaccaattacctgaataaagccaaatggttagaaatgtatggggttgatatgcatgtagtcaaggctagagatgggaatgactatagcttgggactaactccgacaggagtccttgtttttgaaggagagaccaaaattggcttatttttttggcccaagataaccagattggattttaagaagaataaattaactctggtggttgtagaagatgatgttcagggaaaagagcaggagcatacatttgtctttagactggatcacccaaaagcatgcaaacatttatggaaatgtgctgtggaacatcatgcattctttcgccttcgaggtccggtccaaaagagttctcatcgatcaggatttattcgactaggatcacgatttagatatagtgggaaaactgagtatcagaccacaaaaaccaataaagcaagaagatcaacatccttcgaaagaagacccagcaaacgatactctcgaagaactctacaaatgaaagcaagtacagcaaaacctgaagaactcagtgttcacaataatgtttcaactcagagtaatggatcccaacaggcttggagtgtgagatcaactctgcctgtgattccttctgttccctctggtcctgtgctggcagagatagagaatcttccaaggaatcctggatcaaaccagtatgacaggaaatgggtctctgctgccagtgactgctgtcaacgtggtggaaaccagtggaacacaagggccttgtccccaccccagcctgcacatagaaactacactgactttgtccatgagcacaatgtgaagaatacaggagtccatcatgatgttcattttcccggccatgcagccatgactgagatatgagtgttaagcccattagacactgggactctttgtcatgcaagttgatggtatacattttctatacatagaggattgatcacattaggagaatttgggagaaattactttatattgagtcactagttgcatagtattgtttgtaattctgtgaaagggaaaagaatgtgaagaaagctgtatgccatcaatgataatcacacatgcttttgtattgaaagggtatgtatatatcattgtgattttggaaaggtttttcatgattttaacatggtaatacatcactcagaagatgtctcaggagaaggtttgtgtttgtgtaaaagctatctgttatcctcccacaccatgccatccaaatagattgaggttaaaagaatcagatacactaatcacacactgagaaggaagcatatccaggcacaatgtatcaacctttggtgatactttgataaaactgcttttctatgcatttttaatacttctacaatgaccccatgccttaatttcagttaagtgcctaagattctataattgtaattaatgtaatttttagttaaaagcactattactttttgacaaaccagcattttattttaccaaaagatctag

SEQ ID NO: 3352 - DNA, 422 bp, Canis familiaris
  misc_feature (8)..(8): n comprises a, c, g, or t, or includes no nucleotide
  misc_feature (53)..(53): n comprises a, c, g, or t, or includes no nucleotide
  misc_feature (66)..(66): n comprises a, c, g, or t, or includes no nucleotide
  misc_feature (299)..(299): n comprises a, c, g, or t, or includes no nucleotide
  misc_feature (307)..(307): n comprises a, c, g, or t, or includes no nucleotide
  misc_feature (318)..(318): n comprises a, c, g, or t, or includes no nucleotide
  misc_feature (323)..(323): n comprises a, c, g, or t, or includes no nucleotide
  misc_feature (327)..(327): n comprises a, c, g, or t, or includes no nucleotide
  misc_feature (336)..(336): n comprises a, c, g, or t, or includes no nucleotide
  misc_feature (353)..(353): n comprises a, c, g, or t, or includes no nucleotide
  misc_feature (358)..(358): n comprises a, c, g, or t, or includes no nucleotide
  misc_feature (368)..(368): n comprises a, c, g, or t, or includes no nucleotide
  misc_feature (373)..(373): n comprises a, c, g, or t, or includes no nucleotide
  misc_feature (383)..(383): n comprises a, c, g, or t, or includes no nucleotide
  misc_feature (387)..(387): n comprises a, c, g, or t, or includes no nucleotide
  misc_feature (400)..(400): n comprises a, c, g, or t, or includes no nucleotide
  misc_feature (420)..(420): n comprises a, c, g, or t, or includes no nucleotide
gcacaagntaaacctgagcaagggaaagaaaaagaacagtggaataaagaggntttgcaaggacgnttttcacaagatgatgacagtgtctttacatccaaaatgcaaagcagacaaatgggcgtctccgggaagaacatggctaaaagcaccagcatcagtggagacatgtgctcgctggagaaggcggacggcagccagtccgacacggcggtgggtgccctgggcaccagcggcaaaaagcggcgctctagcattggcgccaaaatggtggccattgtttggcctgttcccggaanaattccancgcttccccanctcanccanaacgggttnggcccctcctgtttttnctttnggaattcccnacttnaattttgggntttnaaataccctcccntttccccttggtccttcctntt

SEQ ID NO: 3353 - DNA, 430 bp, Canis familiaris
  misc_feature (15)..(15): n comprises a, c, g, or t, or includes no nucleotide
  misc_feature (19)..(19): n comprises a, c, g, or t, or includes no nucleotide
  misc_feature (52)..(52): n comprises a, c, g, or t, or includes no nucleotide
  misc_feature (123)..(123): n comprises a, c, g, or t, or includes no nucleotide
  misc_feature (166)..(166): n comprises a, c, g, or t, or includes no nucleotide
  misc_feature (168)..(168): n comprises a, c, g, or t, or includes no nucleotide
  misc_feature (170)..(170): n comprises a, c, g, or t, or includes no nucleotide
  misc_feature (239)..(239): n comprises a, c, g, or t, or includes no nucleotide
  misc_feature (243)..(243): n comprises a, c, g, or t, or includes no nucleotide
  misc_feature (248)..(248): n comprises a, c, g, or t, or includes no nucleotide
  misc_feature (255)..(255): n comprises a, c, g, or t, or includes no nucleotide
  misc_feature (323)..(323): n comprises a, c, g, or t, or includes no nucleotide
  misc_feature (334)..(334): n comprises a, c, g, or t, or includes no nucleotide
  misc_feature (364)..(364): n comprises a, c, g, or t, or includes no nucleotide
  misc_feature (366)..(366): n comprises a, c, g, or t, or includes no nucleotide
  misc_feature (395)..(395): n comprises a, c, g, or t, or includes no nucleotide
  misc_feature (403)..(403): n comprises a, c, g, or t, or includes no nucleotide
  misc_feature (411)..(411): n comprises a, c, g, or t, or includes no nucleotide
ttttttgaaaatganaaangctgtttggggtgcacgatccaagggtaacatnaccttgcccctcaaaaggtaaaacaacagagctacatttctgaagtacttaattaggccttcagcaaggantgtgggaaaattctggacccataaaaaccttccagttctggananantaaattttctctgcagcactctgtcactgctcatttcctgcatcattttgacaacatctcatatttccntgangcttngacatantctataaatggggacagaaagtgaagaacagagatgatagggaacaaatttggactccctcacggtcncttcctttcanctttccattaaaggttcaggctgaagggcngnatttaagatggtccttttaaaaggccaancattagtntccacccnccaaaagaaacttttcaac

SEQ ID NO: 3354 - DNA, 245 bp, Canis familiaris
  misc_feature (178)..(178): n comprises a, c, g, or t, or includes no nucleotide
  misc_feature (189)..(189): n comprises a, c, g, or t, or includes no nucleotide
  misc_feature (235)..(235): n comprises a, c, g, or t, or includes no nucleotide
aattcggcacgaggtaaaacaggatgtaaagtttatatacaagaatataatgtttatctgaaatatttacagtgttggttaaagcaatatttttacaacttttttaaggtcaactactatgtatattacaggtaagctacaatggtttaatttgcaaaattaagtaaaaaatgttttnaacaaagcttnaaagtactcaggtcaattataaaatctgttttgccctttattcggngaactcatgc

SEQ ID NO: 3355 - DNA, 222 bp, Canis familiaris
  misc_feature (170)..(170): n comprises a, c, g, or t, or includes no nucleotide
  misc_feature (183)..(183): n comprises a, c, g, or t, or includes no nucleotide
  misc_feature (191)..(191): n comprises a, c, g, or t, or includes no nucleotide
  misc_feature (204)..(204): n comprises a, c, g, or t, or includes no nucleotide
  misc_feature (212)..(212): n comprises a, c, g, or t, or includes no nucleotide
  misc_feature (214)..(214): n comprises a, c, g, or t, or includes no nucleotide
  misc_feature (217)..(217): n comprises a, c, g, or t, or includes no nucleotide
ttttttttttatgggtcactgaggccttttttattctgcacataaaaccactggggatcttgcctgtggacaccttgagattattacatagacagacctggctccagatgcttggtggaagtgaggtgagaaarcaatgatttgggcccctttcatgtttacagagctanggttcccccccanggttcccncatgtcaactctngcttcttntngcnattct

SEQ ID NO: 3356 - DNA, 253 bp, Canis familiaris
  misc_feature (196)..(197): n comprises a, c, g, or t, or includes no nucleotide
  misc_feature (199)..(199): n comprises a, c, g, or t, or includes no nucleotide
  misc_feature (207)..(207): n comprises a, c, g, or t, or includes no nucleotide
  misc_feature (225)..(225): n comprises a, c, g, or t, or includes no nucleotide
  misc_feature (232)..(232): n comprises a, c, g, or t, or includes no nucleotide
  misc_feature (245)..(245): n comprises a, c, g, or t, or includes no nucleotide
  misc_feature (247)..(247): n comprises a, c, g, or t, or includes no nucleotide
ttttttttttaggtaaaacaggatgtaaagtttatatacaagaatataatgtttatctgaaatatttacagtgttggttaaagcaatatttttacaactttttaaggtcaactactatgtatattacaggtaagctacaatggtttaatttgcaaaattaaktaaaaaatgttttaaacaaakcttaaagtctcknnkntcttatanaatctttttttccccccnttcgtgngggcccctctgtnkntgtttt

SEQ ID NO: 3357 - DNA, 270 bp, Canis familiaris
  misc_feature (171)..(171): n comprises a, c, g, or t, or includes no nucleotide
  misc_feature (176)..(177): n comprises a, c, g, or t, or includes no nucleotide
  misc_feature (186)..(186): n comprises a, c, g, or t, or includes no nucleotide
  misc_feature (188)..(188): n comprises a, c, g, or t, or includes no nucleotide
  misc_feature (191)..(191): n comprises a, c, g, or t, or includes no nucleotide
  misc_feature (200)..(200): n comprises a, c, g, or t, or includes no nucleotide
  misc_feature (222)..(223): n comprises a, c, g, or t, or includes no nucleotide
  misc_feature (237)..(237): n comprises a, c, g, or t, or includes no nucleotide
  misc_feature (247)..(247): n comprises a, c, g, or t, or includes no nucleotide
  misc_feature (251)..(251): n comprises a, c, g, or t, or includes no nucleotide
  misc_feature (254)..(255): n comprises a, c, g, or t, or includes no nucleotide
tcaggtgactacattttaataaatcaaagtctggtatcctaagcttgaaacaattccttagaagactccaggaaagacagtcatctgagtgcagattcactgatccccaccgatatttttaggtgtgctgtgattccatgtttgcggagggcaggggtgcgagcagggcancctanncccctcagntncgnggcatttgnaggctgcgtgaatttgtcgggnncttctcgatgaccnctccccctkncccnccnngtggtttggtccccg

SEQ ID NO: 3358 - DNA, 251 bp, Canis familiaris
  misc_feature (250)..(250): n comprises a, c, g, or t, or includes no nucleotide
aattcggcacgagcttgaagctagaacctaatagcagggctgaagcaaaagaggcactcacctggggtgcagaatttaaggtggtgccaaaaagttcagtaattgagataaataatatatgaatgcaatactttttaaattcaaaattactgcaggggcgtctggctggctcgtgggtagaacatgtgctcttgatcttggggttgtaagttcaagcccccctattaggtgtgggcctactccaaaaaana

SEQ ID NO: 3359 - DNA, 218 bp, Canis familiaris
  misc_feature (14)..(14): n comprises a, c, g, or t, or includes no nucleotide
  misc_feature (49)..(49): n comprises a, c, g, or t, or includes no nucleotide
tttttacccttacntatagggggaattgggggtmcggggccccccttcngaggtcgacggtatcgataagcttgatatcgaattcggcacgagctgggtggcgcaggtttggcgcctgctttggccagggcgcgatcctggagacccgggatcgaatcccacatcgggcttcgatcatggasctgytycctctgtgctcgccctctytcttctcgtga

SEQ ID NO: 3360 - DNA, 319 bp, Canis familiaris
  misc_feature (274)..(274): n comprises a, c, g, or t, or includes no nucleotide
cggcacgagctcgcgamcacaagatgattctgtgctatgaggatgctttgggaaagtcctagtgatttagagctctccagtgggccgactggcttagcatctgggaaattctgaatcacatcggatggaatgttttgtttacttcctccccacagtgctaaaaggggagaaagggttctttttttcctccagctaatttgctggaaacagtaaataatttcccagttcatctggtctcacttcaaccgccttcctgtggccatctatttgctantttcagagaagaaatatcgtttgacatatttgacttcctttcaaa

SEQ ID NO: 3361 - DNA, 305 bp, Canis familiaris
  misc_feature (257)..(257): n comprises a, c, g, or t, or includes no nucleotide
  misc_feature (272)..(272): n comprises a, c, g, or t, or includes no nucleotide
  misc_feature (275)..(275): n comprises a, c, g, or t, or includes no nucleotide
  misc_feature (289)..(289): n comprises a, c, g, or t, or includes no nucleotide
ttttttaacattttatttattcattcatgaaagacacacagagagaaaagcagagacacaggcagagggagaaggaggctctgtgcaggaagtctgatgtgggacttgatccgggaccccaggatccctccctgagccgaacggaatgctcaaccactgatccacccaggcatccctgagccctcaaattcttaagtttgaattttcaattggtttccgataacctagacagtttttkgaaaratacactgaaaggnaatatacyataatgnttnaacataaaataaantaaaaccagcccccag

SEQ ID NO: 3362 - DNA, 223 bp, Canis familiaris
  misc_feature (193)..(193): n comprises a, c, g, or t, or includes no nucleotide
  misc_feature (195)..(195): n comprises a, c, g, or t, or includes no nucleotide
cttctttattatactgtctcagtgagtagtaagtttgaagcaagcttcattggaagcactagggatttgttagttgccatagtcgwtgatctataaattctagtcctttcagagattccctaactattattggcaaagctcttgctgaatagaatctggtgcttccmagctaagtstgcctggttccccgtcncncctatcttttttgccgccttgccttggt

SEQ ID NO: 3363 - DNA, 443 bp, Canis familiaris
  misc_feature (3)..(3): n comprises a, c, g, or t, or includes no nucleotide
  misc_feature (11)..(11): n comprises a, c, g, or t, or includes no nucleotide
  misc_feature (18)..(19): n comprises a, c, g, or t, or includes no nucleotide
  misc_feature (22)..(22): n comprises a, c, g, or t, or includes no nucleotide
  misc_feature (34)..(35): n comprises a, c, g, or t, or includes no nucleotide
  misc_feature (42)..(42): n comprises a, c, g, or t, or includes no nucleotide
  misc_feature (46)..(46): n comprises a, c, g, or t, or includes no nucleotide
  misc_feature (52)..(52): n comprises a, c, g, or t, or includes no nucleotide
  misc_feature (57)..(57): n comprises a, c, g, or t, or includes no nucleotide
  misc_feature (64)..(64): n comprises a, c, g, or t, or includes no nucleotide
  misc_feature (79)..(79): n comprises a, c, g, or t, or includes no nucleotide
  misc_feature (96)..(96): n comprises a, c, g, or t, or includes no nucleotide
  misc_feature (146)..(146): n comprises a, c, g, or t, or includes no nucleotide
  misc_feature (156)..(156): n comprises a, c, g, or t, or includes no nucleotide
  misc_feature (164)..(164): n comprises a, c, g, or t, or includes no nucleotide
  misc_feature (171)..(171): n comprises a, c, g, or t, or includes no nucleotide
  misc_feature (189)..(189): n comprises a, c, g, or t, or includes no nucleotide
  misc_feature (199)..(199): n comprises a, c, g, or t, or includes no nucleotide
  misc_feature (283)..(284): n comprises a, c, g, or t, or includes no nucleotide
  misc_feature (291)..(291): n comprises a, c, g, or t, or includes no nucleotide
  misc_feature (303)..(303): n comprises a, c, g, or t, or includes no nucleotide
  misc_feature (314)..(314): n comprises a, c, g, or t, or includes no nucleotide
  misc_feature (360)..(361): n comprises a, c, g, or t, or includes no nucleotide
  misc_feature (412)..(412): n comprises a, c, g, or t, or includes no nucleotide
ttngactaaantgggaanntancccaccagtganngagcagnacangctgcnactgntgcaagntccccaacgggggcnataaaatgaacagggcnaaattattataaagaattaaggctctggaattctcaaggctgggaaactnaaaaaaacancccaaaantaaacancccaagcttttatctccnaccgaagganatgttgaccccacccaccagttttgggggcccaccatccaaaaaaatttaaacccatttgcacgttttcgggcaaccttagccnngaaaaanttaaaaatccanttgggcccccnacccaacccgaaaaagaaaggaaaattcctgaaccccagttccccnnctgttccttattcccaaactaaaatttaacttatttttaaaacttcccttnaaaatatccccgaatttttattaatttggaa

SEQ ID NO: 3364 - DNA, 405 bp, Canis familiaris
  misc_feature (39)..(39): n comprises a, c, g, or t, or includes no nucleotide
  misc_feature (49)..(49): n comprises a, c, g, or t, or includes no nucleotide
  misc_feature (54)..(54): n comprises a, c, g, or t, or includes no nucleotide
  misc_feature (99)..(99): n comprises a, c, g, or t, or includes no nucleotide
  misc_feature (101)..(101): n comprises a, c, g, or t, or includes no nucleotide
  misc_feature (125)..(125): n comprises a, c, g, or t, or includes no nucleotide
  misc_feature (174)..(174): n comprises a, c, g, or t, or includes no nucleotide
  misc_feature (188)..(188): n comprises a, c, g, or t, or includes no nucleotide
  misc_feature (280)..(280): n comprises a, c, g, or t, or includes no nucleotide
  misc_feature (293)..(293): n comprises a, c, g, or t, or includes no nucleotide
  misc_feature (320)..(320): n comprises a, c, g, or t, or includes no nucleotide
  misc_feature (332)..(332): n comprises a, c, g, or t, or includes no nucleotide
  misc_feature (344)..(344): n comprises a, c, g, or t, or includes no nucleotide
ttttttttgaaaatgaaaaaagctgtttggggtgcacgntccaagggtnacatnacctttcccctcaaaaggttaaacaacagaactacatttctgaantncttaattaggccttcagcaaggantgtgggaaaattacagacccataaaaaccttccagttctggaaagaatnaattttctctgcancactctgtcactgctcatttcctgcatcattttgacaacatctcatatttccatgaagctttgacataatctataaatggggaccgaaagtnaagaacagaaatnattgggacagaatttggaactcccccncggtcacttccnttcactttcccnttaaaggttaagctgaaagggcggcttttaaaaatggtccttttaaaaaggggaaaccttt

SEQ ID NO: 3365 - DNA, 280 bp, Canis familiaris
  misc_feature (259)..(259): n comprises a, c, g, or t, or includes no nucleotide
  misc_feature (268)..(268): n comprises a, c, g, or t, or includes no nucleotide
  misc_feature (277)..(277): n comprises a, c, g, or t, or includes no nucleotide
tttttttgtttgttttccaaactcagggagactctgtaacctggttctgacaggactgactcctgtggggcagctgtggctgggggtaggtgtagggaatgggagactcctacaatcggccgtagagtccttggcagggcttaggccggtgccacctggctggtctccgtccttgaaggccctggcaaaggcctcgtcgtcacccaatgggttcttcccacaccaaagggtggtgatcatccagttccggaactccttnttcaccacnaaaaaaaanaca

SEQ ID NO: 3366 - DNA, 511 bp, Canis familiaris
  misc_feature (168)..(168): n comprises a, c, g, or t, or includes no nucleotide
  misc_feature (170)..(170): n comprises a, c, g, or t, or includes no nucleotide
  misc_feature (176)..(176): n comprises a, c, g, or t, or includes no nucleotide
  misc_feature (250)..(250): n comprises a, c, g, or t, or includes no nucleotide
  misc_feature (341)..(341): n comprises a, c, g, or t, or includes no nucleotide
  misc_feature (360)..(360): n comprises a, c, g, or t, or includes no nucleotide
  misc_feature (426)..(426): n comprises a, c, g, or t, or includes no nucleotide
  misc_feature (430)..(430): n comprises a, c, g, or t, or includes no nucleotide
  misc_feature (439)..(439): n comprises a, c, g, or t, or includes no nucleotide
  misc_feature (458)..(458): n comprises a, c, g, or t, or includes no nucleotide
  misc_feature (469)..(469): n comprises a, c, g, or t, or includes no nucleotide
  misc_feature (479)..(479): n comprises a, c, g, or t, or includes no nucleotide
  misc_feature (484)..(484): n comprises a, c, g, or t, or includes no nucleotide
  misc_feature (494)..(494): n comprises a, c, g, or t, or includes no nucleotide
cagtatgattgtgattcatctggccacatcacagcttccttgtgacatcagttataaaatgctggactagggttttactcttcaaagcaaaattaagcctcaactaatagattcaccaaaatgatacatcacgaagcctccttccaccaaagaatgctccggttcagnanttaagnaatgccctgcgctccatatgctgaaattcattatctgttccttgcaatcaatgggcagattatttggccgatancctgcctgaagtcctccacactgctagaactcactctcacggggcttctgatcacttctctgctcattaatatctgttgcctgaaaagatnggccggaaaaaaaaagaangttacttgcttcccactccccccccattaactttttaataaggaaggcggaaattccttaaacaantttnaagattttnggttggccccatttctctntccatatttcncgggcgggcncccanggaaataacngtccccttggttggttg

SEQ ID NO: 3367 - DNA, 479 bp, Canis familiaris
  misc_feature (50)..(50): n comprises a, c, g, or t, or includes no nucleotide
  misc_feature (52)..(52): n comprises a, c, g, or t, or includes no nucleotide
  misc_feature (187)..(187): n comprises a, c, g, or t, or includes no nucleotide
  misc_feature (189)..(189): n comprises a, c, g, or t, or includes no nucleotide
  misc_feature (354)..(354): n comprises a, c, g, or t, or includes no nucleotide
  misc_feature (357)..(357): n comprises a, c, g, or t, or includes no nucleotide
  misc_feature (359)..(359): n comprises a, c, g, or t, or includes no nucleotide
  misc_feature (383)..(383): n comprises a, c, g, or t, or includes no nucleotide
  misc_feature (389)..(389): n comprises a, c, g, or t, or includes no nucleotide
  misc_feature (435)..(435): n comprises a, c, g, or t, or includes no nucleotide
aagattttatttatttattcatgagagacacacagagagaggcaaagacncnggcagagggagaagcaggatccctgcaggggagcctgttgtggaccctatcccaggaccctgggatcaggacctaagctgaaggcagatgctcaatcgctgaaccacccaggtggttctcttccttccttccttntngccttctctcctcctttccttcattcctctctccatccctatctctttttccttcttcaagattttctctttatcaatggattccagaaagtttactattatgtatctaagtataggctttttaaaaattatttattgttgcttgaattggatcttttcatctanttnanaaatttgggaacattatttcttcnaatggnttctctgaaccattctcttaagtcattctcttaattcttaattcantgttttttatactattgggtattttccccagattactgaaggtc

SEQ ID NO: 3368 - DNA, 562 bp, Canis familiaris
  misc_feature (246)..(246): n comprises a, c, g, or t, or includes no nucleotide
  misc_feature (308)..(308): n comprises a, c, g, or t, or includes no nucleotide
  misc_feature (349)..(349): n comprises a, c, g, or t, or includes no nucleotide
  misc_feature (433)..(433): n comprises a, c, g, or t, or includes no nucleotide
  misc_feature (445)..(445): n comprises a, c, g, or t, or includes no nucleotide
  misc_feature (461)..(461): n comprises a, c, g, or t, or includes no nucleotide
  misc_feature (477)..(477): n comprises a, c, g, or t, or includes no nucleotide
  misc_feature (489)..(490): n comprises a, c, g, or t, or includes no nucleotide
  misc_feature (518)..(518): n comprises a, c, g, or t, or includes no nucleotide
  misc_feature (521)..(521): n comprises a, c, g, or t, or includes no nucleotide
  misc_feature (524)..(524): n comprises a, c, g, or t, or includes no nucleotide
tatcgaattcggcacgagcctttggcttgggtcatgatcctggggtcgtgggatggagtccagagctgggctccctgctcagtggggagcctgcttctccctctccctctgcccctcacccctctcacacgttctctctctcccccaaataaataaataaataaataaataaataaataatctttttaaatagactataataattgatataaacaaaccagtgaggcaaaatagaaagcctagaantatataagtgtatttttttttgaaaactgaaataagaagaaatggcatgatagatcagtacnaaaatcagtaaatggtgctggacattgcttgttgttggganaaatctaatgaactgtgttctgctatctgtgacagaacctaactgcttatccagctgtcttcagatcttttacaacattggganaaaaaagatccncaaacaaataatcttntgtcatataggtctcncccagcatcggnntgcctaaaatcgtccagggcggtcctcntanacntaattcccgcctcctgcttctttcttcccaatgggcct

SEQ ID NO: 3369 - DNA, 415 bp, Canis familiaris
  misc_feature (25)..(25): n comprises a, c, g, or t, or includes no nucleotide
  misc_feature (27)..(27): n comprises a, c, g, or t, or includes no nucleotide
  misc_feature (107)..(107): n comprises a, c, g, or t, or includes no nucleotide
  misc_feature (190)..(190): n comprises a, c, g, or t, or includes no nucleotide
  misc_feature (224)..(224): n comprises a, c, g, or t, or includes no nucleotide
  misc_feature (274)..(274): n comprises a, c, g, or t, or includes no nucleotide
  misc_feature (307)..(307): n comprises a, c, g, or t, or includes no nucleotide
  misc_feature (310)..(310): n comprises a, c, g, or t, or includes no nucleotide
  misc_feature (318)..(318): n comprises a, c, g, or t, or includes no nucleotide
  misc_feature (330)..(330): n comprises a, c, g, or t, or includes no nucleotide
  misc_feature (334)..(336): n comprises a, c, g, or t, or includes no nucleotide
  misc_feature (351)..(351): n comprises a, c, g, or t, or includes no nucleotide
  misc_feature (391)..(391): n comprises a, c, g, or t, or includes no nucleotide
  misc_feature (393)..(393): n comprises a, c, g, or t, or includes no nucleotide
tcaccgccttcctgcaccctgaggngnttgagcacatgaaggaaattgtggttttggaaactctggaggacatcgacaagaatgggatgggttcgtggatcaagatnagtatattgcggatatgttttcccacgaggagaacggccctgagccagactgggttttgtcagaacgggagcagtttaatganttccgggatctgaacaaggatgggaagttggacnaagatgagattcgccactggatcctccctccagactatgaccacgctcangccgaaggcaggcacctggtgttttgagttccnacnaaaattangatgaaaagctnactnnngaagaaatattgganaactggaacatgttttgtttggaaacccaactacctattntngggaagaactcccccaaaatcc

SEQ ID NO: 3370 - DNA, 409 bp, Canis familiaris
  misc_feature (41)..(41): n comprises a, c, g, or t, or includes no nucleotide
  misc_feature (223)..(223): n comprises a, c, g, or t, or includes no nucleotide
  misc_feature (235)..(235): n comprises a, c, g, or t, or includes no nucleotide
  misc_feature (242)..(242): n comprises a, c, g, or t, or includes no nucleotide
  misc_feature (264)..(264): n comprises a, c, g, or t, or includes no nucleotide
  misc_feature (345)..(345): n comprises a, c, g, or t, or includes no nucleotide
  misc_feature (378)..(378): n comprises a, c, g, or t, or includes no nucleotide
  misc_feature (386)..(386): n comprises a, c, g, or t, or includes no nucleotide
  misc_feature (394)..(394): n comprises a, c, g, or t, or includes no nucleotide
aaagattttatttatttattcatgagagatacacagaggcngagatacaggcagagggagaagcaggcttcatgcagggagcccgaagcaggactcgattccgggatcatgccctaagctgaaagcagacactcaacccctgagccactcaggcgtccctaaaagtcttttctttctattttaaaaatagatattttacttataagttcactctatgtattanaaaaccattatntactatnattataaaaacattaattattncttgctgaaataagctctactagaattactatcctatttcctatattcccaattactaaatgattatcctgaagtatgcancctagtgcttctgatcgtactccaaaatatggntctaaganctgatgantcccataatagactg

SEQ ID NO: 3371 - DNA, 538 bp, Canis familiaris
  misc_feature (14)..(14): n comprises a, c, g, or t, or includes no nucleotide
  misc_feature (68)..(68): n comprises a, c, g, or t, or includes no nucleotide
  misc_feature (326)..(327): n comprises a, c, g, or t, or includes no nucleotide
  misc_feature (450)..(450): n comprises a, c, g, or t, or includes no nucleotide
ggccgctctgggcncagtggaaacccgggctgcaggatttcggcacgagatttattttaatgatctancctctccctcatttgagttctgctgcagagccattactacacatgtttctagactttctgttcccctccagagatctggatgtggttgtaccagtctcagactcttttaattattgcagtttaaaaataatatttaatgtctagtaggacctcttattctgccacagtggtcttttttagaatcctttttttttcttttcatatttttccacttgaagctttacagttaaccgtctacttaaaaaatatcagtctttnngttaatgttaactgaacatgtaaaattcaacaaaggaagaattgacatcttttttttttttttgacatcttttatgttaaatctttttgtgcaagaacatgatatgcttctctctttgttaangtcttcttttggcctttttgtgccaaaaaaaagtgccataccttttttgaaacaaatattgtttgcaagaaattgttacttaaatgtc

SEQ ID NO: 3372 - DNA, 266 bp, Canis familiaris
  misc_feature (45)..(45): n comprises a, c, g, or t, or includes no nucleotide
  misc_feature (79)..(79): n comprises a, c, g, or t, or includes no nucleotide
  misc_feature (106)..(106): n comprises a, c, g, or t, or includes no nucleotide
  misc_feature (124)..(124): n comprises a, c, g, or t, or includes no nucleotide
  misc_feature (136)..(136): n comprises a, c, g, or t, or includes no nucleotide
  misc_feature (138)..(138): n comprises a, c, g, or t, or includes no nucleotide
  misc_feature (146)..(146): n comprises a, c, g, or t, or includes no nucleotide
  misc_feature (180)..(180): n comprises a, c, g, or t, or includes no nucleotide
  misc_feature (209)..(209): n comprises a, c, g, or t, or includes no nucleotide
  misc_feature (249)..(249): n comprises a, c, g, or t, or includes no nucleotide
ccaagggatgaaatttccacatttatttttctttcatgtgcatanaatatggcaatgaagtgtcctatgaaacaagcanggaatgggcatggcgcttctataccanactggactttgtgcttcnaaggtacctatncnttttgaanacaaaggagttatagtttgtttttaattgctaanaatccttgggttcccatttgtttttactntcacttctccaatctctttccaatgaacctgcatacaatnatgccttaaccatttgc

SEQ ID NO: 3373 - DNA, 353 bp, Canis familiaris
  misc_feature (22)..(22): n comprises a, c, g, or t, or includes no nucleotide
  misc_feature (41)..(41): n comprises a, c, g, or t, or includes no nucleotide
  misc_feature (48)..(48): n comprises a, c, g, or t, or includes no nucleotide
  misc_feature (68)..(68): n comprises a, c, g, or t, or includes no nucleotide
  misc_feature (72)..(72): n comprises a, c, g, or t, or includes no nucleotide
  misc_feature (80)..(80): n comprises a, c, g, or t, or includes no nucleotide
  misc_feature (120)..(120): n comprises a, c, g, or t, or includes no nucleotide
  misc_feature (164)..(164): n comprises a, c, g, or t, or includes no nucleotide
  misc_feature (180)..(180): n comprises a, c, g, or t, or includes no nucleotide
  misc_feature (199)..(199): n comprises a, c, g, or t, or includes no nucleotide
  misc_feature (201)..(201): n comprises a, c, g, or t, or includes no nucleotide
  misc_feature (207)..(207): n comprises a, c, g, or t, or includes no nucleotide
  misc_feature (215)..(215): n comprises a, c, g, or t, or includes no nucleotide
  misc_feature (225)..(225): n comprises a, c, g, or t, or includes no nucleotide
  misc_feature (234)..(234): n comprises a, c, g, or t, or includes no nucleotide
  misc_feature (246)..(246): n comprises a, c, g, or t, or includes no nucleotide
  misc_feature (248)..(248): n comprises a, c, g, or t, or includes no nucleotide
  misc_feature (251)..(251): n comprises a, c, g, or t, or includes no nucleotide
  misc_feature (263)..(263): n comprises a, c, g, or t, or includes no nucleotide
  misc_feature (283)..(283): n comprises a, c, g, or t, or includes no nucleotide
ggcgagccagcgagagggcgcnagcggcggcgctgcctgcngcctgcngcctcggccggccggcgaanccantgcgcgtncgcggcggcggcctccgcggcgaccgggggagcggacgcncggaccggcgaagcgggcgaacgggcgaacggtgcgggcgcgangcgaagccgagccacnaacgacatgggcgaccganancaactnctgcaacnggcgccgctngccgaacangcggaaacgctncnacnacatggcctccnccctaaaagcggtgacccanctcaatgaacctctttccaatgaaaatttaaaacctcctctctgtggtctacaaaaatgttgtttgtgcc

SEQ ID NO: 3374 - DNA, 268 bp, Canis familiaris
  misc_feature (33)..(33): n comprises a, c, g, or t, or includes no nucleotide
  misc_feature (51)..(51): n comprises a, c, g, or t, or includes no nucleotide
  misc_feature (99)..(99): n comprises a, c, g, or t, or includes no nucleotide
  misc_feature (121)..(122): n comprises a, c, g, or t, or includes no nucleotide
  misc_feature (137)..(137): n comprises a, c, g, or t, or includes no nucleotide
  misc_feature (140)..(140): n comprises a, c, g, or t, or includes no nucleotide
  misc_feature (145)..(145): n comprises a, c, g, or t, or includes no nucleotide
  misc_feature (202)..(202): n comprises a, c, g, or t, or includes no nucleotide
  misc_feature (207)..(207): n comprises a, c, g, or t, or includes no nucleotide
  misc_feature (215)..(215): n comprises a, c, g, or t, or includes no nucleotide
  misc_feature (221)..(221): n comprises a, c, g, or t, or includes no nucleotide
  misc_feature (224)..(224): n comprises a, c, g, or t, or includes no nucleotide
  misc_feature (232)..(232): n comprises a, c, g, or t, or includes no nucleotide
  misc_feature (238)..(238): n comprises a, c, g, or t, or includes no nucleotide
  misc_feature (245)..(245): n comprises a, c, g, or t, or includes no nucleotide
  misc_feature (252)..(252): n comprises a, c, g, or t, or includes no nucleotide
cgcggcctgactcaccgcgcggacatcctccgngcgccgcgcacggacganccgacgcacggcacggcacgtcggccagcagcaccacatggcacaacnttccgccgtgcacaggacccanntgccgctaagcgtanatntaccncataacacccctgccaatgtgcgcatctagtccctacaactgtagacaaatgaatancgaanaagcgacntctatnccntatcccancacttnacgtttnatagatnccgattcgaaaattat

SEQ ID NO: 3375 - DNA, 456 bp, Canis familiaris
  misc_feature (202)..(202): n comprises a, c, g, or t, or includes no nucleotide
  misc_feature (282)..(282): n comprises a, c, g, or t, or includes no nucleotide
  misc_feature (284)..(284): n comprises a, c, g, or t, or includes no nucleotide
  misc_feature (300)..(300): n comprises a, c, g, or t, or includes no nucleotide
  misc_feature (305)..(305): n comprises a, c, g, or t, or includes no nucleotide
  misc_feature (352)..(353): n comprises a, c, g, or t, or includes no nucleotide
  misc_feature (360)..(360): n comprises a, c, g, or t, or includes no nucleotide
  misc_feature (383)..(383): n comprises a, c, g, or t, or includes no nucleotide
  misc_feature (394)..(394): n comprises a, c, g, or t, or includes no nucleotide
  misc_feature (423)..(423): n comprises a, c, g, or t, or includes no nucleotide
  misc_feature (430)..(430): n comprises a, c, g, or t, or includes no nucleotide
  misc_feature (433)..(433): n comprises a, c, g, or t, or includes no nucleotide
  misc_feature (446)..(446): n comprises a, c, g, or t, or includes no nucleotide
aaagttatatcaagaattaagtttgcttcatgccaatgacctgctcctcagcaggggctggttttgctatttgaggaatgacagccactctgttgtatatgcaagagagctggatggcatcgatagagtctttcttgtggttctgaattttggagaattatcactggtaaatctccaggaaatgatttccaacattcccgcnagaatgagaataaggttaagtactaattctgctgacgatcgcaatacagttgatacaatgccatttactggataaagganangctcaccttgaatacnacacnacgatctctctcaccaacgctttcaaacgatttttgttccatcggcnnctatccntgtttaacatctgccactgtgtngcccctataanaataaaactgctcttttttacaccttgcntactccnttnctcgcggttaacntgatcagtcc

SEQ ID NO: 3376 - DNA, 303 bp, Canis familiaris
  misc_feature (14)..(14): n comprises a, c, g, or t, or includes no nucleotide
  misc_feature (50)..(50): n comprises a, c, g, or t, or includes no nucleotide
  misc_feature (53)..(53): n comprises a, c, g, or t, or includes no nucleotide
  misc_feature (103)..(103): n comprises a, c, g, or t, or includes no nucleotide
  misc_feature (110)..(110): n comprises a, c, g, or t, or includes no nucleotide
  misc_feature (112)..(112): n comprises a, c, g, or t, or includes no nucleotide
  misc_feature (120)..(120): n comprises a, c, g, or t, or includes no nucleotide
  misc_feature (124)..(124): n comprises a, c, g, or t, or includes no nucleotide
  misc_feature (153)..(153): n comprises a, c, g, or t, or includes no nucleotide
  misc_feature (172)..(172): n comprises a, c, g, or t, or includes no nucleotide
  misc_feature (210)..(210): n comprises a, c, g, or t, or includes no nucleotide
  misc_feature (225)..(225): n comprises a, c, g, or t, or includes no nucleotide
  misc_feature (251)..(251): n comprises a, c, g, or t, or includes no nucleotide
  misc_feature (283)..(283): n comprises a, c, g, or t, or includes no nucleotide
ctctcatccccccnagcacaggcccttgcagctctggccccagcctggancancttcccttgccttttgcacgtttgcaccctggcatctcctgaattataangccttangnagcctcangaantggatagctgttttcacatacagggaagnaacccacccagatcttgtngaaatgttcaaactaataaaatcatgaatatttttacnaaaatttttaaatanctcactttaattttgaataagttcancttttaattgggttctgaatttccctccttcngtttggtttggggccactta

SEQ ID NO: 3377 - DNA, 390 bp, Canis familiaris
  misc_feature (194)..(194): n comprises a, c, g, or t, or includes no nucleotide
  misc_feature (233)..(233): n comprises a, c, g, or t, or includes no nucleotide
  misc_feature (235)..(235): n comprises a, c, g, or t, or includes no nucleotide
  misc_feature (243)..(243): n comprises a, c, g, or t, or includes no nucleotide
  misc_feature (303)..(303): n comprises a, c, g, or t, or includes no nucleotide
  misc_feature (333)..(333): n comprises a, c, g, or t, or includes no nucleotide
  misc_feature (358)..(358): n comprises a, c, g, or t, or includes no nucleotide
  misc_feature (366)..(366): n comprises a, c, g, or t, or includes no nucleotide
ccatataacaagcttttgtttattaacataatcctcgtccagaaaaaactgtccccctctctaatcaactttgatgcttacaaaaattaaaaaacaaaatttactagactacttaaccctattaaggcattttagaaattgatttccagaataatggaaaattttcaagctctcaaaatcctgctatgtttatngggcaattcttagatttgtggaaatatacctgcattgananaagatgtntgatataagctgctccttataactgctctgtggcaaatgtacttattctctaatctctanttgattgatcagacaatagtcgactcagtnatcattctaatattctcatgacggntcctgatnaaattacatacgagatcactcttt

SEQ ID NO: 3378 - DNA, 465 bp, Canis familiaris
  misc_feature (72)..(72): n comprises a, c, g, or t, or includes no nucleotide
  misc_feature (91)..(91): n comprises a, c, g, or t, or includes no nucleotide
  misc_feature (114)..(114): n comprises a, c, g, or t, or includes no nucleotide
  misc_feature (141)..(141): n comprises a, c, g, or t, or includes no nucleotide
  misc_feature (154)..(154): n comprises a, c, g, or t, or includes no nucleotide
  misc_feature (165)..(165): n comprises a, c, g, or t, or includes no nucleotide
  misc_feature (181)..(181): n comprises a, c, g, or t, or includes no nucleotide
  misc_feature (279)..(279): n comprises a, c, g, or t, or includes no nucleotide
  misc_feature (281)..(281): n comprises a, c, g, or t, or includes no nucleotide
  misc_feature (308)..(308): n comprises a, c, g, or t, or includes no nucleotide
  misc_feature (328)..(328): n comprises a, c, g, or t, or includes no nucleotide
  misc_feature (390)..(390): n comprises a, c, g, or t, or includes no nucleotide
  misc_feature (399)..(399): n comprises a, c, g, or t, or includes no nucleotide
  misc_feature (403)..(403): n comprises a, c, g, or t, or includes no nucleotide
  misc_feature (415)..(415): n comprises a, c, g, or t, or includes no nucleotide
  misc_feature (426)..(426): n comprises a, c, g, or t, or includes no nucleotide
  misc_feature (436)..(436): n comprises a, c, g, or t, or includes no nucleotide
ggaaaattagttaacccttttgaacctcagtttagttatctgcaaattgaagatcactgtatttacctatanggttgttataaagagacgntaacccagatgtgcctacttacngaatctgaggcaatactactttccatntcttccctttctnatgtttattcnaaactgaaacaagttnaatataaatacttgcaatagttaacccagaactaatctagtaggctgagattttcacatgtatacaagattaagtttttatgggtcctgaatagggcncntgcatgaacatttaaatatccatttcntagatatattttgatgctcnatttattcgcagcctctgttatacttcacgctgctgtcaagatttagtccaattgcactatnattaggtcntgcncgtaagtgcagngtcctaaagcntatgtctgtnttccaaatgcccatttttaggatatttga

SEQ ID NO: 3379 - DNA, 309 bp, Canis familiaris
  misc_feature (68)..(68): n comprises a, c, g, or t, or includes no nucleotide
  misc_feature (74)..(74): n comprises a, c, g, or t, or includes no nucleotide
  misc_feature (94)..(94): n comprises a, c, g, or t, or includes no nucleotide
  misc_feature (164)..(164): n comprises a, c, g, or t, or includes no nucleotide
  misc_feature (235)..(236): n comprises a, c, g, or t, or includes no nucleotide
  misc_feature (302)..(302): n comprises a, c, g, or t, or includes no nucleotide
gaggctggcaacaccaccatctttagtgttttgctatgattctaagcaaaatactgaaaaggacctcnatgaangagaaactaaaatgagagtnaaaatgatggtgaaaagcgtggaaattggaagttattcagagtcctctcttgattttaaaaatgacttcntaggaccagtgacttctgattggtctgaatttagaccaagcatgagaatgagcagccatattaaacatccnntgatggccccatgcgttgtgaagaaattgtccagacaggactatataaggattgtttaaggacatnaaaactt

SEQ ID NO: 3380 - DNA, 455 bp, Canis familiaris
  misc_feature (129)..(129): n comprises a, c, g, or t, or includes no nucleotide
  misc_feature (218)..(218): n comprises a, c, g, or t, or includes no nucleotide
  misc_feature (220)..(220): n comprises a, c, g, or t, or includes no nucleotide
  misc_feature (237)..(237): n comprises a, c, g, or t, or includes no nucleotide
  misc_feature (243)..(243): n comprises a, c, g, or t, or includes no nucleotide
  misc_feature (266)..(266): n comprises a, c, g, or t, or includes no nucleotide
  misc_feature (272)..(272): n comprises a, c, g, or t, or includes no nucleotide
  misc_feature (276)..(276): n comprises a, c, g, or t, or includes no nucleotide
  misc_feature (278)..(278): n comprises a, c, g, or t, or includes no nucleotide
  misc_feature (291)..(291): n comprises a, c, g, or t, or includes no nucleotide
  misc_feature (301)..(301): n comprises a, c, g, or t, or includes no nucleotide
  misc_feature (354)..(354): n comprises a, c, g, or t, or includes no nucleotide
  misc_feature (381)..(381): n comprises a, c, g, or t, or includes no nucleotide
  misc_feature (395)..(395): n comprises a, c, g, or t, or includes no nucleotide
  misc_feature (403)..(403): n comprises a, c, g, or t, or includes no nucleotide
ttattggagttcaatttgccaacatatagcataacacccagttgcactagacatttttaacatcatgttatgagactggatcttacttaaatcctatggaaaatgtttggggtgggttggtttgggttncatgcaaattaccattagatcagctaaccagttaggtcaattccaccactctgcaggtggtgttttataagagattctcctgtctattntngggaccctcctactctnggatcnaaagaagatctctggactctgtntccccngttntntccagctccatgnctgatccganaaattggaggaaaaaccgaaccccgtatctctcttcgttatcctctggcccgngcctattcaacccaaacccctccgtcngtctctccgaattntcccttgnaaacggacactgacggaatacctcccaccctatttgtaatgggctaaacgtg

SEQ ID NO: 3381 - DNA, 300 bp, Canis familiaris
  misc_feature (84)..(84): n comprises a, c, g, or t, or includes no nucleotide
  misc_feature (148)..(148): n comprises a, c, g, or t, or includes no nucleotide
  misc_feature (152)..(152): n comprises a, c, g, or t, or includes no nucleotide
  misc_feature (155)..(155): n comprises a, c, g, or t, or includes no nucleotide
  misc_feature (162)..(162): n comprises a, c, g, or t, or includes no nucleotide
  misc_feature (182)..(182): n comprises a, c, g, or t, or includes no nucleotide
cagacctttgcatcagggaacttctggagtcagcaaaacagccctcagcccaatggctttgtttccattatctgagactccaangattggtgggggatgggggggtgggggggaaggtgaaaaatgctttcacaaattccctcccaanacanaangatgacngttggttacattttggcaanatgctgtgccttggcatcgctttaattatgacccatatatgccgatgccttgcaccctgcctccaccctgttttccttatgtctgctgtgtcttgtgatcataggacacttaggctca

SEQ ID NO: 3382 - DNA, 477 bp, Canis familiaris
  misc_feature (26)..(26): n comprises a, c, g, or t, or includes no nucleotide
  misc_feature (30)..(30): n comprises a, c, g, or t, or includes no nucleotide
  misc_feature (38)..(38): n comprises a, c, g, or t, or includes no nucleotide
  misc_feature (79)..(79): n comprises a, c, g, or t, or includes no nucleotide
  misc_feature (109)..(109): n comprises a, c, g, or t, or includes no nucleotide
  misc_feature (146)..(146): n comprises a, c, g, or t, or includes no nucleotide
  misc_feature (148)..(148): n comprises a, c, g, or t, or includes no nucleotide
  misc_feature (213)..(213): n comprises a, c, g, or t, or includes no nucleotide
  misc_feature (252)..(252): n comprises a, c, g, or t, or includes no nucleotide
  misc_feature (272)..(272): n comprises a, c, g, or t, or includes no nucleotide
  misc_feature (306)..(306): n comprises a, c, g, or t, or includes no nucleotide
  misc_feature (339)..(339): n comprises a, c, g, or t, or includes no nucleotide
  misc_feature (374)..(374): n comprises a, c, g, or t, or includes no nucleotide
  misc_feature (394)..(394): n comprises a, c, g, or t, or includes no nucleotide
  misc_feature (436)..(436): n comprises a, c, g, or t, or includes no nucleotide
  misc_feature (438)..(438): n comprises a, c, g, or t, or includes no nucleotide
tgcaggtttttattggtttagaaccntgtngcttatcnaaattttatctaaatttatttatatcttacattagccttcnaattatatttgaatttcatttaggaattcnaaatgatgtcctagaaatggaatttgacaactaggananaactaatttttaataacattaaatttaataaatgttataacattttataaagtttaataaaactnagattttaataaaatgaattaaaagggacaacccaaacnaacttattttatgatattcnattgtttaacacggtaccttatacatagacatanattttttgatctctgactgactttaagtgtttntagctgcgattttttttacattcatatctactccnttattctttccatctttccntcccccatactgaaaccaattctttgccgatgaaaccgatancnattgcttctttttggcggtatgtttttaagacaagagtt

SEQ ID NO: 3383 - DNA, 416 bp, Canis familiaris
  misc_feature (9)..(9): n comprises a, c, g, or t, or includes no nucleotide
  misc_feature (52)..(52): n comprises a, c, g, or t, or includes no nucleotide
  misc_feature (62)..(62): n comprises a, c, g, or t, or includes no nucleotide
  misc_feature (92)..(92): n comprises a, c, g, or t, or includes no nucleotide
  misc_feature (108)..(108): n comprises a, c, g, or t, or includes no nucleotide
  misc_feature (112)..(112): n comprises a, c, g, or t, or includes no nucleotide
  misc_feature (115)..(115): n comprises a, c, g, or t, or includes no nucleotide
  misc_feature (120)..(120): n comprises a, c, g, or t, or includes no nucleotide
  misc_feature (142)..(142): n comprises a, c, g, or t, or includes no nucleotide
  misc_feature (159)..(159): n comprises a, c, g, or t, or includes no nucleotide
  misc_feature (161)..(161): n comprises a, c, g, or t, or includes no nucleotide
  misc_feature (183)..(183): n comprises a, c, g, or t, or includes no nucleotide
  misc_feature (197)..(197): n comprises a, c, g, or t, or includes no nucleotide
  misc_feature (209)..(209): n comprises a, c, g, or t, or includes no nucleotide
  misc_feature (230)..(230): n comprises a, c, g, or t, or includes no nucleotide
  misc_feature (269)..(269): n comprises a, c, g, or t, or includes no nucleotide
  misc_feature (283)..(283): n comprises a, c, g, or t, or includes no nucleotide
  misc_feature (294)..(294): n comprises a, c, g, or t, or includes no nucleotide
  misc_feature (300)..(300): n comprises a, c, g, or t, or includes no nucleotide
  misc_feature (331)..(332): n comprises a, c, g, or t, or includes no nucleotide
  misc_feature (342)..(342): n comprises a, c, g, or t, or includes no nucleotide
  misc_feature (345)..(345): n comprises a, c, g, or t, or includes no nucleotide
  misc_feature (347)..(347): n comprises a, c, g, or t, or includes no nucleotide
  misc_feature (353)..(353): n comprises a, c, g, or t, or includes no nucleotide
  misc_feature (367)..(367): n comprises a, c, g, or t, or includes no nucleotide
  misc_feature (383)..(383): n comprises a, c, g, or t, or includes no nucleotide
  misc_feature (392)..(392): n comprises a, c, g, or t, or includes no nucleotide
ttatttcanccaaggaatgatgcatgctacaaattaaactttactttccccncttggttttncaaaaaataccaccatttcaacccccaatnaacatggcacttgttncttnctnccctnctaatttatccaaatttccaantgtttccttcagtaacnangcttctcctgcactcaggtctntgtctgtcccatantactaatgaccnatcaggacacctgcccaattncaattccctgttaatctcatttttaacatatcttccaanaactctgtcccaanatgtctattcnaaaaantatgataattcaaaaatccccaaccggttgnntctctcaacntancngaaagntctgatgggacaangctcctcctttactcnctcctgcanccagtacctggtccttcggcgttc

SEQ ID NO: 3384 - DNA, 260 bp, Canis familiaris
  misc_feature (108)..(108): n comprises a, c, g, or t, or includes no nucleotide
  misc_feature (120)..(120): n comprises a, c, g, or t, or includes no nucleotide
  misc_feature (134)..(134): n comprises a, c, g, or t, or includes no nucleotide
  misc_feature (177)..(177): n comprises a, c, g, or t, or includes no nucleotide
  misc_feature (198)..(198): n comprises a, c, g, or t, or includes no nucleotide
  misc_feature (235)..(235): n comprises a, c, g, or t, or includes no nucleotide
cccttttgcacatgggctgctatggtgatcggaacggtagatttagaggtgactgggtgagatatgaaccttttgcagaccattgtgagtgttcccctccctgattcnatttcagctcangtcatgatgtccangatgtgaaattgagctcctcctcctccacccaccgtgtcaagntctgctctcagcaaggaatcngcttgagattctctctctctctctctgctaccccccncatattataaatctttttcttctca

SEQ ID NO: 3385 - DNA, 538 bp, Canis familiaris
  misc_feature (39)..(39): n comprises a, c, g, or t, or includes no nucleotide
  misc_feature (123)..(123): n comprises a, c, g, or t, or includes no nucleotide
  misc_feature (143)..(143): n comprises a, c, g, or t, or includes no nucleotide
  misc_feature (212)..(212): n comprises a, c, g, or t, or includes no nucleotide
  misc_feature (245)..(245): n comprises a, c, g, or t, or includes no nucleotide
  misc_feature (282)..(282): n comprises a, c, g, or t, or includes no nucleotide
  misc_feature (324)..(324): n comprises a, c, g, or t, or includes no nucleotide
  misc_feature (331)..(331): n comprises a, c, g, or t, or includes no nucleotide
  misc_feature (334)..(334): n comprises a, c, g, or t, or includes no nucleotide
  misc_feature (358)..(358): n comprises a, c, g, or t, or includes no nucleotide
  misc_feature (360)..(360): n comprises a, c, g, or t, or includes no nucleotide
  misc_feature (380)..(380): n comprises a, c, g, or t, or includes no nucleotide
  misc_feature (423)..(423): n comprises a, c, g, or t, or includes no nucleotide
  misc_feature (452)..(452): n comprises a, c, g, or t, or includes no nucleotide
  misc_feature (471)..(471): n comprises a, c, g, or t, or includes no nucleotide
gttctctgtctctgtctctctctctctctcaaataaatnaataaaatctttaaaatatatatatccctgttcccacttcagaaggaccatatcaaaatgacttctgatccagctagccatctnatgctaaccaaattgtggtntattcatattatgaaatgacactcaaaaactttgcacaaggcaatactgatatacaacaaaaaaactcnaaataattatgttgagagagaactagacaaaanaggtcccgtgtatctgatccctttatattaaatctanaaatcctactaatctatatgacagaaacaatcataatgtctnggggatnganagataatggacagaaaggagattntnagacagaaaactttaggtgnaattttctatctaagtttatgctcttaattcctctcaaccatntgtgcaatatcttataacaatattgtccncataggtttgtctattcgncataaattaccaaatccctttctaatttaattttatatcctattttcaatccgcactttcctaattg

SEQ ID NO: 3386 - DNA, 390 bp, Canis familiaris
  misc_feature (15)..(15): n comprises a, c, g, or t, or includes no nucleotide
  misc_feature (57)..(57): n comprises a, c, g, or t, or includes no nucleotide
  misc_feature (80)..(80): n comprises a, c, g, or t, or includes no nucleotide
  misc_feature (96)..(96): n comprises a, c, g, or t, or includes no nucleotide
  misc_feature (178)..(178): n comprises a, c, g, or t, or includes no nucleotide
  misc_feature (207)..(207): n comprises a, c, g, or t, or includes no nucleotide
  misc_feature (225)..(225): n comprises a, c, g, or t, or includes no nucleotide
  misc_feature (228)..(228): n comprises a, c, g, or t, or includes no nucleotide
  misc_feature (247)..(247): n comprises a, c, g, or t, or includes no nucleotide
  misc_feature (256)..(256): n comprises a, c, g, or t, or includes no nucleotide
  misc_feature (289)..(289): n comprises a, c, g, or t, or includes no nucleotide
  misc_feature (309)..(309): n comprises a, c, g, or t, or includes no nucleotide
  misc_feature (326)..(326): n comprises a, c, g, or t, or includes no nucleotide
  misc_feature (344)..(344): n comprises a, c, g, or t, or includes no nucleotide
  misc_feature (361)..(361): n comprises a, c, g, or t, or includes no nucleotide
tgaggaaacctcaanaagggaaagggtaagtggtgttaaatagtaagcctgtgccanaaaacaccaatgacctgacttangtctccagtctctcanttcaatgctctttccacttcacatgttcctgtgccatgctcctgaatctatcctttcaaaaggaagacagtaaataagatantgaaagctgttggtctctatttgtcatangggcttgtctgaaggcanacnttcaaatggtttttgaatntgcacccancgaccataactcctcaataaaaaggggcctganccatacccgtgattaagganctgacttgcaacaccangttattggatttctccangatacactggctctcanggtctaagctgctgtctttgggtccaaaa

SEQ ID NO: 3387 - DNA, 483 bp, Canis familiaris
  misc_feature (207)..(207): n comprises a, c, g, or t, or includes no nucleotide
  misc_feature (421)..(421): n comprises a, c, g, or t, or includes no nucleotide
  misc_feature (436)..(436): n comprises a, c, g, or t, or includes no nucleotide
  misc_feature (443)..(444): n comprises a, c, g, or t, or includes no nucleotide
  misc_feature (447)..(447): n comprises a, c, g, or t, or includes no nucleotide
  misc_feature (453)..(453): n comprises a, c, g, or t, or includes no nucleotide
  misc_feature (456)..(457): n comprises a, c, g, or t, or includes no nucleotide
tactcttactatccctgcctgtactggctgctggaattacaatacttttaacagaccggaatcttaatacaacattttttgatcccgctggaggaggagaccctatcctatatcaacacctattctgattcttcgggcatcctgaagtttacattcttatcctgcccggattcggaataatttctcacattgtcacttactactcanggaaaaaaaacctttcggttatataggaatagtatgagcaataatatctattgggttttagctttatcgtatgactcacatattttaccgtaggataatttgaccacaacttcttactccgcactatattacgtatccacgggataattttattatggacctcctgagcaataatattcactatcttgactaggttattctattactagggtangttgcactatctctnaactccnnacnatattntgnnttcctttcttcaagacattgctttga

SEQ ID NO: 3388 - DNA, 444 bp, Canis familiaris
  misc_feature (354)..(354): n comprises a, c, g, or t, or includes no nucleotide
  misc_feature (386)..(386): n comprises a, c, g, or t, or includes no nucleotide
  misc_feature (414)..(414): n comprises a, c, g, or t, or includes no nucleotide
ggcagagggagaagcagactccttgtagggaaccccatgcaggaaggacttgatcccgggaccccaggatcgcgacctgagctgaaggcagatgctcaaccactgagccacctaggcgtcccaatttatttgagtcttacttaagactccatttctaccatggcaatgttttaagggtatttgttcacatttatgtgccctaaagtcctatttactatttacctgattttatccccacttcgtttttttcttctccagtatctagttactatgggttcgctgctcctttccttccctttgtaaccatgtagtgaattatatgtttcaaacactgcttaatatactctgacaaanatgaactgccaattttttgtagctcaaaatantggtggttagtatcattttgctgttctnattgctccattctatttaggcgtgtacatg

SEQ ID NO: 3389 - DNA, 352 bp, Canis familiaris
  misc_feature (203)..(203): n comprises a, c, g, or t, or includes no nucleotide
  misc_feature (209)..(209): n comprises a, c, g, or t, or includes no nucleotide
  misc_feature (218)..(218): n comprises a, c, g, or t, or includes no nucleotide
  misc_feature (343)..(343): n comprises a, c, g, or t, or includes no nucleotide
gcttttgtgttcacggaagtctccagtcaagagtcatgtctgcaaataatgttttcctttacaaaataactttgagtgaacacttctaatgagggacagctgcaagtgaagacacatttgtcagtttgtagcctttgctatgaacttatttttttttttttttttatgatagtcacagagagagagagagagcagacacacangcaganggagaacangctccatgcaccgggagcccgacgtgggatcgatccgggtctccaggatcgcgcctgggccaaagcagcctaaaccgctgcgcaccaggatcctgctataacttattattagactacataaattnacaaaatca

SEQ ID NO: 3390 - DNA, 307 bp, Canis familiaris
  misc_feature (19)..(19): n comprises a, c, g, or t, or includes no nucleotide
  misc_feature (141)..(141): n comprises a, c, g, or t, or includes no nucleotide
  misc_feature (216)..(216): n comprises a, c, g, or t, or includes no nucleotide
  misc_feature (259)..(259): n comprises a, c, g, or t, or includes no nucleotide
  misc_feature (283)..(283): n comprises a, c, g, or t, or includes no nucleotide
  misc_feature (292)..(292): n comprises a, c, g, or t, or includes no nucleotide
tcatgatcctggtgtgtanacagagctgtggttctggaacaaccctgagctgtatctgttcttccagctgctattgaaggaacaccatatagctctcagggctgctttcagctagaacatctcaaaggctccaggacagantaacctgagtgagcagcccctttcaggatcatgccataattgaggtaaatattcctctgaagtcccttctcttantctcttgacctgaattctgcatgtttaacaagcttttgctatnatgcaatgttgctggtccaaaaantgcccttcnagaagcaaagatgca

SEQ ID NO: 3391 - DNA, 269 bp, Canis familiaris
  misc_feature (101)..(101): n comprises a, c, g, or t, or includes no nucleotide
  misc_feature (137)..(137): n comprises a, c, g, or t, or includes no nucleotide
  misc_feature (151)..(151): n comprises a, c, g, or t, or includes no nucleotide
  misc_feature (195)..(195): n comprises a, c, g, or t, or includes no nucleotide
  misc_feature (229)..(229): n comprises a, c, g, or t, or includes no nucleotide
  misc_feature (237)..(237): n comprises a, c, g, or t, or includes no nucleotide
  misc_feature (256)..(256): n comprises a, c, g, or t, or includes no nucleotide
ccaaagccactcttagttccttctgtttacccccatacttacacaacgtgatattatcacacaatatctttcttaaatatttttttctaagaagaagcaanagaagaagagctagtgatgacgtcagatcccggtcncggtactccacggntacatacttctaacataattcggaacgtatctctcccgaagctntttaatctccttagactgatgtcccatttatcgntaaatatnaaaaaacatcctcacgcgncttcagccgggat

SEQ ID NO: 3392 - DNA, 368 bp, Canis familiaris
  misc_feature (142)..(142): n comprises a, c, g, or t, or includes no nucleotide
  misc_feature (146)..(146): n comprises a, c, g, or t, or includes no nucleotide
  misc_feature (168)..(168): n comprises a, c, g, or t, or includes no nucleotide
  misc_feature (181)..(181): n comprises a, c, g, or t, or includes no nucleotide
  misc_feature (230)..(230): n comprises a, c, g, or t, or includes no nucleotide
  misc_feature (252)..(252): n comprises a, c, g, or t, or includes no nucleotide
  misc_feature (277)..(277): n comprises a, c, g, or t, or includes no nucleotide
  misc_feature (282)..(282): n comprises a, c, g, or t, or includes no nucleotide
  misc_feature (300)..(300): n comprises a, c, g, or t, or includes no nucleotide
  misc_feature (322)..(322): n comprises a, c, g, or t, or includes no nucleotide
cattctatgaagtttgcacctttcattgttttttaactactccacagcagttatctataacgaacagagctgtggagtagttaactgctagcaatccaaattattctttttcttttaaagattttatttatttatttattcntagnagacagagagggagaggcaganacacaggcggganggagaagcaggcatgatgtgggacttgaaccggggtctccaagatcacnccctgggctgcaggcggcgctnaaccgctgcgccaccggggctgtcnatccnaattattcttgttcatanataggcaaatgaatattttcangtggaagaactgttgatttcatttccctccccccccggaaaaaggc

SEQ ID NO: 3393 - DNA, 347 bp, Canis familiaris
  misc_feature (80)..(80): n comprises a, c, g, or t, or includes no nucleotide
  misc_feature (145)..(145): n comprises a, c, g, or t, or includes no nucleotide
  misc_feature (148)..(148): n comprises a, c, g, or t, or includes no nucleotide
  misc_feature (267)..(267): n comprises a, c, g, or t, or includes no nucleotide
  misc_feature (276)..(276): n comprises a, c, g, or t, or includes no nucleotide
  misc_feature (292)..(292): n comprises a, c, g, or t, or includes no nucleotide
  misc_feature (328)..(328): n comprises a, c, g, or t, or includes no nucleotide
tgactacttaactcatttattaatgacccagtaaaatattacaaccaattcagaagagaattcaaaatatcccacatgtnttagcaatcagcaatgctgaaaatgaatttctaaatagatataaactggccttttccaggggganaangaaaatgaaatcaacagttcctccacctgaaaataatcatttgcctatctatgaacaagaataatttggattgacagccccggtggcgcaacggtttaaccccccctgcttcccaaggngtgatcctngaaaacccggttcaantcccacatcatgcctgcttctccctctgcctgtgtntctgcctctccctctctgt

SEQ ID NO: 3394 - DNA, 483 bp, Canis familiaris
  misc_feature (25)..(25): n comprises a, c, g, or t, or includes no nucleotide
  misc_feature (32)..(32): n comprises a, c, g, or t, or includes no nucleotide
  misc_feature (34)..(34): n comprises a, c, g, or t, or includes no nucleotide
  misc_feature (42)..(42): n comprises a, c, g, or t, or includes no nucleotide
  misc_feature (59)..(60): n comprises a, c, g, or t, or includes no nucleotide
  misc_feature (95)..(95): n comprises a, c, g, or t, or includes no nucleotide
  misc_feature (256)..(256): n comprises a, c, g, or t, or includes no nucleotide
  misc_feature (258)..(258): n comprises a, c, g, or t, or includes no nucleotide
  misc_feature (337)..(337): n comprises a, c, g, or t, or includes no nucleotide
  misc_feature (416)..(416): n comprises a, c, g, or t, or includes no nucleotide
gggccggttactcccctcgagtcgnccgtgtntntagcttgntatcgaattcggcacgnnggccaagtcacacaaatatgcagcgggaaaagggngaagcaaagctcccactctgtgtagtgcgcatccccttattacaaccggtgtgattctcacccctcttgtcttccgtagcactgaaataaaagtgaaggagataacctacatcaacagagataccaaaatcatcctgggagaccaagaacaagaacatttncnagctgaacggtgtgtctgaaagggacctgaagaaatccgtgctgtggctgaaagacagctgcagtgcacctgcgaaganatgaatgacatcaacgcgccttatctggtcatgggacagaaatagtggggactggtgatcacctcagtgaacggtggcnaaagggcagaaaaattcaagcgctctcccgaaactccgcattgcattgtattttgcccccctccccc

SEQ ID NO: 3395 - DNA, 308 bp, Canis familiaris
  misc_feature (24)..(24): n comprises a, c, g, or t, or includes no nucleotide
  misc_feature (29)..(29): n comprises a, c, g, or t, or includes no nucleotide
  misc_feature (44)..(44): n comprises a, c, g, or t, or includes no nucleotide
  misc_feature (46)..(46): n comprises a, c, g, or t, or includes no nucleotide
  misc_feature (89)..(89): n comprises a, c, g, or t, or includes no nucleotide
  misc_feature (140)..(140): n comprises a, c, g, or t, or includes no nucleotide
  misc_feature (148)..(148): n comprises a, c, g, or t, or includes no nucleotide
  misc_feature (165)..(165): n comprises a, c, g, or t, or includes no nucleotide
  misc_feature (223)..(223): n comprises a, c, g, or t, or includes no nucleotide
  misc_feature (264)..(264): n comprises a, c, g, or t, or includes no nucleotide
  misc_feature (275)..(275): n comprises a, c, g, or t, or includes no nucleotide
aaagcagtatttattccacttctngcaancatatattatttaangnataagtgatgattatatagcagaagaatacaatttcttttaangcctctgtatctgatttttgtgcagaaatacatcatacttgtacacatttnagaaaaanttatttatttatccatncatgaagaaataatctctgcctcattatcccttaatcacactcagccacgtgcagcanaatcaggtctggtttctggaagtcacttgctttgctgtggnctggcccccantgtgaaggggcttcgctgggctcccatccctca

SEQ ID NO: 3396 - DNA, 474 bp, Canis familiaris
  misc_feature (3)..(3): n comprises a, c, g, or t, or includes no nucleotide
  misc_feature (11)..(11): n comprises a, c, g, or t, or includes no nucleotide
  misc_feature (18)..(18): n comprises a, c, g, or t, or includes no nucleotide
  misc_feature (201)..(201): n comprises a, c, g, or t, or includes no nucleotide
  misc_feature (243)..(243): n comprises a, c, g, or t, or includes no nucleotide
  misc_feature (282)..(282): n comprises a, c, g, or t, or includes no nucleotide
  misc_feature (313)..(313): n comprises a, c, g, or t, or includes no nucleotide
  misc_feature (352)..(354): n comprises a, c, g, or t, or includes no nucleotide
  misc_feature (356)..(356): n comprises a, c, g, or t, or includes no nucleotide
  misc_feature (366)..(366): n comprises a, c, g, or t, or includes no nucleotide
  misc_feature (396)..(396): n comprises a, c, g, or t, or includes no nucleotide
  misc_feature (420)..(420): n comprises a, c, g, or t, or includes no nucleotide
  misc_feature (436)..(437): n comprises a, c, g, or t, or includes no nucleotide
  misc_feature (449)..(449): n comprises a, c, g, or t, or includes no nucleotide
ccncttttgcncgcatcnccttggcggcctttgaaaaggaacagaatatcaccacaattgttgttcacatttatgaagatggcgttaagggctgtgatgctctaaatagtagctttacatgtcttgcagctgaataccctatggtcaagttctgtaaaataaaagcttctaatacaggtgctggggaccgcttttcctcanatgtgctccccacactgctcatctacaaaggtggggaactcntaagcaattttattagtgttactgaacagtttgcagaanaattttttgctggggatgtggagtctttccnaaatgaatatgggttactactgaaagggagatactgccnnnanatcgaccacntggaagaaaaactgaataagatcctattcnatctgttttctccttacaattgtncttgatttgtatatcnnatccttatgacncaattgcaggtattaattgcgggat

SEQ ID NO: 3397 - DNA, 527 bp, Canis familiaris
  misc_feature (31)..(31): n comprises a, c, g, or t, or includes no nucleotide
  misc_feature (45)..(45): n comprises a, c, g, or t, or includes no nucleotide
gtggcagaagatttttggtggggatggggantcttcctaaatgantatgggttactccctgaagggagatcctgccctagatcagcccaacatgggaagaagtactgaataaggagtccctaggtcaaacctttgatttccccttttacaaattgaacattgattttggtagtacccatattcctttagtgaccaccaaggtatggccatggctattttaatttgcgggggataaaaagattgatcctaaaattatttgatccagcattttttagttacttaagtgcatagaggctttactacaaaattattgtagtctttagcaacatgttagtaagcaaagaggatataaataatattgtggcagttttcaaaaattcctttcaagttatatgttgacttttttactccttgtttttgtttttgtttttttttccccctcagtggtgttatttgggctttccaaattacattatcaatcataattttgcttgtatgataaaaataaagtcttaagaggatataaa

SEQ ID NO: 3398 - DNA, 511 bp, Canis familiaris
tctcatccactgaacataagcaaggataccaggcacagagaaccaaactattatataaaatcaaatccctaaaatggaagaagccaaaaaccaaagtttggaggaagactttgaaggacaggccacacatacaggacccaaaggagtaataaatgattggagaaagtttaaattagagagtgaagacagtgattcagttccacctagtaagaaggagattctcagacaaatgtcttctcctcagaatagagatgacaaagactcaaaagaaagattcagcagaaagatgagcattcaagaatatgaactaattcaccgagacaagaagatggaaattgccttcgtaaatatcgtagacaatgtatgcaggatatgcaccagaagctgagttttgggcctagatatggggttgttgtatgaaccttgagacttgggggcaaattctttggaaaccawttgaaaaggacagaaaatctcccccaattgttgttcccattttttgtagattgcg

SEQ ID NO: 3399 - DNA, 361 bp, Canis familiaris
  misc_feature (144)..(144): n comprises a, c, g, or t, or includes no nucleotide
  misc_feature (277)..(277): n comprises a, c, g, or t, or includes no nucleotide
  misc_feature (354)..(354): n comprises a, c, g, or t, or includes no nucleotide
agctagccacccggctcttcaatgtccacaaggatgctgtccttgaggaatgcctggtggcgcccgactcagagattgtgttccccctggacatgggtgtggtgggtcacgttgcccactctaaaaagatcgccaacgtcgtcnacacagaagaagatgagcatttctgtgactttgtggacaccctcactgagtaccagaccaagaacatcttggcttccccataatgaatgggaaggacgtagtggcagtaatcatgctgtgaataaagtggacnaccccacttcccaagagaatgaagaatctctccagtactcatttgcaactatcatgaagttacactgattactaccnattgcaa

SEQ ID NO: 3400 - DNA, 369 bp, Canis familiaris
  misc_feature (142)..(142): n comprises a, c, g, or t, or includes no nucleotide
  misc_feature (193)..(193): n comprises a, c, g, or t, or includes no nucleotide
  misc_feature (247)..(247): n comprises a, c, g, or t, or includes no nucleotide
  misc_feature (259)..(259): n comprises a, c, g, or t, or includes no nucleotide
  misc_feature (337)..(337): n comprises a, c, g, or t, or includes no nucleotide
  misc_feature (347)..(347): n comprises a, c, g, or t, or includes no nucleotide
  misc_feature (355)..(355): n comprises a, c, g, or t, or includes no nucleotide
cagctactgtctctcgggcatgtatgaccacagatatggagatggcgagttcaccgtccagagcaccactggacactgtgtccacatgagagggctgccgtacaaagctaccgagaacgacatttactacttcttctctccnctcaaccctgtgagagtccatattgagattggccctgatggaagagtgacnggtgaagctgatgttgagtttgccactcacgaagaactgtggcagctatgtccnaagaccgggccncatgcaacacagatactagaactttcctgaatccacaactggggccacaatggggcatataccaccagatgatcaagnatggatgtcngccatcanttacatggctcaaa

SEQ ID NO: 3401 - DNA, 398 bp, Canis familiaris
ttggctctcctctcttgacttttccaaatcaagttccttcaaaaaaatacttgcattcttatttgcttctgcagcctgctggtctttaccttcacaattgtctcaacacattggtgacattttttcaagagtccttatctgtaatgtgctatgtttctcatgcatctatatcagaagggactgatcacttcctccccaaatatgaacaacttttactgacctgggaatgtgactaaaagttgattcctgttatctgctgcatctactcgcactgctgactacaatggccctcaatgacacgtggtcaccaatggtttcctctgtcaaatcattgggcccatatcgacccaattttgactttgtgttgtaacttctgagagcgggactgaatcgccttt

SEQ ID NO: 3402 - DNA, 490 bp, Canis familiaris
  misc_feature (146)..(146): n comprises a, c, g, or t, or includes no nucleotide
  misc_feature (280)..(280): n comprises a, c, g, or t, or includes no nucleotide
  misc_feature (305)..(305): n comprises a, c, g, or t, or includes no nucleotide
  misc_feature (357)..(357): n comprises a, c, g, or t, or includes no nucleotide
  misc_feature (379)..(379): n comprises a, c, g, or t, or includes no nucleotide
  misc_feature (384)..(384): n comprises a, c, g, or t, or includes no nucleotide
  misc_feature (443)..(443): n comprises a, c, g, or t, or includes no nucleotide
  misc_feature (463)..(463): n comprises a, c, g, or t, or includes no nucleotide
  misc_feature (478)..(478): n comprises a, c, g, or t, or includes no nucleotide
  misc_feature (482)..(482): n comprises a, c, g, or t, or includes no nucleotide
agagctagccacccggctcttcaatgtccacaaggatgctgtccttgaggaatgcctggtggcgcccgactcagagattgtgttccccctggacatgggtgtggtgggtcacgttgcccactctaaaaagatcgccaacgtcgtcnacacagaagaagatgagcatttctgtgactttgtggacaccctcactgagtaccagaccaagaacatcttggcttccccataatgaatgggaaggacttatggcagtaatcatggctgtgaataaagtggacanccccacttcaccaagaagataaaanatctctcaattactcaatttgcaactatctgaagttacactgattactaccnattgcaatcgctggcaatctgngtgtnggacaatcttgaaactacgatcaaagatccagggcgtccatcggctctcattacattcntgactaatacacaagatttnattgctctatggagncccntcgtccga

SEQ ID NO: 3403 - DNA, 706 bp, Canis familiaris
ttagttttagattcatagcccaattgagaggaaaatataaagatttttcatatctccctgtcctacaatccataactttccacatgagcaacacccctcaccagagtggtatctttgttagagttgatgaacctatattgacacatcatcacccaaaatctatagttttccttagggttcacctttgctgttgtacattctgcatctggacagatgtacaatgccatgtatctgtcatcatagtatcacacacagtattttcacagccctaaaattcatccttcctctccaccccaacccttagcgaccactgatcattttactgttcccatagtttttgcctttttccagaacttcctgtagttggaatcataatgtgcaatcttttcagattggcttttcatttggtaatatgcatttgcctcctccatgtctttttatggcccgatggctttttagtaatgaataatattccatggtctggggggggctgggtggctcagtcggtaagtgttcactcttgatctggttcagtcatgatctcagggcctgagatggatgctcatcagctctgtgtccagcagggatctacagagattcctcccctcctcctcctttgcctctccttcacctaaataatactttttttaagcagatatgaagtccatccattatgttgattccgcctaactcttccagcgacatt

SEQ ID NO: 3404 - DNA, 300 bp, Canis familiaris
  misc_feature (23)..(23): n comprises a, c, g, or t, or includes no nucleotide
  misc_feature (183)..(183): n comprises a, c, g, or t, or includes no nucleotide
  misc_feature (187)..(187): n comprises a, c, g, or t, or includes no nucleotide
  misc_feature (253)..(253): n comprises a, c, g, or t, or includes no nucleotide
  misc_feature (290)..(290): n comprises a, c, g, or t, or includes no nucleotide
aacatcaccctggatgatgccantgctcctcgcctaatggttcttcgtcagccaaggggaacagataactcaatgggatttggtgcagaaagaaagatccgtcaagctggtgtcattgactaaccacatccacaaagcacatcattaatccactatgatcaaattggggggattctggtgaanggtnctgaatatctccctcttcatccctcccaaaatctggaatacttattctattgaactattacaccanttttaacacctccctcctgttatgttttaaaaaatanatatattttt

SEQ ID NO: 3405 - DNA, 407 bp, Canis familiaris
  misc_feature (88)..(88): n comprises a, c, g, or t, or includes no nucleotide
  misc_feature (238)..(238): n comprises a, c, g, or t, or includes no nucleotide
  misc_feature (244)..(244): n comprises a, c, g, or t, or includes no nucleotide
  misc_feature (248)..(248): n comprises a, c, g, or t, or includes no nucleotide
  misc_feature (382)..(382): n comprises a, c, g, or t, or includes no nucleotide
ttgtttatcttctacagcttctgtcactcactgcctatgccttcaagctgtcctgtagcatcacaggctcccatcagggttctgggtnaacatgagtcatctactgccaccatgaggtgatgccagcctaagacttctgggcatggttccttaactgaaatgaggatgctcaactaaaataaaatgaatctaagataatatgctttttctttgggaaagcataagtttaacaaaagtntcaaanggtnttgtaaatcaaaacttgcttttaaattcaaatctgccttcacttattaaacaaacatctcaaccagcattcttatattcagtctggtatctgtactctggaaatgaatcatgtcttcactacgatgctatttancatttaaatgcgtgaattcaactcc

SEQ ID NO: 3406 - DNA, 430 bp, Canis familiaris
  misc_feature (30)..(30): n comprises a, c, g, or t, or includes no nucleotide
  misc_feature (159)..(159): n comprises a, c, g, or t, or includes no nucleotide
  misc_feature (168)..(168): n comprises a, c, g, or t, or includes no nucleotide
  misc_feature (188)..(188): n comprises a, c, g, or t, or includes no nucleotide
  misc_feature (193)..(193): n comprises a, c, g, or t, or includes no nucleotide
  misc_feature (276)..(276): n comprises a, c, g, or t, or includes no nucleotide
  misc_feature (295)..(295): n comprises a, c, g, or t, or includes no nucleotide
  misc_feature (387)..(387): n comprises a, c, g, or t, or includes no nucleotide
  misc_feature (413)..(413): n comprises a, c, g, or t, or includes no nucleotide
cttctattggagattcttcgcttcacatcntattgaagaagctcttggacttcattttgaagacaggtggcggattccaacgagtgaggacacacctgtacggctctctgttgtattacttacagattgcccagagaccagatgaaccagatacactanaagcagccnagaaaaccatgtgggaaagntgacngccctgaagatgtatttagtaaattacagcgagaaaacataccatcattgagactatgcctgcctcatggaattggtctgtcnaatgcttgtgatgtcacanattggaaggatctgcactggtctcttgatcgattgtccctaataacacacatgctttgttcttctacatgctattaagtctgtgacgttgtnaaatactcttgcaactataccccacnccttaacctttctcatc

SEQ ID NO: 3407 - DNA, 287 bp, Canis familiaris
  misc_feature (94)..(94): n comprises a, c, g, or t, or includes no nucleotide
  misc_feature (115)..(115): n comprises a, c, g, or t, or includes no nucleotide
  misc_feature (141)..(141): n comprises a, c, g, or t, or includes no nucleotide
  misc_feature (174)..(174): n comprises a, c, g, or t, or includes no nucleotide
  misc_feature (194)..(194): n comprises a, c, g, or t, or includes no nucleotide
  misc_feature (218)..(218): n comprises a, c, g, or t, or includes no nucleotide
  misc_feature (220)..(220): n comprises a, c, g, or t, or includes no nucleotide
  misc_feature (260)..(260): n comprises a, c, g, or t, or includes no nucleotide
  misc_feature (279)..(279): n comprises a, c, g, or t, or includes no nucleotide
gaggggccaggcgaacaccaccctctgcagaagccaaggttctgtgtccaaagccatcactgatcccccagcccaagcacccagccacccccanccactaccatggccgaagacncagacatgcgcaatgagctggagganatgcagcgaagggctgaccaactggctgatgantcactggaaagcacccgtcntatgctgcaactggttgaagaaantnaagatgctggtatcaggactttggttatgttggatgaacnaggaaaacaactggaaccnttgaagaa

SEQ ID NO: 3408 - DNA, 259 bp, Canis familiaris
  misc_feature (155)..(155): n comprises a, c, g, or t, or includes no nucleotide
  misc_feature (162)..(162): n comprises a, c, g, or t, or includes no nucleotide
  misc_feature (166)..(166): n comprises a, c, g, or t, or includes no nucleotide
  misc_feature (168)..(168): n comprises a, c, g, or t, or includes no nucleotide
  misc_feature (198)..(198): n comprises a, c, g, or t, or includes no nucleotide
ttgctgttcatcaacatagtgtcctgaacatcagtgtttatatccgtaaaaaatatgtaaagtaacgctattgcgatatgatggttcgacgacctaattacagccgttcattcgatcagaatgtctcatacaaccgagcaatctttatatcaggnccgacgnctgnanataaagagatcatctgtgatctttattatntctcccacatctttccctcacgatagaatattaactacatttaccgtgattaggcgtccct

SEQ ID NO: 3409 - DNA, 503 bp, Canis familiaris
  misc_feature (68)..(68): n comprises a, c, g, or t, or includes no nucleotide
  misc_feature (83)..(83): n comprises a, c, g, or t, or includes no nucleotide
  misc_feature (287)..(287): n comprises a, c, g, or t, or includes no nucleotide
  misc_feature (326)..(326): n comprises a, c, g, or t, or includes no nucleotide
  misc_feature (364)..(364): n comprises a, c, g, or t, or includes no nucleotide
  misc_feature (374)..(374): n comprises a, c, g, or t, or includes no nucleotide
  misc_feature (393)..(393): n comprises a, c, g, or t, or includes no nucleotide
  misc_feature (427)..(427): n comprises a, c, g, or t, or includes no nucleotide
  misc_feature (438)..(438): n comprises a, c, g, or t, or includes no nucleotide
  misc_feature (440)..(440): n comprises a, c, g, or t, or includes no nucleotide
  misc_feature (445)..(445): n comprises a, c, g, or t, or includes no nucleotide
  misc_feature (465)..(465): n comprises a, c, g, or t, or includes no nucleotide
cttggcggctcctccacacttgcaccctgcgaggggccaggcgaacaccaccctctgcagaagccaangttctgtgtccaaanccatcactgatcccccagcccaagcacccagccacccccaaccactaccatggccgaagacgcagacatgcgcaatgagctggaggagatgcagcgaaggctgaccaactggctgatgagtcactggaaagcaccgtcgtatgctgcaactggttgaagagagtaaaatgctggtatcaggactttggttatgttggataacangaaacactggaacccttgaagaaggatggaccaatcatnagacttaaagaacaaaaaaattgacgactaggaaatcngcggctgttntttctgtacactaatcatnatctacaaaactggcataccgatgatgtgcaccnctccttgtganangacangccatgtgtctcgagtcatntccaaatatgaaactacgtacgtctgactctcctgccg

SEQ ID NO: 3410 - DNA, 213 bp, Canis familiaris
  misc_feature (62)..(62): n comprises a, c, g, or t, or includes no nucleotide
  misc_feature (103)..(103): n comprises a, c, g, or t, or includes no nucleotide
  misc_feature (111)..(111): n comprises a, c, g, or t, or includes no nucleotide
  misc_feature (135)..(135): n comprises a, c, g, or t, or includes no nucleotide
  misc_feature (145)..(145): n comprises a, c, g, or t, or includes no nucleotide
  misc_feature (169)..(169): n comprises a, c, g, or t, or includes no nucleotide
cgctcatcgattaactggctctgtgtatagctgagctaatcagtaatcaggaacaaattcancaagagttctttgctacagataagaatgaagcactggagangtacatcntgtcgtctctccataccactcagnacaaactganatgcgctatttcatacatacatgngtcatgttgtaaaagtgcaagattactatagagtgctgattcct

SEQ ID NO: 3411 - DNA, 428 bp, Canis familiaris
  misc_feature (202)..(202): n comprises a, c, g, or t, or includes no nucleotide
  misc_feature (220)..(220): n comprises a, c, g, or t, or includes no nucleotide
  misc_feature (231)..(231): n comprises a, c, g, or t, or includes no nucleotide
  misc_feature (236)..(236): n comprises a, c, g, or t, or includes no nucleotide
  misc_feature (246)..(246): n comprises a, c, g, or t, or includes no nucleotide
  misc_feature (276)..(276): n comprises a, c, g, or t, or includes no nucleotide
  misc_feature (295)..(295): n comprises a, c, g, or t, or includes no nucleotide
  misc_feature (409)..(409): n comprises a, c, g, or t, or includes no nucleotide
tttgatgatgctgtcgtccaatctgatatgaagcattggcctttcatggtggtgaatgatgctggcaggcctaaagtccaagtagagtacaagggggagaccaaaagtttctatccaaaagaggtgtcctctatggtcctgacgaacatcaaggaaattgcagaggcctaccttgggaagactgttaccaatgcagttgtcncggtacctgcatacttcnatgactctcancgtcnggctaccaangatgctggaactattgccggtcttaatgtncttccgaattatcaatganccaactgctgctgctattgcttatggcttagacaagaagttggagctgaaaagaacattgttgatctttgatttaagaagttgcacttttgattttccatccctactattgaanatggattctttgaagtcca

SEQ ID NO: 3412 - DNA, 477 bp, Canis familiaris
  misc_feature (374)..(374): n comprises a, c, g, or t, or includes no nucleotide
  misc_feature (389)..(389): n comprises a, c, g, or t, or includes no nucleotide
  misc_feature (400)..(400): n comprises a, c, g, or t, or includes no nucleotide
  misc_feature (429)..(429): n comprises a, c, g, or t, or includes no nucleotide
  misc_feature (457)..(457): n comprises a, c, g, or t, or includes no nucleotide
tggccttcatcgacacccagctctacatccaccagatgatcagcgtcaagaacttcatcctggcggcggacgtcatgaagagcatctcgctgctgcgctaccaggaggagagcaagacgctgagcctggtgtcgcgggacgccaagcccctggaagtgtacagcgtggacttcatggtggacaacgcccagctgggcttcctcgtgtctgaccgtgaccgcaacctcatggtgtacatgtacctgccagaaccaaagaagcttcgggggcatgcgcctgctccggcgggcggactccacgtggtgcccacgtgaacacttctggaagacccgtgccggggggcacggaaggaccacaaaatcgggtgtttgganatacaatagttgtcnccctgatgggnctcggtgtgtgccatcagaaaaattcggngtatgatctgcaaccctacacatctccncatcggctcaccagctccga

SEQ ID NO: 3413 - DNA, 456 bp, Canis familiaris
  misc_feature (174)..(174): n comprises a, c, g, or t, or includes no nucleotide
  misc_feature (326)..(326): n comprises a, c, g, or t, or includes no nucleotide
  misc_feature (331)..(331): n comprises a, c, g, or t, or includes no nucleotide
  misc_feature (359)..(359): n comprises a, c, g, or t, or includes no nucleotide
  misc_feature (391)..(391): n comprises a, c, g, or t, or includes no nucleotide
  misc_feature (395)..(395): n comprises a, c, g, or t, or includes no nucleotide
atatccaattcggcacgaggaaagaagaaagaaagaaaaacagtaaactcatatggacaattggtataaaaagaatagagcaaacccttttatttttagtttatttttattaatttatttttcattcatgtgagacacagagagaaagacgagacacaggcagaggcagaacangctccctgcggggagccagatggaggactctaccccagcaccccgagatcattacctgggctgaagcagatgctcaaccactgagctaccaggtgccctttctacccctcccattttattattattattattatttttttttttttaaaaanaaaanctgaaattaaaaggaaattggaagggcngggaaaggaaaaaaaatccaagcggtccaccnggtnaccaaacaggtctctccactaatatactgaatcacttatcttccctacccccgccctttat

SEQ ID NO: 3414 - DNA, 676 bp, Canis familiaris
ttggctcaaggcaacacctagatggcatgattgcccttaggataggaaacctgtatgaagagcagcctcaggagggaaaatagagctgagatttggattttgagatgtttagggaaaatctaggtggagaaatacacagatctggactttggtggaggtgtcagtgtataactaacttcagatacctatctcaatgagtcttttctcctgggatggttccctctgaggtggacacctcttctctggggagcagactgtaggcatgctgggaaccagtgggggaagtgatggggatatcatcagtcacttaatcctctgtgttccatccagatcttactccaagttctactttgcctgggtcctgaagtctgaagccactttggctcagttctcctgtggttattccaagcctttctgggactagctgtcttcttgtcacaattctctgtgccaacattgctttcctcatcttggcaactcaagatggttggtcaggtactgggcatctcttagtatcattgaggaatgttgtggtttctgtccctcctcttgttattgggagtgttccctgctggatctttgatcccattccactcaagaaaataccaattctcactaccttcgatcgggacatccgatgacctctacaatccgacttcgtcagacggttttttct

SEQ ID NO: 3415 - DNA, 426 bp, Canis familiaris
  misc_feature (192)..(192): n comprises a, c, g, or t, or includes no nucleotide
  misc_feature (202)..(202): n comprises a, c, g, or t, or includes no nucleotide
  misc_feature (324)..(324): n comprises a, c, g, or t, or includes no nucleotide
  misc_feature (341)..(341): n comprises a, c, g, or t, or includes no nucleotide
  misc_feature (359)..(359): n comprises a, c, g, or t, or includes no nucleotide
ggagaaaagtgccgctctgacatggctcattcccaccctctcaagccccagggaccaatttgatcctgcatcctacatcatcggaccagaggaagatcttccaaggaaaatggaatacttggaatttgtgtgtcatgcaccttctgaatatttcaagtcccgttcatcaccgtttcccacagttccgaccanaccagagaanggctacatatggactcatgttggacctactcctgcaatcactattaaggaaaccgtcgccaaccatttgtagtttagaaagtgaaattctttccagtcatcttgtgttcatctcctataaanatgcacatattctttcntgaaatctagatggaaantaactttcctactgccataacatactgtaatacattctggattaaagatatattaatgatttctttt

SEQ ID NO: 3416 - DNA, 674 bp, Canis familiaris
  misc_feature (599)..(599): n comprises a, c, g, or t, or includes no nucleotide
taaagattttatttattcatgagagacacagagagaggcagagacctaggcagagggagaagcaggctcctcatagggatcctgatgtgggactcgatccctaaacagggatcatgccctgagccaaaggcagatgctcagccactgagccacccaggcatcccccaacttgttttttaaatgtgtttctaacccacttgaatatacttttaagataccctgtagcatgaggccacccacatatcttgtatgtggttgcttatctaatcatagttcaagtggctgagtatacattttaaaaaatcaaaacataattggaatttaggctagcctgcttgtattaagacaattcctctttagttttttaaaatttcagatttttactaaaagaaaaatctagtatcttgataactaaaattttaaaaaattggttaggtacagaattacagattatgcttggaaattgttcacagacaaagtacctagggacataaaattctttatttacctatcagccactattgggtagtctgcatattaaacaagacgttaaaaaattacagcccagttagcaggcagtgctatttagtcactagttnattttaatctcccagycttgttatcagtctgatgacawttttcacccttggggtagtacttcccaggaacccagc

SEQ ID NO: 3417 - DNA, 455 bp, Canis familiaris
taaagattttatttattcatcccaacttgttttttaaatgtgtttctaacccacttgaatatacttttaagataccctgtagcatgaggccacccacatatcttgtatgtggttgcttatctaatcatagttcaagtggctgagtatacattttaaaaaatcaaaacataattggaatttaggctagcctgcttgtattaagacaattcctctttagttttttaaaatttcagatttttactaaaagaaaaatctagtatcttgataactaaaattttaaaaaattggttaggtacagaattacagattatgcttggaaattgttcacagacaaagtacctagggacataaaattctttatttacctatcagccactattgggtagtctgcatattaaacaagacgttaaaaaattacagcccagttagcaggcagtgctatttagtcactagtt

SEQ ID NO: 3418 - DNA, 548 bp, Canis familiaris
  misc_feature (357)..(357): n comprises a, c, g, or t, or includes no nucleotide
  misc_feature (359)..(359): n comprises a, c, g, or t, or includes no nucleotide
  misc_feature (438)..(438): n comprises a, c, g, or t, or includes no nucleotide
ccagaacatgcggctgcccaacctgctgggccacgagaccatgaaggaggtgctggagcaggcgggcgcctggatcccgctggtcatgaagcagtgccacccggacaccaagaagttcctctgctcgctcttcgcccccgtgtgcctcgacgacctggacgagaccatccagccgtgccactctctctgcgtgcaggtgaaggaccgctgcgccccggtcatgtcggccttcggcttcccctggccggacatgctcgagtgcgaccgattcccccagacaaagacctctgcatacccctcgctaacagcgaccatctctgccggccaccgaggaactccaaaagtatgcgaacgtgncnaaaataaaaatgaggatgacaacgacataatggaaactctttgtaaaaatgatttttcactgattataaaatgaagganatttcctacatcaacagagataccaaaatcatcctggagaccaagagcaagaccatttacaagctgaacggtgtgtctgaaagggacctgaagaaatccgtgctgtggct

SEQ ID NO: 3419 - DNA, 334 bp, Canis familiaris
  misc_feature (9)..(9): n comprises a, c, g, or t, or includes no nucleotide
  misc_feature (56)..(56): n comprises a, c, g, or t, or includes no nucleotide
acaggaacnattttcacttgagcggggtggattgccctcatgacaattgtcaagtnatttctggtagacaatgaatttggtacagcaaccggtggtggactcatggtccacatggcttccaaggagtaagagcttcctggaccaccagccccagcaagaacaagaggaagagagaggccctcagctgctggggagtccctgccccaacttaatcccccaacacactgagagaatctcctgacctccaatttacatcctagaccccaaggaaggggaagggcttggggagccctaccttgtcatgtaccatcaataaagtatactgtacccagcg

SEQ ID NO: 3420 - DNA, 327 bp, Canis familiaris
  misc_feature (144)..(144): n comprises a, c, g, or t, or includes no nucleotide
  misc_feature (175)..(175): n comprises a, c, g, or t, or includes no nucleotide
  misc_feature (203)..(203): n comprises a, c, g, or t, or includes no nucleotide
  misc_feature (225)..(225): n comprises a, c, g, or t, or includes no nucleotide
  misc_feature (231)..(231): n comprises a, c, g, or t, or includes no nucleotide
  misc_feature (243)..(243): n comprises a, c, g, or t, or includes no nucleotide
  misc_feature (250)..(250): n comprises a, c, g, or t, or includes no nucleotide
  misc_feature (271)..(271): n comprises a, c, g, or t, or includes no nucleotide
  misc_feature (291)..(291): n comprises a, c, g, or t, or includes no nucleotide
  misc_feature (304)..(304): n comprises a, c, g, or t, or includes no nucleotide
  misc_feature (313)..(313): n comprises a, c, g, or t, or includes no nucleotide
ggcttcccctggccggacatgctcgagtgcgaccgattcccccaggacaacgacctctgcatacccctcgctagcagcgaccatctcctgccggccaccgaggaagctccaaaggtatgcgaagcctgcaaaaataaaaatgangatgacaacgacataatggaaactctttgtnaaaatgattttgcactgaaaataaagtnaaggagataactactcacaganatacanaatctcctgganaccagancagacattacaactgacgttntctaaaggactgaaaaatcntctgtgctgaaanacctcatcnctcaagaaataata

SEQ ID NO: 3421 - DNA, 530 bp, Canis familiaris
ggatgtatcttgatatactaaatagcaattgttagatgtgatatgcatataattatatatgtagaattgtgagttaatgtaatacttagcaatatgattttataatggctcctcattttgcttcctatcaagccttccctgaggagtgaatataaagtattggttttccccagaaatttaaaggttatgttattaataataacttccaatcaaatcagataaaggcaattttaagataggaatagtatttgtttcctatctcaagaaatggatttttatgggaattctgcttattaaggagcttttaaatctaaagataagtactaagaaagataacgatagatgtcctctatgtgatttttgctatttgtatgaatcaatgtagtggtgtttagaagctgagactatctataaggtaaatctaccttaagtgtattatgtgttactgaaggcaaatttgtgtatagaatatgagttattattcagccagattatgtactttataaagatgtgaggacttaaacgggaag

SEQ ID NO: 3422 - DNA, 431 bp, Canis familiaris
  misc_feature (33)..(34): n comprises a, c, g, or t, or includes no nucleotide
  misc_feature (70)..(70): n comprises a, c, g, or t, or includes no nucleotide
  misc_feature (98)..(98): n comprises a, c, g, or t, or includes no nucleotide
  misc_feature (108)..(108): n comprises a, c, g, or t, or includes no nucleotide
  misc_feature (135)..(135): n comprises a, c, g, or t, or includes no nucleotide
  misc_feature (143)..(143): n comprises a, c, g, or t, or includes no nucleotide
  misc_feature (162)..(162): n comprises a, c, g, or t, or includes no nucleotide
  misc_feature (171)..(171): n comprises a, c, g, or t, or includes no nucleotide
  misc_feature (177)..(177): n comprises a, c, g, or t, or includes no nucleotide
  misc_feature (194)..(194): n comprises a, c, g, or t, or includes no nucleotide
  misc_feature (199)..(199): n comprises a, c, g, or t, or includes no nucleotide
  misc_feature (207)..(207): n comprises a, c, g, or t, or includes no nucleotide
  misc_feature (284)..(284): n comprises a, c, g, or t, or includes no nucleotide
  misc_feature (388)..(388): n comprises a, c, g, or t, or includes no nucleotide
tcatttcggggcatgcactttgtcagtatgagnngttttaggaggggaaaacccaaatttaattaaagcnttaggcacaattaattagggggtgaaangtaattgaanacgcagttgatcacccaccatagggcntgattaanaacgcaacctttctttttntccccaagngatttnggggaaacccccttttnttccnttccgctnggttaaatattccaaatttagaaggcttaaggcggcctacagagaaaaagaaaaggaaaaaggccacaaaagttccntttttctttcagtaattaaaataacagcagcaaacagagataatgaaataaaagaaataaatgaaataaaagaaataaatgaaataaatgaaataaatattgtnttgtgcagcattaaaaaaatcaaaataaaaattaaatgtgagc

SEQ ID NO: 3423 - DNA, 505 bp, Canis familiaris
  misc_feature (117)..(117): n comprises a, c, g, or t, or includes no nucleotide
  misc_feature (285)..(285): n comprises a, c, g, or t, or includes no nucleotide
  misc_feature (345)..(345): n comprises a, c, g, or t, or includes no nucleotide
  misc_feature (390)..(390): n comprises a, c, g, or t, or includes no nucleotide
  misc_feature (405)..(405): n comprises a, c, g, or t, or includes no nucleotide
  misc_feature (440)..(440): n comprises a, c, g, or t, or includes no nucleotide
  misc_feature (461)..(461): n comprises a, c, g, or t, or includes no nucleotide
  misc_feature (466)..(466): n comprises a, c, g, or t, or includes no nucleotide
ggcacgagggatggctacccctgctttcttttgaggaccatttgaatggtaaatggttctccaaccttttattttcaggctgtaggtgtccttctgtctaaaatgagtctcttgtanacagcaaatagatgggtcctgcttttttacccagtctgaaaccctgcgccttttgatggggtcattaagcccgttcatgttcagagttactattgagagatatgagtttagtgtcatcatgctatctattcagtccttgtttttgtggattgtccactgaatcttctnaaaggggaatttaaaatccccttaaaattcttgcaaactggttggagtccatatcttcantgctgctgtcttggaaccttactctcctccattgataaaactgcngataatactggtgantctccattagaccgaattctgcacctcggctgcanccttgaagttgtgtacctaanccccnaatcggatctttctggcttagatcctacttgattgactc

SEQ ID NO: 3424 - DNA, 364 bp, Canis familiaris
  misc_feature (178)..(178): n comprises a, c, g, or t, or includes no nucleotide
  misc_feature (298)..(298): n comprises a, c, g, or t, or includes no nucleotide
gcacgaggttgtcatgtaagtatagactcactagtaaggtaaaaacataggcttgaattaaggcaacagcaaattccaggatcgtaagtaggattagaataataaaagtgataaaagctgtggtcgcgctaatattgataagagctaaggtagcccctccaatcaaatggattaggangtgtcctgcagtaatattggcggttaatcgaacggctagagctatgggttgaataaatagactaatatttcgatgactactaatattggaattagggaagagggtgccttggggtaaaanttgctaaggatcttggtcttataccgaaaccgtatacgtcctgctctaggggatgctatccaagtt

SEQ ID NO: 3425 - DNA, 565 bp, Canis familiaris
atacaggacccaaaggagtaataaatgattggagaaagtttaaattagagagtgaagacagtgattcagttccacctagtaagaaggagattctcagacaaatgtcttctcctcagaatagagatgacaaagactcaaaagaaagattcagcagaaagatgagcattcaagaatatgaactaattcaccgagacaaagaagatgaaaattgccttcgtaaatatcgtagacaatgtatgcaggatatgcaccagaagctgagttttgggcctagatatgggtttgtgtatgagcttgagactggggagcaattcttggaaaccattgaaaaggacagaaaatcccacaattgttgttcacatttatgaagatggcgttaaaggctgtgatgctctaaatagtagctttacatgtcttgcagctggataaccyatggtcaagtctgttaaataaaaacmtcttatacaagtgcttggggacgccttttctcagatatggtcccccactggtcatcttcaaaatggggactccttaacaaattttttaggtttcttaacaatttccc

SEQ ID NO: 3426 - DNA, 654 bp, Canis familiaris
  misc_feature (31)..(31): n comprises a, c, g, or t, or includes no nucleotide
  misc_feature (101)..(101): n comprises a, c, g, or t, or includes no nucleotide
caaaaaaaaggggtgggggaccgccttcccncggttgggctccccaacatggctcatctacaaaaggtggggaaactcataaagcaattttattaggtgtnactgaacaggtggcagaagaatttttttgctgggggatgtggagtctttccctaaatgaatatgggtttactaccttgaaagggaagatacatcccttaagatcagcccaaacatgggaagaagatactgaataaaggagtccactatgtcaaatctttgtatttcctccttttacaaaattgtacatttgattttggtagtatccatattcctttagtgaacaccaagtatggccatggctattttaatttgcaggggataaaaagattgatactaaaattatttgattcagcattttttagttacttaagtgcatagaggctttactacaaaatattgtagtctttagcaacatgttagtaagcaaagaggatataaataatattgtggcagttttcaaaaattcctttcaagttatatgttgacttttttactccttgtttttgtttttgttttttttttccccctcagtggtgttatttgggctttccaaattacattatcaatcataattttgcttgtatgataaaaataaagtcttaagaggataaa

SEQ ID NO: 3427 - DNA, 423 bp, Canis familiaris
  misc_feature (60)..(60): n comprises a, c, g, or t, or includes no nucleotide
  misc_feature (111)..(111): n comprises a, c, g, or t, or includes no nucleotide
  misc_feature (116)..(116): n comprises a, c, g, or t, or includes no nucleotide
  misc_feature (166)..(166): n comprises a, c, g, or t, or includes no nucleotide
  misc_feature (231)..(231): n comprises a, c, g, or t, or includes no nucleotide
  misc_feature (257)..(257): n comprises a, c, g, or t, or includes no nucleotide
  misc_feature (264)..(264): n comprises a, c, g, or t, or includes no nucleotide
  misc_feature (344)..(344): n comprises a, c, g, or t, or includes no nucleotide
  misc_feature (365)..(365): n comprises a, c, g, or t, or includes no nucleotide
  misc_feature (403)..(403): n comprises a, c, g, or t, or includes no nucleotide
ctttcaagggtaaaaattttatttttgaggaacttcatactgcacatttttaaagagtcncataagaaagcaaaaatgttatcctcccctcatcctagaaataaataagangggcntaaaatttctttttaaatcacgacacttggaagtttagcaccagcatccnaatgaacaaaaaaggaaaaaaaacatttactatatatttcaggtttctttggttggggtctcccntgtggtattaatattctttttcatcntattacnaaacagtaaaacagaaaaatataactatggttgctgaaatgggaagttgtcctgtctttgtgcggatccggattcactgnaaaaatggtgaatttcttgtnttcgttctaagaatataaacaatccactgtatactccntatgtgattctgggtggagc

SEQ ID NO: 3428 - DNA, 275 bp, Canis familiaris
  misc_feature (17)..(17): n comprises a, c, g, or t, or includes no nucleotide
  misc_feature (46)..(46): n comprises a, c, g, or t, or includes no nucleotide
  misc_feature (74)..(74): n comprises a, c, g, or t, or includes no nucleotide
  misc_feature (83)..(83): n comprises a, c, g, or t, or includes no nucleotide
  misc_feature (90)..(90): n comprises a, c, g, or t, or includes no nucleotide
  misc_feature (100)..(100): n comprises a, c, g, or t, or includes no nucleotide
  misc_feature (127)..(127): n comprises a, c, g, or t, or includes no nucleotide
  misc_feature (139)..(139): n comprises a, c, g, or t, or includes no nucleotide
  misc_feature (145)..(145): n comprises a, c, g, or t, or includes no nucleotide
  misc_feature (147)..(147): n comprises a, c, g, or t, or includes no nucleotide
  misc_feature (149)..(149): n comprises a, c, g, or t, or includes no nucleotide
  misc_feature (184)..(184): n comprises a, c, g, or t, or includes no nucleotide
  misc_feature (229)..(229): n comprises a, c, g, or t, or includes no nucleotide
  misc_feature (254)..(254): n comprises a, c, g, or t, or includes no nucleotide
  misc_feature (263)..(263): n comprises a, c, g, or t, or includes no nucleotide
  misc_feature (269)..(269): n comprises a, c, g, or t, or includes no nucleotide
acgaggaccgtcgctcncgggtctttccccatcccaacagaatgcnggccggtgagattggagagatgaagganggagtcccncatgggncacagctgcngggaccggttcatcgaaatccaacttnccgcccaaggtnccgganangncctcctcgcccccgacctgccccagctgttggtgnggctgaagattaagagaaccaccagcagcccatggtcctaaccanccatctgctccccgtggattccggngcccatacnactttntgtttc

SEQ ID NO: 3429 - DNA, 354 bp, Canis familiaris
  misc_feature (39)..(39): n comprises a, c, g, or t, or includes no nucleotide
  misc_feature (52)..(52): n comprises a, c, g, or t, or includes no nucleotide
  misc_feature (70)..(70): n comprises a, c, g, or t, or includes no nucleotide
  misc_feature (87)..(87): n comprises a, c, g, or t, or includes no nucleotide
  misc_feature (99)..(99): n comprises a, c, g, or t, or includes no nucleotide
  misc_feature (104)..(104): n comprises a, c, g, or t, or includes no nucleotide
  misc_feature (137)..(137): n comprises a, c, g, or t, or includes no nucleotide
  misc_feature (143)..(143): n comprises a, c, g, or t, or includes no nucleotide
  misc_feature (164)..(164): n comprises a, c, g, or t, or includes no nucleotide
  misc_feature (166)..(166): n comprises a, c, g, or t, or includes no nucleotide
  misc_feature (208)..(208): n comprises a, c, g, or t, or includes no nucleotide
  misc_feature (238)..(238): n comprises a, c, g, or t, or includes no nucleotide
  misc_feature (252)..(252): n comprises a, c, g, or t, or includes no nucleotide
  misc_feature (283)..(283): n comprises a, c, g, or t, or includes no nucleotide
  misc_feature (297)..(297): n comprises a, c, g, or t, or includes no nucleotide
  misc_feature (340)..(340): n comprises a, c, g, or t, or includes no nucleotide
agcctctgtttatacctcttaaaaatgcagcatggagtncagaggatttganaaggaacaaagatatttngtttagtttctaatatntacaatacatanagaanggttgattggtaaaagacaaaggaaaactcaantctgantttatgtttcacagaaagttncnaaagactgtataaaaatatgccttgtgctttagagctttacntacattaagacataaaatatattactgctnccctatgctattcngatatattactactgcatcttccttttctcntaagcaaaggcagncccatcgatggtaaactcgactgactccctcccccattttttnatgtctgcactccc

SEQ ID NO: 3430 - DNA, 584 bp, Canis familiaris
ttggtcaggaaagtttattttaacattctaaagcagtaatgctttagatgttacttaagtgccccagacaggattaacaaaattaaatgtttctaaattacaaatttagctcctgtaggacctcagaaattaaacagaagaaaacaatcccccctcccaaaggaagtatgacacacacattttgaagaaatcccaatgtttcatgcagtggtaggcaagatgtaaaaagccacccaaattcacacatttctacaccaatcatcatcagaaaaaagtcctccgtagtcaatctgtacatccaaatgcatttgagaatctacacctacgttacattatttaatgttatatacatttattacccaccccccttgtttttaataatttcttatgtaaaccttcattcaaacccaaaaaagatgtaagactaccttggggggaggaaaaagatattcctttagacattcgttaaatgtgtttatctaatctcaaaatgtttataaaacaaatatctctccctttaccctttgcttctactgtacgtaattgcttgtggggtcccctcttatctcgactgtatctcttgg

SEQ ID NO: 3431 - DNA, 496 bp, Canis familiaris
  misc_feature (228)..(228): n comprises a, c, g, or t, or includes no nucleotide
  misc_feature (342)..(342): n comprises a, c, g, or t, or includes no nucleotide
  misc_feature (386)..(386): n comprises a, c, g, or t, or includes no nucleotide
  misc_feature (437)..(437): n comprises a, c, g, or t, or includes no nucleotide
  misc_feature (439)..(439): n comprises a, c, g, or t, or includes no nucleotide
  misc_feature (445)..(445): n comprises a, c, g, or t, or includes no nucleotide
  misc_feature (463)..(463): n comprises a, c, g, or t, or includes no nucleotide
ggcacgagcggcacgagaattcatactagcatgagtatgactaactgcacattcctattttgtttgattcttgactgtctgcttcctgcccaataggctcttctaaaaatcccactttctggacccaggaagagcctttacttcatgctggagtgataatatctaatgcagaaagctattttactaacttaggtgaagggcaacagcaccatcctttctatttagatnagattaacagggacgggttaatggggtgggactgcattgggagcacttccaaattttgtatagaaaaaaaaaattgtttgtatttattggaaatggagggttttgtattctgantctgtctcttcagtctgtcctcccttactctccctgtctaaaancatctcctgacccctcatcactggacttcttcttcaatatctaccattacntnctaccncttctatcctgttagacngatgtgtattatctgcctgctatttacctaaaa

SEQ ID NO: 3432 - DNA, 236 bp, Canis familiaris
  misc_feature (6)..(6): n comprises a, c, g, or t, or includes no nucleotide
  misc_feature (14)..(14): n comprises a, c, g, or t, or includes no nucleotide
  misc_feature (101)..(101): n comprises a, c, g, or t, or includes no nucleotide
  misc_feature (163)..(163): n comprises a, c, g, or t, or includes no nucleotide
  misc_feature (170)..(170): n comprises a, c, g, or t, or includes no nucleotide
  misc_feature (177)..(177): n comprises a, c, g, or t, or includes no nucleotide
  misc_feature (191)..(191): n comprises a, c, g, or t, or includes no nucleotide
  misc_feature (199)..(199): n comprises a, c, g, or t, or includes no nucleotide
  misc_feature (202)..(202): n comprises a, c, g, or t, or includes no nucleotide
  misc_feature (222)..(222): n comprises a, c, g, or t, or includes no nucleotide
gaaacngcgagaancagtcagagaccatgatcacccgtcaatcccaagcgtcaaccgacaccagaccatcttacttaattgcgtcatcccaatctcgctancctgctaattatatcaccccgaaccgaagcttgtataccacttagctactatactcgcttcnatcagcntaccagngttacacttccagngacatccntgnatcacattatctactcattncttggctaaaaaaa

SEQ ID NO: 3433 - DNA, 413 bp, Canis familiaris
  misc_feature (389)..(389): n comprises a, c, g, or t, or includes no nucleotide
tgaggatagctttagaaagctgtaagttgttaaaaaaccactttattgcagtttgattgacatgtaaaaagctgtacctactaaatacgtatgactcagtgagtttgggataagaatgcacctgtgcaagcatcaccaccataagcaaatccatgacctcccagactatcctctcacctcctttattattattattattgaaaaatgtaagtgtaggtaggtgtgatgaaaagctaagaataaccagtgggagaataaatatttgaattccaaactgagaagaaaaatgaaacaaagcaggttttatcaattcaactagagctagaaaggggagaaatacgaaacaaccagaaagtgttggaaaaacatgaaatgttttgacaggattnccctgaattaaccacagccatgtt

SEQ ID NO: 3434 - DNA, 359 bp, Canis familiaris
  misc_feature (64)..(64): n comprises a, c, g, or t, or includes no nucleotide
  misc_feature (239)..(239): n comprises a, c, g, or t, or includes no nucleotide
  misc_feature (255)..(255): n comprises a, c, g, or t, or includes no nucleotide
  misc_feature (287)..(287): n comprises a, c, g, or t, or includes no nucleotide
  misc_feature (322)..(322): n comprises a, c, g, or t, or includes no nucleotide
  misc_feature (328)..(328): n comprises a, c, g, or t, or includes no nucleotide
ggcacgagggctacatgaaagcctgtgtaagcgtggtgctcctctgtgagacctcagaccaganggtcagagctagggagagaatccatgtactcaatcacaagccttgcctagaagtaatttctaaatgtgccctctgggaaatttattcttaccacatgaattgaaacagaaatgaggaggactgagcttatagacaagcaccagcccacaaggaaattgcagtgtattctgttgcngagaaccaatatacanttcccagggggaaagactatctatattcagtnactggtctttgaaaactggaggggaacagggagtngttaantggagatttgacaactaagcctcactctagt

SEQ ID NO: 3435 - DNA, 434 bp, Canis familiaris
  misc_feature (17)..(17): n comprises a, c, g, or t, or includes no nucleotide
  misc_feature (120)..(120): n comprises a, c, g, or t, or includes no nucleotide
  misc_feature (133)..(133): n comprises a, c, g, or t, or includes no nucleotide
  misc_feature (165)..(165): n comprises a, c, g, or t, or includes no nucleotide
  misc_feature (182)..(182): n comprises a, c, g, or t, or includes no nucleotide
  misc_feature (192)..(192): n comprises a, c, g, or t, or includes no nucleotide
  misc_feature (216)..(216): n comprises a, c, g, or t, or includes no nucleotide
  misc_feature (245)..(245): n comprises a, c, g, or t, or includes no nucleotide
  misc_feature (262)..(262): n comprises a, c, g, or t, or includes no nucleotide
  misc_feature (297)..(297): n comprises a, c, g, or t, or includes no nucleotide
  misc_feature (305)..(305): n comprises a, c, g, or t, or includes no nucleotide
  misc_feature (310)..(310): n comprises a, c, g, or t, or includes no nucleotide
  misc_feature (312)..(312): n comprises a, c, g, or t, or includes no nucleotide
  misc_feature (344)..(344): n comprises a, c, g, or t, or includes no nucleotide
  misc_feature (346)..(346): n comprises a, c, g, or t, or includes no nucleotide
  misc_feature (350)..(350): n comprises a, c, g, or t, or includes no nucleotide
  misc_feature (355)..(355): n comprises a, c, g, or t, or includes no nucleotide
  misc_feature (363)..(363): n comprises a, c, g, or t, or includes no nucleotide
  misc_feature (394)..(394): n comprises a, c, g, or t, or includes no nucleotide
  misc_feature (401)..(401): n comprises a, c, g, or t, or includes no nucleotide
  misc_feature (405)..(405): n comprises a, c, g, or t, or includes no nucleotide
cgagccctggctccacncgcgccccacaccgcgggcaggcttgcgcgcagctccggtgggcggactcccgggcacgatggaatgggtgtgggcgctcgtgctgctggcggcgctgggcancgcccgggcgganagcgactgcccgagtgagcaacttccaattcnagaagaacttccacaangctcgcttcnccgggacctggtacgccatggccnagaaagaccccgatggcctctttctgcangaaaacatcgtcgcttntttctctgtggatgagaatggccggatgaacgccncggccaangggcnantccggcttttttgaataactggggaccttgtntnccanacatngtttgggnacctttcccagaaaaccgaaggaccctgctnaattcangatnaaatttttgggggcgttatcgtcctttcc

SEQ ID NO: 3436 - DNA, 1147 bp, Canis familiaris
tctagttctcctggtcacctagtggactgccagaagtgaattagtttcacgtcaatgtcatgaattgtaagttaagtgaaaaagttgaaagttaaaggaaatgaattatttgctcttatgtgtatatacacatttatatttatgtatgttatagaaccttgattctttctaaaacgtgtattaagtggcacatgggccatttaagctctggctgagtccattaaaaatactaaagcctggttttcatgaagtcattactacaatggtacagatgattgaggacaagttcaaaaacacaaataatgatgttatgtaacacaaatactgtttactgacacactgatacagctctctcttctagatgcctgggtactgtgaacaaatcagccaaaggtccttgaccattggaactcaacttctaatgtactgtcatgatcaatcattgtaaaagagtttaaaataaaattacatgtatatacttctgaaaaattcagggaatggtgctaagtctggaattcaaaaattattcattccacccttgcaggtcacatttttggaatgaggaaaaagatttaatcaatgttcattctgggacactgttgacttctgttgccagctatgttctgatccctgttctgatctccttaagagaagctggaggctgtgtctactgagagcctttagctggagtgtgaccagatggttatcctttgcctgaagatgtctaggaggacagaaagaagagcagctgtttcttcttctctcctagaaagtacatatgcattggtggaaaccagaaccacgattaaaaagatcacagaaattataatacgttcttggatgctatagtattctgtataaaccacatgtgtcattctttctcctttctttaaagtctccaaatgttgtgaagaagtaagggattatgttgaagaaagatctggggaagatccactagtaaagggcatcccagaggacaaaaatcccttcaaggagctcaaaggaggctgtgtgatttcataagaaaaaaaaagttccttggaatagcttgagttttaatgacagtactaatttttggtcatctataataatactattaagcatttacataaccttttaatttataaatataaacttttaataaaaa

SEQ ID NO: 3437 - DNA, 698 bp, Canis familiaris
  misc_feature (550)..(550): n comprises a, c, g, or t, or includes no nucleotide
  misc_feature (662)..(662): n comprises a, c, g, or t, or includes no nucleotide
ttacaaaagtttgaggtgcagagggaagaccagattttttttaatgaaattatatagattagatctcaatatttaaactgttcctcaattttgtgaggctgcgttggaaataacccgcctctagtgctgttggtatgcaaggcagcggtgcttaaacaatatttcctgtgctcaccagagacaaaaatgtaccaatttcctgacaccattctcttccatttatttccagtggttaccttgagtcttgactattagaagtgcccacgacgggtctaaccttgattaaacagatcgtgtattatgatctcgctgcagcgacagtgcagctccatgttcaatctacagaccaaaccgtttgtatctggcatcacttactaacacatgccctgcggctttttctgcgtcacctgscaggacagttgaggaatgtcggtataccggtataagagaaggatagaaaattgatactgttttaataatctgtatttcagttttttttttttttttgctgaaatacatatattgatgtttagatattcatgatcaagtntataacttgatgttataaccccttaatcttggtggtgtcagtggactgagcatttctgccaagcatgtccctattgtcttccctgtcgtccamctggtaaattcgttattcntcctttgacatgtcgatcttccatgcgtgtcaatct

SEQ ID NO: 3438 - DNA, 558 bp, Canis familiaris
  misc_feature (503)..(503): n comprises a, c, g, or t, or includes no nucleotide
  misc_feature (530)..(530): n comprises a, c, g, or t, or includes no nucleotide
tccccctctgctccggagctccgaggcgccggcggcgcgaccgtgctcctcggtgctccgccagcgacggccaggacaaaaaataatgtccaaagatattttggcactaacaacacaatttgtagcaagaaagatgagcagcctgcttcaatgcatgagatttccaaggaaacagagagccaagagagtgtaaaggagaataccaaaaaagatttgttaggtattattaaaggcatgaaaattgaattaagcacagtaaatgtacaaacaaccaagccgtccagcacaagacaacttaaaagtgtggaagctacaatcaacaagcttcaaaaagctccaggagatgccccaaagaagagaaccaagtccttgagtcctgagttggtagctgctgcatctgctattgcagattttctcccttttgataagcagacaccaagtcagagctgctcaggcagctccagcagcatgaagaagtctcaaaggcacagaaaatggaggangagaaaaattagtgtcagtacattatntcagcctgaaattgccaaatctgccaca

SEQ ID NO: 3439 - DNA, 351 bp, Canis familiaris
  misc_feature (19)..(19): n comprises a, c, g, or t, or includes no nucleotide
  misc_feature (26)..(26): n comprises a, c, g, or t, or includes no nucleotide
  misc_feature (88)..(88): n comprises a, c, g, or t, or includes no nucleotide
  misc_feature (124)..(124): n comprises a, c, g, or t, or includes no nucleotide
  misc_feature (130)..(130): n comprises a, c, g, or t, or includes no nucleotide
  misc_feature (141)..(141): n comprises a, c, g, or t, or includes no nucleotide
  misc_feature (158)..(158): n comprises a, c, g, or t, or includes no nucleotide
  misc_feature (165)..(165): n comprises a, c, g, or t, or includes no nucleotide
  misc_feature (192)..(192): n comprises a, c, g, or t, or includes no nucleotide
  misc_feature (201)..(201): n comprises a, c, g, or t, or includes no nucleotide
  misc_feature (231)..(231): n comprises a, c, g, or t, or includes no nucleotide
  misc_feature (245)..(245): n comprises a, c, g, or t, or includes no nucleotide
  misc_feature (262)..(262): n comprises a, c, g, or t, or includes no nucleotide
  misc_feature (299)..(299): n comprises a, c, g, or t, or includes no nucleotide
  misc_feature (320)..(320): n comprises a, c, g, or t, or includes no nucleotide
  misc_feature (332)..(332): n comprises a, c, g, or t, or includes no nucleotide
ttccgcacgaacagatgtncgtcccntggccaacaaagcaccccgtaggcagagtctagtctggcacttccttggactacttgtttcntaagataaccagtttttgcagaaaaacgtgttcccntatatnattctcccacnctagcttgcagaaaccnaaaaggnccctacttgttttatttaactgtgcgntgactgttnttacttaagaaaaaatgctttgttgaacanaacagtttgaaaancaggaatccagaaagcnatactgttccttaaatgttctttataccaattaaccntcctggcatgggtctctgttncataaggggtcnttggaaaggctgttgatat

SEQ ID NO: 3440 - DNA, 466 bp, Canis familiaris
  misc_feature (266)..(266): n comprises a, c, g, or t, or includes no nucleotide
  misc_feature (343)..(343): n comprises a, c, g, or t, or includes no nucleotide
  misc_feature (365)..(365): n comprises a, c, g, or t, or includes no nucleotide
  misc_feature (372)..(372): n comprises a, c, g, or t, or includes no nucleotide
  misc_feature (418)..(418): n comprises a, c, g, or t, or includes no nucleotide
  misc_feature (442)..(442): n comprises a, c, g, or t, or includes no nucleotide
  misc_feature (444)..(444): n comprises a, c, g, or t, or includes no nucleotide
tgtaggtaaaacaggatgtaaagtttatatacaagaatataatgtttatctgaaatatttacagtgttggttaaagcaatatttttacaactttttaaggtcactactatgtatattacaggtaagctacaatggtttaatttgcaaaattaagtaaaaaatgttttaaacaaagcttaaagtactcaggtcaattataaaatctgttttgcctttattcgaaaacccatgctatggtggttaatgtgcttttgataatggaatanctacccgaaagcatacatctgctctgtgtattcccacggggtttaaatacggtgattatataaactagcctgatccngctgactaaaatcaaatacacnctttccncagatgtaccccattggcctcaaataacttgcttcgacttcaaatnatcttgccaccacaaaagatcacntnccctcctcactatacttaactc

SEQ ID NO: 3441 - DNA, 519 bp, Canis familiaris
  misc_feature (182)..(182): n comprises a, c, g, or t, or includes no nucleotide
  misc_feature (203)..(203): n comprises a, c, g, or t, or includes no nucleotide
  misc_feature (229)..(229): n comprises a, c, g, or t, or includes no nucleotide
  misc_feature (373)..(373): n comprises a, c, g, or t, or includes no nucleotide
  misc_feature (381)..(381): n comprises a, c, g, or t, or includes no nucleotide
  misc_feature (398)..(398): n comprises a, c, g, or t, or includes no nucleotide
  misc_feature (407)..(407): n comprises a, c, g, or t, or includes no nucleotide
  misc_feature (427)..(427): n comprises a, c, g, or t, or includes no nucleotide
  misc_feature (436)..(436): n comprises a, c, g, or t, or includes no nucleotide
  misc_feature (461)..(461): n comprises a, c, g, or t, or includes no nucleotide
  misc_feature (469)..(469): n comprises a, c, g, or t, or includes no nucleotide
  misc_feature (472)..(472): n comprises a, c, g, or t, or includes no nucleotide
  misc_feature (493)..(493): n comprises a, c, g, or t, or includes no nucleotide
tcgataagcttgatatcgtgctgatgctgtccgtgatccccggggaagacggacgacaagctgagttccgagcccagtggcggcacctgtggggcccaaggggaggaggactcgcggtgcagcctccgagagcacctcttctctctggacgcacgggggccagcttccaggacagagaggangagtattactcagagcccgangtgggcgaatcggaccggcccacacnaggactccaataacacggaagtctgaaatctcccaaggtgaatgcgaggagagaaatgtgaccgcttagaaactttactctcaagttttaaatattccaggacttatgatttctgatccaatgtatgatgccctgtctgtttanccatgtcnattctgcattggccccntttatcctnccggcttcccctcttttgcncatctcccnacactctcattggactcttcccttntttcgganacntgtattctcgcaactgactanttcttttcaggctaaccaaatttgta

SEQ ID NO: 3442 - DNA, 330 bp, Canis familiaris
  misc_feature (72)..(73): n comprises a, c, g, or t, or includes no nucleotide
  misc_feature (306)..(306): n comprises a, c, g, or t, or includes no nucleotide
ttgggcgattgggtacgggcccccctcgaggtcgacggtatcgataagcttgatatcgaattcggcacgaknnsccctcwkcgccgccgacaccaagcccggcaccacgggcagcggcgcagggagckgcggcccgggckgcctcacatcggcggcgctgccggcggggacaagaaggtcatcgcaacgaaggttttgggaacagtaaaatggttcaatgtaaatacggatatggtttcatcaacaggaatgacaccaaggaagatgtatttgtacaccagactgccataaaaaagaataacccangaataccttcgcagtgtaagatat

SEQ ID NO: 3443 - DNA, 466 bp, Canis familiaris
tattttattttattttattttcaagcatcttgaagtcttcaagtgaacgtcacaagtttgcaagtgttgatggtttaaaaaaaacaacaagaaacaaaaactacaaggaggagttgacaaaggcattgaaaaatgaggaatttaaattacatgattccatttaaaatcttcacgtttactccatgaggcaggattggaggattagaaccccgggggtgactatgggcatttacaaaagtgcttctacctccttagaagctgcggtcttcccagcagctctcctacgtcccttttatcaaaataatccaagttccagatttctcagataaaaatgcatctatgcgaccagcagccattccagagttgactggcatgtattcttgaaattcaattccacagacacagcatgggataacattttccttatycacccgggggctccattttaagggtatcctcccgccag

SEQ ID NO: 3444 - DNA, 408 bp, Canis familiaris
ttcggcacgagctattgggagctttccagcccacgacaatccctgcccggcagtcagggcagggacccccagtctctggtggaggccacagtgaccgaggccgggacagtgctagcctggtcccccaacaatctggagcagcgctgccacacccgagcgccaagggaaagggttgcgtgccccgggttggggcgtcctggcctccaggcgttggggcagcacagctcttctgcaacctgsctctgggtcctgcctcgtggggccccctcgtgacattaaccacacttataacttactacctcatgttgcaccttaaacataaaataattataaaatatataataataataaataaataaactttgtctaaacaaattcatttgatttttttttaataatttaaatttt

SEQ ID NO: 3445 - DNA, 353 bp, Canis familiaris
  misc_feature (86)..(86): n comprises a, c, g, or t, or includes no nucleotide
  misc_feature (108)..(108): n comprises a, c, g, or t, or includes no nucleotide
aacacacaaaaaaccaaacaacccaaaaaacacacccccacccaccacaacggcaagccaagccccacaccgccaggaaacggganwggcgggttgctgtgcwgwggnggatgwgawggtggcggcgawggcagaagcakgawgatctttccatttgtttgtgttgtctgcaatttctttcaccaatgttttacagtttcagagtacaagatatcccccacaccaggttaattgtaactggcatttattatttcatgcatataaggggatgtttctaattctcttcgcactmctaagtgtawgaatgacaattctkactgattgtaccgaacttacgatcaatatagtcagag

SEQ ID NO: 3446 - DNA, 555 bp, Canis familiaris
acatgtgggaaaacattcagccagagtgcaaacctagctcaacataagagaatacatactggggagaaaccttatgaatgtaaagaatgtaggaaagccttcagccagaatgcacaccttgctcaacaccagagagttcatactggagagagaccttatcagtgtaaagaatgtaaaaaagcctttagccagattgcacacctggcagagaaatcttgtaagtgcaatgaatgtgggaaagcctttagttattgttcagctcttattcaacatcagagagttcatactggagagagaccttttgaatgtattgaatgtggaaaagccttcagtaatggttcatttcttgctcagcatcagagaattcatacaggagagaaaccttatgtgtgtaatgtatgtgggaaagcctttagccatcgtggatacctaattgtacatcaaagaattcatactggagagaggccatatgaatgtaaggaatgtagaaaaagcatttcagccaatatgcacacctagctcaacatcaaagagttcatactggaggaaaaactt

SEQ ID NO: 3447 - DNA, 760 bp, Canis familiaris
tcggcacgagcctagcacagctgtgaggagccacataaagtgaaatttccaagtggccggaggaacttaatctcatttctaggcctcagtgttctcatctgtaaaatgggtgagttccctggatgcctttatggtctcttctagcccaaacatcctgtgacaccatagaagagcctgccctctattcccccttggaacatcctgtagcaagtatcattcatgggactttcaaaaaggatacttactgggaatgaacttttctaagtaggggagggatggctgtatggtttaccaggtcctgtgtccaatgtcagttatgcgagtcaccaagctggaggccattccaggagtggaattattcatgaaactctgctgagttttcccaatgggaggaaagtattcccttctttcctgcccttcccaaacggaagggactgctctgggaaggattctcccaccactcctcaactgaccatagacttttagaaagtaaaatgtaagactagcaactagcaagggtgctcatagtcttactacagaacactaaagagccaggtaggaaagagtggagcatggttgacaatatagagaggatttttaaacaccacgcttatagatcatctttaaggacgattttaaatagagagggtcatttgttttacctgaataacttttgtcttcagttcaaatcatcccccaggaagtctgctatcaaatcaaggtcactctctatctatttgtagagtcaatgaatgaggcc

SEQ ID NO: 3448 - DNA, 761 bp, Canis familiaris
cggcacgagccagaacgccccagccagacctgaggccctgtccagtcccaatgcatgtaccctccctgtggtggccgccccacagcctttacagtggcacctagttggtgaacttcctagaacatttattttccaacctatccctatttttttttctgtttctattctcagaaagatgttatcagtttgtcatttggatgtgggttcagtggaagaagaaacaggacttggtggctacagtgggaggctggaggttggccatgggctgcgtgtccctaaggctcccaagcgtgaggtctctctgccaggcgtccttttcccacagatacaagtcacagttcccgttctgcctctcacatcgaatgtctagagcttcaccaacaggagaagcttcagatggttgaaaattgaagtgcacttgggacacattctgttcctttgtgctttgcctgtgggtctgtaggaaggtcattgatgcctcagccgcagtcttttgctctgctgtgattttctatgaactgcgctgagggtttgacgattatctcaaaatagtctttgaggagatcccccgttgtctcagggctccaagargagttagctcacaggatcagatgtgcttagcatgtatgtggccccgtcctcmatatgtagctgtggtttcagagattcgtccaccgttgcacatggcacaaagktttgggacgarccaaacgtacgtcacaaactccaatactgctttaaaatgcatcccaggataacat

SEQ ID NO: 3449 - DNA, 494 bp, Canis familiaris
  misc_feature (221)..(222): n comprises a, c, g, or t, or includes no nucleotide
  misc_feature (227)..(227): n comprises a, c, g, or t, or includes no nucleotide
  misc_feature (451)..(451): n comprises a, c, g, or t, or includes no nucleotide
gcctgcaggtcgactctagaggatccagtccagaatcgcagattgtgcttagttatcatgtctctttaggctcctttaatttcttttaatagctctcaactttgcttgtctttcatgacatttgaatgttcctctacttgggtttgtttgatgtttcctcttggttagtgtcaggctctgcaccccaactagatatgtcataagaaatgttttgtccttcnnggggngtcctgtcttgagcacccagtgtcacttcctcctcaattatgatgttgattctagtcatctagtaaaagtgtgacctggtgtctgcacagtactatctttatttcctcccttgcaaatgaatgagcaatctatgcaatgggcagggagatgctctacacaagtatgtgaaagacttgctcctcgtcaaactctatctctgtctctgtctctgtctctctctttncacacacacacacacacacacacacacactcacacatggcatg

SEQ ID NO: 3450 - DNA, 340 bp, Canis familiaris
  misc_feature (45)..(45): n comprises a, c, g, or t, or includes no nucleotide
  misc_feature (155)..(155): n comprises a, c, g, or t, or includes no nucleotide
  misc_feature (175)..(175): n comprises a, c, g, or t, or includes no nucleotide
tccctcttccctcacttacttatcaatttattgtcagcacagagnaagcctagctttcaaaatcattgtttccaccatgcacttaaaaaccgttcaatatttactccagaagctgagaaataacttctttgttctcaattccatctgcactctgntggaagaaatagatactttngcatgcacaaaaaatagtgggaataaaacatataccagccaaccttttaaaaatattattccatgatggctatatctcaatccagagaatgtaagtttgtaagcaacataatgctaaagttttaacagaaatagctaaataggggcgcctgggtggctcagtggt

SEQ ID NO: 3451 - DNA, 380 bp, Canis familiaris
  misc_feature (348)..(348): n comprises a, c, g, or t, or includes no nucleotide
gcatagctgtgtccatttttcttctcctcttttacaaggacgccaggcacactggactagaccccatcctaaagacctcattttaagttgactacctctgtactccctacctccaaacaaggtcacattctcaggttttgggggttttcaacatacaaatcatggggaaaacacacttcaactcagagtacattgattccttccaagagatttacatttgatgttcattaaccaactttgacaagtcagaaagcttgctggtctctgctatgcacacacacacacacacacacaatctcgattgaatgtaaaatctcgatagaaaccctgttttattatctttacatntctgctattaacaatccaaatgctcctcaggc

SEQ ID NO: 3452 - DNA, 844 bp, Canis familiaris
  misc_feature (199)..(199): n comprises a, c, g, or t, or includes no nucleotide
  misc_feature (351)..(351): n comprises a, c, g, or t, or includes no nucleotide
gatccctgggtggcacagaggtttggcgcctgcctttggccagggcgcgatcctggagtcccgggatcgaatcccacgtcaggctccccatgcatggagcctgcttctccctctgcctgtgtctctgcctttctctctctctctgtgactatcataaataaattaaaaaaaaaaaaagaaaaaagaaagacttcggagngsggactatatgtkggatgaggttattgaagtaatatcaatgttcttgggtgtgataatagtgatgagattgtatagaaagtcttattcttgggatatgcatgckgaagtgtttggagtgaataccycgatgtttgcagcttccctttgaanggtttggwaaaagggaatgtgtgtgtgtgtgtgtgtgtgtgtgtgtgtggtgtctgtgtctctctctctctctctgtgtgtgtatttatattcataaagatggaaccagtgtgacaaaatgttaatagtcagtgaatgtaggtgaaaggtgcatgggtactcatcatgctgttcttttaacttttgtagaagcttgaattttttctgaagaaaataaaaggaaaaatgaatgtaatgcataccaattacagaaaatgggtaaaataaaacacaaggaaagaaaaaggaaattgagaatctagatagactctttatggttataacctgaaaaagaaattgcatcagtagagaatacctttattcaatattcagttggaggctctagccacagagtaataaaagaaaaagaaatgaaataaagattgaacatgaagaaacaaaattatctacatagaaaactccaagagaagctacagacaaattattagaacta

SEQ ID NO: 3453 - DNA, 375 bp, Canis familiaris
  misc_feature (197)..(197): n comprises a, c, g, or t, or includes no nucleotide
  misc_feature (204)..(204): n comprises a, c, g, or t, or includes no nucleotide
  misc_feature (361)..(361): n comprises a, c, g, or t, or includes no nucleotide
agaggatctatagaagaagggagttttatcaggctgtaagtcctgtgggtcaggaatctggtgtatgtgtgcatgcatgcttgtgtgtgtgtgtgtgtgtgtacacgcatgcactgtgcacctatgtgtctgtgtgtgactttattttcctaaggttgtcccaagtatgggtttggctattacttgaagctaaagtntgcatangtctcatgccagtaattgcacatgttaactctgccctttgcatgaggaaatggccagggactcacctgtactgacccatgagccttcctaacttagctcactcagtgctggcactgcttcccaggaaaagcatgaaggtcccttccccatgtgtgtnccacatggcacaga

SEQ ID NO: 3454 - DNA, 343 bp, Canis familiaris
  misc_feature (234)..(234): n comprises a, c, g, or t, or includes no nucleotide
aggaaaaacaaaaatagtagctcaaaaaaatatatgcactcctatatttattgcagcattatttacaatagctaaggcatagaagcaacctaagtgtccgacaatagatgaatggataaggcaaacatggtacacacacacacacacacaaatattcacacaatggaatattacatagccataaaaaagatgaaattgtgccgtttgggataacatggatggacctagagggtnttatgctaagtgaaataagattgagaaagacaaatcctgtatgatttcactcataaatgaaatctgaaaaaatgaataaatagaaagcagaaccagaactataaataca

SEQ ID NO: 3455 - DNA, 399 bp, Canis familiaris
  misc_feature (36)..(36): n comprises a, c, g, or t, or includes no nucleotide
  misc_feature (236)..(236): n comprises a, c, g, or t, or includes no nucleotide
  misc_feature (240)..(243): n comprises a, c, g, or t, or includes no nucleotide
  misc_feature (281)..(281): n comprises a, c, g, or t, or includes no nucleotide
  misc_feature (297)..(297): n comprises a, c, g, or t, or includes no nucleotide
  misc_feature (377)..(377): n comprises a, c, g, or t, or includes no nucleotide
gcgctatttcactgagccacccagggaccctaagcngatgcatattaaggccatgcataggggtccgatggctgtccctggtaaccgcctcagttcatccttccccctctcacgttaaatgcttttacttctgtgaatccccctctgtcttcccaccctgccctttctcattagcacttaccgagcccaggccagggattttgctccaacacagcctcttcccccgggtgaagganctgnnnntacacacacacacacacacacacacacgcacacacacnctcacatacacacgcntgcgcgcaagcgcgcacacacacacaagagtgagcacagccagactagcactgtcatgggagccatgataaatatttgantgtgtatatttaagttcagaac

SEQ ID NO: 3456 - DNA, 380 bp, Canis familiaris
  misc_feature (75)..(75): n comprises a, c, g, or t, or includes no nucleotide
  misc_feature (223)..(223): n comprises a, c, g, or t, or includes no nucleotide
  misc_feature (225)..(227): n comprises a, c, g, or t, or includes no nucleotide
  misc_feature (351)..(351): n comprises a, c, g, or t, or includes no nucleotide
  misc_feature (367)..(367): n comprises a, c, g, or t, or includes no nucleotide
tgcatgcctgcaggtcgactctagaggatcttttaaaaaaaaattaaaattttttaaaaattgagagagcgaganaccaacacaagcgggggacagaggcagatggagagggagaagcaggttccccgctgagcagggaccccgatgatgcgatgcagggctggatcccaggaccctgagatcatgacctgagtgaggggaaggcagatgtttaattgactgngnnnccagatgcccctgtatttgagatgttaataaagagtaacacacacacacacacacacacacacacacacccctaccttttccctggtcatacagccacaaacccaccatggctggcctttatcnagaagcaaaggctctncagaaccccagaa

SEQ ID NO: 3457 - DNA, 369 bp, Canis familiaris
  misc_feature (27)..(27): n comprises a, c, g, or t, or includes no nucleotide
  misc_feature (167)..(167): n comprises a, c, g, or t, or includes no nucleotide
  misc_feature (216)..(216): n comprises a, c, g, or t, or includes no nucleotide
  misc_feature (219)..(219): n comprises a, c, g, or t, or includes no nucleotide
  misc_feature (222)..(222): n comprises a, c, g, or t, or includes no nucleotide
gcctgaggtcgactctagaggatctgngcagactcttcagctccagaactttctttgagcgaggtgggtgcaggaaagtagccagcccagcgtacaaccgtgtgtgtgtgtgtgtgtgtgtgtgtgtgtgtgggtgggtgcgcgtgccaaggacggtcttggcctgntccagcctgttgcctgtagtttcgatttagccaggctgggttcagggangcngcnggtttagttccccaccagtgtgcccactcacccagcacaggccagctcggggtgggggtgggggctggtttctctccagtcctttccagggctgctccgccagggaaggcgccctggtacactggtgacctggggagccccgggcgt

SEQ ID NO: 3458 - DNA, 805 bp, Canis familiaris
  misc_feature (468)..(468): n comprises a, c, g, or t, or includes no nucleotide
ctggtgcccaaatgtctccaatttctaagacttttcaagactcccacagaaagagagctttgtttttttgycatccttcttcttccccttgtgtgtggtaaagaagatgaactttactctttttaggtaattcatctaccattcttctatttgctttctcttttatatttttgtgattcaggatggtatctgcctctttgtttaattcaagataaagtttttgcttctgcttttgttctctctgttgtcagtgtgtgtgtgtgtgtgtgtgtgtgtgtgtgtgtgtgtatgtttwgagagagggatcatawgttatrggatcaaaaagacaggggcacwaytcctcaaataacctgtatccatrggccaaaatagctattcaaatcwttgaataawatgttagtctaataarttgtttgctccatarggtatgggacaatgtatttytcttttctytcttttttktgnacaatttatttttcaaggcaatttgggataactggaagaacacaaactctgggattggagggagctgagcttgaatctgagctctcagtttycctagctttctcatcttagtctatytcttaacttcttagattttaaattatctccactattactaaattcaaagtcatagtaaggattaagtgaatatatggtaaagtttttagcatagttcctggtactctgcagctaatagtttaggaatcctgaagacagagtatatggactgaactgtgtcccaccaaccccccaaaatcctgtgttgaagccctaacccccaatgtgattacatttggag

SEQ ID NO: 3459 - DNA, 271 bp, Canis familiaris
  misc_feature (33)..(33): n comprises a, c, g, or t, or includes no nucleotide
  misc_feature (157)..(157): n comprises a, c, g, or t, or includes no nucleotide
  misc_feature (183)..(183): n comprises a, c, g, or t, or includes no nucleotide
  misc_feature (204)..(204): n comprises a, c, g, or t, or includes no nucleotide
  misc_feature (211)..(211): n comprises a, c, g, or t, or includes no nucleotide
  misc_feature (217)..(217): n comprises a, c, g, or t, or includes no nucleotide
  misc_feature (227)..(227): n comprises a, c, g, or t, or includes no nucleotide
aagggtaatttttgtctgaaacaatctgtgatntgtggtcatttgtggtcaacctggtcatttgagattagagtgggctatttagaaagagatttctctgttcatttagactattaacctctacacacacacacacacacacacacacacacacacncctcaaaatacatacacaaaagccangtataaattactttttaatangtgtccntgtgantctgcatatntgaatgactcagagtacactgtaccgggtaaaacagactttaga

SEQ ID NO: 3460 - DNA, 399 bp, Canis familiaris
  misc_feature (226)..(226): n comprises a, c, g, or t, or includes no nucleotide
  misc_feature (358)..(358): n comprises a, c, g, or t, or includes no nucleotide
tgcatgcctgcaggtcgactctagaggatcttcacatctatttttgtgccagtaccagaccgttttgattacagtggtttcctagtatcttcaaatctggaagtgtgataccttctgttttgtttttctttttcacgtggtatttgtctttctctgacttactttgcttagcattatactctaaatccatccgtgtcattgcaaatggcaagatttcattattttntatggctgagtaatattccagtgtgtgtgtgtgtgtgtgtgtgtgtgtgcatgcgtgcacatgtgcatacacacacatatatataacctttgtcctttcatcagtcgatgggcactgggctgcttccatacntggctgttgtagataatgctgccctaaacatggagagcagt

SEQ ID NO: 3461 - DNA, 370 bp, Canis familiaris
taatacactgggctcctaaggttagcctactgaaactagattctaaggtatcttttttatttgttgagtaatcaatattctctggaagggataatctcaactatgaacttcaggttgcaaattatgaaattttgcattatatctaccctcttcatcacaaaaatctttgtcattaccactgaaataatgtaaaatataaaaacataaaatcattgaattgtaaatactcttaaacttgggtgtgtgtgtgtgtgtgtttgtgtgtgtagaaacatccatttctcctaagaaacctttttggtggatataaaatgtagatacattcagataagttaaaaattttaggcaagttgaatgggacaataaatga

SEQ ID NO: 3462 - DNA, 367 bp, Canis familiaris
  misc_feature (34)..(34): n comprises a, c, g, or t, or includes no nucleotide
  misc_feature (137)..(137): n comprises a, c, g, or t, or includes no nucleotide
  misc_feature (142)..(142): n comprises a, c, g, or t, or includes no nucleotide
  misc_feature (193)..(193): n comprises a, c, g, or t, or includes no nucleotide
  misc_feature (217)..(217): n comprises a, c, g, or t, or includes no nucleotide
  misc_feature (222)..(222): n comprises a, c, g, or t, or includes no nucleotide
gcctcaggtcgactctagaggatctatagctccngcgagcagacgagcacaccgaattccctggcatcattacgtgtgtgtgtgtgtgtgtgtgtgtgtgttcatgcagagagagggagagggagggggagagtcangctancgtcctaggcccctagagtagattgctatgttacatacatgctgaacctanggtgaatgatgtggaatatctgcntccancttctaggatgggggcacagaatcaattcgatacttgattagtacgatttgaaaaaaaaatagagattccagccactctacagactgagatttctattcagaattccaaggaagcagcaacattgcaaatgaagtgctttgggaa

SEQ ID NO: 3463 - DNA, 517 bp, Canis familiaris
  misc_feature (17)..(17): n comprises a, c, g, or t, or includes no nucleotide
  misc_feature (62)..(62): n comprises a, c, g, or t, or includes no nucleotide
  misc_feature (502)..(502): n comprises a, c, g, or t, or includes no nucleotide
ctatcaagggcccaccnaaatagtgttatgttataagtaaatagagaaatttcttggttganacacaagccagaccaaaatatagggttgaatgatattttctacagttcctactattttaaaatgggaaaaaatgataggaaagaatgaaaagataatgcttaaacaaacttccagggatttctttcattactaaccaaaacctgccaaatttgtcaacttgcaaataggtctctcttctccatgagggtaaactggaattttgaagtaggggtgtgtgtgtgtgtgtgtgatatatatagagaaagacagacacataaagtaggccctaaggttagggagcataagaaagagagtggtagattagattagaggactgatgagttaccatgcttgctgtaagattttgaaggtcaaaataagaactcctagactttggatgtttactgttaagaatgggaagttgctttgaagttaatgacttaataattaaaaaactccngaaaagtttggagga

SEQ ID NO: 3464 - DNA, 310 bp, Canis familiaris
  misc_feature (6)..(6): n comprises a, c, g, or t, or includes no nucleotide
  misc_feature (22)..(22): n comprises a, c, g, or t, or includes no nucleotide
  misc_feature (53)..(54): n comprises a, c, g, or t, or includes no nucleotide
  misc_feature (59)..(59): n comprises a, c, g, or t, or includes no nucleotide
  misc_feature (101)..(102): n comprises a, c, g, or t, or includes no nucleotide
  misc_feature (108)..(108): n comprises a, c, g, or t, or includes no nucleotide
  misc_feature (129)..(129): n comprises a, c, g, or t, or includes no nucleotide
  misc_feature (134)..(134): n comprises a, c, g, or t, or includes no nucleotide
  misc_feature (141)..(141): n comprises a, c, g, or t, or includes no nucleotide
  misc_feature (149)..(149): n comprises a, c, g, or t, or includes no nucleotide
  misc_feature (192)..(192): n comprises a, c, g, or t, or includes no nucleotide
  misc_feature (213)..(213): n comprises a, c, g, or t, or includes no nucleotide
  misc_feature (252)..(252): n comprises a, c, g, or t, or includes no nucleotide
  misc_feature (293)..(293): n comprises a, c, g, or t, or includes no nucleotide
aggggngccccaaaaaaaagcntttttatcctctagaggctgctacacatacnnacacncacacacacacacacacacacacacactacccttctatgccnnggctcntggacctcttcctctagcagntaganatctcangatatcantgtgacactgactcttcttcctctctaagactactaatcatcntgtggttacaccgggcccacncagttaatccagaataatcgtcctattttaacatcagtngacacacagcattaattctatctgcaacattaattcctctntgtcacataacctaaca

SEQ ID NO: 3465 - DNA, 334 bp, Canis familiaris
  misc_feature (277)..(277): n comprises a, c, g, or t, or includes no nucleotide
  misc_feature (286)..(286): n comprises a, c, g, or t, or includes no nucleotide
  misc_feature (291)..(291): n comprises a, c, g, or t, or includes no nucleotide
aactttgtattttcctccaacttttattgcaaacattggaaacatgcagaaaagctgaaagaatggcactgtgaacacccacgtacctccaacctagattccaccttcaacatttttttatatttgagttagcttggagctctccatctctccatccatacagtaggcttcgttttgagtgacactaagattgtggccacaggagtgtatgtgtgtgtgtgtgtgtgtgtgtgtgtgtgtgtgtgtgagtgtgtatgtgcctgcacacccacaggangtggggcanggtancttctcagcaacatgggcccttcttacagtccaccccctccag

SEQ ID NO: 3466 - DNA, 605 bp, Canis familiaris
  misc_feature (142)..(142): n comprises a, c, g, or t, or includes no nucleotide
tctagcacggacaattataaaatattacttatttttataatctttgaaacgaatttaaaataccattttctgaaacccagttgactcatttttatcacttgccagaagaaaaaagcatctttcataaaattgagcacctgcntacagaattgtaaatctgtgtttacatgtatttaaaaacctctggtaaactgttggaacaggatgaaaatctccttagacaagacctagggggaattaacaaagcctgagccacacatatcctatctttgtcatacctgtgtggagtcagcttccctctggctcagttagaagttctcaaacwtcagtttgcatcagattcaccggtgtgtgtgtgtgtgtgtgtgtgtgtgtgtgtgtgtgtawaacacaacgcmtcctgtgaccccactcctagagtttctgattcagtaggtgtctgcagtggggctcagaatttgcatttctaacatgttcccaggtgatgctgatgccagggacccagcagagaactattgctctggcttgaattctctaagaaagaatgttctttttacataagaggacttctatatttaggctttctatgccttgggagtattgta

SEQ ID NO: 3467 - DNA, 756 bp, Canis familiaris
tgggctgccctaaaatcacctttaaatagtgttacgagttcaatgagttttgacaaatatatagttatgtaaccaccagtataaccaatgtatcaaatattttcatcactccaaaaggttcaccatgctcctttctagctaatttcttatctgtatctctaacttttgtcaactactgaaatgtttctatctttatagtttcatctttttgaaaatgttataatggactcatacagaacacaggcttttgtctctkggcttctttccatttagcattaaakattttkggaggattcatmcacagtgtgcgtgtgtgtgtgtgtgtgtgtgtgagagagagagagagagagagagagagaaagagagagaggcagagacacaggcagagatagagagagacagagaatgaaggagagaatttttttctttttttaattgccaagtagtattctgttgtatggctagaccacagtttgtttatccattcacctgctgatggaattggactaatttgttctagttttagaaaattatgaataaagtctatattcttttataaaaagaataaattttatttatttgaaacagagagaaagagagagagagatagagcaagcacaagcaagggggagggatagagggagagggagagggagaagcagactcctggctgagcagggagccagatgcaggacgccaacccagaaccctgggatcatgacctgagccaaaggcagacacttaaccgacctagcc

SEQ ID NO: 3468 - DNA, 816 bp, Canis familiaris
  misc_feature (472)..(472): n comprises a, c, g, or t, or includes no nucleotide
tttcttacatttagaaaactgtgatagagacaataaatgcttcctcggaggaggtattattgatttttcatctgggtagtcaagggaaggttttatgagggagctggcgtccgaactggccctcaaggacaggccctgcatgctttctcttaacaaatgacatcaagtgtccatttaaactatctgcttgagaaaatgccccacttccaggggccattcattacttcctggttttcyttgagagcttcaatgtgttagttatatttaattatggtatggcccagagagaagatggagtagaaacagtgtgtggatggagccatggaggaaaggagagggtggggcttgcagaggggaaagaaaacagttcaggttggctggagtgcaggcagatacagggtacagtagacaaagtgcaaagtctattgtgaagcaagctcaagagtgtatatttattttttctgtatttagncamagraggwggtgtgtgtgtgtgtgtgtgtgtgtgtgtgtgtgtgtgtgtgtgtctcaggattggtcattttatgccgatggggatgagtmtgacaacattacaactmacataaattgatggtcctattgttgaataaccgtgtcagtatcattttgttttagaactgttgctcatccagtaaaactgttgggcatgtggggacttttcaatgtacatgtcacttttgatccttggagaagacacgggagacacacccttgctgacaaagtagacctgggcagttgtgtctaaactgcatcatcctgctcacttttacccccacccggacaggttaaatccaa

SEQ ID NO: 3469 - DNA, 250 bp, Canis familiaris
  misc_feature (20)..(20): n comprises a, c, g, or t, or includes no nucleotide
  misc_feature (23)..(23): n comprises a, c, g, or t, or includes no nucleotide
  misc_feature (123)..(123): n comprises a, c, g, or t, or includes no nucleotide
  misc_feature (181)..(181): n comprises a, c, g, or t, or includes no nucleotide
  misc_feature (207)..(209): n comprises a, c, g, or t, or includes no nucleotide
  misc_feature (230)..(230): n comprises a, c, g, or t, or includes no nucleotide
ctctagacgatcacaaaggnacntgcccaggacccaatatggacttcttgccaagtcctgtgtgtgtgtgtgtgtgtgtgtgtatttgaaatgggagggttcagacccttggcagtataatanacagactcagagcacccattttttgttcaagcagaggttctatccaagaagacttaanacacatgaaaaacaaataaatggagnnnatccattgggaatataatatncagacacgtgttcctttttt

SEQ ID NO: 3470 - DNA, 368 bp, Canis familiaris
  misc_feature (180)..(180): n comprises a, c, g, or t, or includes no nucleotide
  misc_feature (184)..(184): n comprises a, c, g, or t, or includes no nucleotide
  misc_feature (186)..(186): n comprises a, c, g, or t, or includes no nucleotide
  misc_feature (351)..(351): n comprises a, c, g, or t, or includes no nucleotide
tctgtttgaattagaaatagatgcacagagagaaagggacaccttttcccccaaggagatgtagcctgtcaccagagatcaaggcttgcttggcacatgagttgggctcaattttagcctgctcttgaccttgagtggtgtcaggagacaaacctgaccaggtaggcagagcagttgcancgantngcatatgggttgtaataatgggtgtatcctgctctattaagatgttttaagtgaaggtcgacatcattagatttgtgtgtgtgtgtgtgtgtgtgtgtaattcttatttccagtatggttaacatacagtgttatattagtttcaggtgtacaatatagtggatncaacaattctgtaacat

SEQ ID NO: 3471 - DNA, 526 bp, Canis familiaris
gaggatccctcattcttaaacatgaacagaaatccgagggtaatcggactgttggtccaaattacatgaatgaaaaagttaaaccaacagaaaaattgactccagaggaaacaaaggtaattcagggaacagactttttaaaaaatctgtaaataataccctcagaaaaacgtgagakgatatcatgtccttaaaacaagaacavagtgctattttaaaaaggaagaatacaacaaagaggtcttggaaattaataatatgatttctgagatagatatttaabagatggraatatagattttagaatatagaaatacaggaaatctcccagaaagtaaaataaaacccatatgaaaagacacaaaaagaagaccctwagacacacacacacacacacacacacacacaccmaaacactwtcagagagraaaaaggaaagacatagraggccgatcaaggaggtccaaactcctatcttctgagtttctgaaaaaagaatgragratatggaagaaattatgaaagg

SEQ ID NO: 3472 - DNA, 418 bp, Canis familiaris
  misc_feature (214)..(214): n comprises a, c, g, or t, or includes no nucleotide
  misc_feature (229)..(229): n comprises a, c, g, or t, or includes no nucleotide
  misc_feature (234)..(234): n comprises a, c, g, or t, or includes no nucleotide
  misc_feature (247)..(247): n comprises a, c, g, or t, or includes no nucleotide
  misc_feature (255)..(256): n comprises a, c, g, or t, or includes no nucleotide
  misc_feature (258)..(258): n comprises a, c, g, or t, or includes no nucleotide
  misc_feature (265)..(265): n comprises a, c, g, or t, or includes no nucleotide
  misc_feature (269)..(269): n comprises a, c, g, or t, or includes no nucleotide
  misc_feature (272)..(272): n comprises a, c, g, or t, or includes no nucleotide
  misc_feature (289)..(289): n comprises a, c, g, or t, or includes no nucleotide
  misc_feature (292)..(292): n comprises a, c, g, or t, or includes no nucleotide
  misc_feature (297)..(297): n comprises a, c, g, or t, or includes no nucleotide
taaaaaaactgatttatctcagcaaaaatatctagtaagtgcagacccagggtcatacttctgtcttctaactcaaagtttattgttcttttcattctactaggtcattccataaacatattatatgaagtcataacacggccagttaatttgaaggcacttatcgctctcatgcacacacacacacacacacacacacacacactcacacgcnaagaaagaatagtancttanggaaagaaatttntgcaccannanggcacangcanaangggggtgggggtggatnccncatanatgatattccatgtctagaaaaatgatggaaaaacaaaacaacaacaacaaaaaaaacaaaaacaccaaatgtctttaaatggtgagctcttttaatagcaccacttagttcacatttata

SEQ ID NO: 3473 - DNA, 342 bp, Canis familiaris
  misc_feature (189)..(189): n comprises a, c, g, or t, or includes no nucleotide
  misc_feature (329)..(329): n comprises a, c, g, or t, or includes no nucleotide
cacattcctggctgttactccaagaatacaagaacgctagcagaagggatacatgcacccctatatttatagcagcaatatttacaaaagccaagatagggaagcagcccaagtgtccatctccatgttagatgattggataaagaagatgtgatacacacacacacacacacacacacacattggacnattattcagccataaagaagaatgaaatcttgccatttgcaacgacatggttggaattagaaaatatagtgctctgtgaaacaagtcaaagacaataccatatgatttcatttataagtggaatttaagaaacaaaacanacaagccaaaggg

SEQ ID NO: 3474 - DNA, 320 bp, Canis familiaris
  misc_feature (52)..(52): n comprises a, c, g, or t, or includes no nucleotide
  misc_feature (87)..(87): n comprises a, c, g, or t, or includes no nucleotide
  misc_feature (178)..(178): n comprises a, c, g, or t, or includes no nucleotide
  misc_feature (197)..(197): n comprises a, c, g, or t, or includes no nucleotide
  misc_feature (211)..(211): n comprises a, c, g, or t, or includes no nucleotide
  misc_feature (214)..(214): n comprises a, c, g, or t, or includes no nucleotide
  misc_feature (222)..(222): n comprises a, c, g, or t, or includes no nucleotide
  misc_feature (226)..(226): n comprises a, c, g, or t, or includes no nucleotide
  misc_feature (255)..(255): n comprises a, c, g, or t, or includes no nucleotide
  misc_feature (264)..(264): n comprises a, c, g, or t, or includes no nucleotide
  misc_feature (270)..(270): n comprises a, c, g, or t, or includes no nucleotide
  misc_feature (279)..(280): n comprises a, c, g, or t, or includes no nucleotide
  misc_feature (289)..(289): n comprises a, c, g, or t, or includes no nucleotide
  misc_feature (301)..(301): n comprises a, c, g, or t, or includes no nucleotide
gagagaaatgatgcattgtacagttatatgaagtaaaagcaaaacataaaanggaaacaaatctggccctcatgtcagacatggagnataaatctgaaacaaatctgaatgtatttacaattagtctagggatgtgtgtgtgtgtgtgtgtgtgtgtgcgtgtgtgtgtgtgtgtgtntatatggaggcatgcctanaaagtgtgaaaatnacntctaaaanaganatgaacacattaataagacaaagaatatngcggggacnccagcncatatgaannacgagttgngcaaatagctangggcataaaaatgtatccc

SEQ ID NO: 3475 - DNA, 201 bp, Canis familiaris
  misc_feature (69)..(69): n comprises a, c, g, or t, or includes no nucleotide
  misc_feature (74)..(74): n comprises a, c, g, or t, or includes no nucleotide
  misc_feature (81)..(81): n comprises a, c, g, or t, or includes no nucleotide
  misc_feature (84)..(84): n comprises a, c, g, or t, or includes no nucleotide
  misc_feature (102)..(103): n comprises a, c, g, or t, or includes no nucleotide
  misc_feature (125)..(125): n comprises a, c, g, or t, or includes no nucleotide
aataaaagtgccatctaccttctgtcctgttcatgatgtgtgtgtgtgtgtgtgtgtgtgtgcacgacntggcnagtgccntgngcagtcctcacccagcanncacccctttgacgactggcccntcctgtccaaattggcaggtgctaagggttgtgggcgcccaggcccccctgtccaggaagctccaggtttcaatct

SEQ ID NO: 3476 - DNA, 369 bp, Canis familiaris
  misc_feature (205)..(205): n comprises a, c, g, or t, or includes no nucleotide
  misc_feature (316)..(317): n comprises a, c, g, or t, or includes no nucleotide
  misc_feature (340)..(340): n comprises a, c, g, or t, or includes no nucleotide
gaggatctatagaaattctttagcataccccatcgatgcaatctgccttatcctgtgtctagaaaatatatgcaaagacaagtttacagagtaaaagaaacttgaagcatgcacacacacacacacacacacacacacacaaatgtgacttacattgcttcctgcactgcatataacttgtcctgcactgcatttcttctcaggncagagcaaaagttagacaaatcttgcctgtaataatggataaaatgaacaaaagtagaatatcccaacaaatatatatatttttatttttatatttatacttatatttttnnctggctttttcttggaccaaatnaaaaagccactccaaaaaatttctcaatg

SEQ ID NO: 3477 - DNA, 321 bp, Canis familiaris
  misc_feature (22)..(22): n comprises a, c, g, or t, or includes no nucleotide
  misc_feature (144)..(144): n comprises a, c, g, or t, or includes no nucleotide
  misc_feature (152)..(152): n comprises a, c, g, or t, or includes no nucleotide
  misc_feature (161)..(161): n comprises a, c, g, or t, or includes no nucleotide
  misc_feature (187)..(187): n comprises a, c, g, or t, or includes no nucleotide
  misc_feature (194)..(196): n comprises a, c, g, or t, or includes no nucleotide
  misc_feature (213)..(213): n comprises a, c, g, or t, or includes no nucleotide
  misc_feature (240)..(240): n comprises a, c, g, or t, or includes no nucleotide
  misc_feature (243)..(243): n comprises a, c, g, or t, or includes no nucleotide
aaacaaataaaatccatattanaagaaaagttcataattcccccccagactcctatagcccattcttgtgaattaattgacaatcattttctttatcttatgctggtgtgtgtgtgtgtgtgtgtgtgtgtgtgtgtgtgtttnaaatgganctacgtgtnactctttaagtaggatacaggcttgnctctgtnnnggaagcccccaaataanagtggctccacaagacagaagtttatntcntgttcatgagagagaacagttacaagcagtctaggaggtacggtactttctacagtgtgcagtggacacaaactcttt

SEQ ID NO: 3478 - DNA, 400 bp, Canis familiaris
  misc_feature (196)..(197): n comprises a, c, g, or t, or includes no nucleotide
atatggtatttgtctttctgtgactaacttattttacttagcattatactctccagccctatccatattgctgcaaatggcaagatttcatttatgactgaataatattcaattatacacacacacacacacacacacacacacacacatcttctttatccattcatctatcagtggacactttggctacttccannatttagcttttgtaaataatgctgcagtaaacataggagtgcatgtatccctttgaattagtgtttttgtatggcgggagtggggggaatacccagtagtatgattactgaattgtaggatagctctatttttagttttttggaaactcatactgttttccacagtggctgcaccagtttggcattcccaccaacagtggcat

SEQ ID NO: 3479 - DNA, 417 bp, Canis familiaris
  misc_feature (372)..(373): n comprises a, c, g, or t, or includes no nucleotide
  misc_feature (383)..(383): n comprises a, c, g, or t, or includes no nucleotide
  misc_feature (403)..(403): n comprises a, c, g, or t, or includes no nucleotide
cacactgggctctctgcatggagcctgcttatccctctgtgtctctgtctctcacaaatgaacaaatattaaaaaattaaaataaaaaattcttctcagacatgaaaatttttggctgacacaggaagaaatggaggcaacaagacttaaagaaaaaaagggggggggggtccctggatggtgcagcagttctagcgcctgcctttggcccagggtgtgatcctggagaccagggatcgaatcccacgtcgggctcccggtgcatggagcctgcttctccctctgcctatgtctctgcctctctctctctctgtgtgtgtgtgtgtgtgtgtgtgtgtgtgtgtgactatcataaataaataaaattttttnnaaaaaaaagngggaggaaaagagctggganccccaggggaaaaa

SEQ ID NO: 3480 - DNA, 335 bp, Canis familiaris
  misc_feature (33)..(33): n comprises a, c, g, or t, or includes no nucleotide
  misc_feature (36)..(36): n comprises a, c, g, or t, or includes no nucleotide
  misc_feature (198)..(198): n comprises a, c, g, or t, or includes no nucleotide
  misc_feature (219)..(219): n comprises a, c, g, or t, or includes no nucleotide
  misc_feature (223)..(223): n comprises a, c, g, or t, or includes no nucleotide
gtttgttaaaggacataaccatagtgttatatnacncacaaattgttcctcaaggtagcaacctgacttaaaggaacaaataactgtcatgtccctgaggggtgcttagcctatagttcatggctgaaattgtatgcaatattttaagcctctgtgtgtgtgtgtgtgtgtgtgtgtgtatgtgtgagtgattttttntgggggtggggggttagtatntggnctattagatatcaaattctaaaatctgacagtctataactcccaaaaccattaattctcccgaaatcccagctttctgcctcctatataattccacaggaaaagatttaatt

SEQ ID NO: 3481 - DNA, 380 bp, Canis familiaris
  misc_feature (203)..(203): n comprises a, c, g, or t, or includes no nucleotide
  misc_feature (205)..(205): n comprises a, c, g, or t, or includes no nucleotide
  misc_feature (360)..(360): n comprises a, c, g, or t, or includes no nucleotide
gaggatctgtttcggtcctggcaggcccaagaggatgtccgtcctgaatggcctgctatgtgcctcaagatgcaagccaacatgctacgaagaggctttgctcaccacaagtggaatggagtctgcagaaaattacttcatgcacacacacacacacacacacaataataataatcagacttggaaatccacaccagtagccngnggagaccgatgcaccgctgaccagcacccgacggtggaacgtggttctcccttccagctgttcctggccctgagcctttgcaagaatggaaactgtgtagcttggtggaactcacctgccgaactgaggtgcttacgacaggttcatgacagggnagcgctggaggccacagtgg

SEQ ID NO: 3482 - DNA, 314 bp, Canis familiaris
  misc_feature (187)..(188): n comprises a, c, g, or t, or includes no nucleotide
  misc_feature (273)..(273): n comprises a, c, g, or t, or includes no nucleotide
  misc_feature (278)..(278): n comprises a, c, g, or t, or includes no nucleotide
tctcagaatagtaagataatgctgaaagttgataaacttagctggagagatgatatccaaaaggatactagaacttagaacaggccactattgtattttaatgtggcagtttgtgtgcacacacacacacacacacacacacacacgagtgtgtgagcagtgagggggccctcaccaagcagtgtgnntggccctttaagaaatatatacaaagccactgtattgcctgtccttgtcctgagcctagaggcgctccccctgagtgccagggtnacagntcttcccttgtctgctggtcctgtgatgatgggcac

SEQ ID NO: 3483 - DNA, 879 bp, Canis familiaris
  misc_feature (207)..(207): n comprises a, c, g, or t, or includes no nucleotide
  misc_feature (404)..(404): n comprises a, c, g, or t, or includes no nucleotide
ctagaggatcctacaatggcccagaaattcttggggggcatggggagtatcagcatatggaagaacactgagtccccagacgttctgggaggtagggtgggttaccataatttcatctcgtccaggaaatcctgctttttgagctactgtgasctgtcccagggctttgtggcttttccaggggagctctgggctacctaacttcvnccaggtttccctgactagctagagccccagggtcccacctggaagacaatgtgtacagcttcagaggtgtggactttccccaagggctgaggggctgtggggctgagttagctacagggaaacgagtaatgggcaatgtgccaggagacaagcatggactggagccaaacacatttaacagcagggcatggctggtnaccctggacttcctggccacctgtggatgctaatagaatgtcttttccatatcctctaggcttcctggaaatgagctcccttgctgatgcagtgattgattgcatatccgtatctcttcctgaccgtgaccccctaaactgccttccatccctcctttcgcatggttcctaccacatttctttttctcctcccctttagccttctctcttttcaggccaggagaagaagtcaggacctgggggtgcaagaggccaaagtctcagtgcctcacatccctgagcagtgtgtgtgtgtgtgtgtgtgtgtgtgtgtgtgaggtacatgcattccagagctggattgtctgcattctaatcctgactccacaatttccgagctgtgtgaattcgggcaagtgacttaaccactctatgccttggttttctcaagctggtaggatgaggataacaatagtagttagctctgggaaagtta

SEQ ID NO: 3484 - DNA, 406 bp, Canis familiaris
  misc_feature (216)..(216): n comprises a, c, g, or t, or includes no nucleotide
  misc_feature (263)..(263): n comprises a, c, g, or t, or includes no nucleotide
  misc_feature (274)..(274): n comprises a, c, g, or t, or includes no nucleotide
agaggatcataatgggctttgagtaattatgatgtatcagtgtcgattcatcagttgtgacaaatgcccccctcccctgcccgctggaaatctgatgtaggagacgctctctctctctctctctgtctgtctgtctctctctctctctgtgtgtgtgtgtgtgtgtgtgtgtgtgtgtttagggcaggagaggtatgtgggaaaactctacttttncctcaacttttctgtgacttgaaaactgttctgaaaaaaaaagtccnaataattaatnagttgagctccagaagaaaagtctgagctagcagaggttatttcatgaagtttaaggaaagaagccatctctatgagataaaagtgcaaggtgaagcaacaaatgctgatgcagtaagctgcagcaaggtat

SEQ ID NO: 3485 - DNA, 466 bp, Canis familiaris
  misc_feature (36)..(36): n comprises a, c, g, or t, or includes no nucleotide
  misc_feature (107)..(108): n comprises a, c, g, or t, or includes no nucleotide
  misc_feature (180)..(180): n comprises a, c, g, or t, or includes no nucleotide
  misc_feature (209)..(209): n comprises a, c, g, or t, or includes no nucleotide
  misc_feature (371)..(372): n comprises a, c, g, or t, or includes no nucleotide
cttaactgactgagccacccagttggttatagattncctcaactatatctttgaacatactaattttaatttttttaagttcctctctgagagcttaagcatttgcnncatttctgggtatgcttctgttgtttgtttatctcttggcagtaggtttctctctcctaccctcctgttttngattgaatgctggacatgatgtataaaanaacagactgcggtaaataataattgtgcacagcagtaaacatctcttttgtcaggttattagtgtgagagattgaattagttcttatctggttgaactggatttggctatattttggctttgtgtgtgtgtgtgtgtgtgtgtatgaataagtacatctgtnncatcagtatgctttaccctgaaacactttagcacaaacatcattaattggaattcatggtatagtttttctgtgttggagggtaatgtacatat

SEQ ID NO: 3486 - DNA, 341 bp, Canis familiaris
  misc_feature (214)..(219): n comprises a, c, g, or t, or includes no nucleotide
ttccttagaatctaatgtccatcattctaattactccactgacatgctttcaaaggtctcaagagggtgcccctcttagcagtcagattttacaatatattttcctaggtaatttgcttagctatgctccagaagagtgttcatcctcagtaccaaatctccaaaacacacacacacacacacacacacacacacacacacaccagcctatggnnnnnnatagtcacagcagaggcaatcaaacaagaatcacttaagtatgattgattgattgattgattgatttagagttcaatttgccaacatatagcataatacccagtgctcatcccatcaagtgc

SEQ ID NO: 3487 - DNA, 436 bp, Canis familiaris
  misc_feature (431)..(431): n comprises a, c, g, or t, or includes no nucleotide
ctagaggatctccatatagccatatatgattgtgtttgctgttacagcatttttactatagcctgaagcagaagtccctttagagtacttagattagaatagaaggtatgaagccagtataattggatactgttctaaaaattatttttaagacttctttctaataaggaaacaaaatgcagtattattactattttgtgtatattctttaaacaattcatgttgttttcatattatggcaaacagccctcacatagcatttttatttaaataatatagctatccacccacaaaagtctgtctcagctccacttgtggactctagaaattggctggatagtgttttaattgcacatagaactcaagattcccagtctcttggacccagctttattttgaggtactgtgtgtgtgtgtgtgtgtgtgttttnaactt

SEQ ID NO: 3488 - DNA, 307 bp, Canis familiaris
catgactctcaaactaaaatgattgcattaattgatacacagatactaatatacatgcttcagcttttcataatctctcctaattcctaatttaaatttttaaaaatattctaattccattacaaaataaaaatgattttaaagaacaaaccaggattcaagcccatattttaaaactgcatccccagttttattcagacaacctgctgcctgttgtaaaaataaattctcaaggtcataatttcaaacctcttgcacaaggctctcccagtaaattactgttcccaatgaaacagactttaaagaa

SEQ ID NO: 3489 - DNA, 395 bp, Canis familiaris
agaggatcatgacagtaattctgtattccgaacataatacctcactgtgacttttttctttttataatgttccaaaaaattgtcatatagtgttttccaaagtttggatgtattagatgtctccaaatcccaaaatagttaagccagctgggttttgcctttacccaactgttccccagcttttctacacacacacacacacacacagagagatatacacagatacatgcacagacatacacacactgatatacaaacacagatacacatgtacacacatgcatactgagaccagtctattagtttataactgtctaacttttaagatttcataatactgccaatactcagcaacctagcacaagtacactatacctctaaagatagatatttct

SEQ ID NO: 3490 - DNA, 403 bp, Canis familiaris
  misc_feature (202)..(202): n comprises a, c, g, or t, or includes no nucleotide
  misc_feature (204)..(204): n comprises a, c, g, or t, or includes no nucleotide
  misc_feature (359)..(359): n comprises a, c, g, or t, or includes no nucleotide
  misc_feature (369)..(369): n comprises a, c, g, or t, or includes no nucleotide
aggatctagtgttctgtccactagagtccagttaatgacatttttcaagtggcttgggggctgttgaatttttttttcttttggcttttttgcttgtttaatacagatatactcttactttcctagttttctttttatttacctacccccctatcctgagcacactgccacagaacaataggtcttattctcaaaccacatncnttgttgtgtacacatcacacaacacacacacacacacacacacacactgagctgaggaataatgaagtgtcagggaaattactgctgagtccacagctcttgtgtgtgtgtgtgatgtgtttgcacattctctctcagtgcccttcccctcgccnactccccttnacccctctccgctttgtggaatggatttgtctct

SEQ ID NO: 3491 - DNA, 401 bp, Canis familiaris
  misc_feature (205)..(205): n comprises a, c, g, or t, or includes no nucleotide
agaggatcaaatcttctacagcaatagcaaatcaagaaaggtcagagaaagaaagaaacgagattaaatactcagtaagtgatgtagatttgttgtgctttgtaattacgcagtccttcactgtacacttccttaaaaataaaagtcttcctgttcatggttttggggtgtgtgtgtgtgtgtgtgtatgtgtgtgtgtgtgttnatggttttcatcaaaagaactgctctttcttatcttcagaaaagaaatgatcaaagagaagtttgttcctctatgttgcccctgttcccctcaactcctctcactcctccgttgaggtcattatccccacacccagagaaaaggaaggaactggccttttgttttcttcttcagtttcaagtggctggaagacatt

SEQ ID NO: 3492 - DNA, 386 bp, Canis familiaris
  misc_feature (50)..(50): n comprises a, c, g, or t, or includes no nucleotide
  misc_feature (202)..(202): n comprises a, c, g, or t, or includes no nucleotide
agaggatccctgcatgaaaggcagttgtcatttcctgtatgagcggcaanattgtccgttttgctgatgggtttgttaatgggacacacacacacacacacacacacacgcccagaaacataaaatgcatcgctctatggaaaacagaggtaatctctggaactcccttcagttaattattatttgtaaataagcagaattnagcttcatttgagggcttgttaggaattgcagaggtgattgttcataaatcaaaaactggcatgcctgtgtgcactgattttgattaaaaactggctccggctttatataaaattactcccgaaaatgttaatcataaaaacacagcattatctctggtttctggccacttttaaaggtgtttt

SEQ ID NO: 3493 - DNA, 329 bp, Canis familiaris
  misc_feature (146)..(146): n comprises a, c, g, or t, or includes no nucleotide
  misc_feature (148)..(148): n comprises a, c, g, or t, or includes no nucleotide
atttttcctgccaggaatactcctggcaatatcagcatagataacactttgacctccttcaaattttaaaaacactaaaacaaacataagacaagagcaacaaaaaagcggggggaggagggaggaaagaaagggaaaaaacttangnggaagcatcttctcagtgttttttcctgaccacgctatttaaaattagacctctctgtctttgaaatatatttgctcttcttccctgctttcattttctccatagcatttaatcacctttatacataaggtggtatggtgtatggggaggtgtgtgtgtgtgtgtgtgtgtgtgttaattt

SEQ ID NO: 3494 - DNA, 360 bp, Canis familiaris
ctataatccttcaaacaatgtctgcacgtaataggtgtttggtaactaattgttaaaatgtgtaaataagtaacacatcgtttgaaaacatgatagtctcttctatgtccaaacctgattcattataatctgtttaatgatacgtgaccactaaagaaggcctgagttttagatatggaatcaagaacaaggaaatacccttgtcaacttgacagattaaagcttctactaatatcaattcttactgagcccagtgtacctgatttgtatgtacaactggatacttccttagaaattctaggagtactgaggagattaatgaggtaaaatatgaaatactttatttcttcttatgaaaat

SEQ ID NO: 3495 - DNA, 175 bp, Canis familiaris
  misc_feature (130)..(130): n comprises a, c, g, or t, or includes no nucleotide
  misc_feature (145)..(145): n comprises a, c, g, or t, or includes no nucleotide
  misc_feature (147)..(147): n comprises a, c, g, or t, or includes no nucleotide
tattagctcataccctttatttaacaatccttgaaatatatgggtacaattcctctggtaaatgtctgtatgtctttggtgtgtgtgtgtgtgtgtgtgtgtgtgtgtgtgtgtgttggggggtggtaanaattggagaataganantgtacatacttaccccagcagggagaga

SEQ ID NO: 3496 - DNA, 370 bp, Canis familiaris
  misc_feature (27)..(27): n comprises a, c, g, or t, or includes no nucleotide
  misc_feature (141)..(141): n comprises a, c, g, or t, or includes no nucleotide
  misc_feature (213)..(213): n comprises a, c, g, or t, or includes no nucleotide
  misc_feature (216)..(216): n comprises a, c, g, or t, or includes no nucleotide
  misc_feature (329)..(329): n comprises a, c, g, or t, or includes no nucleotide
gaaaaattaaagtccagaaaaggtgantggataaatactacctcccactctttgttcattaatactattatcaatatcttactttttaaagattaattgttcaccattgctattttttgagaaccctgggtaaattatgtnttttctcccaaaggtcactcaaaaggtaaggtttcacagtacacacacacacacacacacacaaaccacatnagncctttaacttttaaaactatacccactcagtatttaattttatgtaaataagttaataaacataaagcactcagaatagtacctggcacataaggcacatctgctatcagccntatcgttttaatttccatattatcactaccaatcactaaca

SEQ ID NO: 3497 - DNA, 341 bp, Canis familiaris
  misc_feature (50)..(50): n comprises a, c, g, or t, or includes no nucleotide
  misc_feature (71)..(71): n comprises a, c, g, or t, or includes no nucleotide
  misc_feature (73)..(73): n comprises a, c, g, or t, or includes no nucleotide
  misc_feature (77)..(78): n comprises a, c, g, or t, or includes no nucleotide
  misc_feature (81)..(81): n comprises a, c, g, or t, or includes no nucleotide
  misc_feature (111)..(111): n comprises a, c, g, or t, or includes no nucleotide
  misc_feature (120)..(120): n comprises a, c, g, or t, or includes no nucleotide
  misc_feature (173)..(173): n comprises a, c, g, or t, or includes no nucleotide
  misc_feature (177)..(177): n comprises a, c, g, or t, or includes no nucleotide
  misc_feature (181)..(181): n comprises a, c, g, or t, or includes no nucleotide
  misc_feature (187)..(187): n comprises a, c, g, or t, or includes no nucleotide
  misc_feature (190)..(190): n comprises a, c, g, or t, or includes no nucleotide
  misc_feature (272)..(272): n comprises a, c, g, or t, or includes no nucleotide
  misc_feature (278)..(278): n comprises a, c, g, or t, or includes no nucleotide
  misc_feature (322)..(322): n comprises a, c, g, or t, or includes no nucleotide
  misc_feature (329)..(329): n comprises a, c, g, or t, or includes no nucleotide
  misc_feature (337)..(337): n comprises a, c, g, or t, or includes no nucleotide
gagactggtgtcgccctggtgcgatcctgtgattattttacccagtgatntggatacagccacaaaaaganangcanngtnctatcagtgggtgaggcgaggttgaaaggnatacttgtngtgtatattcaaagacacattaaacacatgtgcacgtgagtgacccgtgtgcnagtntctncaggtnagngatacctgagaatgggcactgcgggtctaaaggtatatacaattttataaacacacacacacacacacacacacacacacanaaagcnatattagctgatgacaaattgcccaccacaaatattgtgccagnttacatntctgccancagg

SEQ ID NO: 3498 - DNA, 430 bp, Canis familiaris
  misc_feature (206)..(206): n comprises a, c, g, or t, or includes no nucleotide
  misc_feature (364)..(364): n comprises a, c, g, or t, or includes no nucleotide
  misc_feature (381)..(381): n comprises a, c, g, or t, or includes no nucleotide
tagaggatccaacctatcttaagaaaaattgattggctaaaaaaaaacattacagtctatgcaatctacaagtgacacaattaagaacagttaaaaataaaagggcaaatatataccatataaagcaagcaaaaaataggacaaagtacggtttcactttttatggaattagtgtacaatttataatgaaaacaaaaagaccacantacaacagtttctttaatttccttccacacacacacacacacacacacacacacaaattgtatataatcatatttctgtttatatatttagttctacctcctttcagcacatagagcactatctcattcttaatcatgattgtaatatatctctccantggatgtaccgtaaaanaaatctccatggataaacacccaagctgtttcccagtttttaattatta

SEQ ID NO: 3499 - DNA, 380 bp, Canis familiaris
  misc_feature (201)..(201): n comprises a, c, g, or t, or includes no nucleotide
  misc_feature (296)..(296): n comprises a, c, g, or t, or includes no nucleotide
  misc_feature (323)..(323): n comprises a, c, g, or t, or includes no nucleotide
  misc_feature (349)..(349): n comprises a, c, g, or t, or includes no nucleotide
tagaggatctgtccaaggaagcatctgttcttgtgttttggttggaaggtttgtcatgaatttcttctgaatgtctgaatttagatagtgtcaggtagtacaggacctggacacttggccactatcgttggtgtatgagcaaaatgagagcgttagctgccatcatcttgaatggatgggccaattaggcatttgagagcnggtggtgtgtgtgtgtgtgtgtgtgtgtgtgtgtgtgtgtgtgtgtgttgagaaggggaaggaggagagggcttctggacactttatgcatttcntctcttcagagatgaagtctatctctntctcagcttctcagcttctcaggtcnactgggttaacccagaggtgatttccaagcc

SEQ ID NO: 3500 - DNA, 435 bp, Canis familiaris
gatctacaatccccttcctgttagatatcctctcatcaccataacaacctacattccattaaaaaacagaggaatcattaaagggaggcagaaggagagaacttttgaggccgcttttcaggtgtcccattcaggtagtctctaatcttttcctgaaagaaaagattaamttcatcactaaaatatgaagtgttattctgtgctgcaawgctcttagggactataagttagtattatttaccagtaaattaagttccttctatgcctatcagcatttgttttctgtgtgtgtgtgtgtgtgtgtgtgtgttttacagtttttctttccccatttgatatcttagctcmrttggcacatattcctgcttctactaaagcatgtcaatctcttacaaacttcccttttttttttcaaacttccctttcttattaaac

SEQ ID NO: 3501 - DNA, 350 bp, Canis familiaris
  misc_feature (102)..(102): n comprises a, c, g, or t, or includes no nucleotide
  misc_feature (142)..(142): n comprises a, c, g, or t, or includes no nucleotide
  misc_feature (195)..(195): n comprises a, c, g, or t, or includes no nucleotide
  misc_feature (306)..(306): n comprises a, c, g, or t, or includes no nucleotide
  misc_feature (317)..(317): n comprises a, c, g, or t, or includes no nucleotide
  misc_feature (325)..(325): n comprises a, c, g, or t, or includes no nucleotide
  misc_feature (336)..(336): n comprises a, c, g, or t, or includes no nucleotide
gaaaactatatatctggctaatgaattaatctgcaatagtaactccatgaaccctagggtatcatagctgagcccaagagtgaggtgtagtatcttaaatanggtatccagtatgaaccagtatccaatggttgtacttttnttcacacacacacacacacacacacacgtgcacacgcatgaacacagagattntacaaaaatgtcaggaagtagacatggcagattgctaatggtttcttctgaggttggactgggaagtggagagagacattattcacaattctgttcctttgtggacttttncaatatgtttncacatttnaaaacaaacanaaaagtttaaacaa

SEQ ID NO: 3502 - DNA, 310 bp, Canis familiaris
  misc_feature (27)..(27): n comprises a, c, g, or t, or includes no nucleotide
  misc_feature (220)..(220): n comprises a, c, g, or t, or includes no nucleotide
  misc_feature (222)..(222): n comprises a, c, g, or t, or includes no nucleotide
  misc_feature (224)..(224): n comprises a, c, g, or t, or includes no nucleotide
  misc_feature (235)..(235): n comprises a, c, g, or t, or includes no nucleotide
  misc_feature (268)..(268): n comprises a, c, g, or t, or includes no nucleotide
  misc_feature (280)..(280): n comprises a, c, g, or t, or includes no nucleotide
  misc_feature (294)..(294): n comprises a, c, g, or t, or includes no nucleotide
ttcttataataggaggaaatttggacntagttacagagggaagaccatgtaaagacacagagtatagatggccatctataagccaagaaaaagaggcctcaaaagaaaccaaccttctcaacacacacacacacacacacacacacacacacacacagaatcatcatgtgaggtgatggatgtattatttaaccttattgtggtcattattttacaaaananancaaaacaaaanatatatataaaaaatcacctcaaacttacatantgttatatgtcnattatatccaatanatctgggagaaagaag

SEQ ID NO: 3503 - DNA, 345 bp, Canis familiaris
  misc_feature (101)..(101): n comprises a, c, g, or t, or includes no nucleotide
  misc_feature (137)..(137): n comprises a, c, g, or t, or includes no nucleotide
  misc_feature (260)..(260): n comprises a, c, g, or t, or includes no nucleotide
  misc_feature (278)..(278): n comprises a, c, g, or t, or includes no nucleotide
  misc_feature (287)..(288): n comprises a, c, g, or t, or includes no nucleotide
  misc_feature (295)..(295): n comprises a, c, g, or t, or includes no nucleotide
  misc_feature (301)..(301): n comprises a, c, g, or t, or includes no nucleotide
  misc_feature (308)..(308): n comprises a, c, g, or t, or includes no nucleotide
  misc_feature (318)..(318): n comprises a, c, g, or t, or includes no nucleotide
  misc_feature (341)..(341): n comprises a, c, g, or t, or includes no nucleotide
gggggacatggataggaaagggggaaatgccaataaatgaatgagtgagttactgctctatgaatctggggcacagtctcactagaccctctgcggagtcntttgaacaagcttcaaattatcccactgagggatangttaagccagagtatttatctgcagattcatgtcattgtttggaggatgccctggaaaatgggggcattaattacacacacacacacacacacacacacacacacacacacacacacgtgagntgagtaagctcttgtcanctaaagaanntcctcanacaganacagcanagatatgccncccattgatatagaaagctgggntgtg

SEQ ID NO: 3504 - DNA, 360 bp, Canis familiaris
  misc_feature (202)..(202): n comprises a, c, g, or t, or includes no nucleotide
  misc_feature (226)..(226): n comprises a, c, g, or t, or includes no nucleotide
  misc_feature (231)..(231): n comprises a, c, g, or t, or includes no nucleotide
  misc_feature (263)..(263): n comprises a, c, g, or t, or includes no nucleotide
gtgaaggtatagccatgactattatttcaggtagaaagcaagtcctggttaaactctgttagggcagtgaataaaagctgtagtcaaaccataaaattgaattttttattgttgtaaatggactcttattggttgagaatcccatctcatatatgtgaaagctacacacacacacacacacacacacacacacacacacaanatactagaacatacaagagtagcnactcngggatatacacacgaactcctagggcagctgnaagattacaccacttgtgagcttgagccaggcacaagcttgccagagagatggagtcagaaaaagactcctggaccagaaaatataccctctaacaa

SEQ ID NO: 3505 - DNA, 312 bp, Canis familiaris
cctgcaggtcgactctagaggatcttggaataaatcacctatagactaagagagaagtccaaaagggaagcctataccattcccacatttataggatgggagtaaagaagatgctaagggaaacaatatatgtatatgtgtgtgtgtgtgtgtgtgtgtgtgtgttatgtacacatacacacatttctctttctcctcttaacaaatactatgattggccagtgttttctcaaaaagagcttcttacatcatctgcctcagagaagtgcttattagtaatctatattcctggtcccagtgcacagtgactga

SEQ ID NO: 3506 - DNA, 861 bp, Canis familiaris
  misc_feature (245)..(245): n comprises a, c, g, or t, or includes no nucleotide
  misc_feature (483)..(483): n comprises a, c, g, or t, or includes no nucleotide
  misc_feature (495)..(495): n comprises a, c, g, or t, or includes no nucleotide
  misc_feature (689)..(691): n comprises a, c, g, or t, or includes no nucleotide
  misc_feature (742)..(742): n comprises a, c, g, or t, or includes no nucleotide
cactcataagggaccagaatgaaaacggggatttcaatttatttatttaccatgagaaatctctgacacagattgggaattctagtgttaataacctggaggcgttctttccacgaatggaatggaaatcgtgacaagaagctctctttgaaggtgcaagagaaacatcacaaggacgcaaagtctactttgcccaatgagcagtgagtctttcatcatggaaccccaggcagtcacgggcttgnttagccagcacggaatctggctgaattgttagctggccgtggtcaatgacagacatgaacctatgtctcatctgggtctcatccactatgtgtcattgagacccatgtctcaatcctgggtcagaatctcctaatgagaatttaaaggctatctctgtctctctgtctctctctctctctcacacacacacacacacacacacacacacacacacaaaccagggttaaacccatggtnaaaggttaagtnagattttggtttccatccgtttccaatggtgggtccatcttttccacaatatatatcaaaacatccaagctgtacatcttcagtatacacgctttttacatgtcaaagtcacctaaagctttaaagaaaacacaaaggccaggcaccaccccaggtgaatggaatcagaattcctgggggtgaagccaggcatnnnttgacggaagtttctgcgggccttggagcacccctgctttaactcactgtntctgctcttgctcatgcattgttcacaggacttttcttagtggacaaagttttccttatcctcacatttttggagggggtacctcacctggggattagacgaactgaaagggaaccaag

SEQ ID NO: 3507 - DNA, 755 bp, Canis familiaris
atccagagtgccaaatacagtcaccctctgacatcttgtggggttaagatgtcaacataggaatttggggaggggaggagaacacaattcagcccatgacaacagggtagagagaagaagtccacctgccagagagtgggagtccaggtctatgcctgtccctggtggaattgggccctggttggaggtggagtcaagctccaaaaccgagaatcctgtctccagtatgattgtgacaagtggctgactacttctcttctccccctgctccaaaggtgctccagtccctggttcacttggccaccctcactatgtgtgaagaggagaccaccgcgctcgtgtgtggacaatggctctggctgtgcaaggctggcttcgcagggggatgatgcccccccgctgtcttcccctctatcgtgggccgccctcgccaccaagtatgtgctcatctggaccaaagctttgagctactaggaraaaghccckcayagtggacaccgtattgtactctgagtgtgtgtgagagagawgtgtgwgcatgagagttgtgtgtgtgtgtgtgtgtgtgtgtgtgtgtgtgttgaaggtgagggactctcttctgagtcccttcagatagaaatatccaggaccaaacccaacataccccaggchtgcagggatggaattatgtctggcttaagttctttggggttgctaggtttggaagaaactttttacaaacrcgacmcagtaaacaagaccatgcctttaag

SEQ ID NO: 3508 - DNA, 470 bp, Canis familiaris
tacctcaaatcactaagtgagcctttgttccattttcataaagctgtgtgtccttcccttagggctcctgtggggcttctaaagataagctggaatattcagtagcaaacagttaccaagtgtaccagactcattcattagctttcaagggctctcacaaaggcttttgcagagctcataaaggtaatgttcaaactctctaatgattccttgaccatgattaagcaaagctaacaaaacaaaagaaaaatctatctcccagaactctgggactatcacaaatgctgatgaggttccatcaggttgggagcaattattacactttatttttctacagacacacacacacacacacacacacacacagatattggtttgtttctgagtgatatgcaaggaattttaaaaggctccctgggtggctcagtcggttaagtgatggactcttggtttcagctcaggtcatgatc

SEQ ID NO: 3509 - DNA, 462 bp, Canis familiaris
  misc_feature (399)..(399): n comprises a, c, g, or t, or includes no nucleotide
ctggcaggtgccccggctscacascytatatgggaaatgccaggtcacgtggggacagctgtgtccctcaggctgccagamtgcaggcaagcmacagacccgccctttcttcccttygamatggaaatcatgcacatggtctctgtgggtgagcamaggggacmaatgtgcattcgggcctcttggggtcacctgctgttcagagccttccttccagagtcmtgggtgttaacatccctacacacacacacacacacacacacacacacgtctccaaacacaagcagccagcaaaggggctggaaagcaacagaatctgcttcgagggttttgaaacgtcctggccttgctgtctgagcttgagcctcacacattctcctggtttgtctcacccggccngcaggggtgcgtggargctgacgctttcaggcactgggtctgtggggacagtgtgctcagagc

SEQ ID NO: 3510 - DNA, 543 bp, Canis familiaris
taaagagtccctgtgcctgcgtaaggcacagcaccttccccagccatctcactttcagtcttagagaaggtgctgagtctgaccttgcctcactcctagcttggaaattgtgaggatrckactgagcaccacagagccctccacagtcaggaagagcactccctgartaggtacacttgtggcgrctcacagtgccgatgcctgtcctttgacbttggggttctaggagaccyagaawgagaccagtacyccagaaagtgtgtgtgtgtgtgtgtgtgtgtgtgtgtgtgtgtgtgtgtgtgtatgthgtgggtgggggkgacacatgcctaggtagagccagaggaagactggtcaggagagaaagagcaagtagatgctgaaaaaatggagaatttatttgaaaattatcctaggcatttaagacaacagaagaggccaggttcaggtatccaatgcaaagtgtccttcctttaccctgtttggctgatggccatccacttagttcctgctcccttaatgttctaagccattgcataggaa

SEQ ID NO: 3511 - DNA, 608 bp, Canis familiaris
  misc_feature (172)..(172): n comprises a, c, g, or t, or includes no nucleotide
  misc_feature (401)..(401): n comprises a, c, g, or t, or includes no nucleotide
  misc_feature (428)..(428): n comprises a, c, g, or t, or includes no nucleotide
  misc_feature (499)..(499): n comprises a, c, g, or t, or includes no nucleotide
agaggatcaccacagcaacttagttaacacctccatcacctcatatatttagctttttgttatggttagaacaccttaaggtctacttccttagcaactttcaagtttataatacagtatcgttgactattaccaccaagctgtgaccagcatttccctgatttcccccatnccctaccttctggcaaccacctttctattctgtttctctgaattcagcttttttaaagattccacatataagtgagatcatacagtatgtggctttctctgcctgaattatctcacttagcatcatgccctgcagttatcagaaatgtcaggaatccttctttctcatggctgcagaatttccagtgtgtgtgtgtgtgtgtgtgtgtgtgtgtttttctttattcatntgtctatcgatggacattaccttgttntggtacttcacctaatatgattattttctcaccattacactgggattatgggtgtggagaagaaagagcanatcttttcatctgtccccattggaaggaagtccccgtatgtagcccacatgtgaagagctgggagttggctccacctcatcaaggacttaaatttcttttcctcatcca

SEQ ID NO: 3512 - DNA, 420 bp, Canis familiaris
actctagaggatctaattacaatcttccagatgcttatggctcactgtaagcaaccaaaatagttgcatttaatactaagcaaattatacagtcaattcaagaatctcaacaccaccctaatttgaaaagtattttccgggccaatatttttagctctattccccagcgataccaggaaacttagagattagaagaatctgattcttcttatgaatattaagtatacacacacacacacacacacatatttttctcacctagctgtataaactaacattttcagctcttataacaacagtagcattactcccaacccaagacctccacattagctgttcctctgtctgaaatgctgttccctaggattttccccaggtaagcttaaacaccttttcagagaaaccttgcttaacatccaa

SEQ ID NO: 3513 - DNA, 450 bp, Canis familiaris
  misc_feature (99)..(99): n comprises a, c, g, or t, or includes no nucleotide
  misc_feature (158)..(158): n comprises a, c, g, or t, or includes no nucleotide
tcgactctagaggatctgtgacctatgatgactcctgctcagcccctactccaaggcctgtggggatgcagggctaacaccaggcatcctttaccccanttgttctacctttcttcacacttctgttgagttgcctacttgctgctcagtagaccagncagaggggcgagactgagctgagcctgttgtttagagcctggtggaggacagggtgggcaccaaggacatttggggggtgatgaggccacccttcttctgtttcatgcttcacccctgcctgcagcagagattgaggctccagcttcccattccgggtagctcagagcttcagagaacacgcagatgtgaggtgctggtcttttggggttgggatgtttgcactccccagtcctacagggctctgagtaaccaagcccacacacaaagaaaaataggcaggtgggaaggaga

SEQ ID NO: 3514 - DNA, 287 bp, Canis familiaris
  misc_feature (78)..(78): n comprises a, c, g, or t, or includes no nucleotide
  misc_feature (82)..(82): n comprises a, c, g, or t, or includes no nucleotide
  misc_feature (103)..(104): n comprises a, c, g, or t, or includes no nucleotide
  misc_feature (151)..(151): n comprises a, c, g, or t, or includes no nucleotide
  misc_feature (170)..(170): n comprises a, c, g, or t, or includes no nucleotide
cacacacacacacacacacacacacacactaatctccattggagacaaaaactttggttcaagggcaactcatatttntggngttggcacacatctgaggtgnnccaggggatgagggagaggaagaggaggaggagagagaggcagactntctgtcgagcagaatgccngcacacaaactttaaatcagcctgctacccactagtcacaggtggaccgagccagacctgcttctaggacagtagttctcaatgtgggttgcatgttagaatctcccggggagtgtt

SEQ ID NO: 3515 - DNA, 377 bp, Canis familiaris
  misc_feature (156)..(156): n comprises a, c, g, or t, or includes no nucleotide
ctctagaggatcattcaaaccaacgtattaaataaaagcaatctcaactctttctgcacacacacacacacacacacacacagtgtacacatgtgcatgcatgtgtcctattggttgtttccctagagagccccaactaacacaatgataaaatanctttgtccttctcaatcccaccttagaatcactgttatttatgagccttagagactgactgccaggtagtgtgccgacaaagtgtctacccagtccagacctcacacctcatagtgggctctgcaccctctttctgggaattctgagaaaagcctggctttcccggcctcagacatacaaatgatgctccaagctttcttacctgtaacaggccaaactgg

SEQ ID NO: 3516 - DNA, 380 bp, Canis familiaris
tctagaggatccgagtacgtaattcaatccacacatttgctgaaggaagcattataaatcaatagacacagatgaattattcaataaaggatgtcaggaaatggggctagctactctggtggagattaatccattcggtcagttccaatatttcacaccaacataaatccccacgtggatggacacacacacacacacacactcactcactcctacacacaaatctgaatgagagataatgaaggcctgaaataaggcagggatagacaggaagggtggatgtgagtgatgcaaagagctctgtcactggccattgcagaactctagaaattaaccagctctagaaagaaatgaaaattctctatccaagggaaactact

SEQ ID NO: 3517 - DNA, 604 bp, Canis familiaris
atccctctacggactccatggtagtgacaagatgtgagggagccatcagggactgagatgggcatgggtctggagagggtaacccaggccatgccatcctcaggagcggggtcagaggcccttaatgtagctgactgcaggtggcgctgcacactccaaggagctccagagggggagagaccacagcaatagagttaagtgtgagaaagtgagtcagggagacagagcccgtawaggggtgtgtgtgtgtgtgtgtgtgtgtgtgtgtgtgtgtgagagagagagagagagatggctatttgaatawatgaacaggaagatattgtctttgtatttgcctccaatcatttgcttaagatttatttactaagctcctaccctgtgttatgctaactgstggacactggacacatggacaatatgacacaagacctccatcaagacatgtgcactctggtggggcataggataaatacacagacatcacccagaaamcatrctgagtscggagatggagggakgcaaggggaccgaagggcacccagaagagamgcctggggcagattcagaggctcctccahacatagcatcagcagagatgaga

SEQ ID NO: 3518 - DNA, 475 bp, Canis familiaris
caagatgttgttccttaccaggcagactcagctggactagatggggcaaagaactccgtggagggagatgcctacagggtatcttaagacagtgatgccaacttttctatttgcgtttgttagggtgatataatgtaaatccacccactaacctgtcctcaaattctcatgaatgctttgagaaagtgtgtgtgtgtgagagagagagagacagagacagagacagagacagagagagaatcaagtgatgaaagaatcaacacaatgtawaggcasgatacatggatataggaaaagccataagcatgtaagtcattccctacacacacacacacacacacacacacacacacagtcatagaaatcttgacagaagtcmtaggaatttgaggaagacattgaattaaggaytcccagatgacagtaggggcagaaaagcaccctgctcaactgctaggcgtggcattagagtagg

SEQ ID NO: 3519 - DNA, 903 bp, Canis familiaris
  misc_feature (687)..(688): n comprises a, c, g, or t, or includes no nucleotide
ctaaggttgactctagaggatcataaaattgggtcctttgagggtaagtaaatctctcaaggtgaacagctggttcatggcaaaactggaacttaaacccacaccttctcactctgggttcactgttcctttctccgtatgccccatttccttccatcaacacacatgcatgtctgctctactcctattcttgtgccttgtcacccactgacacatgcatgctctagttatatttagaaggcacagtgcagccagttcttcgcagagcaaagatggcaaagactgaaggactccatcctcaaagtcacaagcacaataaacaaccccagcttccaaaatgaatccttcgtgatgccctcaatccaggccttccttcatcttggcaggaggaggattttatcaacctgtcactatccaatcagtcattggatttcaggagggagggagatgataagtgtgtcccttctaacacacaatggaaattgaaattaatctaattagtttgaaggagcacttcaatgccatggtggtaggcactgaatgcagagatgtaagacagaaatacagatgaaaattgatggttactttcatcctagttcacaagattagaggtgatttccagggatttgttttatcattaaaattccatataatgatgaaacccaactgcttagctctttaaatacnnaccccctcacacacacacacacacacacacaccttgataacaggtaggtaaaaggttataaaggttacaaacaaatcagttctagcttccgtatttcttctttggctttgatgacggtgtaagatgtcttctttttttcttcctccagtgtaaaatatgtaaccaagatggccaggttcaatttgtgcagtggcttatgataaatacctggggtt

SEQ ID NO: 3520 - DNA, 356 bp, Canis familiaris
  misc_feature (11)..(11): n comprises a, c, g, or t, or includes no nucleotide
  misc_feature (129)..(129): n comprises a, c, g, or t, or includes no nucleotide
  misc_feature (132)..(134): n comprises a, c, g, or t, or includes no nucleotide
cccagtttganatgtccgccattttgggtgcccctgtctctcagccagcccaacaatacatacacaaacacacacacacacacacacacacacacacacacacgtgtttctaaaaactatcacatgtantcnnncatttgacaatctaaggatttctggtacgatagacaatgtgcccgtggttcctactgacttttcaccagagactgaggtttctaggagttaacagtctgccgcctgggtggctcagcggttgaggggttgagcatcggcctttgggtcagggcccaattctggggcggcggggggggaggtatccgagtccggacccctttccacatctggctcctgtgggg

SEQ ID NO: 3521 - DNA, 408 bp, Canis familiaris
aggatctcagctgctatttttaacccaggaaaccaaggtggccctattgcccaggtgcaatccagagcaaatggcatcagggccccatttgatgacaacaggacctataagatgtgctctaacaccaagattcctcatgctatcaggggttataggccaaatttggggtatttttggttttgtttttattctggggtgtgtgtgtgtgtgtgttctaatgggttggagtccaatattcctgtaaagcacaaaagtataatgtgctcaatgtcccagcaatgtcatattgttataaatatgtttaaccacttgctctcaatttcttaatccattgcagtattaaacagttcctgaaccaacaccagcccatccatggtccacaatttgaggagctctggtctataactg

SEQ ID NO: 3522 - DNA, 360 bp, Canis familiaris
  misc_feature (109)..(109): n comprises a, c, g, or t, or includes no nucleotide
  misc_feature (122)..(122): n comprises a, c, g, or t, or includes no nucleotide
  misc_feature (126)..(126): n comprises a, c, g, or t, or includes no nucleotide
  misc_feature (141)..(142): n comprises a, c, g, or t, or includes no nucleotide
ctgtaataaggaaagaaagaacagctgggtcctgaggcaggccagagaaagtcatcaaagcccagagaagccacatagaagatggcaggaagtcatgggcagaatgccnaaaagcagtaggntggntgtgtggcaggtgannatgagcgcagacttgtggaaagtgtaagcatcccttagaaacttagggaaggggggcacagggtgactcagtggttgagcatctgctttcggccaagggtgtgatcccagagtcctggaatcaagtcccatgtcaggctccctgcatggagctgcttctccctctgtgtgtgtgtgtgtgtgtgtgtctcatgaataaataaataaaatcttaaaaaa

SEQ ID NO: 3523 - DNA, 108 bp, Canis familiaris
  misc_feature (72)..(72): n comprises a, c, g, or t, or includes no nucleotide
  misc_feature (83)..(84): n comprises a, c, g, or t, or includes no nucleotide
  misc_feature (86)..(87): n comprises a, c, g, or t, or includes no nucleotide
aaatttttaaaaaaaaaaaaaaagaaacttagtaaagagcttcctagaggcagtacagactattgtctcatntggacctgganngnngcgctgacccttccgcactgg

SEQ ID NO: 3524 - DNA, 243 bp, Canis familiaris
  misc_feature (78)..(78): n comprises a, c, g, or t, or includes no nucleotide
  misc_feature (170)..(170): n comprises a, c, g, or t, or includes no nucleotide
  misc_feature (180)..(180): n comprises a, c, g, or t, or includes no nucleotide
  misc_feature (201)..(201): n comprises a, c, g, or t, or includes no nucleotide
  misc_feature (215)..(215): n comprises a, c, g, or t, or includes no nucleotide
ttcacttagccctggatttttgagtgtgtgtctttgcctccctctcatacgtgtaccagagttctctccactcatgtnttatttcacttcgcgcacgcgcttttgtgtgtgtgtgtgtgtgtgtgtgtgtgtgtgtgtgtgtctacttgctcatttactactcagcaaantggagtgctngatgccaagtcccacttggangactcagctccatntcccatctgacagatattgtcataatta

SEQ ID NO: 3525 - DNA, 433 bp, Canis familiaris
  misc_feature (94)..(96): n comprises a, c, g, or t, or includes no nucleotide
cgctcaaccactgagccacccggttgccctgtttttcttattttcattctacagacctggaaatggctcagaggcataggccctgaccaaggtnnnaagctggtcagggtggagctgggatgtccactgtagggcgtgttcacctccaagcaaggctctgtagtgcctcagagggagagcagttggggcgtgctgtcccacagttgtctggctgggctgagagaagggtgaggaagggtaggaagggtctgggtatggtgactagagcttgggacacccacctcccactccaggttccccaggaagtgggaggtgagagctggaacggtcccggggcctcatgggtatcgtcggtgtcatgggtgtctcagggccctggagcgggacaaggagtgccaaggtggctggggcctcctcttcttctcttattccc

SEQ ID NO: 3526 - DNA, 316 bp, Canis familiaris
tcccagcgtgtgtgtgtgtgtgtgtgtgtgtgtgtgtgtgtgtgtgtgtgtttgagcgggcgcataggggcaacacagtggtattggggaggtggggcccgcctctggcctcttcctcactccctcttagctcacacagctggcccgtggcaagtgggggcaggaaggggagagtcagcaggtgccggaaccactgagatggccccagctcacccagagtgattccatgttccagtccctgggaccgagtgcccctccctgaagtcctggttctgatggctgtcctccctctgcttctgtccctagttctggcaca

SEQ ID NO: 3527 - DNA, 359 bp, Canis familiaris
  misc_feature (289)..(289): n comprises a, c, g, or t, or includes no nucleotide
  misc_feature (303)..(303): n comprises a, c, g, or t, or includes no nucleotide
gggagcagagaaccactcccccagttctagtaaagaccacccattccaactgatggaaacttgtggaaattcaaagacagaagcccaagatagccatgactcaagggaacttgactctagaactagtctaaagctttcacattaaggtaggtctgtccctgtgtgtgtgtgtgtgtgtgtgtgtgtgtgtgtgtgtctgtctctcacactcacacattctctctgcctttctccttcactctcagcctcttctctctacctattcttcagctgtcatgacacattaganatttcattcccgcnctgactactaaagattcccaaaatagtccgattggcccactttcctcttcaacaca

SEQ ID NO: 3528 - DNA, 380 bp, Canis familiaris
  misc_feature (114)..(114): n comprises a, c, g, or t, or includes no nucleotide
  misc_feature (170)..(170): n comprises a, c, g, or t, or includes no nucleotide
  misc_feature (173)..(173): n comprises a, c, g, or t, or includes no nucleotide
gcatgcctgcacgtcgactctagaggatctatccattactgaaagtaggatattgaagtctcctactgttactgaaatgctgtctatttctcccttcaaatctgatagtatttncctattacatttaggggctccagtgttgagtgtatatgtgtatgtgtgtgtgtgtnccngtgtgtgtgtgtgtatacacccatacatacttgttatattctcttgatgaatcaatctacttgtcatcatataatgaccttctttgtcttttgtgacatttttttttacttgaagcctattttgtctaatataagaatagccacttcttgtctcttttgtctaacagttggatgaaatattgctttccagcccttcactatatattt

SEQ ID NO: 3529 - DNA, 331 bp, Canis familiaris
  misc_feature (38)..(38): n comprises a, c, g, or t, or includes no nucleotide
  misc_feature (129)..(129): n comprises a, c, g, or t, or includes no nucleotide
  misc_feature (191)..(191): n comprises a, c, g, or t, or includes no nucleotide
  misc_feature (291)..(291): n comprises a, c, g, or t, or includes no nucleotide
cactaaacatcaaattgacagctcttctacattttatntccattagcatttcagtgcccttcagtgagagacctttctgtgtcaagttcccttcctctcctttgcccacatgtgcccctgcccctaccngaggaaccaattttgtttttgttattttaccattctcacattggcttcagtcaaatcaaggnaacctctaagttatgaggctcagagagacaacacacacacacacacacacacacacacacacaccatttctatgacctaaaaatttgaattcttcgagantgatgtttacccatcagagtcgtctggagtgttttcagaa

SEQ ID NO: 3530 - DNA, 360 bp, Canis familiaris
aagaaagaaaccttagtgtgaactcttactcttttctctctctcttttttttaagaatctgtgtctaagtgggattatgcaggatttctctttctctgacttatttcacttagcataatgtcctctggagccatccatgttgtcacaaatggcactttattttgtggctgaataattacatgtgtgtgtgtgtgtgtgtgcacgcacgcatgtatcaccaatcctttatccatttgtccatcgctggactcgagttgtttcggtgggttggctattgcacgtaacactgcagtgaacctggcatgcagatatctttccaagttcatgttttcatttcctttgcataaatacccagaaatg

SEQ ID NO: 3531 - DNA, 823 bp, Canis familiaris
aatgttatagaaatatgtcagaacaagcaactagtttaaaagttagtagagggcaaacttgaatgagtttaagttaaactcttagaggagggattgagaaattgtgatcctattggtcaggagagaggacttatacccatagcttaaatcagaagagtaaattagaagtcaaataaaagcagagttgcataaagatatctggtccaacataatgaagaggatgtcaggcastagtagactcattttctgaaagagttattcaacatgggaatttgtcttgtaggtttctcttaataatcttgagcatattttcaagttggaactcaatttaataaagtactctcgttcttttgcaatgtktattattatggggctaaaagaacattcctaattccctcaagagcktaggtattctcttcacagrgaagactgtgttacactcttgggttggtacattgagaatatctgtattcctcagartgaktatwttgtggtagagatagtgtthtgcgtcctagattggttaggggtgtgtgtgtatgtgtgtgtgtgtgtgtgtgtgtgtgtgtgtatttctagccacccccttccttgtccatagttatgaatcttgtctgggaaatagaccctgacagcaatattatgtattaacgtgtattcatagcagctaatatttttttaatttttaattatttatgatagtcacacacacacacacacagagagagagagagagagagaggcagagacatagkcagagggagwagcaggctccatgcaccgggagcctgacatgggattcgatcccgagtctccaggatcg

SEQ ID NO: 3532 - DNA, 749 bp, Canis familiaris
tatctctgcataaatcatatataaagaatgtcccccaaaaatgtgcagcttcagataaaagtgggcttttaacaaaagacagtgttttcttaaaaaactgagcctggaatgattacaaaacccaactggaggaatgacattaataagaaatcagccgtagctaaggagcaaaacaggtatttatgtttcaaagtatcttagagctcagattaggaaaattagcaaaatgagattaagtcatgtgggaagagaagaaggaaacggcctacggcatccctagtctgagccagtcactgaactcatgtgtgtgtgtgtgtgtgtgtgtgtgtgtgtgtccstrtggtgtgttgtgtgttccctatttttatccattacaataatttctattgaatcctttgaaatagcccctgactcaccctcttcctactcccatctttctttgtacctaacagctataataattggtttataaatggaggcataattactcgcctagttggaactcttcagtggcttcccatctcacttcagaaatacacaaaatgtgtaacatgcccacaggactccctataacctagcctgggtctacctctgaagccctgtcaggtgccacccactcccctgctccccgtgctttcaacatatcagcctccttccagttccttgcccatgctactttctttcttgtctgcaggtctttgcagatgctaagatgcccttattccagcytgctggctagtttcaattta

SEQ ID NO: 3533 - DNA, 733 bp, Canis familiaris
  misc_feature (343)..(343): n comprises a, c, g, or t, or includes no nucleotide
caaaatatctctgcataaatcatatataaagaatgtcccccaaaaatgtgcagcttcagataaaagtgggcttttaacaaaagacagtgttttcttaaaaaactgagcctggaatgattacaaaacccaactggaggaatgacattaataagaaatcagccgtagctaaggagcaaaacaggtatttatgtttcaaagtatcttagagctcagattaggaaaattagcaaaatgagattaagtcatgtgggaagagaagaaggaaacggcctacggcatccctagtctgagccagtcactgaactcatgtgtgtgtgtgtgtgtgtgtgtgtgtgtgtgtccntattttatcattacaataattctattgaatccctttgaaatagcccctgactcaccctcttacctactcccatctttctttgtacctaacagctataataattggtttataaatggaggcataattactcgcctagttggaactcttcagtggcttcccatctcacttcagaaatacacaaaatgtgtaacatgcccacaggactccctataacctagcctgggtctacctctgaagccctgtcaggtgccacccactcccctgctccccgtgctttcaacatatcagcctccttccagttccttgcccatgctactttctttcttgtctgcaggtctttgcagatgctaagatgcccttattgccagcttgctggctagtttcaattta

SEQ ID NO: 3534 - DNA, 391 bp, Canis familiaris
  misc_feature (26)..(26): n comprises a, c, g, or t, or includes no nucleotide
tagaggatcacgatgttagctgaagnagatgctcaaccactgagccacccaggcgtcccttcaaccaagaattctgaataatattaccttcaattactagtagttaattttgagcccagaagccactgaagtgtaatctagtctgtgtgtgtgtgtgtgtgtgcttgctccactagaacgaagaagagcatgtcactgtccttcctggaagcctctctaggcatgtggtagaaacctctcaagcattgcttgagaagtttttttttgactggtatctaaaccagaatgcgacataaaattttagagaactccttggcagaagtcaaagatgtgagatacagaattcccctttcttatcaacaattaattgacaaaatggcagatgcatctt

SEQ ID NO: 3535 - DNA, 359 bp, Canis familiaris
  misc_feature (71)..(71): n comprises a, c, g, or t, or includes no nucleotide
  misc_feature (117)..(118): n comprises a, c, g, or t, or includes no nucleotide
gctgtgggctatgagttgtagggacaatgtttaggcagcatcacaaagaccagaggttctcagtgcagganaatgttgcttctcaggagacatttgacaatttctggagatattttnntatcataagagggggcttggggggagccactgaacctggaacaatgctaagtgatatcctgcagtgcacaggacagcctcctctccaacacacacacacacacacacacacacacacacacacacatatcatccaacacaatatgttaatggctttgaggctgagaaaccctggttcagaggagcaggtagtacacacagaaagaaagctttgaggtcaattggctctctcatgagctgtg

SEQ ID NO: 3536 - DNA, 329 bp, Canis familiaris
  misc_feature (210)..(210): n comprises a, c, g, or t, or includes no nucleotide
gtaaagaaattacctcttttctttgtgtagacactgcatcgtcagcctgagccctcactcatttgtgtgtgtgtgtgtgtgtgtgtgtgtgtgtgtgtgtgtgacatctggccacagcatcctatccatcaattatccctttgctaatagggcaaacttggatattagctatgccaaaggacttcagaaactggcagtcaagttcagcanagtattacagagcacacaaaaaaagtatgtatatgaaacaggtaaggcaaaaatgatgactaaaagttataaagagtgggacgcctgggtggctcagtggtagagtgtctgactttggc

SEQ ID NO: 3537 - DNA, 317 bp, Canis familiaris
  misc_feature (35)..(35): n comprises a, c, g, or t, or includes no nucleotide
  misc_feature (51)..(51): n comprises a, c, g, or t, or includes no nucleotide
  misc_feature (192)..(192): n comprises a, c, g, or t, or includes no nucleotide
  misc_feature (201)..(201): n comprises a, c, g, or t, or includes no nucleotide
  misc_feature (205)..(205): n comprises a, c, g, or t, or includes no nucleotide
  misc_feature (218)..(218): n comprises a, c, g, or t, or includes no nucleotide
  misc_feature (261)..(261): n comprises a, c, g, or t, or includes no nucleotide
aaacagcactcatcgccattcctgggggtgtgccncccaactgcgggtgtnaggtatcactatgagctttcagaggtcccttagagagcaacagagtaaatatggagatggagggcacacacacacacacacacacacacacacacacacacacacaagttatattaatgcatatgttgtgtgtgatgatanatgtgtgtntgcntggtatcgctganggcgtcccagttgctctaacatgtgggtaagctcgtgctgctngagatagagcacttcccaggtggccctggtgaggacaaccctaagtgtcaccttac

SEQ ID NO: 3538 - DNA, 397 bp, Canis familiaris
gtgcacatcctcggcccttgagaaatgtaaagatggagtgggaacccttgaaaaataccgtatggtgtcaaggtccagcatcccagcccccagatttatagtaatgaaagcagcaaggcatgtgccattagcactgttgaaggcaggaggaggagcacctggtaaggtgacacttagggttgtcctcaccagggccacctgggaagtgctttatctcaagctgcaagaacttacccacatgttagaacaactgggatgccttcagcgataccaggcatacatacatctatcatcacacacaacatatgcattaatataacttgtgtgtgtgtgtgtgtgtgtgtgtgtgtgtgtgtgtgtgtgccctccatctccatatttactctgtgctctctaa

SEQ ID NO: 3539 - DNA, 479 bp, Canis familiaris
ggtttttgaaggacagtttagcattgcattttcagaggaaataaagaacaggtggttgagtgacctcatactgccagagaaggaaggatgtgaaggagacagcagctattttacagaaaaagaatcctccctgccttcctcctgtkgccttcccaacacacgaacatgaacacgtgtgtacacacatgtacatacacacacacacacacacacacacacacacacatagacacagtmttgywtctgcaaagctgatgagtctgagctgcctcggtgtgcacacagtgttrtcatctggtctgtttccaccctggtggggagacagtttcttctttgagtctagcatttgwacctaagtttactcagagatggaggcgctacctaggaacctggcccaaccacatgaggtattctttattggtttgagagtgttttcattttcagtcttttattctcatatatgagtccagagtgatgct

SEQ ID NO: 3540 - DNA, 426 bp, Canis familiaris
  misc_feature (127)..(127): n comprises a, c, g, or t, or includes no nucleotide
  misc_feature (371)..(371): n comprises a, c, g, or t, or includes no nucleotide
  misc_feature (375)..(375): n comprises a, c, g, or t, or includes no nucleotide
  misc_feature (386)..(386): n comprises a, c, g, or t, or includes no nucleotide
  misc_feature (394)..(394): n comprises a, c, g, or t, or includes no nucleotide
tgtgttcttgtctgagagctgcattccagaaactcaatgctgcaaactcttcattgtgctgcttgtttactttttcttcagctctactgatatataatcaatatgtaacactggaaaagtttaaggngtataaagtgtacaaagtgatgatttgatacatgtatagatgcatatacttgataaatgattaccacactgaggttacttaacacatccatcacctctcatagctacttctgtgtgtgtgtgtgtgtgtgtgtgtgtgtgtgtgataagaacatttagtatctactctgttaacaaatttcaagtgtatcatacagttgttgattatagcctccctgttcatacaatgggaccccatctttatnaacntgaggtgtgtnaccccttnaaccaacatcttcccatttccaccacccacct

SEQ ID NO: 3541 - DNA, 340 bp, Canis familiaris
  misc_feature (70)..(70): n comprises a, c, g, or t, or includes no nucleotide
gcagaggactgaatctcttctcttaagggtcctggcaactctgcagcgaatttgggcactaagccagccnaggccccattacttcggtgtgtgtgtgtgtgtgtgtgtgtctggggttggagtgagagagtgagagagtgagagagaattatttcagtgacgctattctcaaatgcagatggtattctctgccttagttgtctcacaactggttgctctgaaagtaaaataaggtaaaataggacaataaatatgactctgcctagaaaaaattagttgtgacattttaaaatattatttgctagtctgtggcataaatcagtattactctgcattccca

SEQ ID NO: 3542 - DNA, 397 bp, Canis familiaris
  misc_feature (42)..(42): n comprises a, c, g, or t, or includes no nucleotide
  misc_feature (190)..(190): n comprises a, c, g, or t, or includes no nucleotide
  misc_feature (338)..(338): n comprises a, c, g, or t, or includes no nucleotide
ggtcctggatggagtccctcattgggctcctcacagggagcntgcttctccctctgcctgtgtctctgcctctctctgtgtgtttctcatgaataaataaataaaatataaaaaataaaaattaaatacatcgaatccttaagttaaaaacatttaagaggaaatgatagaagacattgcattccagaangattggaccctacctcctaggagtttctttgcaaaaacatcatatatatagttatacacacacacacacacacacatatatagttttatagttatatatagttatatataaagttttatatacacacacatacccacacgtatgtatnacatggaactatttttctatcagtaattcaatgggaagcaacttttggcaaagcatggg

SEQ ID NO: 3543 - DNA, 718 bp, Canis familiaris
  misc_feature (71)..(71): n comprises a, c, g, or t, or includes no nucleotide
  misc_feature (364)..(364): n comprises a, c, g, or t, or includes no nucleotide
  misc_feature (387)..(387): n comprises a, c, g, or t, or includes no nucleotide
  misc_feature (571)..(571): n comprises a, c, g, or t, or includes no nucleotide
  misc_feature (687)..(687): n comprises a, c, g, or t, or includes no nucleotide
ctgcaggtcgactctagaggatcccagcgaccaaaagaatgttccacagttctggaaaactgccgcmgcgngcctccactctcatagcttccacagcacatcattccaatccatctgctgaaatgttttcctaggggagaggaagtcccattccgtaatggaagtagacgaggcaaatgagacctagtttgcagaaacgtgcatcgtggccaatgctgcycacatctgctgcctcaagtggaagacaaatgtctctgtcttgaagttcccctttttcctgagccaagcacttctggacattgtcaagttggctgtggctaaggctttgtggcaaatgtgccatggaatctagaagaactcatgnactggggactccaagaaccttgnccatttggccttcacccttaggaagatacggcggtcctggacacacacacacacacacacacacacacacccagctggttcctaaaccgcagagagggaagaagtcagagaggcaggaaccccacctacaccgaagctgaaggggggggggtctctattccaaagtcctgagttgcttcccccndtctgccacccttcttcaagccttgttgtagggtttggagagccaagtactatttttagaaatgtttattcttactcctttcttcccttccattctcaacctctctggaatgagcnctgaatgttcccctgctgggagcctttccac

SEQ ID NO: 3544 - DNA, 972 bp, Canis familiaris
  misc_feature (326)..(326): n comprises a, c, g, or t, or includes no nucleotide
  misc_feature (329)..(329): n comprises a, c, g, or t, or includes no nucleotide
  misc_feature (337)..(337): n comprises a, c, g, or t, or includes no nucleotide
  misc_feature (364)..(364): n comprises a, c, g, or t, or includes no nucleotide
  misc_feature (368)..(368): n comprises a, c, g, or t, or includes no nucleotide
  misc_feature (403)..(403): n comprises a, c, g, or t, or includes no nucleotide
  misc_feature (436)..(436): n comprises a, c, g, or t, or includes no nucleotide
  misc_feature (444)..(444): n comprises a, c, g, or t, or includes no nucleotide
agcaggctgccctggcccaccacaacccagcccggcctatcttcgtcgagggccccttttccctttggctccgagacaaatgtgtctattatcacatcctcagagctgacttgctgcctcctgaggagagggtaagggcccaaagcatgcatagggggcatcaccccaagggctcctctgaggagggctccttgcmggtctcagaggtgcaggtgaaaggggtagggatagctcctggtttggggaggtaggctgcaaatcctgagcctctgaccctgctgtacctgcctccctggggtaggaagtggaggaaattccggagaatnggnaatctctnactaacccaatgcagctcagacctggnactnacggaaggagtggctgggatgaaycacgagtttgnacattcccatggaaggtcaaaactgggatgggncagtgttnccaaacattgggacaggatgaggcctyggggtgggaaggtggcacccagggyggattacccagagcagttgccacatgcagaccagtagatgtccaagtacacacacacacacacacacacacacacacaccactccccagggctccaggcctgtcagcccttggtcatagaacatctctgtgctggctactgagtatgaccaggacaggccaagtccatgcccttgagcagctctgggccatagggaaacaggcaagttaagttatattcttggggcctcaggggaggagcacaccacccagcatcgggtgggatgcagggaggacttcttggtggaaggctgaagaaccaggaggcatcamtcaggtgaagcatgggattggcagtctaggcagaggggatatcttgtgcaaaagctttgacgcacaagaaacatcccacctgtggcctagaaggggtgcaggcatggggatgctcctccaatccacactgaacaaactctgagcacctgtttcttccaacagtgg

SEQ ID NO: 3545 - DNA, 350 bp, Canis familiaris
  misc_feature (27)..(27): n comprises a, c, g, or t, or includes no nucleotide
  misc_feature (30)..(31): n comprises a, c, g, or t, or includes no nucleotide
  misc_feature (126)..(126): n comprises a, c, g, or t, or includes no nucleotide
  misc_feature (166)..(166): n comprises a, c, g, or t, or includes no nucleotide
  misc_feature (198)..(198): n comprises a, c, g, or t, or includes no nucleotide
  misc_feature (217)..(217): n comprises a, c, g, or t, or includes no nucleotide
  misc_feature (277)..(277): n comprises a, c, g, or t, or includes no nucleotide
  misc_feature (320)..(320): n comprises a, c, g, or t, or includes no nucleotide
ccacccaggggccctggaacatttctngtnnttgctaatgaattctttcagctctcatgtccaaaaatgcttttgtgtgtgtgtgtgtgtgtgtgtgtgtgtgtgtgtgccttggttttgtctcanggcagctttgctggtttatctcctgtacttcaggcatgtncctctactgtcttctcacatctgttctcttgncgcctgtgtgctatctctntattgtgtggaaccatcatcttgtctcttgcatcatttccttgaggtcatttgagctgtntcctaacctgccttcacctgccatcctacagaggcctagagcntcctaaatatacattttaaatcctagatgt

SEQ ID NO: 3546 - DNA, 335 bp, Canis familiaris
  misc_feature (144)..(147): n comprises a, c, g, or t, or includes no nucleotide
  misc_feature (229)..(229): n comprises a, c, g, or t, or includes no nucleotide
  misc_feature (240)..(249): n comprises a, c, g, or t, or includes no nucleotide
  misc_feature (261)..(261): n comprises a, c, g, or t, or includes no nucleotide
  misc_feature (281)..(282): n comprises a, c, g, or t, or includes no nucleotide
aactggagtcaggtttcttgtctctatatcattggtgcctgcagggtgcctggcaacaggcttttggaatgctgagtgcccagagtatggtggatttgagtagaaaactcctggaaagggaggctgttggaaaggctgccccannnntggtccagatgtgaaataccgaccttaaggccacagttgttgtgtgtgtgtgtgtgtgtgtgtgtgtgtgtgtgtgtgtgtntcttcagattnnnnnnnnnntatttatgaganacacagaatcagagacatanncagagggagaagcaggctccctgaggggactcatatcagggactccatcccaa

SEQ ID NO: 3547 - DNA, 435 bp, Canis familiaris
  misc_feature (256)..(257): n comprises a, c, g, or t, or includes no nucleotide
  misc_feature (399)..(399): n comprises a, c, g, or t, or includes no nucleotide
gctggaacttgcctcctggtagcttttggaacaaaatctgttctctgaagagtctactgttgggtctgtagaggttgctacaaggtagaggtgagcctccaacaatttgagaattgagagatttcacagaattcttcccttgagtagctggaaggtgtggcagcactagaaccacatgctctcctgggaagagtcacccaaagaggagaagctgccttcttaagaggacagcagctgccatatctgataaggggtnnttatccaaaatagataaagaacttatacgactggatacacacgcgcacgcacacacacacacacacacacacaaataatgccattaaaaatgggcagaggacccaaatacacatttttcaaaagaagacacaaaagtggccnacagatgtatgaaaagatgctcaatatcacttaaca

SEQ ID NO: 3548 - DNA, 430 bp, Canis familiaris
  misc_feature (48)..(48): n comprises a, c, g, or t, or includes no nucleotide
  misc_feature (407)..(407): n comprises a, c, g, or t, or includes no nucleotide
agaggatcaataaatgtattgcaggagagtccaaagtcagtgaaagtngaatttaaatgagataccctgtcatccatcagattattggacattaaaaagtttggaaatattgagtaatagcaaggatgatgagaaatgatactcaggtacactgctggtaagagggtagttaatacagacatgacacagggcaatatggcattaacaatatgactaaaaattttaaatatgcatcccctgggacccagaagctctgcttcttgacttcccctacaagaccactcacgtgtgtgtgtgtgtgtgtgtgtgtgtgtgaaggaaaacactgagcacggcaggtgtgtttataagagcaaaatctctctgggtgcaatccgaatgttcacgcatagagggaggcaaacctnaacacagcgcgtgcacagcttgg

SEQ ID NO: 3549 - DNA, 450 bp, Canis familiaris
  misc_feature (200)..(200): n comprises a, c, g, or t, or includes no nucleotide
gatcaatagagtcttggccagcacttttcgggaataatttcactgcaagaaattctctcaagcttctcgttctgattcggaaaaccatttaactagtattgtggaatgttcccatttttgaggcggtataaggcatgcacgtggggatttgctcactaaagaaagccttttgcaatctaaaaacattagaccgtaattcnagcagaatgcacacagaacttaaaaacacattgttttttttccttgaagattcatagaggaagattgaggtcttttaaagctcaggattattccttaactatcgtgtgtgtgtgtgtgtgtgtgtgtgtgttactaattctatattctgtgcaactatggagaggagtttctcttaagtaccagagcaaaggcccaatggctaaacttcatctttgggtttgggattcacacgtgtggggttgtgttttg

SEQ ID NO: 3550 - DNA, 400 bp, Canis familiaris
  misc_feature (193)..(193): n comprises a, c, g, or t, or includes no nucleotide
  misc_feature (216)..(216): n comprises a, c, g, or t, or includes no nucleotide
  misc_feature (223)..(224): n comprises a, c, g, or t, or includes no nucleotide
attactcacatttgaaaaatactgacctaagacattgaaaaaaggttcaattgtggaacaccctcaaagtatgtagagtttaaaaagcacagtagagtatatgtgtgtgtgtgtgtgtgtgtgtgtgtgtgtatatatatatttaaagaatagtatatagttttttttaaagcttggaaaaatatgtactgtntgcttatatatgtataaaatatntctgganntaacactggttgtctatagggaaaaactggttatctgggagaccaagatgggagggaaatgtgttgttacttgtacagtttaaatcttttgagtgttaactaacaggtgtatatattacttatttaatccaggaataaatatttttattttgttaaagaacaaagaagatatcttc

SEQ ID NO: 3551 - DNA, 830 bp, Canis familiaris
  misc_feature (375)..(375): n comprises a, c, g, or t, or includes no nucleotide
  misc_feature (399)..(399): n comprises a, c, g, or t, or includes no nucleotide
  misc_feature (408)..(408): n comprises a, c, g, or t, or includes no nucleotide
  misc_feature (411)..(411): n comprises a, c, g, or t, or includes no nucleotide
  misc_feature (419)..(419): n comprises a, c, g, or t, or includes no nucleotide
tctttttcttattcccttcttccatgacgtagtaaggtgtgttggtggtgggtatgttgaccatttagtctgtaggtcatagaatattgaggtaggaaggatgaatgttacccagaacattctctagggcttgaagttggatgcagtgactagattgagtctgggctatttccmattgagagggatgtggtggtagcagcatgttagatggggggtgagggggagatttttttgagcatatggagggaaacctccacagttaacacttactggtcatttagtaggtgccatgcctgggtgaaaggttcacagcattagtaatttaatcctcccagtgaaccttaattagggatattatccctgttttatgaatgnaggaaattaaccatagaaagtttnaaatatctnytnccagtgtncatgtgttggccaagccaagattcaaactctgacagtytagctccaaagcccagtagtatakggctgtctggacaggtgtgtgtgtgtgtgtgtgtgtgtgtgtgtgtgtgtgtatacacatgttcatgaatctacatatgtaggtatgcatgtgccgcctggcagctcagaggtggtagtgatgggtgttttttatttcagccatgtggcatctccttttctcgcttggtaaacarccctcttgtcttcgggggaccttcttctacgtgacttcagggcttgttgctcagagtcctgggcgccatggcacattgggcctctcagacctctcctctggatgttgaatctggaatagagttgtccttgcactgtgccctgaggaggtggcctggaagctcctgcccctctct

SEQ ID NO: 3552 - DNA, 290 bp, Canis familiaris
  misc_feature (222)..(222): n comprises a, c, g, or t, or includes no nucleotide
  misc_feature (243)..(243): n comprises a, c, g, or t, or includes no nucleotide
tacaggctggagagcactggtgtctgggtcccagggtttggggcagggagagtggttggttgctagagtttccacttgcacacaccctgtacacacacacacacacacacatttgtggcacacccagtgccctcaccacacaggcagtgcctactgttacctactcacaaaaatcccctctgcctcctccatgttttctggactgacctccaccttccctantcacctccccacacagctggncaggaacaaccacatttgctgcaggggtggaggtggggaggggcctg

SEQ ID NO: 3553 - DNA, 420 bp, Canis familiaris
  misc_feature (82)..(82): n comprises a, c, g, or t, or includes no nucleotide
ggtaagctttcattctttttatggcttagtaatattcctttctgtatatgtgagtgagtgtgtgtgtgtgtgtgtgtatacnaccttttcgttatccattcatctattgatgggcatttgggctgcttccataatttggctattgtaaataataatgcaataaacataagagtgcatatatcctttcaaattagtgttttttcattctctgggtaaatggccagtaatgtaattactaaatcatatgatgtgattctagttttaatatttgaggaacctccatagtgttttccacagtggctgcatcagtttgcattcctaacaacagtacatcagggctcctttttcccacatcctcaccaacactttttgtttgtgttttggattttagccattcttttattttaacatttatttact

SEQ ID NO: 3554 - DNA, 395 bp, Canis familiaris
  misc_feature (194)..(194): n comprises a, c, g, or t, or includes no nucleotide
  misc_feature (197)..(197): n comprises a, c, g, or t, or includes no nucleotide
  misc_feature (320)..(320): n comprises a, c, g, or t, or includes no nucleotide
  misc_feature (337)..(337): n comprises a, c, g, or t, or includes no nucleotide
  misc_feature (352)..(352): n comprises a, c, g, or t, or includes no nucleotide
agtctacttttcccccctcatttttaattccttttgtgacattcaagtcctagaaaatgtttttgaaagcaattatatttctaaagtaagttttcccaaactcccacagcttaacttttcagcttaaaatatcatgttttaaaaggtgttggcattcagttttacctaacaaatagctgggtcttggaaaagantanaaatctgacaatttaaaaaggaaaaagcctctgtgtgtgtgtgtgtgtgtgtgtgtgtgtgtgtgtattttgagcttatttgaacacatttttaaaaactttgagaattatagacttcatctntcacatcagataattanaggacactaaataantcttactctttcaaaactattcacttgaacaggaaacccatgt

SEQ ID NO: 3555 - DNA, 407 bp, Canis familiaris
  misc_feature (49)..(49): n comprises a, c, g, or t, or includes no nucleotide
  misc_feature (87)..(87): n comprises a, c, g, or t, or includes no nucleotide
aatatagagagaaagggacccttttgcactactgttgagaatgtaaacngtcacagtcactatgcaacagagtatggaggtttctanaaaattaagactatacacacacacacacacacacacacacacacacacacaatggaatatttttcagccacaaaaagggaatcctgtcatttttaacaacatgtatagactttgaggcattatgctaagagcaataattcagataaaaaaaaacaataaatactgcatagtgtcatttacatgtagaatttaaaaacatcacatttatagaaatagagtataatgggggcaactggatggttcactatgttcagcatctgccttcagctcaggtcatgatcccgaggccctaggattggccccactttgggctccctgct

SEQ ID NO: 3556 - DNA, 408 bp, Canis familiaris
  misc_feature (128)..(128): n comprises a, c, g, or t, or includes no nucleotide
  misc_feature (130)..(130): n comprises a, c, g, or t, or includes no nucleotide
acttgcctacaaatcacatgaagtccctttacagcagtcctagtaaggggccacctgcttcttcttgctagcttcttgcgacagaagactcactaccttgaaaagatttctaacccatggtacccagnangttcatacactgtttctgtaagcacttttcgagagattgagttatacgtgttaaaagcacaccagaaatcatccctgcagagcctgcaaattcatacctaggaatgtatctaaggaaataaatgaatgaatgaatcaacatataatgttcctctctgtgtcagtagtaaggagattaaatgaattaaaaaccatgttgtagaataataagtattaatatgcaaaagtggtaatagctatcattttaagtactcgttctgtgccatttctgagagcttt

SEQ ID NO: 3557 - DNA, 414 bp, Canis familiaris
  misc_feature (127)..(127): n comprises a, c, g, or t, or includes no nucleotide
  misc_feature (132)..(132): n comprises a, c, g, or t, or includes no nucleotide
  misc_feature (188)..(188): n comprises a, c, g, or t, or includes no nucleotide
tgggtgttttgtggtgtgtgtgtgtgtgtgtgtgtgtgtgtgtgtgtgtgtgtttggaggttggaaaggtcagggattcctgtgaacactttagagtttatgaggacgagctggtgtgtctcccccnacacntaggctagcttttgaattgccaaccctgccccagctgtgtgcctccctagaattgnacaagacatttccccactttgcttcttatcctctggttggttggcgtcagtcacttttctcctcccacccagacaagacaggttccctgaagagttaggattttttggaagactttgaagaaagcaggggaatatcattgggtaaagctctgaggaagggaaactgaatgatgatgggtcttctaaacgcatgctagtgcttaattgtttctgatggtctttgggc

SEQ ID NO: 3558 - DNA, 406 bp, Canis familiaris
  misc_feature (61)..(61): n comprises a, c, g, or t, or includes no nucleotide
  misc_feature (303)..(303): n comprises a, c, g, or t, or includes no nucleotide
taagtgcatatttatttaaataaaaagtgcataagagagaatgcaaaaggaagtgaaaacntgcttatgaccctaatgctttttataaaaaaatgcaaagtaagaagtcagtgtctccctctgacgtccaccccatcccttggggataaactcttattagcagttttgtgtgtatatatgtgtgtgtgtgtgtgtgtacatatccacactctgttcttggtgaatgttttttgaagaggagcaaactccagggtcgaagggagtggttttcctgctgttggggcatgacaggcacagcctgcncctttgagcatccagggtgtccaattcaggatgctctggctgcttcgtccacatggcacgtcagcaagaccctctgtgtggggggcaggggccacctgggggg

SEQ ID NO: 3559 - DNA, 432 bp, Canis familiaris
  misc_feature (192)..(192): n comprises a, c, g, or t, or includes no nucleotide
agacttgggttccttttagtatttagaaacctaaatctaggtggcttattgtgctcattgtactaacgtgcattgagtcattgtttctaggctctcacgtgttcacagttagaaaacacacacacacacacacacacacacacacacacacacacgtccatggatacatactttaaaaccttgcattcgtgncaatacccgtaatttccattcaaacctcaaggttctttctagacttccttctctccatatttatgagtcttttttccaatggtgagaatggtaaacttggcttctgtaatcctcaatctattcaatatttgcccaaaccctctctatataacctacctcctgaccacattggccaccttcttagtctcctcaaccccaagccctgacatttgttcttcagcccctgtctctttggccctg

SEQ ID NO: 3560 - DNA, 532 bp, Canis familiaris
  misc_feature (136)..(136): n comprises a, c, g, or t, or includes no nucleotide
ctttctgtattcctcctcacccatcgttcttattacaatgggtgtacattgctttatggatattgcattcattctaatttattgcctatggcttcacaaccgggcttctttttccctcagaacttagactccttgngttgtatgtgagttactaactataggcatagaccgaggaggctcttagtgctctcagaaggggaaaggaaatgctattctgtaaaccttaatcagcccagccatgkccccagartgattctataggtttaagcacttgtacaactygcagcatctggtcwacctcgtgtgtgtgtgtgtgtgtgtgtgtgtgtgtgtgtgtgtacaaatacatgcatatggacgtgcatagacaagcaagggagtgtatgtatgagtttggaaagtatcccagatgtggacagggcctatgtatgtccaggtgtaaacttgtccccaccgccccactccagaatgacatgactggcctggttatatgagcaactggagagaaacttaattttgaagaagatacctc

SEQ ID NO: 3561 - DNA, 440 bp, Canis familiaris
actgtaggatacttgcatacggtttgacggagtcccatcaacagagaccataaaactatggcaggcacacagaaagctctaaatacacgttagctattgatattctttatgtttttaaaaatcttaaaggctggactgtcagggaaccattgttctaacttacatggaattcaaatacggcttggagtgaagactttctcaataagataaggctgctgcaagcggaagatggaaacccataaagttggagaaataccactgtccctcctcttacacacacacacacacacacacacatacgcacacacacacagaggattatgcatatacacctgtagaaagaaagaaggaaaatgatagatttgataccaggattattagcagttttattagtaaaactctcaagactacagatacttttatacatattgaggtataat

SEQ ID NO: 3562 - DNA, 381 bp, Canis familiaris
  misc_feature (147)..(147): n comprises a, c, g, or t, or includes no nucleotide
  misc_feature (155)..(155): n comprises a, c, g, or t, or includes no nucleotide
  misc_feature (205)..(205): n comprises a, c, g, or t, or includes no nucleotide
  misc_feature (221)..(221): n comprises a, c, g, or t, or includes no nucleotide
  misc_feature (299)..(299): n comprises a, c, g, or t, or includes no nucleotide
  misc_feature (314)..(314): n comprises a, c, g, or t, or includes no nucleotide
  misc_feature (330)..(330): n comprises a, c, g, or t, or includes no nucleotide
agaggatcacgtgcttaaaatctgttgaattctcagtccgtaaatctgtaaattatatctcagtaaaaagccaacagtggaaaaaatgtacacacacacacacacacacacacacacacacacacacacacaattagagagaggctntctccggncacccttctggcatgaaggagcatacccctctctccatcttggacacttntgtctgctttactatntgtgataattttcattaaaataccaccttccagcatatgctaaactattaattatctctactgcctatgaacatggangtttcctgaaggtangtaaggaccctctgtnagtttgccactgttaaccagtattgatggctgtggcaaaaaggcaataact

SEQ ID NO: 3563 - DNA, 524 bp, Canis familiaris
atttcttttagtcacctagatactgtccaggtagaaaggagaaatacatccaagcaatttaggagaattaaagcagcagcaatggaagtgaagggcaagagtgtttgcatttgactggttaagtcaagaaaggcttcaaaaatgagacgacatttaaattagtctttaataggaatagaaggatttagtcaggtgaacaaatcaggttagggagtgggataggaagacaaacaaatgtttttagtatatttggagatagttgtggtgaaacttaaattgagtgctgggggctctaaggatggtcggaagaaatattgataattgatagccaacgtgtaatgattgcttgctatttagtggacagtattgtgtgtgtgtgtgtgtgtgtgtgtgtgtgtgtctgtgaattmaccatcacaagacctgatggttgggtgctatactgccaatagtaatacttgagactagatggccagggaaggatgagagagcatcatgasccttgttggcatgatggggagttt

SEQ ID NO: 3564 - DNA, 344 bp, Canis familiaris
  misc_feature (187)..(187): n comprises a, c, g, or t, or includes no nucleotide
  misc_feature (238)..(238): n comprises a, c, g, or t, or includes no nucleotide
  misc_feature (242)..(242): n comprises a, c, g, or t, or includes no nucleotide
  misc_feature (317)..(317): n comprises a, c, g, or t, or includes no nucleotide
  misc_feature (337)..(337): n comprises a, c, g, or t, or includes no nucleotide
accttctcagaagaaagtatttttaagaagaatcctttattcttaatacttagtgaatatctactttgagaacagaggattgataaattttttgccctgcccctaagaaaactcacagtctttcacagaatatcagaaaaaaagtaccgatcgacttcactaaagacaaagtggacttcttaaactnaacatttggactcatgttgcagactgtaaaattaatattcaaagccacagntgtngtgtgtgtgtgtgtgtgtgtgtatgtgcagatgacagctgacgagggaaaagtaagctgctgagattagaagatnaaggtggactgtgtcagttnaatgagt

SEQ ID NO: 3565 - DNA, 350 bp, Canis familiaris
  misc_feature (245)..(245): n comprises a, c, g, or t, or includes no nucleotide
  misc_feature (259)..(259): n comprises a, c, g, or t, or includes no nucleotide
  misc_feature (264)..(264): n comprises a, c, g, or t, or includes no nucleotide
  misc_feature (270)..(270): n comprises a, c, g, or t, or includes no nucleotide
  misc_feature (276)..(278): n comprises a, c, g, or t, or includes no nucleotide
  misc_feature (290)..(290): n comprises a, c, g, or t, or includes no nucleotide
  misc_feature (296)..(296): n comprises a, c, g, or t, or includes no nucleotide
  misc_feature (302)..(302): n comprises a, c, g, or t, or includes no nucleotide
  misc_feature (310)..(310): n comprises a, c, g, or t, or includes no nucleotide
  misc_feature (319)..(319): n comprises a, c, g, or t, or includes no nucleotide
ctctagaggatccatcccataaaaaagaaaggagaaaggtgctgcaaaaagcacacaggagggagtgccctgtgctactccaggtcctgggagggagaggggctgtcagcaaggctctgaaaaggaagcaacatttaggtattacaaggaactccgcaaagacatttatgggataataataaatatttaagtgccatcacacacacacacacacacacacacacacacacacacacacacacaantccctggaaaaaanatgtnagaganagaggnnnctctgtgcccangggcanacagcnagagaaanggagctggnagcaacccagactcttgttcatccagcttca

SEQ ID NO: 3566 - DNA, 717 bp, Canis familiaris
  misc_feature (167)..(169): n comprises a, c, g, or t, or includes no nucleotide
  misc_feature (329)..(329): n comprises a, c, g, or t, or includes no nucleotide
  misc_feature (336)..(336): n comprises a, c, g, or t, or includes no nucleotide
gtggcaccaagtaattactcagccattatttatattaattaagaggccattaaattgaagggacacacatagcccttcagtcaccagccagtgttctgacagtttcactattctctatacatcaaactatacttgtgtggggtgcaatgagcagccctcacacccvnnnttctctactaaagagcttaaatgtctgagagaaaataccagcatctggcccacctctgggtgaagctgcaataaaaaaattgaaatcaaacggcttgaatctcagaagagaagggggacaccagtagggaaatatagagtacatattcattcaacaaatnacttagncgtttttatgtgccaggcacagtgccatgaactatgaaaatagcaaaggccaaagcaggtaaaggccctscctatatggagaktgtatwtgtaggacgtttgarakacaccctgtacaactcayasrcacacacacacacacacacacacacacacacacaaagtataggttactttttataartgacctaagtttttttctgtgtctcccctatcattaagagagaaaaatataaatgtgatttttttaatgaatgaagaggaaactccccatttttggtgggacttcagttttattattttttttaagattttatttatttattcatgagagacacaaagagagagagagaggcagagacacagacagagggagaagca

SEQ ID NO: 3567 - DNA, 430 bp, Canis familiaris
  misc_feature (150)..(154): n comprises a, c, g, or t, or includes no nucleotide
  misc_feature (333)..(333): n comprises a, c, g, or t, or includes no nucleotide
  misc_feature (341)..(341): n comprises a, c, g, or t, or includes no nucleotide
  misc_feature (344)..(344): n comprises a, c, g, or t, or includes no nucleotide
  misc_feature (351)..(351): n comprises a, c, g, or t, or includes no nucleotide
  misc_feature (385)..(385): n comprises a, c, g, or t, or includes no nucleotide
  misc_feature (397)..(397): n comprises a, c, g, or t, or includes no nucleotide
aagagatattaaggtactccttccacaacacaacaagggaacatcccctttagaaatcgtgttctcggcttcacatcacaagggcagctgagggacatctggcaaggagaagccagttgaaagacactcttgcgctcatgacttaacatnnnnngtagttgagcttggccctcagcactcatcttctcatcttgcctgctatgacctggagtctgaacaccaaagatgtgtcaggcttccaaaccgtggcagctggtttatacccaggaagggcatgttcctctcctctatccccctctacacacacacacacacacacacacacacacatgncactaatnctncacattnaaacacaccctttttcacacatcacacaaatggnaacacacacccnaatgagggtgaaagaggtgcgagcccggctcag

SEQ ID NO: 3568 - DNA, 873 bp, Canis familiaris
  misc_feature (285)..(285): n comprises a, c, g, or t, or includes no nucleotide
  misc_feature (442)..(442): n comprises a, c, g, or t, or includes no nucleotide
ggaatggagagagaggggttcagggagatgttttctgagagctgactgaactggtggacgaaggcactgcgcactcacgctgagccaccctcagccctcgttggttcccgcccagagctgcagaccaccccttctgcccctgscccagtgcscgtctgcctcctcccgtcctgggaggctaatcccaggagcagggcctggagatgagatagccagctgstgccagtccatctctgggtactgcccgcagctggagagagccgcctcctccaagcagtccccccntccctgtacccagtgactgctccacgcaggggtaggaaagcccagacctttgacttcacttctgggcctccttgaagggctgtcccmagcttcagagctccccccgggctcaactcctccctctgctttgtcctgctcccctcaacatcttttgcanggggtggttcccacgcacccatgcacacacacttacacagacacacacacacacacacacaggggagggtgagccagtgcgcagactgatgagtattagctgggaacacatgtgattgtgtatgaaagtgggcgtgtgagcctgtgtgtgaaggcagatgttggaacacatgtgagcaggattgtgttcatgtgaacgtgagtgtgtgcatatctggaaactgttcccatgcagagccctgcgggagatgacagctgcggctgcccggtttccccggcctcggcctctccctccctctcaccaactggccggtgtggtggtgacctggaggaaatgatgttgtgtgctctgtgagtgtgagggtccatgcmgccctgcaggtggccccctctcttctgcttatcctccccaggcctgactaaggagcacca

SEQ ID NO: 3569 - DNA, 434 bp, Canis familiaris
  misc_feature (203)..(203): n comprises a, c, g, or t, or includes no nucleotide
  misc_feature (404)..(404): n comprises a, c, g, or t, or includes no nucleotide
agaggatccaggaattctagatgaatgaagactgacaagtatttttggaattaaagggtttaaattcacaaagtggagttagattttgaatgactacatccaatgaagtgtcttttatttgatttgttctgaactgacaggaatcttaagtgaaatggcaatagggcaggacacatgaatgatgaaggaaaaagccacagaanaatccacatatgcaagttcaatctgtgcaaatttcggtatccaaacctctgctggattaacatctgcattcagacacacacacacacacacacacacacacacacacgctcacatttatgaaatcccctataatcatccattcagctccctgtcacgctgtggccagcaccttcctgggatggaccttctcccacctgtgnctacccacacctggaggcaagtccacccac

SEQ ID NO: 3570 - DNA, 955 bp, Canis familiaris
tctccaaaaaaagaacattttcctttgtccatttctcactcctttccatccccttccaaaactacttgcctgattcagttaggaggaaggcaacattaataattgggaatcttggcagctatctctacagcctcaccattctgtgaactttggtcattgtgtccagcattacaggtccctgcttgtggcagaagggcaggaggacagtatctctcttctcttggcttctttagcacgtgtggccttcttcttgatagtgaagaactgatttcaattgcagttcaagaattttaacttagttttttatgagaagagaattattccatagttggacattaataaagaacacacacacacacacacaaacaagtgaaaattagaaaatttattttgaaccttctaaaaatcttccacagatgagtgaagttgatgaacacctttcaatagcaagagagctggaaagcaaagtacctaaaaggatttgtattaagtttggggtgtttatatatgacgtccacgagaaagaccccgagggtttccaaccaaactaagacatgywttctcttgattttccaatcaaagaactgggcttactaaaagtaacaaataaaaaccactaattattcacagttgtttgaaaaatagaaaactggcctgtgagtttcaggagtttgccaacattgctgaatcaggagaggattctctatggaattcaataattaaatgtgaggacataagctttgaaaagttcttkgttatagacacaagccagcaagagaagtaaaggtgaaaccatctcagaaaatttctgaagttgtaaataacaaactatagcatcgcatcaagaaacactctttagggttttggaaatcaggattcatttctgcctaaaaagaaaaaaaggtaagaggatgtaaactgtcagaatataaacattttgagaaagatcctctag

SEQ ID NO: 3571 - DNA, 386 bp, Canis familiaris
  misc_feature (26)..(27): n comprises a, c, g, or t, or includes no nucleotide
  misc_feature (144)..(144): n comprises a, c, g, or t, or includes no nucleotide
  misc_feature (153)..(153): n comprises a, c, g, or t, or includes no nucleotide
  misc_feature (198)..(198): n comprises a, c, g, or t, or includes no nucleotide
  misc_feature (207)..(207): n comprises a, c, g, or t, or includes no nucleotide
  misc_feature (214)..(214): n comprises a, c, g, or t, or includes no nucleotide
tacaggaaatggagaaataagagtgnncttgctgccagacggcactccccaggactgcagcacctgaggctccgtgggtatgtgggagctcgcagcatgtgtgtgtgtgtgtgtgtgtgtgtgtgtgtgtaacactatgcagcnggctctgcncagtaacccctgactaggatcccgggcctcaaacaccagaggccnggacagcanctctganctcttgattggctgtcatagccattgagcatcattcccttggcctggaaacctcagaatcacgatgggtggggggaggggcttactggaaacgctgattcccgggctccagctcgagagggttgcaggtagggccagggttctgtgctttcaacaagcgcccccgaagctct

SEQ ID NO: 3572 - DNA, 400 bp, Canis familiaris
  misc_feature (199)..(199): n comprises a, c, g, or t, or includes no nucleotide
  misc_feature (202)..(202): n comprises a, c, g, or t, or includes no nucleotide
  misc_feature (216)..(216): n comprises a, c, g, or t, or includes no nucleotide
  misc_feature (356)..(356): n comprises a, c, g, or t, or includes no nucleotide
gatctccttcaagcaagagggaattctgctgcatgtagcctttggatttgaattggagcattgattctttttaggtcctcagaccactagcccaccctgcaaattctgaatttgcagtcttctaccattgcatgaaccaattccttaaaataatttgtgtgtgtgtgtgtgtgtgtgtgtgtgtgtgtgtgtatccacnaancctttggttctgtntctcaggagaaccctaatacatttccctttagagaaatccaccagcagagaaatctatgagcaagtacttaattgcatgatgttttccttgataccctggttgggccatatgctatcacatatacacttttcctgcttcnagagaggaaagttcagggtgctcaggattaacagcctgttggag

SEQ ID NO: 3573 - DNA, 788 bp, Canis familiaris
  misc_feature (347)..(347): n comprises a, c, g, or t, or includes no nucleotide
  misc_feature (355)..(355): n comprises a, c, g, or t, or includes no nucleotide
  misc_feature (389)..(389): n comprises a, c, g, or t, or includes no nucleotide
agaggatcccgtcatttccaatccttaattacttctgcaaagtctccttttccaaataaggtaagatttccaaattccagggagtaaacttgatatctttgggtggtcattgttcagcatactaaaacttataaaaccctagaatggtctcctacctgaacaatgaatacatccaaatgcaattatacccaggcccaccagttgtmctgtttctactgtaaaaggcaagtgacagggtggccagaaggtcctgagcctgtgaagagctaataaactacaagagacctaatgggaacactaagaaaaatataagctgatatcctaattaacacataaacatctctgtnacactctncactctctcgtgtggcgtgtgctcttgctctatncacacacacacacacacacacacacacacacacacacacacccctataccttccttccaggatagttgctagcagaaccaaggaattttcaatataatcctatctgaggagatgcagctgccattgcccagtgtagaatggtctagggtacagaatgctccaaaatgaaaattataaactacagaaatgarctgtcatggagaaacacagatgctcttaaaaggaagagatgaggaaatggtttatgcacataaattgcacaatttccagtactccacgrgawacagctatgayggtctgcatgtatgttaataccgtaatttaaaagatacygactatacgtaaagagaaatatttagaaattgttttaaaagatgaagtttgaatgtatacaggggt

SEQ ID NO: 3574 - DNA, 470 bp, Canis familiaris
  misc_feature (424)..(424): n comprises a, c, g, or t, or includes no nucleotide
agctacccaggcatcccaaagtcttattatttaagaaatacattcataaggctacagcagccatagataataattcccctgatggacctgggcaaagtaaattgaaaaccttctggaaaacattcaccattctagatgccatttgtaattcatgggaagatgtcaaaacatcaacattaatagtagttttaaagaaattgtattcccagcctcatagatgacttcaaggggttcaagacttcagtggagaaagtaactgcagcggtagtggaaatagcaagaaaattggaattagaagggaagcctgccaaactatggaagcagcccaactgtccatcaagaggtgaagggataaagaagacgtggtacacacacacacacacacacacacactggactattacttagccataaaaggattganatcttcacatttgcaccaacatagatggaactagagagtataatgc

SEQ ID NO: 3575 - DNA, 415 bp, Canis familiaris
  misc_feature (147)..(147): n comprises a, c, g, or t, or includes no nucleotide
  misc_feature (152)..(152): n comprises a, c, g, or t, or includes no nucleotide
  misc_feature (200)..(200): n comprises a, c, g, or t, or includes no nucleotide
  misc_feature (204)..(205): n comprises a, c, g, or t, or includes no nucleotide
ctagaggatctccattccctaaataccttgagagtcgggcagtatttctaattttattttgcatatgggtgtgtggtgggaaggtgtgcgtctggatatgtgtgtgtgtgtgtgtgtgtgtgtgtgtgaggggagggagagagagangctanatgaacgtgggaagatggcagtgggggaagggaatattcagccagganagcnntatggctgtggaaacgcaaatggacaagaccaattacttagaaatatagtttatcaactggagaggacattaaagcttcagagctagagctagtatttcttcagtggcccccccacctcccctccccacccatatcacttagtgaactgagtaagaggaagtacaactgaatgttgttttgtttttctaaacaaaattgctaaaattggt

SEQ ID NO: 3576 - DNA, 398 bp, Canis familiaris
  misc_feature (306)..(306): n comprises a, c, g, or t, or includes no nucleotide
  misc_feature (308)..(309): n comprises a, c, g, or t, or includes no nucleotide
ataaaaatattagaggaaagtagagacagtaatttctctgatatcagccatagcaatatttttctagatgtgtctcctgaggcaagagaaacaaaaggaaaaataaacattgggactacatcaaaataaaaagcttccgcaggagcgaaggtaacaatccacaaaactaaaaggcaacctactgagtggaggaagtgcctatctatagatgaatggataaagaagatgtgatgtatacacacacacacacacacacacacacggaatattactcagtgataaaaaagaacaaaatttgccattggncnnaacgtgaagggatatagagggtataatgccaagttgaagtaagtccatcagaggaagacaaatatcatacgatctcactaatatgtggg

SEQ ID NO: 3577 - DNA, 410 bp, Canis familiaris
  misc_feature (284)..(284): n comprises a, c, g, or t, or includes no nucleotide
  misc_feature (348)..(348): n comprises a, c, g, or t, or includes no nucleotide
ttactgtatcatatgtccctcctagctagtgagtatgattgactctactttacacatggagaaaacagaagctatgagagacattaaattgtttgcccaaagccacatacacacatacatgcacatgcacgcacacacacacacacacacacacacacacaccccaagctaggctctcagaagaaaaccgcctaatataaagcatctctacagtatagcacaatccccaaagctaatcaacaaatacttgaaagtatatgtgctggacaccactggccactgtntggcttataaataagccagagaaccaataaacaggaaagacacaaaaatataagttcacttgtnatcttggggtagcaggtaaggggaaagggagggaagattggttaatttatatcagccatgtc

SEQ ID NO: 3578 - DNA, 470 bp, Canis familiaris
  misc_feature (59)..(59): n comprises a, c, g, or t, or includes no nucleotide
  misc_feature (75)..(76): n comprises a, c, g, or t, or includes no nucleotide
  misc_feature (112)..(112): n comprises a, c, g, or t, or includes no nucleotide
aatctttccactgcaaccaagtaccagctctattatttgacctctgaattactgggggntcagttaaaacaacannctgacaaacgttcttgataaaatctaaaactctaancaaatgtaagacatcaatatttttgctgttcctgtgtgtccaccagctccttgtcctccccatctctccattccccaaggcccagaaacatgtgttggcttttctcacaagacctgtacttcaagtacatttctgtattccttgcccaccaagctcctcgacaccacccttcactcccattttcctccttgcaacaaccacccccggctgcatggtatgccccacctgcatacacacacacacacacacacacacacacacataccttctcctcatcatcgctgaaataatttatcctctccaagacaaccttgatgagttgctccagccagctgtcatcatcaatggccactaatga

SEQ ID NO: 3579 - DNA, 436 bp, Canis familiaris
  misc_feature (29)..(29): n comprises a, c, g, or t, or includes no nucleotide
  misc_feature (279)..(279): n comprises a, c, g, or t, or includes no nucleotide
atatacgtccagtgagtaggaaaatagcntcttgttatcttaatttgggttcttccgactcttgagagagaacgaacatcttttcctcttggttatttgcagttgtttttctttaaatcatccatatatgttctttgccttttggattggattgcttgcataattcatgctgtgtgaaggggtttggtgctctgttctccatggtcttatctacacacacgtgcacacacatacacacacacacacacacacgctcatttttaaaaaccagcctttggntgtatacccaaactccattctcacaattgccttgacctgtagtcagcattccactcatcaaaatacccaactgcttactctacgcggtacccagggagacagggatgccatttatgtggacacagtcgctgccctccacatctggtggggcgggctg

SEQ ID NO: 3580 - DNA, 202 bp, Canis familiaris
  misc_feature (81)..(81): n comprises a, c, g, or t, or includes no nucleotide
  misc_feature (88)..(88): n comprises a, c, g, or t, or includes no nucleotide
  misc_feature (153)..(153): n comprises a, c, g, or t, or includes no nucleotide
  misc_feature (158)..(158): n comprises a, c, g, or t, or includes no nucleotide
  misc_feature (181)..(181): n comprises a, c, g, or t, or includes no nucleotide
  misc_feature (188)..(188): n comprises a, c, g, or t, or includes no nucleotide
  misc_feature (190)..(190): n comprises a, c, g, or t, or includes no nucleotide
  misc_feature (196)..(196): n comprises a, c, g, or t, or includes no nucleotide
  misc_feature (198)..(198): n comprises a, c, g, or t, or includes no nucleotide
atacatacatatcgatacgcatgtggagatattcagacatgtgaacctgcatgatattatctgaggtgggtcttggtctgntctagcnagtggagtgtgtgtgtgtgtgtgtgtgtgtgtgtgtgtgtgtgtgtcagtgacagagagtgcgantgccngtgtgccagagtgagatgatatntagctcntntgcccnanaaaa

SEQ ID NO: 3581 - DNA, 215 bp, Canis familiaris
  misc_feature (75)..(75): n comprises a, c, g, or t, or includes no nucleotide
  misc_feature (146)..(146): n comprises a, c, g, or t, or includes no nucleotide
  misc_feature (148)..(148): n comprises a, c, g, or t, or includes no nucleotide
  misc_feature (153)..(153): n comprises a, c, g, or t, or includes no nucleotide
  misc_feature (155)..(155): n comprises a, c, g, or t, or includes no nucleotide
  misc_feature (158)..(158): n comprises a, c, g, or t, or includes no nucleotide
  misc_feature (160)..(161): n comprises a, c, g, or t, or includes no nucleotide
  misc_feature (170)..(170): n comprises a, c, g, or t, or includes no nucleotide
  misc_feature (186)..(186): n comprises a, c, g, or t, or includes no nucleotide
  misc_feature (210)..(210): n comprises a, c, g, or t, or includes no nucleotide
agtgtgccttctcaaattatatatatgcctgattactgcatacatagctcctctcaaaaacaccttgtatgtgtnactttatttcttcacatgtaatctttgaggttttatgtgtgtgtgtgtgtgtgtgtgtgtgtgcgcgcgcncntgtgntngcngnntcataagantatctactttattccntgatgttgctattcttgtctcttntctct

SEQ ID NO: 3582 - DNA, 366 bp, Canis familiaris
catttgtcttgtttttaaaattctacatataactgaaatcatatgctatttgtctttccctgactgacttatttcacttagcataataccctgtagttccatccatcttgttacaaatggcaaggtgtctttcttttttatggctaatattccattgtatgtgtgtatgtgtgtgtgtgtgtgtgtgtgtgtgcataccacttatgcatatatttatcggtggatacttgggctgtttttataatttgactgttgtgaataaggctgcagtacacataggggtgcacatgtcttttcaaattcatgtttttgtattctttgagtagaatacctagtattggaattactgaatcatatagtagttct

SEQ ID NO: 3583 - DNA, 208 bp, Canis familiaris
  misc_feature (194)..(194): n comprises a, c, g, or t, or includes no nucleotide
ttaactgtagtgtagttacgtgaatctacacaaatgataaaactacatgcaactaaatacacacacacacacacacacacacacacaattgcatgtaaaactgatggaatctaaataaggtcagtggattgtatcaaagtcaataacctggttgtgatattgcaacctatagttatgcccgacatgaccactgngggaaactcttctc

SEQ ID NO: 3584 - DNA, 374 bp, Canis familiaris
  misc_feature (31)..(31): n comprises a, c, g, or t, or includes no nucleotide
  misc_feature (237)..(237): n comprises a, c, g, or t, or includes no nucleotide
  misc_feature (239)..(239): n comprises a, c, g, or t, or includes no nucleotide
  misc_feature (258)..(258): n comprises a, c, g, or t, or includes no nucleotide
ttatttctgaagcaattacagatacataagnatttgcaaagaaatgtacagggagtttcagtgcaccttcataaggaaatatactttaaaattatctaggaattaattcctgagtgcttaacaatacacacacacacacacacacgtatatatgagactgggtaaggcagggatatgagatattaaggcagaaaatagcaatattgacatgtaatgactcattagcttttcccaagnantagctaagcgtgctatgtntctaaaggtgtctgtttggaccaaaagtcaatgacaaaatcctccacaagttatgtgggaacctggaaacagtaaacatatttctccggtatttaattaactccaccagaaacata

SEQ ID NO: 3585 - DNA, 447 bp, Canis familiaris
atccgtttgatcgtcaaagtccttatgggtggttcttcaaattttttcattgtatttgatgggcaaaagacmccyttgtgtgtgtgtgtgtgtgtgtgtgtgtgtgtgcgcgcgcggatgtksttytctccctagtataaaattgtctatattctggtaattttatgttctttaaataccagattattatcacagcttaaaatrtcagtctgatgggtaagtggaaagttgaagacacctggggatttattatttcttctctatgttatcagatgccccctgccatgttttcagttactcttcctgatttgtagaaaccctcttctgccataggaccccagtataggcattgtagacctactgaagccagaacatctatctacttgagatgaaacaaagggatgagtatgggccatttgcctcctctatgtgttgataagtcacatc

SEQ ID NO: 3586 - DNA, 403 bp, Canis familiaris
  misc_feature (8)..(8): n comprises a, c, g, or t, or includes no nucleotide
  misc_feature (22)..(22): n comprises a, c, g, or t, or includes no nucleotide
  misc_feature (128)..(128): n comprises a, c, g, or t, or includes no nucleotide
gatcccanaaataggatttcgntcaactttcataaagcccaccatccatttctctacacacacacacacacacacccttttttaaattctttgccacctatgtttaagggcagtatttatggttgagnattggcattcttgtagtcattgggatgcatgctatttcaggagaagctgcaatgagaggaaagcttggtgtcgtcatgggggaaacttggctgtctctgggctttcttctctgacagcattccctctttccttttgtgaatactgaggacctaccacttgccaggcagagtgaaggcactgaggccatcaggatgaatgtgtccttcccctgccctgggagagctctcaagtcccctggaggaggacaccaggttcaacaaaaatctcaacattg

SEQ ID NO: 3587 - DNA, 230 bp, Canis familiaris
  misc_feature (150)..(150): n comprises a, c, g, or t, or includes no nucleotide
  misc_feature (165)..(166): n comprises a, c, g, or t, or includes no nucleotide
  misc_feature (187)..(187): n comprises a, c, g, or t, or includes no nucleotide
ttgtagtatgactgtgattttcttaagaaaatgcccacctgaggaaataagactacggagtgtgtgtgtgtgtgtgtgtgtgtgtgtgtgtgtgttgtttaccctgggttctgaggggtgtgggtccccagggcctggaaagtcccaggnagggcctgatatgcnntctctccatgggttctgctgntggtctctctgctctcagacgctgttctgcgcttggtccctgg

SEQ ID NO: 3588 - DNA, 806 bp, Canis familiaris
ttttcctgactgttaggaacttcatccctacaggccaaaaactttagagtcatccttgacttcatatatctaatcagttagaaagtcctattgccacaggagtcaaaataccatatttcatggattctaagaggaacaatctcttacatttcaatgtatgtgaaatcagaatgcatcccacaatcaatagtgcatgatattctttctcaccgaggcagtaatcctgccataattatctttgcctgcacacaccaaaacaaccagtatcaaacttgcaaaatgggtgtcagaagctgggaagtaaaattctaaggaaaatagtggaacacacttatttagcctcttggaactaaatagctatgggggttgtagggaaatgagaatccccacagtgcttataacattgccaaagttagggaatcaaaagctggctctctgtatgcagctgcacaacmtgagttaaagagcccagcatcaagasttctggtgcctgacaagatggaataagtgcccagacwtaattatctgcttagaaatcaccmmaacgtcagaragmtactaaaacacacacacacacacacacacacacacacacacacacacacacaacacaacacatggcttttgagacactgaatatcaggtaaaaagggcagcaatctcggagaatcaagaaacaaggtaggtgagccttagcattgtcctgacttcctactttgaaagactttcccagccgcctctcaggaggtgagaactccaagcctggaggattccctgagttgaggagaccaagctaagaatccaag

SEQ ID NO: 3589 - DNA, 213 bp, Canis familiaris
  misc_feature (26)..(26): n comprises a, c, g, or t, or includes no nucleotide
  misc_feature (90)..(90): n comprises a, c, g, or t, or includes no nucleotide
  misc_feature (150)..(150): n comprises a, c, g, or t, or includes no nucleotide
  misc_feature (205)..(205): n comprises a, c, g, or t, or includes no nucleotide
tctgaccattctgttacctctttggnaaggaatagtacccctgataacaacttagtataaaaaaagattgttgattcagtgctgagtgcnggtttctttatatgcacacatacacacacacacacacacacacacacacattcttctttngagaatttttctatcagacagatgaattgttgttttagactaaagtcactagtcntgtaaaac

SEQ ID NO: 3590 - DNA, 390 bp, Canis familiaris
  misc_feature (30)..(30): n comprises a, c, g, or t, or includes no nucleotide
  misc_feature (266)..(266): n comprises a, c, g, or t, or includes no nucleotide
ccacttctgtccactctgcctggacagccncgttttcaggggaaggacccccaggaggaagctttatcaacctccaccagtctgttggtctagtttcctttgccaaaagattgccctggacaattgtatggcggttacaccgtgcctgaaaagatgtgagggaatgttgtgagaggcacttctgtgaagggattttgtgacacacacacacacacacacacatagaagtgacacaagtgagggcttcatcttttttctgtcttgantgttatctgcatggatgcctaaaactgccaaagccacgaggagagccctcctgagggggcatcagcctgcgggccagtggggaaagatggcaagcacggggtcctcaccacagccaggagtccg

SEQ ID NO: 3591 - DNA, 358 bp, Canis familiaris
  misc_feature (215)..(215): n comprises a, c, g, or t, or includes no nucleotide
  misc_feature (292)..(293): n comprises a, c, g, or t, or includes no nucleotide
  misc_feature (317)..(317): n comprises a, c, g, or t, or includes no nucleotide
  misc_feature (323)..(323): n comprises a, c, g, or t, or includes no nucleotide
tctcctatacctctttctttggtgaaataaaagcagagtacatcctctatgagaccaccagggaagatgctggggaagtgtctcttagttcactgcatggttcctctagatataaattatagctatattgaaaatataagttcccagtgaattcctctatttccctttaagtttttagtggtgtgtgtgtgtgtgtgtgtgtgtgtgtgtgtgtncaccaaccatgggagtgcctcagaagagcattcgaagttggactagatctctcgtgacacttaaatcaagatatttnncaaagtaatctcttaagagctatntcaatntctcattagataaataccatctattcacccactaa

SEQ ID NO: 3592 - DNA, 370 bp, Canis familiaris
  misc_feature (235)..(235): n comprises a, c, g, or t, or includes no nucleotide
  misc_feature (291)..(291): n comprises a, c, g, or t, or includes no nucleotide
  misc_feature (295)..(295): n comprises a, c, g, or t, or includes no nucleotide
  misc_feature (305)..(305): n comprises a, c, g, or t, or includes no nucleotide
  misc_feature (345)..(345): n comprises a, c, g, or t, or includes no nucleotide
  misc_feature (351)..(351): n comprises a, c, g, or t, or includes no nucleotide
ttttttgaattgaactgcttctgaattggatgtttctggacatcatccacacttggtaaatacttactgaatattaaggggaaatagactctacccacaggagtctactcttcaactaaagaaagaatgaggatgtgtgtgtgtgtgtgtgtgtgtgtgacacgcaaaatgaatcacaaaacaaaggtaaagaattgtttgttcacatattcaacaaatatttattgagcacctntgcactaagtattgtgctgggggctgaagatgttataatgaattagactttgtctntgtntcgtggagtntacagatggtagggaactcttgctgtggtgagaaatgctntgccgnaggagaaagtactggatgc

SEQ ID NO: 3593 - DNA, 519 bp, Canis familiaris
atttctgccagaacctcacttctatcaccccgaccccttacacataatccatggcacttgtccatctgccttcctaattttaagggctttcaaacttgcctaaatattggaatcactttgaaaaagcttttcgaagtactgtggctaggtcccatcctcaaaatcctcatgccattggataacaaaaacaaaccaacaaaaaacctttttctatcacttagaaagctatcaggcttttaggagctctgtgcaggaaccagatacaaagaccaaatctatttcttctgaaaccccagcatccataagccatgtttccagataagcttgccctatgacaaatgtgtgtgtgtgtgtgtgtgtgtgtgtgtgtgtgtgtgtgtgtaggaggccagaagggggccattggggctctttgcccagatttaagggaggtctcctagaagctctgaggtgggcctgagaacttcawtcatggtctctcccaggacattctgaagccgatggtcctcagagttacac

SEQ ID NO: 3594 - DNA, 384 bp, Canis familiaris
  misc_feature (120)..(120): n comprises a, c, g, or t, or includes no nucleotide
  misc_feature (147)..(147): n comprises a, c, g, or t, or includes no nucleotide
  misc_feature (154)..(154): n comprises a, c, g, or t, or includes no nucleotide
  misc_feature (159)..(159): n comprises a, c, g, or t, or includes no nucleotide
  misc_feature (184)..(184): n comprises a, c, g, or t, or includes no nucleotide
  misc_feature (242)..(242): n comprises a, c, g, or t, or includes no nucleotide
  misc_feature (249)..(249): n comprises a, c, g, or t, or includes no nucleotide
  misc_feature (274)..(274): n comprises a, c, g, or t, or includes no nucleotide
  misc_feature (311)..(311): n comprises a, c, g, or t, or includes no nucleotide
  misc_feature (353)..(353): n comprises a, c, g, or t, or includes no nucleotide
agaaggttcatatcagactatacttccccaagccacaccgcacacacacacacacacacacacacacacacacactttttgcctcctagccatcaaaatgacccactcaataagagttgntctctggtgggaccatacagcatgtantcatttntgttntgtccaaaagacaatctacagaaanggtccatccataaccaagtagatgtatgtttataaagttggatagtggttatgactangtgtganaataagtgataatgaataatctatntgggtagaaaggtaaaggtctgattcctggaattgtngcaaagacgagacaactttgtgttgtgtgtggagggggtgantctcataattttcatgtctaaaataaagctt

SEQ ID NO: 3595 - DNA, 372 bp, Canis familiaris
  misc_feature (245)..(245): n comprises a, c, g, or t, or includes no nucleotide
  misc_feature (251)..(251): n comprises a, c, g, or t, or includes no nucleotide
  misc_feature (262)..(262): n comprises a, c, g, or t, or includes no nucleotide
  misc_feature (265)..(265): n comprises a, c, g, or t, or includes no nucleotide
  misc_feature (272)..(272): n comprises a, c, g, or t, or includes no nucleotide
  misc_feature (290)..(290): n comprises a, c, g, or t, or includes no nucleotide
  misc_feature (297)..(297): n comprises a, c, g, or t, or includes no nucleotide
  misc_feature (346)..(346): n comprises a, c, g, or t, or includes no nucleotide
  misc_feature (360)..(360): n comprises a, c, g, or t, or includes no nucleotide
agaggttcatgcagtggcccacaccaaagtcagcaatcattttctgtaaaaagccagatagcaaataatttaggatttgcaggtcacatggtctctgtgcaactacttaatttggctattgtagcatgaccaccatacacacacacacacacacacacacacacacacacacacataatatatatatgtctgtggcagtgttgcaatacaactttatttacaaccaaaggcagtagagctggatncagccnataggtcactntgncgacccntgggtcatagaccatgcngttgtcnacacaatggagtacacctcaaacaatatttacagagcctggagtccttntctcaattcagaanatggagaaatat

SEQ ID NO: 3596 - DNA, 217 bp, Canis familiaris
  misc_feature (20)..(20): n comprises a, c, g, or t, or includes no nucleotide
  misc_feature (156)..(156): n comprises a, c, g, or t, or includes no nucleotide
  misc_feature (176)..(176): n comprises a, c, g, or t, or includes no nucleotide
  misc_feature (184)..(184): n comprises a, c, g, or t, or includes no nucleotide
  misc_feature (192)..(192): n comprises a, c, g, or t, or includes no nucleotide
agaggaagagaaatacccanctctgacttactctagccactttttcccatctgaaggggaaggaaaagaaatacacacacacacacacacacacacacacacacacacataagcaaatatacaatgggcatcagttatacaagggacaagagggangaattaggattattttgtanttataaantactcatnctacccatgaagtaatagagtgtcg

SEQ ID NO: 3597 - DNA, 376 bp, Canis familiaris
  misc_feature (316)..(316): n comprises a, c, g, or t, or includes no nucleotide
caggctccctgtgcagtggggagtctgcttctcgctctccctctggccctccccactgcttatgcttgctctatctctgtctcaaataaaacaaaaaacaaacaatagctaaactgtggaaaaagcccaaaagtcatgtccattgactgatgaatgaataaagatgcactatatatataccacacacacacacacacacacacacaggtaatacacggttataccattatatatatatataatatattcagccatcaaaataatgatatcttgccatttacaatgatgcggatgaagctacaatgtattacgctangtgaaatatgtcagaaaaagacaaacaccatatgatttcattcatatgtggaatttaaga

SEQ ID NO: 3598 - DNA, 439 bp, Canis familiaris
  misc_feature (25)..(25): n comprises a, c, g, or t, or includes no nucleotide
  misc_feature (252)..(252): n comprises a, c, g, or t, or includes no nucleotide
  misc_feature (288)..(288): n comprises a, c, g, or t, or includes no nucleotide
  misc_feature (321)..(321): n comprises a, c, g, or t, or includes no nucleotide
  misc_feature (369)..(369): n comprises a, c, g, or t, or includes no nucleotide
gcttctccctctgcctgtatctctncctctctatctctgtgtctgtcatgaataaataaataatatctttttaaaaactgtcagttacattaaggtctttcttttctaactatgaaaattgtcactgagatgggctctcctaatgcaatgacatagaaaactttctgtttctcttgcagcaaagacaaatagcaaaccattacaaggtttcagcagctgacagccctcttagccatgttaatgtcttgttanaaataacactacacacacacacacacacacacacanacacaacataaaagcgacttgccaaaaaagggnctccagctctctgcttactccatccatgttatttattctgtgatttanttttcctggatgacagctattgcaaattggtgtatctacaagatgtattctccctactgaaggatgcgac

SEQ ID NO: 3599 - DNA, 375 bp, Canis familiaris
aaaaagacccaagggaggggagggctggaacagacaccttcattcataagtagaagagttgaactgaaatcacacacacacacacacacacacacacccttaattcctgtgggctcttggtgtttccagggagccatctggtcaacgttttttggtaattctgtctgtggtaattcaaaatggtaacaatcagcacagctaacatttatgcagtgtttgccttgtacggagttaagtggtttacaagtatttaatcttgtaacattgccatgagggaggttctattttttccccattatatagctgaggaaaacaactcaaaagtttagtgattgacccacagccattcagtaggcagagatttgacagacagtc

SEQ ID NO: 3600 - DNA, 171 bp, Canis familiaris
  misc_feature (50)..(50): n comprises a, c, g, or t, or includes no nucleotide
  misc_feature (116)..(116): n comprises a, c, g, or t, or includes no nucleotide
  misc_feature (160)..(160): n comprises a, c, g, or t, or includes no nucleotide
ggactatgcagggagctgtgggaagtccaggaagcacagtatactcaggntgggtcatgtcagggaaggctttctggaggagagagagagtggcagtgagccaggaggaggcatangcgtgactgtgtgtgtgtgtgtgtgtgtgtgtgtgtgtgtggtntgatgtgggaa

SEQ ID NO: 3601 - DNA, 440 bp, Canis familiaris
  misc_feature (217)..(217): n comprises a, c, g, or t, or includes no nucleotide
  misc_feature (220)..(221): n comprises a, c, g, or t, or includes no nucleotide
  misc_feature (340)..(340): n comprises a, c, g, or t, or includes no nucleotide
  misc_feature (362)..(362): n comprises a, c, g, or t, or includes no nucleotide
  misc_feature (408)..(408): n comprises a, c, g, or t, or includes no nucleotide
tgacctttacatgagggcaatgactttaaaccccagtggaacgttgaagggaagcggagtagtaggtactcatgttgagaggccccccaggagaagcaaaggagactaggaggcaatgggaaggatgttcccgccagcaggcctgtgctttgggggagggtgtgctgcagatgaggaattgaatcttccaactgagtacagtttccagtctcatccntanngtccagatgaggacactgaaattcagagagaaggagtaatttcctgagagccccctcaggcggagaggagcggggaacacactgatggggtgacctggggttaggccttccttgggccnggcaggcctggggcatgggagnacaggggtgtgggcgtgtgggcgggaaggtaacgtggagaggccanctttggggtccactgtgtaggatgtgacaaga

SEQ ID NO: 3602 - DNA, 430 bp, Canis familiaris
  misc_feature (30)..(30): n comprises a, c, g, or t, or includes no nucleotide
  misc_feature (162)..(162): n comprises a, c, g, or t, or includes no nucleotide
  misc_feature (336)..(336): n comprises a, c, g, or t, or includes no nucleotide
cgcttaaccagctgagccacccaagcatcnacattttaaattcactgcaccacaatccaccagattttttgagaatctacaaagaggttgaaaacgtgaaagacaattcaggtctgtgtgatagaactttaaaaaacactcaaatagggacacctgggtggntcagcagtttagcacctgccttctgcccagagcatgatgctggaaccctgggatcgagtcccacattgggctccctgcatggagcctgcttctccctctgcttctctctctctctctgtctctcattaataaataaataaaatattttaaaaataaaaaaataaaaaacatccnaataattacatttacctaagtcatcttatatttgaaaaacaaaaatctatattatagtataattcatagcttgaacatatcagagattccaata

SEQ ID NO: 3603 - DNA, 460 bp, Canis familiaris
  misc_feature (123)..(123): n comprises a, c, g, or t, or includes no nucleotide
  misc_feature (292)..(292): n comprises a, c, g, or t, or includes no nucleotide
  misc_feature (331)..(331): n comprises a, c, g, or t, or includes no nucleotide
  misc_feature (397)..(397): n comprises a, c, g, or t, or includes no nucleotide
  misc_feature (427)..(427): n comprises a, c, g, or t, or includes no nucleotide
  misc_feature (434)..(434): n comprises a, c, g, or t, or includes no nucleotide
cttaaaacatatctatgaaaaaggtaaggaagaggaagattaatatttaagaaaggatgtcagggttttttaaacatctatttctcacttaaacttgaaaacaaaataatcatacaggatgtnttgatgcccattacacagatgtagagacttaaggctttatttaggttagagattaactaaatggtagtctaagcatgggattcagaaacctcattctaaaaacttatatcatacaaaccaaaccacttggctaaagaagtagacatcaaagaaggaggttcagaatgancaaaagtctggaaatacagtcagataatgcgcatgcgtntgtgtgtgtgtgtgtattggaagaaggctgcttaaccgttatgcaaaagcatggtcttaagttgtnccaggtgggttaggacccccatgttgctanaatgatncccgggtaccgagctccgaattccgt

SEQ ID NO: 3604 - DNA, 447 bp, Canis familiaris
  misc_feature (39)..(39): n comprises a, c, g, or t, or includes no nucleotide
  misc_feature (209)..(209): n comprises a, c, g, or t, or includes no nucleotide
  misc_feature (236)..(236): n comprises a, c, g, or t, or includes no nucleotide
taggggccaaggctctctggtggaagggcagcttgaccngggagctctgctggtcagtggaggttggcgggatggagcagtaggggaaggctgtctaagtcttgaatacacacacacacacacacacacacgcacacacacacgggtggacatacaggcaggtgagtcgaggaggggaggctgagtgagctttcccagggcgttccccncctcgcctccaggaagaggaagtacanctttacacgagtttgtggattttaacatatagcatatgtgagcacctagatttaccaaaacaaagaaaaattgatgtactgtgcttttgttagaaaaattttagtagcaataacctcagtgcatttaagtgtggtttgatttgtaggtgttcccggccctccagtcatgttggggcaaagcattggctggaaacaggaaggttggtgaagg

SEQ ID NO: 3605 - DNA, 422 bp, Canis familiaris
  misc_feature (230)..(230): n comprises a, c, g, or t, or includes no nucleotide
  misc_feature (359)..(359): n comprises a, c, g, or t, or includes no nucleotide
actgttttgaagtcctgagcaatttctccaccaagcgctggaaaggaagtttgcaaatcagaagtttagcgggcttttttcttattaaacttttgttttaataggtctcaaaattctgtgacagatttttggttgtttccattaaaaagtactgattttaaaaaccaataaaactgccacacacacacacacacacacacacacacacacacaaatggtccacaaaacantctcctttccttctgagggttttacgatgctgtgttatcattaaccagcaaaatgacccaccaatggaagcaactggcttcacggcttatgtgattatgctgaaccatctgattatcctgaaccatccnggtcaaatcagtgctggacgtgcaccttgtgctggatggtcacacagctcacgtttgcttgca

SEQ ID NO: 3606 - DNA, 360 bp, Canis familiaris
  misc_feature (275)..(275): n comprises a, c, g, or t, or includes no nucleotide
cctaattccatgtctttgccaacgtaattactgaatggagatgactgacttttcttaatctgtacagttgttgaaatgattacttgtgggcatattattatttataaaattacaaaagctccaaaatactaaagtggatgtgtgtgcgtgtgtgtgtgtgtgtgtgtgtgtgtgtgtgagtctgtgtgtgtgtaagcatgcatggctttggatagaaaagattcttccttctctctttaatgtatatccacctacaaaatcagctcttttcccanattacatttgatccccgggtaccgagctcgaactcgtaatcatgtcatagctgtctcctgtgtgaaattgttatccgctcacaat

SEQ ID NO: 3607 - DNA, 426 bp, Canis familiaris
  misc_feature (119)..(119): n comprises a, c, g, or t, or includes no nucleotide
  misc_feature (143)..(143): n comprises a, c, g, or t, or includes no nucleotide
  misc_feature (152)..(152): n comprises a, c, g, or t, or includes no nucleotide
  misc_feature (332)..(332): n comprises a, c, g, or t, or includes no nucleotide
attttctagataattctccatacatcagtcacacacacacacacacacacacacacacccaaagcacacacagggtcaaacacatacacacaaacactggctttctttagtgatatatntggattcctttctctttgtttttntgtatgtcnattactggttttggatttgtggttaccattaggtatatctataacatcttacacatatagcagtgtgtattttttcctcccacccctcacagtttaggtagtgtcattctttacatccttttattttgtgaatcccctgaccaatttttatagatacacttaatcttactgcttcttgcntcctatttttctttctcctgtggtcttttctttccactcagagtcccctttaacatttcttgtggggctgggttagtggttaccactaaccttt

SEQ ID NO: 3608 - DNA, 334 bp, Canis familiaris
agagcttcgggatggcatagtgcagagcagactaaaagatttataaatagtctgaaagctcatatgaaagaccttagtgggtgcctagaggcatctcctgagtctaattcacacagatgagggcatggggcttaggattgtcaattcagctaagctmwaactacatwtcccagaattcctgtgtgtgtgtgtgtgtgtgtgtgtgtgtgtgtgtgtgtgtgtgtgtctagatgtgtgtgtgtctgtgtgtaaytctgtggggaggttaagagcattttgcaggtgatttggaagatggtagtgaagtagcatccatattgctttggaggctttg

SEQ ID NO: 3609 - DNA, 387 bp, Canis familiaris
  misc_feature (176)..(176): n comprises a, c, g, or t, or includes no nucleotide
  misc_feature (181)..(181): n comprises a, c, g, or t, or includes no nucleotide
  misc_feature (186)..(186): n comprises a, c, g, or t, or includes no nucleotide
  misc_feature (225)..(225): n comprises a, c, g, or t, or includes no nucleotide
  misc_feature (264)..(264): n comprises a, c, g, or t, or includes no nucleotide
tctgggccctcattagtgcctcattatcatgtctccccacatatcagatttatttcagtccgtgcactctgcaacacggtgtccacctgccgtgggaggaatagagtcaaagaattactttaaaagtaaggatttagtggatgactcacacacacacacacacacacacacacgcntgcanatgcncgcacgcacacacacaaacacttgcacacaaaatctgtngaacatgacagcgcaccttgcactgggagaagatgccanaagagcaagctggtttacatgtttataattatccacccttataatgggaattcattatttcgttgtgtacaaagcaatccatttctgattagccttttatcacgctttcattttcagaggaat

SEQ ID NO: 3610 - DNA, 387 bp, Canis familiaris
ttgaggttttaaataccaggccacgagtgatagcatcttttatttgtattcacccagatgcagagattgactttggtgctccacttgcctgcctctccagagggttctgatgctttcagtccatgaatcatcaaatactaccatacacccaactatgccaggcaccttgcagccaccggtaacacagcaatgaacaaagagagaccctgctctcaggagaagagtacacacacacacacacacacacacaatcatttatacaaatgacagacttgctagggaagaccagtgtgagaagagggattgagaaaagggcggcgtctccaaaatcttttgcctctgactgtcactgagtttacttcgtaactagaagccaaagctgaagtg

SEQ ID NO: 3611 - DNA, 905 bp, Canis familiaris
tagtgacaaattcccccaatttytttaattggttttattacgtgattcataatttgagtggcaccccacctagcaagtagagggaagctcccagattccctcaatttttgtttgacaaaaaaagtctttacttctccttcatttttgaaaaataattttgcagggtacaaaattctaggttggtgatttttttktccttttaacactgtaaatatttcacttcattattcctgcttccatggtttttgaaragaagtctaatgcagctttwatcttggtycttcagtagataaggtaatttttttgacctcgggcttctttgaggattttattctttgtttytgattttgtgccatttgaatatcatatgcttaggggtgagtgtgtgcgtgcgtgtgtgtgtgtgtgtgtgtgtgtgtgtgtgtttcatgcktggcattctckgagctttcyawgtctggtgatwgatgtctgccaagggtttggggggaaatccacagtcattatttcttcaaaatattttctctgktcctttttctctgtcccacatattatacctttctttaattggtccacagttacttagacattctgtcctgtcctttcattcttttttctctttggatttcaatcttgaaagttttctgttgacatttcttccagctcactgattctttccttggttatgctcagtgtattgataagcccatcaaaggtactcttcatttccattgtggtgtgtttgatatccagcatttccttgtgattccttcttagagtttccatttctctgtttactttacctatagtttattttttattgaatttatattatatatgagcacatatcaaaggcacagcttggtaaatttccctgcttttgttattgtataacctatacccag

SEQ ID NO: 3612 - DNA, 345 bp, Canis familiaris
tgctgaagcttaaagaatgggaaaactgataagcaacataacaaagtataatcgttgtatcaaaggtttatttactaggaaaaaaaaatcttaaaggtgactcaaaatagcacaggcacaaagtaaactggaaaaaaaatactttttttttttttaagattttacttatttattcatgagacacacacacacacacacacacacacacacacacacagaggcagaggcagaggcacaggcagagggagaagcaggctccatgcagagggcccgacgtgggactccagaatcacgccctgggctgagtgcagtgctaaactgctgagcccacctgggctgccccaa

SEQ ID NO: 3613 - DNA, 440 bp, Canis familiaris
  misc_feature (105)..(105): n comprises a, c, g, or t, or includes no nucleotide
  misc_feature (146)..(146): n comprises a, c, g, or t, or includes no nucleotide
atcaagaccaacagaagtgagttgctttcctggtaccaaattacctataaaaaattacagagattggtgggaccgatcttcaggcagccccaattcggtgtaaantcattctaagaagagtggtgaaaatacatatgtggccttgncctcaccacaacgtcacagagagtctgtgattatggccatttacgtattgcaagtatgtttatgtccatgtgactcatgcttgggaggcagagagaaaggggacggtgtgtctctgccattgcacatctatgtttgtgcttgtgtgctcctgactgtgaggccagtggactgtgtgtgtgtgtgtgtgtgtgaggtccaagtgctaggagggaggtgttgttgttgtacacaaggatgggttcaaacaacagctgggattgttgggttggatatgttaagatggaggacaatct

SEQ ID NO: 3614 - DNA, 608 bp, Canis familiaris
  misc_feature (386)..(386): n comprises a, c, g, or t, or includes no nucleotide
  misc_feature (424)..(424): n comprises a, c, g, or t, or includes no nucleotide
  misc_feature (430)..(430): n comprises a, c, g, or t, or includes no nucleotide
  misc_feature (514)..(515): n comprises a, c, g, or t, or includes no nucleotide
  misc_feature (525)..(525): n comprises a, c, g, or t, or includes no nucleotide
  misc_feature (537)..(537): n comprises a, c, g, or t, or includes no nucleotide
  misc_feature (563)..(563): n comprises a, c, g, or t, or includes no nucleotide
ctagtgagtcactaatcaagaagttaacagcaaatagaaaaatagttgattttgaactgaaggcagagttggccactaagagaattttcgaatcattctccaacttactaaaaataggctagtgaagaaaagcaattgttttatctaacttgaaacctgactgcttgagagctagtaatgaaaggttacaaagtagaatcaagttctcttccttacccggcactgaaaatctgagccttctagtcctagacatccagaagtgaccacaggcatcccagaatcatcttcttcaatcattgtgaaacaatatccatctgtgctaaagaccaaacaggcaaagtaagtgtgtgtgtgtgtgtgtgtgtgtgtgtgtgtgtgtctacgangaaaggarcatgtwtacaatgtgttttattacatacanggaganagtagatgatctttacaggttactatctgctaagagcattccaaaacatccttttatgatatgtgatgtacactataaaatatnnggtaatatcntctcagtctatntttttgttgagaaagaagaagccaangtctccatataacatatgccattaataaccatatataccaatgac

SEQ ID NO: 3615 - DNA, 305 bp, Canis familiaris
  misc_feature (27)..(27): n comprises a, c, g, or t, or includes no nucleotide
cccacgtgtgagggtcccactgttgtnaagggagagtgaattaggcttagttggagccagagtcgtagaaccagcttccttcttcacgtcgtggagccggctggctcgagtgcgattccctgccagcatccagtcaatgagtaagcctagacatgacgcacgtgggggcgaggcgggggtgtgtgtgtgtgtgtgtgtgtgcccagccctgccacttactagatgtgctgtcccgggcacagaaccatggagcgacagccgtgctcagccccccaagcttgattcggcctacctgccagcccagg

SEQ ID NO: 3616 - DNA, 380 bp, Canis familiaris
taaacccccaaggtacatgttggcaatcatcctccaagtgcatggcccaccgatacacatctgaagggtctcatgactcaggttttattagacagtaataagggaccttttcccaagaatagctagccccctcaaggtcctggaaaccttgcttccaaaattcctttgtgtgtgtgtgtgtgtgtgtgctcttctttgcaattgtatttcaagttctgtccaaaacaaggccccagaacccccaggttcaagtatgtccccgagcttggtccactgctgccttatattcatgtttgggtattcattcaccattaaacctcaggatagaagatgtgacatagcaggactccttcttccatagcatgagtcctttgctgatt

SEQ ID NO: 3617 - DNA, 380 bp, Canis familiaris
  misc_feature (62)..(62): n comprises a, c, g, or t, or includes no nucleotide
cctctcctctggggctgcaatgtctgctacttgcacaactgcccttagacggtcagccctgncctacaaaagccaatcagtgacatcattcaatgacttcctttgctctgcaattcttcttcctggaattctttcattacccttcaaggtctagatgaactttaacttctgttatgaagacctcccagatatttctaggcttaactaatacttaaacaaaaattcttccttcaccaaattcagcatcttaacttgatgttaattggtttttggcttttgttcatttgtttatgtacccatcaaaatctgggtagggttatgctttatactctctgcctcccttgccatgaattcaggatagtcataaatagacacagaag

SEQ ID NO: 3618 - DNA, 395 bp, Canis familiaris
  misc_feature (267)..(267): n comprises a, c, g, or t, or includes no nucleotide
  misc_feature (370)..(370): n comprises a, c, g, or t, or includes no nucleotide
tataaatcaccacacacacacacacacacagcaaaaaaatatttttttatattccctttgaatagtccactctttcaattaagaagggaaaatattttttttctacctatttaattacattataataaacaaatattatgaacaaaggtgcttttttccctccaggattttaatattattttttcattggcactacctaattggaaaatacaagtttttttatcttctcaagagcataaaaatttttaaatgttgtacctgtggaanccatgcatcaatgccaatcatcctcctacccatcctactactaatatattggcataaatgactgataattctcatgcacagaaagtactattagttattgaangtcaccatgactagatgagaatata

SEQ ID NO: 3619 - DNA, 810 bp, Canis familiaris
gatctgcaatgaaagcagggagccttgttattccttagtcttccctctagcacccagaggtcatgaaccataatgactaatttccactcagtcactgatgactgagtactgactaaccagtgccggccacacagacctgggagggctgtgacatactcaaggaacaagtgcggattctcacgagcacctaggggcccagcggtgagattccatgtcccaacctatactctatatatgtcccaacacgtatttctacactgtcccatctttcatggcataacacatggaaaacgtcaggtgaaggcactggcccaacaagagacaccattgttgggaccctggaattatctcatacacacacacacacacacacacacacacacacacacaaaaccccacacacatgtgtatgtgtttttgggggggtgggatttgataaaaggaactggagtcctacataggctaagtacataaagggatgagtcttataaaattaaaacaataactatcctcccattaagggaactgttcttttcccttctctccttggcatatattactaataatgggcatttgcttatatatcagtatatggtgctaaatgaagagggaaaaaaatgaagcaacagaagacatctatcaacagactatttctccaaataatgaaattatggaagcatactaaatatttaaacagaatgagcagtttcattcaaaactggatagcatttagcctttattctcacttatttctaagttgtgaatgatttgggggcacctgggtagctcagtggttgaatgtctgtcttt

SEQ ID NO: 3620 - DNA, 387 bp, Canis familiaris
  misc_feature (318)..(318): n comprises a, c, g, or t, or includes no nucleotide
  misc_feature (360)..(360): n comprises a, c, g, or t, or includes no nucleotide
ctttgataaatattgcgctaattcccttgcccttagcccctggtaatcacctatctactctatttctgagttaggtgaagtgcacatataagagagattatatagtattagtcttgctgacttattccaattaaataaatgagggatggctgtcaagatttatccatgttatctcatggcaagatttcctactttttaatggctgaataatattccactcccctttgtgtgtgaatgtgtgtgtgtgtgtgtgtgtgtgcatgtgtgtgtgtgtgtatgtgttttacatcttccttatctatttatccaccaatgganacttagttgtttcatgtcttggagatgtgcgtaatatttcantgaacatgacagtgaatatatctcttt

SEQ ID NO: 3621 - DNA, 898 bp, Canis familiaris
  misc_feature (93)..(93): n comprises a, c, g, or t, or includes no nucleotide
cttccacagtttctcaagtttttaaaaattragcagctagttctatcagcttgatatggaatgtttaagtttaacctaaagagcacaactgtntttttaatccatccactccccaactctgctgtactagggagtttcccacctcacccctggtccccgtgagggctgcactgccaagactcccagcccagcccgcatctcctcagggatggctcctaactttccataactgtgtatctgccaatgcacttttttttgcctttcccccatcttttggcaaaaggctccttgtccactgtgtgttcaggacccaggaagacaattgcctactcatccaggtggactggcaggagaagacaggagcatagcccatgaaatccatgaggaaggttctttcacacaggcaatgtctctggattcagaagggatatgtgtgtgtgtgtgtgtgtgtgtgtgtgtgtgtgtgtctggtgcatatytctgtctgtctctctbcrgggtaaaaaagggaagtaagcccttttttatcactgccttaaatgaactttaatcatcatagagactcccagttcagctgtcacatctgctctcaatgcatgtagggatgtatttgggggaacaagagcatgtgtctttactactaacaaaagtgtacaggggctttcccttctcctcctccttcttctggctcttctttctccaaactcctcaccccttccccaccctccccccattattggcttggtaaaggaacagaaatgttgaaatcaatatgagaataaattgccacatggtctttatggtggaggcaaggtttctacagaaaatccttgtaatcagaaaagagggagtagaagattaaactgattgractgagaaagtcaaaaaaggacaactt

SEQ ID NO: 3622 - DNA, 396 bp, Canis familiaris
aatgggaactggggctggggcgcacggttctgcagtcagggctagggatgtgcggtagcgaggggagctcacaggaaggggaaactcaagggttacctctgagtggccgtttgcatggacaataggaatacactggggaattttcaggaaaggtaagagggcagattttgttctgaggtagagctatggactaaatgaattctcaggacctcagtgtatatgtatgtgtgtgtgtgtgtgtgtgtgtgtgtgcacgcgtgcacaagggaaagggcctggaaaatcagaatttaagtgagcagcaaggggcttgaagttagattaaaggcagtaatacccatatatgtgagggtggagccactgagggaggctgtagcatctccattgtcgagctgg

SEQ ID NO: 3623 - DNA, 476 bp, Canis familiaris
gaggatcacttgttggtattggtattgttctcatttaatatttcttaaaaatgctttctaaaaaatttacattgataacaccctgctgcataacctaatgtatgtgcaataatctgaacactgaaaaaaggaatgaaacacaggtccaaggagtagaaggctatcaatccctcagcacccacacactctcttctgaggatttaattcagcttctatggacttagtcttcttcagggcttgggttaaaagcaaaacaaacaaacaaaacacacacacacacacacacacacacacacaaacaacaacaacaacaacaacaacaaagcaaaacaaagccagacaatccttcctggctctgacaggttggaagtgttggaagagagcaataattcctgacacgggacattatgagctgtcttgggggcagactattatatatctccaccaataatacaaatgataacaataataatgat

SEQ ID NO: 3624 - DNA, 865 bp, Canis familiaris
aatgaggttcaaagaggtttggcatggcccaaactctcccagctaccctaagaataactgatgactgtctggctctaggctgtccttggagtagagcagccacccttaactcccacccagagcccccgcctcccctcccctccagaggcttccatgtgcctggtgtacaaggagaaactggctgctacaaccatgggattcttagtaacctgtgatggcccagctgtttgactaaatttgggcacttgtgtttcctgcttaggtatggggtctcaggagcaggagcctaaccagctgggaaagacccacctgtcaagattcgtggtggtgagtctcacacacacaaacacacacaagcgtgcatgcacacacacgcatgcatgcacacacttaaatatactggcaataaatatagcgtgtagaactaggctgatggtttgtaatcagagtctccagatgggattttatatttaaaacaaaagggagaaagaaagatgaggagagaaagcagaaaactaatggacatggcggcagaaaatgcaagttcctgttcyttcactggatggtgagaccacagactttcctccccactccctccagcccctgggccttgcctctctgtcagaaccacctcgagctgttmcagacagaagaggcwacatttagcagatggctggcacgatatatgtgatatctctccaccctgatttccatttaaaagataccttagcaaccagccaaggagccatccgcccctggagcctgtaaatcaagtaagatgcctgtctctgcttcaggtaaaaagaaatggcccctccagggtgctcccagccaggaaagtgtgaattaataaaagtgggagggg

SEQ ID NO: 3625 - DNA, 410 bp, Canis familiaris
tcccgaagcctcgctgagtgaaagctaattataataattaacagagaactcctgaacttgtcaaactggtaattataaaccacggggacttttatcattaatagatgccatagaaagtgaaggcacaggggtcctggcagggagaggcacacaggagatgttccaggccagagccaaatccgagtgccaccaggacgtgagaacctggctccttttggctctgcgcccaacactcagcctgcctctgccttcctgcaaacaagccccgagtgtctccatacacacaccctgcactgcactcagggaggtgcgacacacacacacacacacacacacacactcttacacattcacctacttgaaccaatgtttactatacgggggctttatactcatgcatgcttgcgtgc

SEQ ID NO: 3626 - DNA, 440 bp, Canis familiaris
atcatgcaggtgacctcccatgtgtggcaacccacatgccttacacatggcctccttgaggcccaatcaccttagggacaccaagggacacaaaacattcccctccaccaggcccggagtgcagcagaaagcatccctcaaagcagcacacggatggtcgtggggaaccctgctcggtggacaccatcatggcaagaagggtaaagttcctgtgtcagttgtcattccacagctcctaggaatttctaagggaggggggaggccagaatgtggcgtccccccaggacacacacacacacacatacacacacacacggctaacatccatcagtccacccatccccacatgcacgcatgcacggtcgagctgctgaatgtgctcggtcacatggggtcggggtgaccgcctagtcagcaaggaaggcccttgatggacagca

SEQ ID NO: 3627 - DNA, 391 bp, Canis familiaris
  misc_feature (186)..(186): n comprises a, c, g, or t, or includes no nucleotide
tctgtaaagtgacctccgtgggtgattcaatctatccctctgcctctatgagccacccttcccctgagaatagatggacccaggtggcaacatttaccatttatttccaagacctgtggtcagggagcccagggcttcagacaaagtctggtcctcatcccaggatgtattcatcttggctaggangaaccttagactgcgtgtgtgtgtgtgtgtgtgtgtctgtgtgatgggtgtgactgtgatgcagtccaatgtgacgagcacctatcccatgtgtcacacttggtgtggctgtatggcccccgtgggttgactgtggttatgatgatgacttgtgcgttgactgtgtcatacgtggttgtcacacactggtgactgaattgtgatg

SEQ ID NO: 3628 - DNA, 358 bp, Canis familiaris
catctaggggaaacagccccacagtagacagtcctgacccataagcctgagcccaccttcagttcctcagtcctctgagcaaacctttgggccagcaccctggggaataagaggatgatttgcacacacacacacacaccccatctcctctcctagactctacatccctccagagagagagtggcgaagtctccagtgccgcccagggccccgcacagaccccaacctgccacatactctctggggccgagctgtctgctcacccctcctgcacgatgtgcatcgaggccctgcacatggaagaacaggttgtgcatgcgagacagctattccgtctgaaggatgccctatgccaggc

SEQ ID NO: 3629 - DNA, 599 bp, Canis familiaris
  misc_feature (469)..(469): n comprises a, c, g, or t, or includes no nucleotide
  misc_feature (509)..(510): n comprises a, c, g, or t, or includes no nucleotide
  misc_feature (530)..(530): n comprises a, c, g, or t, or includes no nucleotide
aaaagatttaagcataaactctttatggattttagttatacattatatataatatacatatcatattataggtatgtatgtaatgccaaaatgccataatctatgagttatagcagtgaggttctcacattctaaggcaaatgaaagttaacttccctgggcaagggaaaaagagagcttcaggaaaaagataaacaaatccattagagagggcattaaatgcatttgaaatggcctcaataaaataggtaagctcctgggaaaataatgtatctaactattgctaaaactgctttctggacgtactaaacaggaataacacacataccctcatctagcctatttaatttcagagaatgttggttaaagaaagctgtgggttttttgtctgtgtgtgtgtgtgtgtgtgtgtgtgtgtttaaacaagcagcacaatagaaatatagaacacaacctcatagctaattcncactgtgtgactaagacttctctctggtgactttggaatnncacactactttttgatggtnccttctttgttctaaatcaggtagttcaatctataatcaacaaatcctctaacaatccaattctggttg

SEQ ID NO: 3630 - DNA, 421 bp, Canis familiaris
  misc_feature (147)..(147): n comprises a, c, g, or t, or includes no nucleotide
ctaacaggtgttggtgaagaggggagcagctggagcctcacgcactggctggtgggatgtaaactggcgtaacctctcttggaaaacagtctggcagttcctcaaaatgttaaacacagggtaattccacttctaggtgtgtacctnagagacgggaagactctgtcacacgaagattgtgtgtgtgtgtgtgtgtgtgtgtgtgtgtgtgtatagcagcatcatcttacccgctgcgtgtgatgccctggtttcagatacggactggctgttgggacacgctgtagaggttttctggcatgttgccctcctgttgggtctgttttgtggtctcccgtaggcctccatcattgtaactctcagaaaacagcctaagtgtgggctgtgttttaagaacacgaattttcagagagtcttttgt

SEQ ID NO: 3631 - DNA, 553 bp, Canis familiaris
accttcactaccttacttagcaatttgcacgcatgtttggcatagagtaggtactcaaggatgttgtacagattggccactactaaagctcacaaagctgaactaaatttgttttctctgaaatatccctttttttaaaaaaaaattatttttccgtgagaaacacacacacacacacacacacacacacacacacacacacacacacacacrggcagagacacrggcagagggagaagcrggctccatgcagggagcctgacgcgggactcgatcctcccactgccactctgcggggccgggcaggtgcagaggcagaggcacgcctgtcgggatcagggccgccagggtgcgtggctgctccagagagctgcctgtgtgcccaactgtgtcacctgtttactctggcttgtttgcaagaccagaagagctggacttcaggctgctccgtgcaggtagcgttttgctgcctccggggtgatgttcagggcagaagagctccctgacccgtttctccaggctgttcacsgcctgggcctcctactgggcctcc

SEQ ID NO: 3632 - DNA, 386 bp, Canis familiaris
  misc_feature (240)..(240): n comprises a, c, g, or t, or includes no nucleotide
  misc_feature (274)..(274): n comprises a, c, g, or t, or includes no nucleotide
  misc_feature (339)..(339): n comprises a, c, g, or t, or includes no nucleotide
  misc_feature (343)..(343): n comprises a, c, g, or t, or includes no nucleotide
  misc_feature (364)..(364): n comprises a, c, g, or t, or includes no nucleotide
ttgtgtcctccccaaattcacatgtcgaagtcctaacccccagttccttagaaggtgaccttatttggaaagagacaatcaggttaacatgagcatcagggtgagccctaatccagcatgactggtgttcttataaaaaggggaagtttggacacacacacacacacacacacacacacacacacacacaaggtaaacatcatgtgaacttaaaggcagagattgggtgatatgtctgcnggctaagcaacaccaaagattgccagcaaaccancagaatgtcgaggaggggcatggaacagggtctctctcatagtctccaggaagaaccaaccctgntganatcttgatctcagacttgtancctctagaacgtcgagacaaca

SEQ ID NO: 3633 - DNA, 773 bp, Canis familiaris
  misc_feature (700)..(700): n comprises a, c, g, or t, or includes no nucleotide
tcttgagactgaacatgcaggtgtcrgcamcaaagctgggcagaaggcaggctagcgaacatgagaggaaacacccaaaaaacactgttagtagattgcttgctgccccttcctgcatttattaaaagacacatgtacacacctactatgggccactccagcagaagacttgcccaagtatctgtgcctgttcttacatcttcatgggggcaactcttttctwaacagataactgcaatagagtgcccatcacccagttaccccatccccccatccaccactccttctgcagccctttgtttctttcagagttaggagtctctcgtggtttgtctctctaatttttcccactcagttcccctcctttcccttataacccctttcactatttcttatattccatgtatgagtgaaaccatatgattattgtccttctctgatggacttatttcattcagcataataccctccagttccatccatgtcgaatcaaagggtgggtatttgtcttttctaatggctgagtaatattccattgtgtctatgtgtatacacacacacacacacacacacacaccccacatccttatccattcatctgtcgaggacattgtggctccttccacagtttggctattgtggacattgctgctatgaccaccgggtgcagtgtcccagcatttcactacatcagtatctntggagtaaatacccaggagtgcaaatgctgggtccgtagggtaccaatcacagttttccagagtggctgtaca

SEQ ID NO: 3634 - DNA, 357 bp, Canis familiaris
  misc_feature (25)..(25): n comprises a, c, g, or t, or includes no nucleotide
  misc_feature (279)..(279): n comprises a, c, g, or t, or includes no nucleotide
  misc_feature (345)..(345): n comprises a, c, g, or t, or includes no nucleotide
aattgttgtgttctaaactcaaggnttaaagtcttaaggaataaacagcagcacgaatgagaacattagtaataaacatacttgagggatggaaaaatcatggaaatcaaggcatggcaaatcagaaaaatggtcaaaagggtgtcagaaaaaggttattgtaaagtctgagtgttgttagttttgaggaaatgggaaaatgtgaactcatgcaaccacagggccgtgtgtgtgtgtgtgtgtgtgtgtgtgtgtgtatttttaaaggcactcattgtngggatttgactttatacaattgccagagacagttacatagtctatttgatgctattgtctcttgtntctgtgtctcat

SEQ ID NO: 3635 - DNA, 450 bp, Canis familiaris
  misc_feature (78)..(78): n comprises a, c, g, or t, or includes no nucleotide
  misc_feature (335)..(335): n comprises a, c, g, or t, or includes no nucleotide
aaatgttttctgtaaagaatcagataatatattttagactctgcaaacatatggtctctgtcacaactactaaattgnttttgaagtgaaaaggcagccatagataaaatgtaaacaaatggctatggctgtttacaataaaactttatttacaaaaatagatgataggctgaatttggcctgcaagtcagagctgactggtccctgatataaaccatacgtgtggcatgtgcatgcgagtctatatttgtgtgtgtgtgtgtgtgtctgtgtgtgtgtatgtgagggagagagagacagaaagacacagagaaagagagagagagaggaattanatgaattaatccttagaataaaggagtcagggattgagttcaagtggtctcattgtaaatccagtgttaattttatttcaccctactgtcttctagtcaacaactcttcaaatta

SEQ ID NO: 3636 - DNA, 281 bp, Canis familiaris
  misc_feature (48)..(48): n comprises a, c, g, or t, or includes no nucleotide
  misc_feature (118)..(118): n comprises a, c, g, or t, or includes no nucleotide
  misc_feature (140)..(140): n comprises a, c, g, or t, or includes no nucleotide
  misc_feature (163)..(163): n comprises a, c, g, or t, or includes no nucleotide
  misc_feature (191)..(191): n comprises a, c, g, or t, or includes no nucleotide
  misc_feature (221)..(221): n comprises a, c, g, or t, or includes no nucleotide
  misc_feature (225)..(225): n comprises a, c, g, or t, or includes no nucleotide
  misc_feature (230)..(230): n comprises a, c, g, or t, or includes no nucleotide
  misc_feature (235)..(235): n comprises a, c, g, or t, or includes no nucleotide
  misc_feature (244)..(244): n comprises a, c, g, or t, or includes no nucleotide
  misc_feature (250)..(250): n comprises a, c, g, or t, or includes no nucleotide
  misc_feature (259)..(259): n comprises a, c, g, or t, or includes no nucleotide
taataatgaatctgtgtgtgtgcatatgaatgcatatgcttacctganagaaaaatgtgcataaacacacacacacacacacacacacacacacacacacacacatcttactctacancatagaacattttcttgttctngaacatacaaaatatgaccacanatttatttattcccacagtagccctctnaaatgagtttaattatcccatgttatcttnatanataanaaaantgaggctcnggggcnttatatttnaataagtcacagaacaaagtat

SEQ ID NO: 3637 - DNA, 360 bp, Canis familiaris
  misc_feature (139)..(139): n comprises a, c, g, or t, or includes no nucleotide
gtataaaaagcattgaaataaaaccacctgcccttttctttcaaatgccctaagaatgtgccacaactctgctttgatcctatgttccagtgtttcactgctattaccagcagaagagaatttttcccacacgtggatntctaacctaaatccttcatgctgcattttgcattcattccttttgttcaaaattactgtttcttcttacacctgctccccattagatgactattacgtacttctgggtaatcacattctagaggggagaaaggcataaactactgcagctgagggtagtagcgtatacttccacacagatgtgcgagtcatcaacaaattgtggaatctttctgagtagca

SEQ ID NO: 3638 - DNA, 220 bp, Canis familiaris
agttagatacagagttaacactggacctacacacacacacacacacacacacacacgcacgatttatgggctttagttagaatgaaatatgaatttataagctagcggttgccttctgtttaaagcactactttgttcctgacacttggatacaattccgaatgcgtctgttatctaaggcaggctatggttcatgctgcatgaaaccggtctaactact

SEQ ID NO: 3639 - DNA, 292 bp, Canis familiaris
  misc_feature (172)..(172): n comprises a, c, g, or t, or includes no nucleotide
caaatgtgattctgataaatgcccaggaagaaaagagggcagctgaagagaaatcctcagtttcttagagaatacttaagtaatcctaaacacacacacacacacacacacacacatacacatacaaaatcctaaacagaatgttggaagaaatatgtaccataaaggccantctggtgaggtctcaagcagaaatgaggaagaagttattggacactggatgagaggcgatccttgttataaattgaaaatgaacttggctgaattgtgttcatgttctgatgctgtgtgg

SEQ ID NO: 3640 - DNA, 275 bp, Canis familiaris
  misc_feature (26)..(26): n comprises a, c, g, or t, or includes no nucleotide
  misc_feature (187)..(187): n comprises a, c, g, or t, or includes no nucleotide
  misc_feature (203)..(203): n comprises a, c, g, or t, or includes no nucleotide
  misc_feature (209)..(209): n comprises a, c, g, or t, or includes no nucleotide
  misc_feature (213)..(213): n comprises a, c, g, or t, or includes no nucleotide
  misc_feature (239)..(239): n comprises a, c, g, or t, or includes no nucleotide
  misc_feature (244)..(244): n comprises a, c, g, or t, or includes no nucleotide
  misc_feature (260)..(260): n comprises a, c, g, or t, or includes no nucleotide
agggtcagaattaagttacactgtangacagccagttggtgctgcaaaattgcctcacagaaaaaatccacacacctgcgccagaagtgtcatgctgcagcactgtgagagttaaggacacacacacacacacacacacacacacacacacaggggaagactgagttcttcccaaaacactatgtancttgttttctctgtgnggtgcnacantctgtctccaagtgccctatatcagngcctncacttcaagaagccancctgggatccctggg

SEQ ID NO: 3641 - DNA, 784 bp, Canis familiaris
  misc_feature (609)..(609): n comprises a, c, g, or t, or includes no nucleotide
  misc_feature (637)..(637): n comprises a, c, g, or t, or includes no nucleotide
  misc_feature (696)..(696): n comprises a, c, g, or t, or includes no nucleotide
gagactcgtgggtttaagatgacttgtcagtcggatccacacccttggggtaccagcagttcagcatgtgtcaggacaatcctagataccagaacatatccattacctttcagcaactatagaatactggttaagtgcatggactttggcattagctagaccagatttaaacttcctttttgcaatttaccagcagttaagttaccttggtcaaattgtgtaactgctctaaatttctgttttctcattagcatatctaggawaataatgctatcaataatgtctactcatagagccactgtgaattaaaggaggtaatgtattaatgtcttaggcacagggcctggcacataggaagtcttcagtcaagaatgactattatatttatctggctatdwgccacaaatacacacacacacacacacacacacacacacacatacacatgcaggcttccattatctttaktggtttaataacctaaaatcattttctcactcattattataatagcaatcattattgcaattactgtttgttcatgacacctcacattattataattattatttttatcctactctcacaaatgtcatcaataactaccanccattagttgtcattaataattactaantccatgatatcccaccccactgttctaaataaatgagtttgttttattagtactaaggnccagccataagtgaaggatttgtctccattaaaccaaaaaaatcctcagaatgttcaaggtgagtttgttttctgctctgaatttagc

SEQ ID NO: 3642 - DNA, 430 bp, Canis familiaris
  misc_feature (17)..(17): n comprises a, c, g, or t, or includes no nucleotide
  misc_feature (219)..(219): n comprises a, c, g, or t, or includes no nucleotide
  misc_feature (371)..(371): n comprises a, c, g, or t, or includes no nucleotide
accaagggaatggaatntgtagggaagtgtattcccccctgctttgttgtgctgtggatgctcaagtgttgtgcattacacgtgggaaacttcctttcatggcaatagcacatgactcaagtaaaacgcaggactccgataataggactcaggaaaatttggaatttagtgttcaatagcaagggtcccccatattgctcaacctcatcgatttatgtnattattttattttatttattttattttattttattttattttattttattttattattttataagattttatttacttatctgacagagagatagagccagagagcacaagctgggggagcaactgccaaagaaggagaagcaggctccgcncttgagcaggggagccccaatggacgagctcgatcccaggaccccaagaccactatcta

SEQ ID NO: 3643 - DNA, 218 bp, Canis familiaris
  misc_feature (89)..(89): n comprises a, c, g, or t, or includes no nucleotide
  misc_feature (187)..(187): n comprises a, c, g, or t, or includes no nucleotide
  misc_feature (196)..(196): n comprises a, c, g, or t, or includes no nucleotide
tgttgcataaatcacctttgtagcccagttcccacaaaaacatcttaagtgttcaaaactttaagtgtccatgtaacactcccccttgntcttttgtaccttactatctaggaatagacacacacacacacacacacacacacacacaagagataagacacgtcctaaagaggccagaacagaggangtcaattgncggtagaacaggcaggaggtgt

SEQ ID NO: 3644 - DNA, 360 bp, Canis familiaris
  misc_feature (29)..(29): n comprises a, c, g, or t, or includes no nucleotide
  misc_feature (237)..(237): n comprises a, c, g, or t, or includes no nucleotide
  misc_feature (295)..(295): n comprises a, c, g, or t, or includes no nucleotide
cactgcacacagttaccaccccacatagntcccgtgtgcagccacacacacaggtcctgtacacatacacacacacacacacacacacagtcacacacacgtagttgcccctcacaggtccttgtgtgcacacagagatagacacaagccagatgtgcaaatatgtccatacctctccttggataggccataccacacacacagacagactcacacagagactcatcacctgcagangcttttgccaagacctcacagaaactctccctccaacacgtgtaacacagaccctccnggggcctaacaaacacagcttgaagacacagacatacagacaccttagcttcaattccttgattt

SEQ ID NO: 3645 - DNA, 346 bp, Canis familiaris
  misc_feature (40)..(40): n comprises a, c, g, or t, or includes no nucleotide
  misc_feature (58)..(58): n comprises a, c, g, or t, or includes no nucleotide
  misc_feature (89)..(89): n comprises a, c, g, or t, or includes no nucleotide
  misc_feature (94)..(94): n comprises a, c, g, or t, or includes no nucleotide
  misc_feature (205)..(205): n comprises a, c, g, or t, or includes no nucleotide
  misc_feature (225)..(225): n comprises a, c, g, or t, or includes no nucleotide
  misc_feature (263)..(263): n comprises a, c, g, or t, or includes no nucleotide
  misc_feature (270)..(270): n comprises a, c, g, or t, or includes no nucleotide
atttttaaaaatcaagtatagctgatattcttatggaaanaattggaatcccttgatngctcttaataatttaaatgaaattatgtgtngggtnaagacagtctcataggtagttgtatgtatctatgtgtgtatgtccatgatactgtctctgaggggtgtgtgtgtgtgtgtgtgtgtgtgtatggagaggacagagcatgangaaaaaccacgctcctaccnacttctcctcctatgtgtggtatcagttcaacactgtnaaatgtnaacacaaacaaaaaaagtagcaagaaatactccgtactggttgacaaaacacttgggaaaagatgagggcatacat

SEQ ID NO: 3646 - DNA, 200 bp, Canis familiaris
  misc_feature (103)..(103): n comprises a, c, g, or t, or includes no nucleotide
  misc_feature (131)..(131): n comprises a, c, g, or t, or includes no nucleotide
  misc_feature (135)..(135): n comprises a, c, g, or t, or includes no nucleotide
  misc_feature (137)..(137): n comprises a, c, g, or t, or includes no nucleotide
  misc_feature (169)..(169): n comprises a, c, g, or t, or includes no nucleotide
  misc_feature (178)..(178): n comprises a, c, g, or t, or includes no nucleotide
  misc_feature (189)..(189): n comprises a, c, g, or t, or includes no nucleotide
gggatggggagtgagcctgggagacacttgacgagggattgtgtgtgtgtgtgtgtgtgtgtgtgtgtgtgtgtgtgctggggagtgtgtgtgagggacgcanacggatggaggaggatggtggtttgctngatncngggtcactagataacatgtgccttggctgtcnctccacagngaccctgggcngggcgggcaag

SEQ ID NO: 3647 - DNA, 400 bp, Canis familiaris
aagacacagaaggaggtatgaaagtctgcaacaagcaaatattccgctggatataagtctctcagtgatgtttctctgctgattttctaagcaaacaggctagctgaagcctactgaacaacctagccctggacttacatacattgcttagaacttcactttcaaacatatagaatcacttctttctttaggacttagagctgtagaaatgcacatataacatataatgggcatattatataaataaattatgtgtgtgtgtgtgtgtgtgtgtgagaagcattaatggtgacaaacctagtgctcaacaaatatgtattgggcatttgctccaagccaggcactatgttaggtgttggagataaagctatgggataagtcaaattcagcttagagtgta

SEQ ID NO: 3648 - DNA, 787 bp, Canis familiaris
  misc_feature (166)..(166): n comprises a, c, g, or t, or includes no nucleotide
  misc_feature (313)..(313): n comprises a, c, g, or t, or includes no nucleotide
  misc_feature (429)..(429): n comprises a, c, g, or t, or includes no nucleotide
  misc_feature (726)..(726): n comprises a, c, g, or t, or includes no nucleotide
  misc_feature (762)..(762): n comprises a, c, g, or t, or includes no nucleotide
gtgctttcttctcagaataactatatacaaagtaagtcatgcacacaatttccatggacagtggaacataaaactttcaaaacctattagtggattctgtaaacagtcagacaccagagacccatactactaatttctcttcaaataagatttatttgcatatatntgtatgtgcttgtagcatttactaaacacagggtcaggaaggaaagacaaaaaagcagaaccctcagaataagtaaggaacaatatcaaaggcaaatgggttactgtaggtgctactagggtggtgatatctccaccaacgaaagancattgagcaagttctttgaggaatccaagaagtgtgacttcatytacaacttgatgcaacatagcatccaaagtgcwttggctgggtgttccagcacaattttgggataaatgganatattacttaatttgcttgtttctatactcacaggctaggggtgtgtctgtgtgtgtgtgtgtgtgtgtgccttatttcaaagagaaactattacagccaaacagaactgttccaattggaaaagttacacctacacagtggcttgtacttggagacctcagtgtgaactcatgtttaggtttatatttataggcatacagatggagagatgcagagataatggcatgtaatattaatgtattattaataataatacatatgtgtgtgcacacttgtgtgtatgtccatgcctgttncgtatgttcattgagaaagcgtggaatcactgacancccagtagcaacaagcatactttac

SEQ ID NO: 3649 - DNA, 410 bp, Canis familiaris
cccttctcttccctatactaatctgttttgtctctgaaattccacatgagttaaatcatatggtttttgtctttctctgacttgtttcacttagaataataccctttagtttcatccacatctttgcaaatggcaagatttcattccttttgatggctgagtgacattctatttcatacacgcagacacacacacacacacacatacacacacgtcactttttctttatccattcatccattggtggacatctgggctctttccatatatcaccaaatgtagagattgctgctataaacattgaagtgcatgtattcctttgaatcattatgcttgtatcctttggataactacccagtagtgcaatttctggttcataggccagttctatttttaacattttgaagggc

SEQ ID NO: 3650 - DNA, 745 bp, Canis familiaris
gcaggctgggggcatcaggagcctgagccatcactctctctttatcaggaatgctgaatctcacaggctggccacggtcctctcaggattcctgggctgactcaggacctaaccattccctgctcacccagggccgggaggaaggttcgctcagtgccagcagcagctgttgacgcagccaggaaagcacgtccgcccctacagggcagttccactcttaataagggaaattcactttacacacactttaggggaaatgtcctgggatggagccagdgccaggtgggcactgagcttattaaaggcatgattgttagcaagaaaaacatttgcaaatatsttatgggktacttttgtatattgccatacactgtgggtgtatgcattttatccaccctccacacacacacacacacacacacatacatacagacacgcaaacctccctgaatccctttcgatyacaagattgcctttacaattgttccacaacataccttatagttaacccgtctgtagagtggatatgctgtgcctcacacctcttcatgccagggtactgtttctcactcttgttttttccctcctgccaggtgcagctcatccactataatcatgagttgtatacaaatgtcacagaagctgcaaagagccctaatggattggtggtagtttctatatttataaaagtaagtgtcttgcattcttccattattttcytgctgttcccagcccagtcagaata

SEQ ID NO: 3651 - DNA, 390 bp, Canis familiaris
  misc_feature (166)..(166): n comprises a, c, g, or t, or includes no nucleotide
aggggaaggtaaggctgcattccagggcttctactggaaaagctactcactggaagcacagtcaaatctcttttcaaagaagagcgtagggttgcgtgtgtgtgtgtgtgtgtgtgtgtgtctaaaacatcggaatagcagtgccattagggacattttaaatgtntgacttttatcttcctacaggggcatgcataatgacttcaggccaagtactaactaggtctggctcaggggaccatgaccttcttttcccaaaccaaggacctctctcggctgcggcactggagacattaaggcctgtatccctctgagcccgctctggaatctctcccttgtgcccttgcctgtctatagcaggttgttattgtttggctccacatgagcttt

SEQ ID NO: 3652 - DNA, 217 bp, Canis familiaris
  misc_feature (119)..(119): n comprises a, c, g, or t, or includes no nucleotide
  misc_feature (147)..(147): n comprises a, c, g, or t, or includes no nucleotide
gacacttaactgagctgcccaggcgctcctcaggctgatttttgagaagaaatacacacttcaatgtcaatttcccattccagctcttctctctctctctctctctctcctagggaaantgtgaatatgggtgtgcttaggaagctnggggaagagggaaagttgaaatctcagaaaaagtcttgaaaagtcagaaacacagacaggggaggcctgt

SEQ ID NO: 3653 - DNA, 855 bp, Canis familiaris
ctttactacctacaatccagaatgtgttggttttctttggtaaattggatgtgagtatacttttctcagcatgtgctcatgagagccctttctgggattgttcctggactctgagcagaaagactatgtctgtggcttgaggtgagatgggcatgaggttaaaatctcaggaggatgcctcagctttaggtgcagtctcccagctctgggctgccgtggtctttgagtgactggttatgctcctgcattcaaacaaagacagatgggtgaagaaattttaggtttattaatcagctaactatatttactatttgtgaggccttccttaacattgtcccacccccaattatggttgttgttttttttaattagctgttatcttatagggtatgcacttgttttggctttaaatgcatgtatgtgtgtgtgtgtatgtgtgtgtgtgcatgtgtgtgtatgtttgggtgtctagagtgtgtccctcattgagctaattgggttttcacccttggagtaaatattaaaagcaaatttttaagttaggccagatggataccccctgggaggagtgtcacatggaaagttctgacgatggcaacatgtcataattggatgaataaggatagggaaaattggagcaatatctcatttctgaattttaggtaaaacatatgatgttgaaaaaaagataatgacttttagttcattcattgagtttagaatatatttgtaagtaaagcatggtgaaatattcacttacaaatccttaggtagcaagttcttggtattgttggaaatttaagaagaacctacaatggtattcttggtttactcccgctttttggagagggataa

SEQ ID NO: 3654 - DNA, 355 bp, Canis familiaris
  misc_feature (27)..(28): n comprises a, c, g, or t, or includes no nucleotide
  misc_feature (52)..(52): n comprises a, c, g, or t, or includes no nucleotide
  misc_feature (61)..(61): n comprises a, c, g, or t, or includes no nucleotide
  misc_feature (70)..(70): n comprises a, c, g, or t, or includes no nucleotide
  misc_feature (74)..(74): n comprises a, c, g, or t, or includes no nucleotide
  misc_feature (197)..(197): n comprises a, c, g, or t, or includes no nucleotide
  misc_feature (231)..(231): n comprises a, c, g, or t, or includes no nucleotide
  misc_feature (236)..(236): n comprises a, c, g, or t, or includes no nucleotide
  misc_feature (269)..(269): n comprises a, c, g, or t, or includes no nucleotide
agcagtactcccagaggtcaggccgannaatggacttgaggccgggtatctntcttccctngctgctttngctnctgtcctgataacatccagaatgttactggaagctaaatttatttctgctatttgtgtcagcttcacacacacacacacacacacaaattatgttttatgtttggggagctattgcatttgcnctagagcatctggcttgacaatctacatggaatnagaanatcctaacaactttttttaactttttgtatttntgtcacaacaaaagttaactcttgggggagggttgttttgttttggggtggggaactgagggagaaagaatcttggcaggctctgc

SEQ ID NO: 3655 - DNA, 677 bp, Canis familiaris
  misc_feature (309)..(309): n comprises a, c, g, or t, or includes no nucleotide
  misc_feature (336)..(336): n comprises a, c, g, or t, or includes no nucleotide
  misc_feature (378)..(378): n comprises a, c, g, or t, or includes no nucleotide
  misc_feature (380)..(380): n comprises a, c, g, or t, or includes no nucleotide
  misc_feature (468)..(468): n comprises a, c, g, or t, or includes no nucleotide
gattttagaggaacacttctacatcagtacatgaaaaggtggttagacaggagggttggacaaagccagaagctgatgatggaagcagagttgtacaaagtctggagcacaggttctcagctcttgatgtacaatagttatctgtaaagtcttttaaaaatgtcaatggcagggcaccaaattccacagaatcagaattttgaggatggggctcaagtttctgtatttttgccacaaagcagattaaggattttttttttctggtarattgctcttccaagacaggaagtacagggtctttaggggarnaaggactatagataactttcactggtnggaatcttctcttgattttcataaacaataatacacacatancncacacacacacacacacacattctctatgatgtcatttgtctactatttcccccttttctctgtcattaaacctatgatactgtatcntaaataaattaattcattcctaatttgtaaatggcagaaacttgatttgctacccttccagagatatttaatttttaacagaaatgatgttcacatgatgaaatttccagcatcaaaatagtttgtctatttcctagacccacacatcacatttgcatgggtatttatatgtaggtaacaatggttgtgaggggccatttaatgaattg

SEQ ID NO: 3656 - DNA, 440 bp, Canis familiaris
caatgtgagctgcctccccacccccaccccctttctctcttgtgtgtttcttaatttggattttattcctagtactttattcttggtgttgggctttgtcctgcaagggagctttggcagttggctttgggaattcatggtaattcccaattcagactgctacagtctctgcagaacttactgcaagggtcctcttattcacttgctactagcatatatgtaaaacccaggtaatcctagctactgttctcacactggccctctgaaatgtccagtgacttcctcttgactactttaggattcttaggactgtaggaatcctagttgcttacttaggcttcctctggatcatctgcttttctacgtttgctatcttgccttgtatggtggggatttaaggagatagaaaaactaagctgccattgccaccaaacatccct

SEQ ID NO: 3657 - DNA, 398 bp, Canis familiaris
  misc_feature (25)..(25): n comprises a, c, g, or t, or includes no nucleotide
  misc_feature (28)..(28): n comprises a, c, g, or t, or includes no nucleotide
  misc_feature (38)..(38): n comprises a, c, g, or t, or includes no nucleotide
  misc_feature (80)..(80): n comprises a, c, g, or t, or includes no nucleotide
  misc_feature (174)..(174): n comprises a, c, g, or t, or includes no nucleotide
tcaacacacagaggattttgtaacntgngtgtgtgtgngtgtgtgtgtgtgtgtgtgtgatagaggagtatgtgaaaatntccttgagttatgacggactatttagcactctggcccatggactcttaggaaattggctgagttgtttcataaaatagtggcttttctcttctntcagtcctccaaattttgccttacattcttttcaaagaggagtaagagtggcaattctctattgaggaccacaaacaaagatttctcaccattatcatgattttccttttcaaaatcaaaaatcctatttagcctaattcacatctgggatatatttttgcatttttgaaaaactcttcagggtgcctgggtgtcctgattgagtgtctgactcttggttttgg

SEQ ID NO: 3658 - DNA, 411 bp, Canis familiaris
  misc_feature (96)..(96): n comprises a, c, g, or t, or includes no nucleotide
  misc_feature (161)..(161): n comprises a, c, g, or t, or includes no nucleotide
  misc_feature (225)..(225): n comprises a, c, g, or t, or includes no nucleotide
ggataaataagaaaataaataagtacataggctctggctttggtaaagaccacaaaccactgctctgattcctctcctcaatgacctgtgaggtangtactattagaatacctattgtgcatatgaggaaactgtgtctcagaagtgaagtagtctgcccnaagtcacacagctagtgagtgatgagccatgactagaatccacatatgtctgactccaaagtgngctctgttaaccactatcctatacataatgtccaaatggctagctacataagaaaacaaacatccggtgaggtgtatatatgtaagaagtagaacatgccatcctagaagccacatatgagatggtacttactgctactaggtccttgcaatgggtctgagaaacactcctttccattatcctttc

SEQ ID NO: 3659 - DNA, 230 bp, Canis familiaris
  misc_feature (7)..(8): n comprises a, c, g, or t, or includes no nucleotide
  misc_feature (71)..(71): n comprises a, c, g, or t, or includes no nucleotide
ctcaatnncacacacacacacacacacacacacacacacatacacacacacacacacacagtaaaaatatntcatagtttcccttgttcagaattagggccttgcagggaaatgttttttttttccccagaggtttgtctactgcattcagagaaacccagtttgtggatgcattgctgcttatatttgtaaacaccaaatatataaagttgggtatgaatttaatcaat

SEQ ID NO: 3660 - DNA, 418 bp, Canis familiaris
  misc_feature (28)..(28): n comprises a, c, g, or t, or includes no nucleotide
  misc_feature (169)..(169): n comprises a, c, g, or t, or includes no nucleotide
  misc_feature (221)..(221): n comprises a, c, g, or t, or includes no nucleotide
  misc_feature (262)..(262): n comprises a, c, g, or t, or includes no nucleotide
  misc_feature (322)..(322): n comprises a, c, g, or t, or includes no nucleotide
  misc_feature (401)..(401): n comprises a, c, g, or t, or includes no nucleotide
  misc_feature (404)..(404): n comprises a, c, g, or t, or includes no nucleotide
cactggattttgcaattagtggatactnctgaccttaaagaatacagatgtagaggagtaggcatgcaaaactcagtgggtggaagatttaatgttaagagggctagttaatggggtaaacggactgctcttgtcagagaactgtgaggcaaaaaagagttagggtgangtcattggaggcttttagttttgcaccttgtcagatgtgagtgagtgaagtntatctacctcctgagaagaaatagatgaagaggaaaatgtngaagacataaaaggaaaactgagaaaagtatgtgggtagtggtggttcatatctcaggtnaatgtagtgtgtgtgtgtgtgtgtgtgtgtgtgtgtgtgtcaccaagggaaagaagataaggatgggaaaaaagggcgngtntctcatagctagga

SEQ ID NO: 3661 - DNA, 320 bp, Canis familiaris
  misc_feature (21)..(22): n comprises a, c, g, or t, or includes no nucleotide
  misc_feature (95)..(95): n comprises a, c, g, or t, or includes no nucleotide
  misc_feature (99)..(99): n comprises a, c, g, or t, or includes no nucleotide
  misc_feature (172)..(172): n comprises a, c, g, or t, or includes no nucleotide
acaatcaccctgtgttaacgnnagagactgtccttattcttagaaaacacacatgtgaagtattacacacacacacacacacacacacaagtganccancgttaaaccaaacagaataaaatgagaatgactggttaatctggttaaagggtaatgtgtttctgagttcacncggactggtttgatgggggttaatcaatttggttgtgattttaaattctatattcctggaataccctttctaattctttccactaggtaatcctactcgttctttaaaaacaaaaacagttccaatctcacctccctaaaggccacac

SEQ ID NO: 3662 - DNA, 325 bp, Canis familiaris
  misc_feature (68)..(68): n comprises a, c, g, or t, or includes no nucleotide
  misc_feature (70)..(70): n comprises a, c, g, or t, or includes no nucleotide
  misc_feature (72)..(72): n comprises a, c, g, or t, or includes no nucleotide
  misc_feature (127)..(127): n comprises a, c, g, or t, or includes no nucleotide
  misc_feature (144)..(145): n comprises a, c, g, or t, or includes no nucleotide
  misc_feature (166)..(168): n comprises a, c, g, or t, or includes no nucleotide
  misc_feature (194)..(194): n comprises a, c, g, or t, or includes no nucleotide
  misc_feature (203)..(203): n comprises a, c, g, or t, or includes no nucleotide
  misc_feature (209)..(210): n comprises a, c, g, or t, or includes no nucleotide
  misc_feature (216)..(216): n comprises a, c, g, or t, or includes no nucleotide
  misc_feature (218)..(218): n comprises a, c, g, or t, or includes no nucleotide
  misc_feature (225)..(225): n comprises a, c, g, or t, or includes no nucleotide
  misc_feature (235)..(235): n comprises a, c, g, or t, or includes no nucleotide
tctacccactgagccagccaggcatacctgtgtgtgtgtgtgtgtgtgtgtgtgtgtgtgtgtgtgantnanagggaaaaaactgaggaatatttatcaaactattagcagtggtttctctggggcntgggattgtgggatatnntctcgttctctcagtcatatnnntctgatatcttatgttaaaaagcaanttaacaatngcatanncatggntnttgaaanagcaaggaanatattaaaaaataatagaaaaggcacacaaaagagttccatgttctatatatgaatactgaatctgaatactgaactgagtactctgtgt

SEQ ID NO: 3663 - DNA, 320 bp, Canis familiaris
acactggaagtatttgaggagctcttgtcactacaattaaaatttttcgttttaaatccagacgtgggctcagtggcctcgcaggtataactcgggtggtaggaagcaaggtcttctggctctcagctcactaaatgtctcctgaccctccacagactcattccttgggtattgattttagagtcgcaaaagattttaaagacggaattttataagctgccaaaatagtagagttccttgttttactttatttccctcctactcatgactcccacggcttcactctatttcacaccacctccatggggagctacaagcat

SEQ ID NO: 3664 - DNA, 402 bp, Canis familiaris
  misc_feature (47)..(47): n comprises a, c, g, or t, or includes no nucleotide
  misc_feature (61)..(61): n comprises a, c, g, or t, or includes no nucleotide
  misc_feature (67)..(67): n comprises a, c, g, or t, or includes no nucleotide
  misc_feature (171)..(171): n comprises a, c, g, or t, or includes no nucleotide
gcatcacacacacacacacacacacactcttttgtttgttagttgtngcttcttttgtttnctttanccacatttaggtataaaccaaagtcctggtaagtattcatcagcatttctagaaaaatgcatctggaaatgtccagcgtaggagggcctttcatatggttggtngcctcctaccatcggggggactaggggttcaggaatcatcgtgccgggcccaataaggggcagcgcctggcctggtgctcagagttcctacctcctctccaacacatctttattaagaggctgtcaggtcccaggcactgggagtttggattaaaaaggaaccagccttccaagggtttatagcccagcaaggaggactttttcaaaggcagggatgtgcctaaaacattt

SEQ ID NO: 3665 - DNA, 383 bp, Canis familiaris
  misc_feature (84)..(84): n comprises a, c, g, or t, or includes no nucleotide
  misc_feature (185)..(185): n comprises a, c, g, or t, or includes no nucleotide
  misc_feature (223)..(223): n comprises a, c, g, or t, or includes no nucleotide
  misc_feature (226)..(226): n comprises a, c, g, or t, or includes no nucleotide
  misc_feature (231)..(231): n comprises a, c, g, or t, or includes no nucleotide
tccctgggtggctcagtagtttagcacctgccttcggcccagggcgtgattctggaatcccaggatcgagtcccacgtcgggcnccctgcgtggagcctgtttctccctctgcctgtgtctctgcctctgtgtatgtgtgtgtgtgtgtgtgtgtgtgtgtgtgtctcatgaataaataaataanatcttaaaaaaataacagtaatcaagagaagacagcanatngtgtntccagttacgaaatgaataagttatgggaataaaagctatagtataaggaaagtagtcagcgatattgtaatagcgatgcactgggacggatggtatgtttacttctggttgagccatagcgtaatgtataaacttgttgcatcactatgtt

SEQ ID NO: 3666 - DNA, 782 bp, Canis familiaris
  misc_feature (351)..(351): n comprises a, c, g, or t, or includes no nucleotide
caaaataatgaaattaaaattttcaacaacaaaaattcatatgtaaatggataaatgtatcattattacaataattaccactcagatattaatcacatttttaaaaatgaatattaagtaatattgcacaattcgtctgtgggaaccttaaacactccaatgaagacagcaatgaaaaaaaaataaacaatcggttctacacagaaaataataaaattatgtatcatttttcaaattatatattgttggtgaaaaatgtttagaaaagcaggtacwctttcttctttaagaaaatatttwgtgatcctggagtcctgggatcgagtcccacatcaagctccctggcatggnagcctgcttctccctctgcctctctttctgtgtgtgtgatgtgtgtgtgtgtgtgwgtgtgtgtgtgtctcatskaataaataaataaaaccttttaaaaagataataaataaatttatttatttggggggtaggggctgaagtagaaggagagagagagtcttaagtagactccatgctgagtgcagagcccaacacaggtttaaatcccaagaccatgagatcacaacctaagtcaaaaccaaaagtcawacactcaactgactgtgctacccaggcaccccaaaaagcaggcatattttaaaaagtctttcaaattttagcaatttgtcagatgtggcagataacaaagctgctatttccgaaagattatttgaagttttacacgtgcttcaaattaataatgttggtgttaatgatgggtttttcaa

SEQ ID NO: 3667 - DNA, 367 bp, Canis familiaris
  misc_feature (356)..(356): n comprises a, c, g, or t, or includes no nucleotide
gatgcttaaccaactgagccacccaagttcccttagaggttgaattcttaagtcacaaggtttgcaattcaagatttttcattcatcaagctgaattgcccctcagaaatgctgtaccagtttacactcccataagcagggtgtaagggtgctcccttacacattcactcactcatagcccttcccactggctactattttgatagtttagggttttttttaaaagacaactattgtgtgtgtttatgtctcatgtgtgtttatctcgtgtgtgtgtgtgtgtgtgtgtgcaatgggatatgtctggattctacagtgaggttaaccccttcaaaaaggaggatttgccattaggnactagaatgtc

SEQ ID NO: 3668 - DNA, 410 bp, Canis familiaris
cactatgaaaagaagtttacagaaatgttcaaatgtatacgataaatgaaaaagtataacaaaggaaaaatataagtacccaaaactagcacaaccattactactactcatcattcttcacatattgtacccaccacattgtagcaatcccaaaaatggcctacaattttagtatttttgcttcatttcaatattctcaaatgctaaaaaatatatatacacacataaaagatatttatatatgcacacacacacatataagatacacacacacacacacacacactcaaatgctacattctaaatgaagagagtcttagagttggataaaaacagatgtagaaatattcccagaaatcagagatgctctatcactgaatatgcttgagaagaaaccactggttattttc

SEQ ID NO: 3669 - DNA, 356 bp, Canis familiaris
  misc_feature (229)..(229): n comprises a, c, g, or t, or includes no nucleotide
  misc_feature (335)..(335): n comprises a, c, g, or t, or includes no nucleotide
  misc_feature (338)..(338): n comprises a, c, g, or t, or includes no nucleotide
gttatcatcctaaaggaaatctataagtcactcatgtcttcatgcaaaaggcactttcattcattcgttgtaacatattctattctgtcaagtactgaacaccttccatttgcctccttctgttgtacacacacacatacacacacacagaataattagaataagaattattaatagaataattagaagagccaggttcttgccacagggaaattgtaatctgtttganaatgtggacactgtaggtgatacggtagctcgtacctgaagtgatggtgtgcccaccatggagagggaaagtaaactcaactgtgattccttaatgtattttgggnacntagctcccaggtataggg

SEQ ID NO: 3670 - DNA, 376 bp, Canis familiaris
  misc_feature (17)..(17): n comprises a, c, g, or t, or includes no nucleotide
  misc_feature (339)..(339): n comprises a, c, g, or t, or includes no nucleotide
acctattcaaaattcangccctttcagttctgcccatacttgtttcctatgctgtttgttttctgccatgagttttagcaatatgtttacggtgtgtgtgtgtgtgtgtgtttgtgcgggtgtgtgcgtgtgtatttctctccagcctggctgaattatccccaagtgactcttaatcctcaaccgtaattcccagtgattgcacggacatgatgataacgggggagcctgttctccgcccgcccctcctcactccctcctcccctgttgctaagctcagccaaagatgctctagggagctgtttattgaaaagaagaattcaacagcagggtcaccangcttttcaatggagacaggctgcccagggtaagaaga

SEQ ID NO: 3671 - DNA, 365 bp, Canis familiaris
  misc_feature (38)..(38): n comprises a, c, g, or t, or includes no nucleotide
  misc_feature (40)..(40): n comprises a, c, g, or t, or includes no nucleotide
  misc_feature (72)..(72): n comprises a, c, g, or t, or includes no nucleotide
  misc_feature (171)..(171): n comprises a, c, g, or t, or includes no nucleotide
  misc_feature (186)..(186): n comprises a, c, g, or t, or includes no nucleotide
  misc_feature (200)..(200): n comprises a, c, g, or t, or includes no nucleotide
  misc_feature (203)..(203): n comprises a, c, g, or t, or includes no nucleotide
  misc_feature (210)..(210): n comprises a, c, g, or t, or includes no nucleotide
  misc_feature (245)..(245): n comprises a, c, g, or t, or includes no nucleotide
  misc_feature (250)..(250): n comprises a, c, g, or t, or includes no nucleotide
  misc_feature (260)..(260): n comprises a, c, g, or t, or includes no nucleotide
  misc_feature (288)..(288): n comprises a, c, g, or t, or includes no nucleotide
  misc_feature (324)..(324): n comprises a, c, g, or t, or includes no nucleotide
  misc_feature (344)..(344): n comprises a, c, g, or t, or includes no nucleotide
ctcaatcccggaactccaggattacccctgaaccgaanancagacactcaactactgagccacccaggtgtncagaaaaggtaacttttaaatctgattgagtttaacatgaaatcatatacacacacacatacacacacacacacacacacacacacacacacacacaanacattgaatttcatntacatgaataaggntanattgttntctgctctcaggaagaatgatgccttagaaagaanttatntccatatacnggcagtgttagctctagaatcttgtctntcttggtataactgtgtacccagcacctagcaccangctcagtagctatttaatangtatctgtgaaacgtataatt

SEQ ID NO: 3672 - DNA, 420 bp, Canis familiaris
ggcctgaggctggtccagctctctgacatcaaaacgtttgagccacaggttatcctggataaggaaggtaagtctgttgatttttttttaatttttttttatttatttatgatagtcacacacacacacacacacacgatcccttgattttcttatacctcaaaagctgcttactctgttcttattcagcactctggcacaacttgtctttctagccataaaattgttggcatagaagggaaactaaaacatgcctctagacaattcctttaacccgtgaatacaaaagtcagttggttacttatgttttctggtctttctgtcttgttctactccattacctggacgagacttgatatataaactgggaagaagtttgttcttactaaagaagaaggatggcttgttctctttaatacc

SEQ ID NO: 3673 - DNA, 323 bp, Canis familiaris
  misc_feature (213)..(213): n comprises a, c, g, or t, or includes no nucleotide
  misc_feature (228)..(228): n comprises a, c, g, or t, or includes no nucleotide
  misc_feature (233)..(233): n comprises a, c, g, or t, or includes no nucleotide
  misc_feature (259)..(259): n comprises a, c, g, or t, or includes no nucleotide
  misc_feature (283)..(283): n comprises a, c, g, or t, or includes no nucleotide
caaagattagctggaaagcacaggtctacattacttaataacaaaaccaagaacattctcaattgtgtgaaatgcattctggagataaccaaagttttctccttccactcactctggcgtgtgtgtgtgtgtgtgtgtgtgtgtgtgtgtgtgtgtgtgggtgactccctaatgtctgactgtaaactggttacagcagatactaatatcctngagataatgcctgangatanatctgatgtctgacaatctaacatantgtgttttaagtaacgctggcctngaactcacaaccttgagatcaaaagtcatacgctccacca

SEQ ID NO: 3674 - DNA, 300 bp, Canis familiaris
  misc_feature (186)..(186): n comprises a, c, g, or t, or includes no nucleotide
  misc_feature (190)..(190): n comprises a, c, g, or t, or includes no nucleotide
  misc_feature (193)..(193): n comprises a, c, g, or t, or includes no nucleotide
  misc_feature (207)..(207): n comprises a, c, g, or t, or includes no nucleotide
agcgctaaactcctgtgccacctgggaatcccttaaattgacccatttctatctctctaatctagtgattctcaaccatgctcaattttacctcccagtggacatttgacaatgtctgtgtacatttttattgttattatggttttgtgtgtgggtgtgtgtgtgtgtgtgtgtgcgcgcgcgcanacantanctggtatctagtgnatagaggccaaggatgctgctgaatgtcttactatgcacaggacagcctctacaacaaaaaagcctgaagtctaaactgtctatagtgctgag

SEQ ID NO: 3675 - DNA, 762 bp, Canis familiaris
cttgatgcacatccataaaataccttctcaggaactcagtgtttgaataactggtgacagattgtacctggsccaactgatacatcaaacacacacacacacacacacacacacacacacacaccagaawatccacccatgtcctarcccgtagaggagggagakgagakagggccatcctcaagmgacakatccctccttccccctgagactttggtdtgtgatttttctccccatctagaascgctgatgtgcagagygtgctttgacctacctccttctgccmtaatcagaawctctttgtccctccawttgctctgaatttatggaagagtakgggawgtgggggmaastctgagctgcttygaccaactcgaakgtcakctkgargagtacctggtggcatttggtgtcaagatgagaatcagagagaagtatcaaagagtggctctggggagaggatggcatcatactcaccccatggccctggtcccatggtgaagtcttaatagctgaaaacaagcccagccacaggatatttcatgagataamcaaaggataaataaaaccaggtccctgtactctgcagggtcttccaggtggaggagtggtttcccccagcagggtaggcactagctgctccggggatacagaaggagatagtcatgagccccagggtggatgggtcagtagaaacttccaggggagatgactccttagcttagttctgagagattcagacacattggccggtgggaaagg

SEQ ID NO: 3676 - DNA, 461 bp, Canis familiaris
atgtgtgatttgctacaatatttaaaaaatatttctcctgtggttatgtctaagcactgatataaatcactataattcactaaattgattcatgacccactaatgtgtggtgacctgcagtttgaaaaatactgttagaagttaacagcatgctgtcaaacccatatactatacagtgtgygtgtgtgtgtgtgtgtgtgtatgtgtgtgtgtagttaggcttcagaataggtccatctacgtatcaatgagccattttataatgccatcacagtgcwaaagcagccatagacagtgtataaacaaatgggtgtggtggtaatccaatcaaactttatttataaaaacacgatgggctggatttgggccacaggccataatttgttaacataggcccagaatgttctttctacccttctttcctaatgaacagscctatccatcctttatctcttccccaa

SEQ ID NO: 3677 - DNA, 335 bp, Canis familiaris
  misc_feature (68)..(68): n comprises a, c, g, or t, or includes no nucleotide
  misc_feature (138)..(138): n comprises a, c, g, or t, or includes no nucleotide
  misc_feature (157)..(157): n comprises a, c, g, or t, or includes no nucleotide
  misc_feature (275)..(275): n comprises a, c, g, or t, or includes no nucleotide
cctagaataacagctaggcctaaagccctggaccctattacacacacacacacacacacacacacgcnctgcttcatttaatggtataagtaacatgtacataagatacttcccaatcatggaaaagcatttggattntatttgagagtttaatgtntctgaaaattttgattaacataagctgtacttggagctggatgacagacatgctaattttaacaggattttcatcctacaattattttccaaaaaataatttcaagcctcttgctgcnggcgggttccataggaatgcacaaaaaagaggcagagtaacagtccccatgggagactgt

SEQ ID NO: 3678 - DNA, 363 bp, Canis familiaris
  misc_feature (58)..(58): n comprises a, c, g, or t, or includes no nucleotide
  misc_feature (86)..(86): n comprises a, c, g, or t, or includes no nucleotide
  misc_feature (100)..(100): n comprises a, c, g, or t, or includes no nucleotide
  misc_feature (218)..(218): n comprises a, c, g, or t, or includes no nucleotide
  misc_feature (268)..(268): n comprises a, c, g, or t, or includes no nucleotide
  misc_feature (312)..(312): n comprises a, c, g, or t, or includes no nucleotide
  misc_feature (316)..(316): n comprises a, c, g, or t, or includes no nucleotide
  misc_feature (340)..(340): n comprises a, c, g, or t, or includes no nucleotide
atccccagagcatcccagctcggcgggcagccaggcagctccgagcggccaccaggcngtggccggtcctcccgggtgacatgggngacgcggcccctgnagctgaggccctaacagctcagccggtccctgagcaaggcagctcagaggcagatagaaaacaaatgccaggtgggggtacacgggagctgccgaaggaagacagagctatttaacancccccccacacacacacacacacatactcactcactcgtacactcacgcnggcaaattgggccgggagtttctttggtgcagaaaaacaatcancaangtagcagggaaaacttggttgaanggagaaatattataaatggcaaa

SEQ ID NO: 3679 - DNA, 406 bp, Canis familiaris
  misc_feature (275)..(275): n comprises a, c, g, or t, or includes no nucleotide
  misc_feature (306)..(306): n comprises a, c, g, or t, or includes no nucleotide
  misc_feature (337)..(337): n comprises a, c, g, or t, or includes no nucleotide
  misc_feature (352)..(352): n comprises a, c, g, or t, or includes no nucleotide
  misc_feature (362)..(362): n comprises a, c, g, or t, or includes no nucleotide
  misc_feature (370)..(370): n comprises a, c, g, or t, or includes no nucleotide
  misc_feature (374)..(374): n comprises a, c, g, or t, or includes no nucleotide
  misc_feature (397)..(397): n comprises a, c, g, or t, or includes no nucleotide
ctagaggactaacaattatgaatatttatgctccaatgtgggagcagccaagtatatcaatcaactaataaccaaagtcaagagatacatagataataatacattagtagtaggagacttcaacacagcactctcagcaaaagacagatataagcagaacatcaccattaccacaaaagaaagaagggccttgaatgatacactggaccaaatagatttcacacacacacacacacacacacacacacacacacacatagaacattccatcctantgcaactgaatacacattcttctcaaacgcntgtggaactctctccagaatagaccacatantgggtcacaaatcgngtctcagccnataccaanagantgggattattctctgcatatttncagaccaca

SEQ ID NO: 3680 - DNA, 519 bp, Canis familiaris
  misc_feature (30)..(30): n comprises a, c, g, or t, or includes no nucleotide
  misc_feature (221)..(221): n comprises a, c, g, or t, or includes no nucleotide
  misc_feature (421)..(421): n comprises a, c, g, or t, or includes no nucleotide
atcatccccatctccttgatatattttctncacatggtttccaaaatgccacactcttgcttttttagtgtccttgctggttcctcctttctatctggcctcaggtttttacaagatttagaaagtaaacacagtactggtattgagaaacctcaccggcctttggagaaggcagactcggtgtcctcttttctacactacagttgctacagcctggccanaattatcagtctttttcaacttattctttgaaaagattattttaaaaggtatcattggggaaaagaaatatagaaagactacttgagaaatagaagtatgtctgcatgcaataattttcttctatgtgggcactgccaggaatcagggatgttagagatatttagggacacacacacacatacacacacacacacactcnatttattctcaaccaggggcactgagtgagaagttagcacacaatttctattaacaataatgagagctgtgagttgtgtctccagtcacagcactgga

SEQ ID NO: 3681 - DNA, 305 bp, Canis familiaris
  misc_feature (169)..(169): n comprises a, c, g, or t, or includes no nucleotide
  misc_feature (182)..(182): n comprises a, c, g, or t, or includes no nucleotide
  misc_feature (198)..(198): n comprises a, c, g, or t, or includes no nucleotide
  misc_feature (213)..(213): n comprises a, c, g, or t, or includes no nucleotide
  misc_feature (223)..(223): n comprises a, c, g, or t, or includes no nucleotide
  misc_feature (235)..(235): n comprises a, c, g, or t, or includes no nucleotide
ataataagatgttgctattattattcagcaaaatgacctttgccattttcctgtatcttaagatgctaagtctatcactgattttaaactgccagaaatactttttgagatgtatgggggatatatatgtgtgtgtgtgtgtgtgtgtgtgtgtgtgtgtgtgtataantcacatttatgantgatatatcctattangcagaaagctgttanacacaatgtntataaaatagtntgttctagttcatttatacaatgtactaagcattttcttaccataataaagagagcagactggggataac

SEQ ID NO: 3682 - DNA, 580 bp, Canis familiaris
  misc_feature (132)..(132): n comprises a, c, g, or t, or includes no nucleotide
ggatctaattaaaaaatgggcagaagaaatgaacaaacattttctgcaaagacatacagatggctatcagacatatgaaatgatgctcaacatcacttatcatcagggaaatacaaatcaaaactacaatgnacataccacttcacacttgtcagaatggccaaaattaacaacaccagaaataataggtgttggcaaggatgcagagaaaggggaactctcttacactgttgctgggaatgcaagctggtgcagcaactctggaaaatggtatggaggctcctcaaaaagttgaaaatagagctaccttactatccaattggactactatttatcaaaaggatacaaaatactaattcaaagggatacatgcacccaatgtttatagcatctttattaacaatagccagattatggaaagagcctaactgtccataaactgatgaatgggataaaggaagctgcagtgacacacacacacacacacacacacacacacacaggaatattactcaggccatcaaaaagagtgagctcttaccatttgcaggacatagatagaactcaaaacttaatcagc

SEQ ID NO: 3683 - DNA, 477 bp, Canis familiaris
tctgtaaccagtcctagtttggggaccaaggatggctcctctgctcctgtgaagctactaatctcctggtttggaataatctcctacttgtgaaaatgttcttttaactgacacacacacacacacacacacacacagcacctcagcctcttgctcttgcctcagaagtcattctgaagttcttcaggataagcttcaactgcattcagggtacagctcccaagtgccagccgctcacacagaccgtacgtccttacctaccttatctaaaccgcacccattccaaggctccctcaaggacgcaggtgacaggagcaaattccacatagataaaagggtccactgacctgtgaggcgctctagggcatcgaatccatgttttagtgctatcacgtcaaggaaggagatggtgccatcttcaaacctgtaacagggttgaggggaacaaggtcaagctgtggccaacatctccatgtg

SEQ ID NO: 3684 - DNA, 226 bp, Canis familiaris
  misc_feature (176)..(176): n comprises a, c, g, or t, or includes no nucleotide
ctatgtgttcgatttctcaactaaagtacagtgtgctatttatgtggccacatgtggcttctctaccctgagttgaagatagagaacaacaatgaccacacacacacacacacacacccgttcagggagcacagtcaaaatattcctaagccttatttgaaccatacataataganatgcaagagacagtttcactgtgaatatacagatgtgttttgtctttctg

SEQ ID NO: 3685 - DNA, 564 bp, Canis familiaris
  misc_feature (113)..(113): n comprises a, c, g, or t, or includes no nucleotide
  misc_feature (138)..(138): n comprises a, c, g, or t, or includes no nucleotide
  misc_feature (187)..(187): n comprises a, c, g, or t, or includes no nucleotide
  misc_feature (425)..(425): n comprises a, c, g, or t, or includes no nucleotide
  misc_feature (431)..(431): n comprises a, c, g, or t, or includes no nucleotide
  misc_feature (449)..(449): n comprises a, c, g, or t, or includes no nucleotide
  misc_feature (467)..(467): n comprises a, c, g, or t, or includes no nucleotide
  misc_feature (494)..(494): n comprises a, c, g, or t, or includes no nucleotide
tggaaacattaaaatggtaaaaagagaattctataaataactctcggccaataaatttggcaattaaaaggaaatggagaagtttcttgaaagatgctaactgccagaaatgnactcaaaaagaaacaaaaaatctgnaaaagctctgtattattttatttcctaacttaacccactgtaaacctgnactattttgcatacacagttctttttatcctttaaatatactgaattgcaaaatttaaaatatcccccaaacctcaggactggatggctttaaaggtgatttaaaacaagcacataaggaaaagaataccaatcctatactagtatttgcagaacttagaaaaggagggaacagtttcaactaatactatgaagccagcattaccctcacacacacacacacaaaaaaaaacaaagtnctatgncaagaaaaccagaaactncaaaacattgttgaatgnaattgaaagaacagctaaatgaattgnaaagtgcatcccacgtttatgagtcagcgacttgatattgttaaaacagcaacactctaagttaatctac

SEQ ID NO: 3686 - DNA, 620 bp, Canis familiaris
  misc_feature (545)..(545): n comprises a, c, g, or t, or includes no nucleotide
  misc_feature (561)..(561): n comprises a, c, g, or t, or includes no nucleotide
  misc_feature (592)..(592): n comprises a, c, g, or t, or includes no nucleotide
gcagaatgctggacccctagtgaggtaacagagccctgggctcccaccccattccctcttctctcttgagcctttagtggggacttggaacttgcggggaggaagggaggccaggaggggaaggcatccctagagcctgggctccaaatcttgcttcttgagatattgggaagagagcaagggcagtctaggtaggagttacccaggaggaaggaaagacagaaaacctttaaaattaaactgcagttcatttctttctatttttggttttgaacagtgctatcagggattgtttccccacattgttacacctgataagtgcctacattcatcattgtctcctctttttaacagtgatgaccttcacaccagcgggaagctttggtggacttacataggttatgtttttgtatctgacccattggggtgcatagactcctgaaaaaagcatgaccattcttcctagaaaatgcccattctctcacacacacacacacacacacacacacacacacacacacccttactcacaaactttctgtcantcacttatttacccanagttgcatataataatagagtcttacaggantgaccctctgttgaagactcctactgta

SEQ ID NO: 3687 - DNA, 255 bp, Canis familiaris
  misc_feature (208)..(208): n comprises a, c, g, or t, or includes no nucleotide
  misc_feature (218)..(218): n comprises a, c, g, or t, or includes no nucleotide
tccccgtaaagcgtagtctgtctccatgagggtccagggcacgaggggtcagagccccagagacaagggacctgatggggacccttgatgcactgatgaagtaacatgaaagctgagccagccgaagtgtgtgtgtgtgtgtgtgtgtatgtgtgagagacacaccaggtagtggcggaagaaagtttttcagacagagggaacggcntgtgcaaaantaagggcactaaagggtggtaaggagaccatgggggc

SEQ ID NO: 3688 - DNA, 567 bp, Canis familiaris
  misc_feature (437)..(437): n comprises a, c, g, or t, or includes no nucleotide
aggatccgaaaggagattcggagggcaagccaggtgccccaggctccagggctccaggtatgatgtatgacccagtgcttagggagaagagagtccgacctgagaagaatgggaagacctctgtgattgccatccaggatttggttgggggaggagaagcccggagtcctggacatgcacgtgggtgtgctgctctattggcccagagacataccccatgattcccaggcctccttgttccacagactgcaatccagaccccagggcttctgttatctgctgggtccagcaggctttccctgggagtccctcagatggctattcaaattgataatgaaaaatccaaaagatgtattgactaaataccacttttgcacaaaacacacacacacatacacacacacacacacacacacacacaccagtgctaaaccggncactcccccacccactccaccatcagcatggctgggcctaggcagccaagggggttgaccttgagaagagaagagaacagactccagccctcagtgcagggagttaatattctggtgtgcctattgttcg

SEQ ID NO: 3689 - DNA, 355 bp, Canis familiaris
  misc_feature (330)..(330): n comprises a, c, g, or t, or includes no nucleotide
tctgcattgccgggacacagtccctgtagctgttcgacaacactttgcaacacatcacatagcgcaagttcaggaaagaaaaataaccgtttgtgaccttacattatgaacctgatggatggctgagaaaggaaatccagcgttctgattcgtccatatctcacagacggacgactgctgatataaacagaaaactatctcatcttgtcaatatttagaacatggcagctaccaaggtagcatcaaggaaggaggaaaataataaaaagcaaagaatcacatttcttatacacacacacacacacacacacaaagttgcgcgcacgcgcntacacgcacatgtacacacgctcaa

SEQ ID NO: 3690 - DNA, 437 bp, Canis familiaris
  misc_feature (407)..(407): n comprises a, c, g, or t, or includes no nucleotide
tttataattccacagctctgagaccttggaaatgttaaagaacttctctgcatctcaatgctttcatctgcaaaggacaaagggatagaacctagctcacagttacctcaaggagccatggcatgattgtgcatgaattacaagcaaaattcacaataagttctcaaaaatatcatattcttgccctgactagggaaaaaagaacccctcaagcaacagcaataagaatatcttataaaagtccagcaaattaaataattattattgcagtgattttttaactctatttgtcatttctgccattttaactcaatgcgcattctcacacacacacacaacacacacacagtggagggagacagttggtcactggaaagtcagtttccctttcttcccatgctcgtgtngctcttccacatttctgaagtctctttgca

SEQ ID NO: 3691 - DNA, 215 bp, Canis familiaris
ccatccatgccattgcaaatggcaagatttcattcttttttatggttgagtgctattccattgtgtgtgtgtgtgtgtgtgtgtgtgtgtgtgtgtgtgtataccatgtctttacccattcatctatggatggatactggttgttttatggaactgtggccaatttcatctaccgttttattttaactcattgtaatagctaagtaatataatac

SEQ ID NO: 3692 - DNA, 465 bp, Canis familiaris
  misc_feature (30)..(30): n comprises a, c, g, or t, or includes no nucleotide
cccggtttcgttctttttatggttgagtantattccattacacacacacacacacacacccacatcttctttatccattcattaattgatgaatacttggctgtttccataatttggctattgttgataatgctgctataaatatcagggtgcatgtatccctttgaattagtatttttgtattctttgggtaaatacctagtagcgcattggatcataggatagttccatatttaactttttgagcaacctccatactgttttccagagtggctgcaccagtttgcattctaaccaatagtgtagaagggttcccttttctccatatccttgccaacacctgttttcttgattttagtcattctgactggtatgaagtggtatctcattttaattttgatttgcatgtccttgatgataagtgaaattgagcatcttttcatgtgtctatttgccatctgtatg

SEQ ID NO: 3693 - DNA, 836 bp, Canis familiaris
  misc_feature (102)..(102): n comprises a, c, g, or t, or includes no nucleotide
  misc_feature (110)..(110): n comprises a, c, g, or t, or includes no nucleotide
  misc_feature (440)..(440): n comprises a, c, g, or t, or includes no nucleotide
aaaggcagatgctcaacccctgagccacccatgtgtcaaaaggggactaatttgattcagttttaaattgaagaaagtagcaaataaggaaataaaacctgnccacaggnaaaaaaatcatataaatatcaaaataacagacttcagagtccttatgatgattaaacaatcagagttaggaattcttataaaaacatcagtgacagtacctttacatcagctcgagctggataagaaaaatgaacatcaatgaactccaaattccctttgatgctgtcaggtttgtgtcctctctctgaaaaactgtcaattttaggattctaaataaaacaaaattcaatgactattccatcataggacaaccaactgcacttttaaggaatatgatttagcaaatttccaaaaagaggaccttggaatggcataacttcctcccatgnaaacagaacctagttgtagattgtatgtgaatgtgtgtgtatgtgtgtgtgtgtgtgtgtgtgtgtgtgaaggaaatattccttcacagaaaacagacgttttctgaaaagtacctagggatatattaatatcatttcccaggatatctcactttaagtttttggcatattcccatacattttccaaatggtcagatacccatgcttcctacaagtgcaataaccagacatactagtaggattgagataaccaagtactcaagcatttagtgaaaataaacttatccctaaacaacaaaggaaatggatttggattgtgaagatggaacaatttgtcagggccaacttatttgggagaaatgtaaactgtaaatatatttagaagctgaataattt

SEQ ID NO: 3694 - DNA, 348 bp, Canis familiaris
  misc_feature (30)..(30): n comprises a, c, g, or t, or includes no nucleotide
  misc_feature (36)..(36): n comprises a, c, g, or t, or includes no nucleotide
  misc_feature (131)..(131): n comprises a, c, g, or t, or includes no nucleotide
  misc_feature (193)..(193): n comprises a, c, g, or t, or includes no nucleotide
  misc_feature (202)..(202): n comprises a, c, g, or t, or includes no nucleotide
  misc_feature (207)..(208): n comprises a, c, g, or t, or includes no nucleotide
  misc_feature (213)..(214): n comprises a, c, g, or t, or includes no nucleotide
  misc_feature (218)..(218): n comprises a, c, g, or t, or includes no nucleotide
  misc_feature (228)..(228): n comprises a, c, g, or t, or includes no nucleotide
  misc_feature (230)..(230): n comprises a, c, g, or t, or includes no nucleotide
  misc_feature (295)..(295): n comprises a, c, g, or t, or includes no nucleotide
  misc_feature (323)..(323): n comprises a, c, g, or t, or includes no nucleotide
tttttagatagatgcattatagttagtaantcctgncaggttactaagccctttgcaatggctttgaactttcttccttccgttctttcctaataaaatctgtgtcatcctgcatccaatgtttgtatgtncatgtcgtttttcctgtctgtgtgtgtgtgtgtgtgtgtgtgtgtacgtgtgtgtgtgttantacagcacntcctnnatganntccntcttgaagtntnactttaagtatatgtatatatgtatatatacatatatatgtgtatatatatatatgtatacgtanatatgacgcccaaaagtaaattgtagcntcaatatatttattatctcattcag

SEQ ID NO: 3695 - DNA, 380 bp, Canis familiaris
  misc_feature (355)..(355): n comprises a, c, g, or t, or includes no nucleotide
tactctaacaagatttaagatatcctattttcataactttgggtttcttaccattaccacatttctgcaagaacactggaaaatgtcaaaattttacacttttcttacttctgcagaaatcctatgtctcatgcaaatcttcgttcacttctttccaatgtcaactgtaataatgagaattctcacaattgtgccccccagtcagtcatattctttcttggtattaattttgagagtcgttgtgtgtgtgtgtgtgtgtgtgtgtgtgtgttttgaacatggtatggagtctgagtcaaggtaccagaatctttatgtctttttggaatgaggtggcatcagttccttgctgggntactactgtgaattcctctctttta

SEQ ID NO: 3696 - DNA, 365 bp, Canis familiaris
  misc_feature (18)..(18): n comprises a, c, g, or t, or includes no nucleotide
  misc_feature (22)..(22): n comprises a, c, g, or t, or includes no nucleotide
  misc_feature (220)..(220): n comprises a, c, g, or t, or includes no nucleotide
  misc_feature (231)..(231): n comprises a, c, g, or t, or includes no nucleotide
  misc_feature (238)..(238): n comprises a, c, g, or t, or includes no nucleotide
  misc_feature (247)..(247): n comprises a, c, g, or t, or includes no nucleotide
  misc_feature (261)..(261): n comprises a, c, g, or t, or includes no nucleotide
  misc_feature (270)..(270): n comprises a, c, g, or t, or includes no nucleotide
  misc_feature (284)..(284): n comprises a, c, g, or t, or includes no nucleotide
  misc_feature (314)..(314): n comprises a, c, g, or t, or includes no nucleotide
  misc_feature (330)..(330): n comprises a, c, g, or t, or includes no nucleotide
  misc_feature (339)..(339): n comprises a, c, g, or t, or includes no nucleotide
ttcctaactgcatggggncaancaggggagggagggactgggaaaggtaaaggagcaaataggatatctggtgagcaactatgtgaactacagggaccttttactagaggggctttaaatgacttgtttcatgcatggcttaaaaagcccttggaggcttgttttgttgggaaattaatgactgtgtgtgtgtgtgtgtgtgtgtgtgtgtgtgtgtgtntgcactcatanctcatanaagacttangtatctctgcgacntctgtagtntactctcagcattntgtatactcatgcatccactcatttattcnacaactatttatttcncccctgctntgggtcaaaaacttctgccctcataa

SEQ ID NO: 3697 - DNA, 744 bp, Canis familiaris
ctgcaggtcgactctagaggatcacatacccagagaggtagggtttgaatatgcctcctccggagtccatgctcactcttctagaccatatggcaagattgagtaaggcagaggtttgtcttcagggagccccttggtcctctgtagagggtgggagggggaacaagatacacgctctcactgtagccatgtccctgcatggaccagctaacttgacacagttcctagtggcagatagctttttcataccagtcacacaacaaagaaatgaaaaggatgtgacaacagggatcaaaatggagaatatagtttcccaactcctagacaaactgctctggaaaggtttgcactctgaggctgatacatcatccgsgtgtggcatggcaagcatcccagaatgtgtgtgtgtgtgtgtgtgtgtgtgtgtgtgtgtgtgtgtgtagtagagcactgctgtmacagagggtctcatctgcttgtccatctgtgaaatggggaggctgccaggattattatttccttaggtcttaatagcatcccagaaagaattggaaactaggatattggggctgatatttcagccctgggacaaaagaatcaggactcagggatgtgtggtggagcgggagttgttctcagcctttctgaaaatgcctcaggtgggcaggagcttagtctataacaggcgacttgggtgctagactctgtctggggattctggctgaatgacaggacacttgaatg

SEQ ID NO: 3698 - DNA, 431 bp, Canis familiaris
  misc_feature (391)..(391): n comprises a, c, g, or t, or includes no nucleotide
gcaggtcgactctagaggatcataatccccatggacttttctcactctgtgcacacaaagcccatgacatctttaggcaagtggcaccttggggagctggtcactttgttggccattctggttctcatgagatgtgcagctcagggctcctgtctccatatttaactgcatctgcctgagctagtggggtgactcagatttgccagagacctattcagaggctggattctctccttctcacagccttctggaaaacacacacacacacacacaggcacgcacatgtacacacacacacacatgtacacacacacacacacacaccaaggctgctgcttccttctcttagccattttcaaaatgtttttttttttttcaaattttctaaggnaacagtcacagccttccaattccatcccatcaatcccaaa

SEQ ID NO: 3699 - DNA, 390 bp, Canis familiaris
agcttgcatgcctgcaggtcgactctagaggatcttgtttatccaaatatataaaaaaaaaatcctacattagatactggcttgaccaccactgtaaagaatcctgagaaaacctgaagatggctgcatatatcatgagatgaaaattcactcaaaaggaaaggtggacattattggctgaattttcattttgaccacacacacacacacacacacattgtccaacccagaagaatatgcactaaggtgttaatactagtgacttctgggcagtagtaactttctaatagtacacatgtgctacttctgtaataataaaacaattattaaaatgaatgaataaataaaagagtgaatatacaaattaaatgtggaaggcaaaacctacca

SEQ ID NO: 3700 - DNA, 280 bp, Canis familiaris
  misc_feature (52)..(52): n comprises a, c, g, or t, or includes no nucleotide
gacacaactgagtggcttaaaccgcggagatgcgtccacccccagtggggangctgcaggtgggagatggaggtggcagcaggctgctgcgccgtggaaggccccgaggagggccgggtccgggtcccttcccagctcctggtccttcctgggcagtgtaattccaggcttcacgctgtcttctgtgtgtgtgtgtgtgtgtgtgcacacgtgtgcccggccccagactctccttttccataaggacgccagtcgtcttggcttagggcccaccgtcctc

SEQ ID NO: 3701 - DNA, 400 bp, Canis familiaris
  misc_feature (178)..(178): n comprises a, c, g, or t, or includes no nucleotide
aagcttgcatgcctgcaggtcgactctagaggatctggagtttaaccgacctctcagggctctggtgaccacagaatggtgtcacggaggcaaagagctggtcctacccgccccagcttgaacaggcgctcgatagaggactatttgctttctctgtggttcatgcctctgggactanagctcttcctgctgtcttcccctataacctgccggatgcttcagctttctggaaatagaagcgtgtgtgtgtgtgtgtgtgtgtgtgtgtgtgtgtgtgtgtgtgtgtcggagggaacaaggcctgcctttcacttcctttctccccagaatacactttcaaggcagaaatccaaacccagggcaggtccaagacaagcgagtcatgacgtgtgccccgcaa

SEQ ID NO: 3702 - DNA, 490 bp, Canis familiaris
agcttgcatgcctgcaggtcgactctagaggatccattcctaggcacatcaaggtaaaagtaatgaaaggaaaagagattatctcaaaagcagcaaaagaaaaaccacttatcacatacaaggttataccaacggggaccaaaaaacagtgggataacatgttcacaactctaaaagaaaaaactgtcagactatgagtctaatatccaacaaaactatccttcaaaagtgaaggtgaaacaaagatattcccaaataaacaaaaactgagagaattagttagcagaagaccagccttacaagaaaaactaatggaagttcttcacaatcaaaagagcaagcccagatggcagtatatacacacatacacatacacacacacacacacacacagagtactagtaaagacaactacataattataaaacacagtataaatagcatctctcctaactggacttaaaaagcaattgcgtaagacaacatgtac

SEQ ID NO: 3703 - DNA, 319 bp, Canis familiaris
agcttgcatgcctgcaggtcgactctagaggatcatatagtatttgtctttctctgtctgactcatttcatttagcatgatgtcctcaaggttcattcatgttgtcaaacagcaagggattccattcttttttatgcttgagtaaaattcctctgtgtgtgtgtgtgtgtgtgtgtgtggttatgtgtgtgcgcgcaccatagtttcttatgtattcatccattggtggacatgtaggttgtttctatgttttggttattgtaaataatgctgcagtaaacatgcaggtacttatatgttttcaagttactgtgtttat

SEQ ID NO: 3704 - DNA, 882 bp, Canis familiaris
  misc_feature (375)..(375): n comprises a, c, g, or t, or includes no nucleotide
catattggaccttcacatgaggcgactttgcaacatgtatcttgaatttagaaaggacggagttcagaagagtgttctcacagctgccatttgtatgtggtctgttaaaacacacacgtagacacacacacacacacacacacacacacacaggatttctttattatcataatgtcacaatgaytcacaaaagatgatgttgtgcgttaatggatgttagggacctcccgtdataggggcwattattytcccgtwgtgcacgctcaaaatctaatttytaaatctaagaaatgcaattttgagaagactacattgctgacttcactgccaacagtwgagtttcatgtgtcctctagacccagcttccacacattnacggccacttttccaaaaaaattagtatattattgtacatccagtgttacccaaagttctaatcacattttccatgccgagcgtttctttgaagtacgtattttccaaatgcgagcatttctttgaaatacgtattttcaaatgtcttcctataaatgccagacaaactcgggttgcactacatctgtctttacccactttttaaagattatttacttgtttgagtgagactgggagagagaacataaggaaggaggaggggtagaggaagaagcagatgccctaccaactagggagcccaacgccaggctcgatcccaggactctggggccatgacctgagctgaaggcaaacgcttaaccacccagttactgttttcagctgttctgatatgcatgttctgaactttacatggcacttgattcttatgcccaattgtattttattaagctttcctgatgagcattctaattgatcctctagagtcgacctgcaggcatgcaagct

SEQ ID NO: 3705 - DNA, 340 bp, Canis familiaris
gagtacttaatggtgaacacacttcctctcctgttttccgtggtgttttaatctcaacttgattacacattttatgaggacaaaaattatatgcattgccctttatatcttccaccaactctaggcatggagaataacttgctggatgatttattaatctgataacgagggggcacaataagttcatcctgtatatatgtgtgcgtgtatgtgtgtgtgtgtgtgtgttcctttcagattttaaaatttatgctacttgctcggagggctattataagtctgtaaattctacaaataaatttcaaattccttggtaatacttctgggcttcttctgagat

SEQ ID NO: 3706 - DNA, 440 bp, Canis familiaris
  misc_feature (146)..(146): n comprises a, c, g, or t, or includes no nucleotide
  misc_feature (343)..(343): n comprises a, c, g, or t, or includes no nucleotide
agcttgcatgcctgcaggtcgactctagaggatctgaccatgtgtcacacagcaagagaggctgcaaagactggaagaccccactgccccgggttccgcatccccggtggtgaaatgtcaggcattagtgacaagataggaggaangttttgagcagtaggtgtcctcccaaatcaaatcttcataattccaacaaacaaacaaacaaacaaacaaacaaacaaacaaagattgcctggttcttttacattcacttcacttaaccatttgtgaacggggtggatggggtgggcaaggaccctaaagaaaggctaatggacaatatcaccctctgcccagaganagacacatacataaatgcccatgattaatgcagatgccagctggggtgtttctgtcccttgggggctgcggacagctgtcaaaatgaaggtttgaat

SEQ ID NO: 3707 - DNA, 360 bp, Canis familiaris
  misc_feature (89)..(89): n comprises a, c, g, or t, or includes no nucleotide
ctggcctgctagccctatgttactttgacacacacacacacacacacatacacacaaaggagcaaaaatagcaagaaattgattatgtngatattctgaataaagtaagtacttccaattttttatgtctaattagccacagctcttcaagaattgatgcaaatgtcatggggtttataatgttggcatttcatcttcacaaaaatgccatttgatgacataaaaccagaaaaaactaatggtcacagcagacagcttgtagattagacaaaggtcactgtgttttaatgaacagggctattaattaattaatgagaaaacaattagaacatgagctgttaggcgttgtgaatttgtatc

SEQ ID NO: 3708 - DNA, 416 bp, Canis familiaris
  misc_feature (170)..(170): n comprises a, c, g, or t, or includes no nucleotide
  misc_feature (400)..(400): n comprises a, c, g, or t, or includes no nucleotide
atgcctgcaggtcgactctagaggatcatagtctattatactatttcaaaatactataagagattgattatagtctaattctatttcccacctctgctctttaaggttttgttttataatttgattttctattcacaagaaaacattccaatgtactttttatgttattnattattcctgctttaattagtcaagacttatttaaagttaaacacatacacacacacacacacacacacacacacacacacatgatttaactaccaaatatacaccagtcctggtgtcttttcctctgaatatcttgtgttcagttgatatgataacatttcccttcaacctgaaggaactttattttagcgtttcttatagtttaggcctgctagggatgaattgtctnagccgtagtatcccac

SEQ ID NO: 3709 - DNA, 295 bp, Canis familiaris
  misc_feature (34)..(34): n comprises a, c, g, or t, or includes no nucleotide
  misc_feature (244)..(244): n comprises a, c, g, or t, or includes no nucleotide
tcacacaaaatccaatacccaaatctataatccnaaaatatatgctctctccctcatccaatacatacactcacatagtcacacccaccaatgcacgctcacacacacacacacacacacaggttgccccagcccatctgctccctcagcaaaccacaggcacattgctaaaggacaaaactcatccccctcaccccaaatctgtcctccaacaaaagtcctcgatgggctcttctgtctgtanttctcactagtatttggtgaccttcttgcccagttctcattccctgtgcca

SEQ ID NO: 3710 - DNA, 270 bp, Canis familiaris
  misc_feature (160)..(160): n comprises a, c, g, or t, or includes no nucleotide
tataaaatatttttaaaaaaaagaataggcaaatagaaaatagattagtggttgcctcaggctggagggaggggatggagaatgggtatggagtttctttttggggtgaggaaaatgttctaaaattgattatggggatggctatacaactctgaatatnatgaagactatttaattgtatattttaggtgtgtgaattgtatggaatgtgacataataaagctgtgtgtgtgtgtgtgtgtgtgtgtgtgtgtgtgtacgcccatgtac

SEQ ID NO: 3711 - DNA, 390 bp, Canis familiaris
ccaggaggataggagccttccaagacactggaaaaaacatccccagagagaaagcagggctaagactgacttggaagtcaagtgggagctccattttctgcccagaagctgggaaatgtaatttcaatggatgggaaacattctctgggtgaaatgggggcatagagaatcactgttccttccgtgtggcagtgggagtggaagagtggataagtgttgcagaaggaaggaccagcaggtacaaaggactcaggagcatgccaggtaggcactggctggcaaggttttaagcagtaagcttaaaagttagtaggcatgggggccttgagagggggccccaagagtagtctggggtccagtgaggaagcctccgcagcatctggactttat

SEQ ID NO: 3712 - DNA, 320 bp, Canis familiaris
  misc_feature (31)..(31): n comprises a, c, g, or t, or includes no nucleotide
  misc_feature (229)..(229): n comprises a, c, g, or t, or includes no nucleotide
  misc_feature (234)..(234): n comprises a, c, g, or t, or includes no nucleotide
  misc_feature (239)..(239): n comprises a, c, g, or t, or includes no nucleotide
tggctatttctcagagccaggccctcacacngctataggggccctgttcttgtatcccttttagagaagagaaaattggaggttaaaaattttgtccatggttgcattaactaataaaaagccaagctaggatgcagggagtccagagtattgattcagtgagtgaatgagggaaggaaggagggagggagggaatgaaggaagaaaattctttaaagagtatacaccncgaangggtnggaatcttattcatctttctcactgttctatctttccagcattttgaattgggcacttattaggccaattattatttgttg

SEQ ID NO: 3713 - DNA, 524 bp, Canis familiaris
  misc_feature (5)..(5): n comprises a, c, g, or t, or includes no nucleotide
  misc_feature (14)..(15): n comprises a, c, g, or t, or includes no nucleotide
  misc_feature (58)..(58): n comprises a, c, g, or t, or includes no nucleotide
  misc_feature (74)..(74): n comprises a, c, g, or t, or includes no nucleotide
  misc_feature (105)..(105): n comprises a, c, g, or t, or includes no nucleotide
ccttnacacacacnncacacacacacacacacacacacacacacacacacacacaccnggctctgggcacaggntaagaggggaatagaatttcagacctactangccatttgcaggctcaggtggagaagcgctgagtgacaggaatgtgacagctgttgactgagacagacccatgattgtagctgtaataaccaagaccagatggttttgtcacacctgctctaaagtaatcaggttcatacccatcagctcttgtggagactatgtgagtccgaccacatttcatggttgcgggtgtcttctcactcttactgtctcctgctatattgactcattagagaatgggtccaacggctgctgctcctaacactcccaaagtttagcatttttctttcctggatttctatgttctttgctatgttctttgaaccttgctggttcaacctctcctcttgccaggatggtgaggaaatagaagaaggagatttacccaatccccagggaactagaatgaattgatg

SEQ ID NO: 3714 - DNA, 430 bp, Canis familiaris
ctaaaggtggcatttccattcatctttggaaaaccaacatgacataaatatcaagagaaaaagggaagtctgtgctcactttcaagtgtcctaatgaaacaatcccagagactaaaaagcagcatgcaaaattgttccactgctttcaaaagtctagtaatagcagactattaaaacaaatgtggtacatgcacatgcacacgtgtgtgtgtgtgtgtgtgtgtgtgtgtgtgtgtttgtggtgtgtactcgaaatattatctggtcattcaaatcactaagacgtatttgtgatgatattaagtagaagcaaatgcagatggatataaacaaatggatataaagtgtagcctgttttcacagggatagatggttagaagggcacgctaacaaccgaacataatccgttagtgtatgtgtgtctatgtgc

SEQ ID NO: 3715 - DNA, 412 bp, Canis familiaris
caggtgctgccagctttccactctggcttaaaccactggtcaaaagaatcatcaagagttaaccaggtaaaaatatgttgtgtgcgtgtgtgtgtgtgtgtgtgtgtgtgtatgtgtgtgtgttctggggcaggaggcggatgcttcagtagaaagagagttccaggtaagaagaccagcatgagtggatacccaaaacagagtcagtctagtaggttgagaaatttagtgtagctgaagaatagaatgtgagagagatgtggcaatagagaaggccagatacataagcagggtcagatgatgcagagcctcatgggcctggtgggtgggcactgctgattgccttactactagccatccttctttgcctgggaatctctatgttgtttagctactaagcagcatgtgattg

SEQ ID NO: 3716 - DNA, 310 bp, Canis familiaris
  misc_feature (36)..(36): n comprises a, c, g, or t, or includes no nucleotide
  misc_feature (49)..(49): n comprises a, c, g, or t, or includes no nucleotide
  misc_feature (188)..(188): n comprises a, c, g, or t, or includes no nucleotide
  misc_feature (209)..(209): n comprises a, c, g, or t, or includes no nucleotide
  misc_feature (219)..(219): n comprises a, c, g, or t, or includes no nucleotide
  misc_feature (224)..(224): n comprises a, c, g, or t, or includes no nucleotide
  misc_feature (244)..(244): n comprises a, c, g, or t, or includes no nucleotide
atgggatgacatactgacttaggcaataaacactgnattttgacggtgnttgtggattttgttacaggacaaagaatcaaagcatcggcctggggacgtgtgtgtgtgtgtgtgtgtatgtgtgcaagaatgtgtatgcatgcatatgtgtgtgtgtgcgtgcacatgcatgtgtgtgtgtggggctntcttgtgaccaacacggcctntgagattttnactantctcctggtttgaaatgctntgtaaatgtcttgcagtgaaagtggggtagaattgtatttgctctgcctataccacatctatctga

SEQ ID NO: 3717 - DNA, 355 bp, Canis familiaris
  misc_feature (229)..(229): n comprises a, c, g, or t, or includes no nucleotide
  misc_feature (292)..(292): n comprises a, c, g, or t, or includes no nucleotide
  misc_feature (352)..(352): n comprises a, c, g, or t, or includes no nucleotide
ccctgggtggctcagcggtttagcacctgcctttggcccagggcgcgatcctggagtcccgggatcgagtcctacatcgggctcccggcatggagcctgcttctccctctgcctgtgtctctgcctctctctctctctctctctctctatcatgaataaataaataaaatattaaaacaaaaacaaaaacaaaaacaaaacacaccagaatcatttccacgaaaaatcntgagcataataagacacttcatgtcatagttattattcagtattaacttgggtattctagacnacacaagataaagaaatgtgtgtgtgtgtgtgtgtgtgtgtgtgtgtgtgtgtgtgtgtnaaa

SEQ ID NO: 3718 - DNA, 419 bp, Canis familiaris
taatttgaactagggacacctgggtggctcagtggttgagcgtctgccttgggctcagggcgtgattctagggtcctggaatcaagtctcacatcaggctctccacagggagcttgcttctccctctatgtctctctctctctctctctctgtctttcataaataaataaataaaatctaaataataatattttgaactaaaaagagttcagtaacatgattagctttcatctttgatgaaactccgtaaaaacatttgaacttcaaccattatatatatgaagagaagttaccaagtgccatgaaaattgaaccaagatgtgagaacatgtaagagtgaattcctgccactggagacttggaaagagctggtggactggagttttccagagcggtattcatattgagatgcaaaacaa

SEQ ID NO: 3719 - DNA, 319 bp, Canis familiaris
  misc_feature (165)..(165): n comprises a, c, g, or t, or includes no nucleotide
catatacagtctttagctaaacttctaaatgtcagaaatgtagggggcagggattatttgagcagccaacttggagaccagtaacactttccataggaatgtctttaaagacacacacacacacacacacacacacacacacactgcatgtgtgcttgaaaaganagagtaaaaatagacctcagaaattttctactgggaattttttttgtaagaataaactagtagtatgtatgcccttcattctgaagcagaaaagaattagtagccaaaagaagatgtataaaactttgaatgacctctggaaatagcatctaac

SEQ ID NO: 3720 - DNA, 353 bp, Canis familiaris
cttgcatgcctgcaggtcgactctagaggatcaacactcaagttgcattcagactctaaatggaatgagtttctgcaaggacctctgatgtgtgtgtttgtgtgtgtgtgtgtgtgcgtgtatgtgtaaaaaataatttctttgccaactgtaatttaaatatctacataactcctttgttagccactatcatttagagtgatacatttaattctgggtgttttttcaggttgaggaacggttggtacttgttgtcagtcagtgtcagtggcctgctggaatctatccaaagggtattttcctatagttaaagtattgaaattgggtttagcttaaaaaaaaaaaaaatggca

SEQ ID NO: 3721 - DNA, 400 bp, Canis familiaris
gcagtcgactctagaggtgatgataatacccactccacaggttcctgtgagcttaggtgagacaagatatacacgtctatcccatagtaagcacccctctacacacgcacacacacacacacacacacacatgcacaccaactaaagtaagtcaatggcattgttatttagaatatctgacatcagttcttccgaatttagtatatatgctaacaaaatgagctctgtgccatcaattaacccttttggtacttcggttctcttaaatcaatagtgcatatgcgggaaagggaaattattttttttcctttattgggcatctcatttctttggttgcaagtgacaaacactatttctaggtagcttatgaaaagagaatttttggaatgataaggtgatc

SEQ ID NO: 3722 - DNA, 570 bp, Canis familiaris
ctgcaggtcgactctagaggatcagtcacttaggccatgtagcacctgcctgattgacatcagcttcgcagactccagactccgcagagcagaaaccacaaactagctagcataaactctctggtcagactggaacagcatggtccagtgcctcaggcttacaaagaaactcttatcaagtagaacattccaaggtctcaacgctcaggagctaaaagctggctacgggccagtcctgagaacagtccttagaaatgtttaggatttgaccaacataggcctgatgaacgaacactttcctgtacaatatcaaaaatgacaatgtctacaacaacaacaacaacaacaacaacaacaacaacaacaaaaccccctgatttccacctctagtgtttctttcacaaaagcctagaactcattcttagaaaatgtcttagggttcatatcttcaaaacaatcccaatcaagagaaataggatttcatgactagctttaattctgaagtagtatcatcttacctcagaggatattaagcacaaatgaggttctgttaggaagggggaagtagaa

SEQ ID NO: 3723 - DNA, 280 bp, Canis familiaris
  misc_feature (36)..(36): n comprises a, c, g, or t, or includes no nucleotide
  misc_feature (256)..(256): n comprises a, c, g, or t, or includes no nucleotide
tccattttctgaataaatacttgttaaggtcattangtaccaaccttgggtcacttttctaggcacttttctagattctcaggttatatcagtgagaaacaaaattccttgtagggcttagcatttctattttttcacataaggaataaaaatataataaaaagtaaatatatactataatgccctctagtgataaggacacacacacacacacacacacacagggtaataaggatgctcagggaaagacactttnacctgaatgaagtaagagtgaggc

SEQ ID NO: 3724 - DNA, 476 bp, Canis familiaris
tagaggatcctcaaaaagttaaaaatagaactaccctaggatgaagcaatctcactacttggtatttacccaaagaatacaaaaacactaattccaagggatacagtgcacccctctatttataggagcactatttacaatagccaaaatatggaaacaattcaaatgtccattgcttgaggaatggatacagaagctacacacacacacacacacacacaatggaatattattcagtcataaaaaagaatgaaatcttgccattggcaatgacatggatagagctaaagagtataatgctaagtgaaataagtcagtcagagaaagaaaatgccatacaaattcactcgtatgtggaattgaagaaacaaaacaagcaagcaaagggaaaaagaaaggcaagccaagaaacagactcttcagtatagtgaacaaactggtgtttaccagaggggaggtgagtggggagttagggg

SEQ ID NO: 3725 - DNA, 345 bp, Canis familiaris
  misc_feature (241)..(241): n comprises a, c, g, or t, or includes no nucleotide
  misc_feature (265)..(265): n comprises a, c, g, or t, or includes no nucleotide
  misc_feature (299)..(299): n comprises a, c, g, or t, or includes no nucleotide
  misc_feature (303)..(303): n comprises a, c, g, or t, or includes no nucleotide
cgactctagaggatctgttttgtgtcttaagttccacatatgagtgaaatcatgatatttgtctttctctctaatgacctatttcacttagcataatacactctagttccatccacaccattgcaaatggcaagatttcattctttttaatggctgagtaatattccattttatacacacacacacacacacacacacacacacacacaccccgcatcttctttatccattcatcagtcantgattgggcctctttccatatttnggctattgttgataagctaatagcctatcactgntganagccttagtgatacagttgtttaacacacattttatatgtta

SEQ ID NO: 3726 - DNA, 460 bp, Canis familiaris
  misc_feature (30)..(30): n comprises a, c, g, or t, or includes no nucleotide
  misc_feature (101)..(101): n comprises a, c, g, or t, or includes no nucleotide
tgacagtacgactctagaggatcactcggnccctgctgaggtggcgcagaagccaccgcagcccacccctggatgacggagcgcattgccttccggcgganttcacttgtggacgctaagcctgactttcgtaccatcttcctgtgtcacaaaatgtcactcttccgatttttctccactattaaaaaaatgtaagaggcgttgttagcttgcagggcatagaaaaacaggtggcaagctcgatttagcccaaaggctgttttgggttttttgggggggattgggttttgtgtgtgtgtgtgtgtgtgtgtgtgtggcttttttggacctctaatcccagagatggaactccgtttaatctggtcagtgggctattctagaccacaacagaaaaattctcaacacattttggaccattttctcaatacttcacagtatgcaaatattacaacaaacacaa

SEQ ID NO: 3727 - DNA, 550 bp, Canis familiaris
cctgcaggtcgactctagaggatctctacctcgcctcaccctggcctgtcacaaaggcttctgggggctccctctccccaggttgtgggtgtgactttgctcccacagcacccgtgcatactgccaggggttgggattgtgactttcttatccgccccacccttcaatgagcctttgagggcagagacaatgtcctgttaatcccggtgacccccgtgtcccgctcactgctcagggcacattaggtgctcaagagtttataacacacacacacacacacacacaatctttttttcattcttaaaaaggattcagcgtaatatgctaggaatctataaagaagtaaggcaagagcctgagcagaataatacggaatttaaacgaaaactagcgtatcctgtggattcgttttcttccactaaaggggaaggttccagccgttgggctccgctcttctcttcgcgctgtttccagcctcctggatcgctgtccatgattaggggacaagtcacctttcatttctgtgaagccacttaatcgaaagatgtat

SEQ ID NO: 3728 - DNA, 427 bp, Canis familiaris
tgcaggtcgactctagaggatcagactttctctggatgttgctcactgtttcagcagtgtcaattagggattgctgtttcccagaatgcaactaagaagcatgtatttgtgatgttctctgtccttctctcttcttttgtcatttgagagctttatcattcaactcctaacatttaaaattcatgcttggtgaaaaacatgcttggtgaaaaacatgatttgtgtctccaaattatttaataatttgtgtgtgtgtgtgtgtgtgaggtcagattaatataccaaatgaataaggaggaaatgattagagaatgagatatggagtacttgaaactgagattcagaaatggggcagttattgatgatggcaggggctagtttaccaaaggaagtaagtacctgagatgatggcaaggatattcagata

SEQ ID NO: 3729 - DNA, 630 bp, Canis familiaris
cctgcaggtcgactctagaggatcaggacctgagccaaaagcagatgttcaaccaactgagccacccaggcacccctgcagttaatattcttattgatacatagccatctttgtttagtgggagcttgttcaaattggctcctacgtcttttgacatgactctagtagttctttatagcttccttggttttggtatgatgaaatgtttaagattcatatcttacacttcctgctcccaaacttggattcagccatttctctaaagagcctcagttcttctaatgaaagatgacagtgactgaaatctgaggctaaaaatgctcattgctattggcaattgtttctagttcttttcactggctggagctaggaaatggtcatatatttattttagggtcacatacaccatgattttatactgataattccaattcaaattcagggctagagaatgtcactgaattttatctgccttacaagtgtctctgtttttacccatactaaaaatctcgattctcaatgacacaaatagaatactctttggctttatcccacagtatacacacacacacacacacacaccagtgttagaataataggaacaatgccaccatcaatatgattactgaa

SEQ ID NO: 3730 - DNA, 377 bp, Canis familiaris
atctttagggaagatgctactcttattattttagagatgaagaaactgaggctataactgaccagaacactctggacagatgggcttggactaattctttgaggaagcaaggtccccagccctgagatgggaggaaagtgtgtgtgtgtgtgtgtgtgtgtgtgtgtgtgatcttagataattagatatttagaaaaagtccctctcatatatgtttatttcaggtcaaatgtatcaactgggatactttaggctgaaaataatagaaaacctaactaacaatgactaaacccagaggtttttcttactgggaaaaaaaaggcagaagtccccaggatggtccagtatttcagcaaaataatcagaacccaagcctt

SEQ ID NO: 3731 - DNA, 520 bp, Canis familiaris
agagaagttaagcagtctacctgagggcacactgctagaaggtagtaaagccaggattgagccctaagacctgcatttgttaaaaagttttccaagtatctcttttttaagttccagtatacttaatatacagtgttacattagttttaggtgtacaatatagtgattcagcatttctatacatcacccagttctcattacagtaagtgtactcttcatccccatcacctatttcccccacttcccctctggtgaagtttgttctctatcatagagttaagaatctttttttcttaatctctttttttctctcttcatttctctctgtttcttaaattccacatatgagtaaaatcatatggtatttgtctttctctgatggacttgtttcacatagcattatattctctagctccatcagtgttgtggcaaatggcaagatttcgttcctttctatgactgaataatatccactgtgtgtgtgtgtgtgtgtgtgtgtgtgtgtgtgtgtgtaacctcc

SEQ ID NO: 3732 - DNA, 370 bp, Canis familiaris
  misc_feature (342)..(342): n comprises a, c, g, or t, or includes no nucleotide
ttttctttgggtaaatacccaggtgctaacccttgcatgctaagccttactatgtgacagggcccttctgagataagaaccatgtaccctagttccttgaatgtcagataaccagcccatgctccattgagctgcaagcttccatgctctagctttaataatcattatcactactgttattactatattatatttagcttattaaaatgtttatgctattatggtaatatgctatatatgctgatatatgtataatattaggttatactaacattatatatattatatgtattgtattttttttaaggttttatttatttattcataagagacatagagagngaggcagagacatagggagagggagaag

SEQ ID NO: 3733 - DNA, 440 bp, Canis familiaris
tccacacttaggatcacagatgctgatttaacttgaggagacataaacattcactggctttcctccacttattcccatccttctaacactatctttccctttcacacctctattttctccttttcttgatactaactcccttgttcacactgccctatgctcccttggttttctttgaacgctcagtttttctgaaatgcagtttcccattctctgtgtgtagaaaacttcttgctcctccgatggggtaggaattagcaaaatttgctcccaacactgctgtgtctcttattttttgttatttctgagcagagatgccattttggagtgtgtgtgtgtgtgtgtgtgtgtgtgtccacttgtgtatttttaaatacccaggagttgggtcacttggggatgagctgtataatgagcatacagaaccaaacttaacccat

SEQ ID NO: 3734 - DNA, 370 bp, Canis familiaris
  misc_feature (189)..(189): n comprises a, c, g, or t, or includes no nucleotide
  misc_feature (215)..(215): n comprises a, c, g, or t, or includes no nucleotide
  misc_feature (220)..(220): n comprises a, c, g, or t, or includes no nucleotide
  misc_feature (299)..(299): n comprises a, c, g, or t, or includes no nucleotide
tagaggataaaattgaactccatgaagtgggtcaagaggaagtgaatagtttcagaaagaaagcggtcttgtaggtggccaaagaaatacagcttccacagactaaggattaattaatgagcgagagggagagagagacaaaagagacacacacacacacacacacacacacacacacacacacagaanatggcagatatctcattgtaaaaganccagnatctggaaaagcccaagccatttagtgagacctaccttctttcatgttctcatctgtaataatctacccacatatagantgtctgctccaccgctagagtgcaagctgcaaggaggcagccaatttgtctgttttgttaattgctcccca

SEQ ID NO: 3735 - DNA, 375 bp, Canis familiaris
agccagaagcagacgcccaactgctgagccacccagacgtcccagaacttcataacttttatggctgaataatattcaatcgtgtgtgtgtgtgtgtgtgtgtgtgtgtgtagcacattttatttacctatttattccagtcatctgatagatattcgggctgtttctctcttttggctactgttactagtgctgttaagaatgcagatgtacatgtatttggttgagtctctgttttcagttctttggggtatgtacatagcgtggaatcgctgggtcgtatggtaattctatgtttaactttctgaggagccgccaaactgttttcctagaagtccatctttggcaactcatcccgttggattatgcatttct

SEQ ID NO: 3736 - DNA, 333 bp, Canis familiaris
  misc_feature (41)..(41): n comprises a, c, g, or t, or includes no nucleotide
  misc_feature (187)..(187): n comprises a, c, g, or t, or includes no nucleotide
  misc_feature (193)..(193): n comprises a, c, g, or t, or includes no nucleotide
  misc_feature (289)..(289): n comprises a, c, g, or t, or includes no nucleotide
  misc_feature (318)..(318): n comprises a, c, g, or t, or includes no nucleotide
caggttgactcaaatgccaccttctcagtgagacctgtgtntccttgtctctgcagtgtcccttgcactcatgcacacacacacacacacacacacacacacacattcccacatgccccatgacacctcatacctcctctttagttttctccttaatgcctatcattcttatcatactgaatgtttntcctangaatgcttgcttattggtcccctccaggatataaacttcacaagggaggacttgagctgccttgtacacactgctgtgtccccagtgcctgggacngtgtccagcacacagaagatatgcaatanatggtcactgaatga

SEQ ID NO: 3737 - DNA, 490 bp, Canis familiaris
cttgcatgcctgcaggtcgactctagaggatcttgaggtctgggatgaagtcccatatcaggctcctgcatgaagcctactcctccctctgcctatgtctctgcctctgtgtgtgtgtgtgtgtgtgtatgtgtgtatctcatgaactaataaatattttttaaaaatgttaaaaatagaactactctttgattcaacaactgggctactagatatttatcaaaaggatacaaaaacactgatttgaaggtactcatgtaccccaatgtttttagcagcattatcaataatagccaaatgatggaaagtgtccaaatccccatggactgatgaatggataaagaagatgtcctggaatggaatattactcagccatcaaaaaagtgaaatcttgtcatttctaatgacatggatggagctagaatgtattatgccaaatgaaacaagtcagtcagagaaagacaaataccatatttatttcactgatatg

SEQ ID NO: 3738 - DNA, 969 bp, Canis familiaris
tacatctttggtaaaacatctaaagcgaaagccagctggtttcatatcgatggatggatgcttcatcagctcatggaggcctgtttttccatagcggtgacacctcagcctctctctacttggcctgtcttcttggctttatcttatgaagcagtcctcctgcagaatgtcctctgctttaggtacacacctcccctaaacacacccacatactcacgactatttcagacttggcagaggggaggagggagtacttccacttaaagctttaataagcagttcagactgcaggtctgagtcccaagagctacaaatcttacttcctgctattggaagaccagatacctaacagctgacatggtcacatactaccaggggtggaggargagcttgggctcttctgaatgtggacttaaggttactttactatgacttaagtcacaggagattttgcagagaaggaataaaaattctccccatggctttgccccttcctctcaacacacacgtgcatgcacacacacacacacacacacacacgcatggatgcatgcacatacacattcctaccctccatcaggcattggctctgtgaccaagatattccacccagggagtcacctttggcaggggagaatgtgtgacatgggcactgctcatcatgtgccatttaaagccaaggacttttcacctcttagtaaaagtgtttctcaatcaaagtgcttattgaacttcaaactgaatggccatttaaaggctgattgcagcactcccacagtcaaagaaatgaaacttttggctttgttaatgctgagtcttggctcaaggtttgaaggctggatggaattttgccctgtacttgcaaacatttggagaactgctcagtcagccttccgggaaaaacacgcccgcgtcctactgtatgccttcagcttgggtcttgtcaacacagggatcctctagagtcga

SEQ ID NO: 3739 - DNA, 470 bp, Canis familiaris
cttgcatgcctgcaggtcgactctagaggatcttaaaacactattagatatataagattgaattattggctcatataaggcatggataaatggtttgaatctttaagggggagtcacagaacttaatcctcaggtaggagctctttgatgtaaagatttcatttttactttcttgcatgattgcagaggttaagagagcagcacacaagactgaaaattagcatttcagtgggggtggggggaacacaggcatgtacgcacatgcacacacacacacacacacacacatttaagatttttcccagagggagctctaagcagtagaataatacattttttcctagtagaaagggatattaaaactccttatatttactttccctattttgtaacaaagaaatgtaatgtaaagaatgaaccgggataaaacccttctctcctgattccaagtcaaatacttgtgccattca

SEQ ID NO: 3740 - DNA, 390 bp, Canis familiaris
  misc_feature (85)..(85): n comprises a, c, g, or t, or includes no nucleotide
gcttgcatgcctggcaggtcgactctagaggatcactaattctactcctgaaactaagtattacactgtatgttaaataactggnatttaaataaaaacttaaacccattaattccacagagacctaaaacagaaacctcactggaaaccaatactatggtaggaaaatctgaaatgtaattgataaattgctggaggctcagtgtggaccagactgaaagttaaacaacaacaacaacaacaacaacaacaaacaacagcagcaacaacaacaacaacaacaacaactcagggggcgggaggaagaaaccatcatggagggtcctaaaacttctttatttaactccaggagcttgaccataatataacagtgaatatcagagaaaaaaa

SEQ ID NO: 3741 - DNA, 697 bp, Canis familiaris
gcagatattcacgtaaataattcattcataatagtgattttgcagttttagttaaaggggaaatgcatatctcaacaatccactcatgctaaccccagaatgttttacactggtatacagaaaatctataagaatacacatagtgccattggttatagacttacaatacgaaaataatgaaaatgttgttagtagtgggtggataaaggtggtgtagacatagaatgtgcaccatatgtgagttaaaagacctcaataattaaccaaaaggatactatgcaaaataaaatgtttagtaaaaattagttgaaaaatacactgaaattttggtactttcatataattttggaaaagtatacttaaaatatcacactgtgtgtgtgtgtgtgtgtgtgtgtgtgtgtgtaaaggtaaggaagagtgcaccatacatttgtaatgctggtcccaagtggccggggcagtaagtgaggttgagaataggaaggaagatagattgggaagaaaatagttgcaatatgccactaaatgaggtgtttcagtaatcaaatcaaatggatatttgtatccgtcagtttagtattagtattatttagggaaatgctactattagatagaagctagatatgagcatctaaaggaaggcccagaggcagagtcccaagtccttgagggaggaatgatgaaagccccaagc

SEQ ID NO: 3742 - DNA, 390 bp, Canis familiaris
  misc_feature (109)..(109): n comprises a, c, g, or t, or includes no nucleotide
tgaatattttttaaaaaatatttaatttaaaagatatcttttttcttttttatttatttttttttaagattttatttatttattcatgagagacagagagagagaggcnggcagagacataggcagagggagaagcaggctccatgcagggagcccgacgtgggactcaatccggggaccgtgggatcacgtcctgagctgaaggcagatgctcaaccactgagccacccaggcgtcccaggaatcattgttcttaatgaagacagtacaatattttaaaatacgccaatgagactgaaactattttgtattcatacatatacacacacacacacacacacatatatatacaactcaaggacagtgctaacgtggtaggcctctgaacga

SEQ ID NO: 3743 - DNA, 300 bp, Canis familiaris
  misc_feature (42)..(42): n comprises a, c, g, or t, or includes no nucleotide
  misc_feature (201)..(201): n comprises a, c, g, or t, or includes no nucleotide
  misc_feature (274)..(274): n comprises a, c, g, or t, or includes no nucleotide
  misc_feature (276)..(277): n comprises a, c, g, or t, or includes no nucleotide
  misc_feature (289)..(289): n comprises a, c, g, or t, or includes no nucleotide
acccgggctgcccatttctttaattttcttaaaaatgtgctncttttaaaaggcagtaaaagcagtatatattttggtataaccagatagtctcatgactagtgatgctgataggaaaacaatccaagacaatagcttggggtctatttatgtgtgtgtgtgtgtgtgtgtgtgtgtgtgtgtgtgtgtgcctgtatttanatattttatttatctgagagagagagtgcatgagcatgagtgaagagattggtggagggagagggaaaaacanannccccgctgggcntggatctggac

SEQ ID NO: 3744 - DNA, 240 bp, Canis familiaris
  misc_feature (103)..(103): n comprises a, c, g, or t, or includes no nucleotide
  misc_feature (119)..(120): n comprises a, c, g, or t, or includes no nucleotide
  misc_feature (122)..(122): n comprises a, c, g, or t, or includes no nucleotide
  misc_feature (142)..(142): n comprises a, c, g, or t, or includes no nucleotide
  misc_feature (152)..(152): n comprises a, c, g, or t, or includes no nucleotide
  misc_feature (155)..(155): n comprises a, c, g, or t, or includes no nucleotide
ggcattaaaggcatggccagaaagcaagaagatgtatatgtatatacacacttatacacacacacacacacacacacacacacacacacacacatacacagtncctctgtatcttcacnncnctgatatcacatatggcccntggggacggngtnttgtgtgttgtttagtcttggaacttcttttaaagataggatgtcatttacaatcttcaggccatatgtttactcagacttaaga

SEQ ID NO: 3745 - DNA, 196 bp, Canis familiaris
  misc_feature (38)..(38): n comprises a, c, g, or t, or includes no nucleotide
  misc_feature (143)..(143): n comprises a, c, g, or t, or includes no nucleotide
gtgatttcagctataatctgttactattgacaggtgtnctctaaatggcctggagaccatcaaactggctccagaatagtgtgtgtgtgtgtgtgtgtgtgtgtgtgtgtgtgtgaatgatgtgggggcagggaggttatctntctggatatagggctttggaggaaggggtagtatggatctatttctctaataa

SEQ ID NO: 3746 - DNA, 495 bp, Canis familiaris
attccttgatttcacttacccttctagggtggggaatatgatgatttaacacacagaggcatagcgaaaccagcagctctttaataacctgtccctacgcacattccctgaacaaagtgcaacctgcccctggctgtgcacccaagtgtcacccacctgtcactccaccactgggtgggggcctctgtccactagctctttgctcagaaaatgaggacataaactcggtttctttgcccaaagaggtcaggtctagtccacaatggaagagcaaggcaaagggtcagacactaacaggcaagactgcctcacaccagggtgattacaggaaccagaggaagcccaaactaccgcttgccattgaccgggaagacacacacacacacacacacgctaaagcttcactccatgtgctctacttcttcccttgccccatctttcctttccagcaccgcaggaagaggacagtgaggaacatccgagaaactccacagc

SEQ ID NO: 3747 - DNA, 624 bp, Canis familiaris
ctgagtgctttccactcctaactttcttaccatgacagcagagagagctgacacagagcccagacaggtaatgccggtggtaaagctagggtccatcatgaatgggattattccacccacactagcagccagcaggcctgcattaagtgcgtgccttccaggaagcagaagcggggcggatttcaggatacctaggaccgtgcacaagtcagtcagaacctakcacatgtcattaaaccattctccctcccccgttcacatacacatacacatacacacacacacacacacacacacacacacacactcttaagtgcatgtcatttaatcctaaaataccaaactttaatataagaattttttaaaaaggtcctgaaacataaaagcaaagtagggctcttacatataacaaatattaaaagtaggaaaagaatggctcagcttaactgttctttactttgatcccacaacaatttctttactctttgtcacagaatctttaaaaattgtttttttcctgtatgaccaacacagaagttaagtgtggtttcatttaaaacttcaaaagagagtcctagtccattagcatttctgattctatcaactgagcccaagggagaagag

SEQ ID NO: 3748 - DNA, 415 bp, Canis familiaris
  misc_feature (313)..(313): n comprises a, c, g, or t, or includes no nucleotide
atgggcaaaatggatgaaggggagtgggagatacagcttttcagttgtggaatgaatgtataacaggaataaaagacatagcacaaggaattcagtcaatgatattataataatgttgtatgatgacacatggtaactgcacttgtggtaagcatagcattatgtataaaattgtccatcactatattgtacccctggaattaatgtaacattgtatgtcaactaaactcagtaaaaacttaaatatatatacatatatatgttttatatatatacatgtgtgtgtgtgtgtgtgtgtgtgtgtgtgtgtcancattttagggcaatggaaatactctctataataccataataatggatacatttcatcatgcatttgcccagacccatggaatatacaacccactaaaagtga

SEQ ID NO: 3749 - DNA, 223 bp, Canis familiaris
  misc_feature (217)..(217): n comprises a, c, g, or t, or includes no nucleotide
ttccatataaaatgtaaaaccccccctctgaatatcttatgatagtctttttttacttttatttctatataatatactttaatggtggtgatattcacagagaatataatatttgtgtgtgtgtgtgtgtgtgtgttttaaatcaattgctgttactttgcttcaagattcccaagcatcctcacagtttgcattcccttcttaaggattgatgtangtcggt

SEQ ID NO: 3750 - DNA, 306 bp, Canis familiaris
  misc_feature (228)..(230): n comprises a, c, g, or t, or includes no nucleotide
  misc_feature (265)..(265): n comprises a, c, g, or t, or includes no nucleotide
  misc_feature (300)..(300): n comprises a, c, g, or t, or includes no nucleotide
ctttaaaggccaaatgtctcagatgggtagagagcatgtttcaagaatctgggagcacagcaggacagaagaaatgtactgtcaggcccctgaagaacattattttattacacaggtaattctgttttgccaatttagaagcaactgtatataatatatgttctctgtattagccagtgtgtgtgtgtgtgtgtgtgtgtgtgtgtgtgtttaacaactgctagcatnnnctgtcacacatatttttgttaacagtcagtatatnattaacttattgcctttcatgagctgtggacagtngcgcca

SEQ ID NO: 3751 - DNA, 260 bp, Canis familiaris
  misc_feature (57)..(57): n comprises a, c, g, or t, or includes no nucleotide
gttgtggaaggcttcacagggtaagggaccagcgcggggaaatcaactcaagcagtnagaggcactgaagaaaactctggttttgagtcagtttacaggatgaggcttgtctgccttcagcacactgggcacatgaggacccttcaatcagcaggtgaaatgatgagaacaagggcaaggcacagtctgggctttggctccttcattttgtttgaggtgtgtgtgtgtgtgtgtgtgtgtgtgtgtgtgtgtgtgtgtgt

SEQ ID NO: 3752 - DNA, 300 bp, Canis familiaris
  misc_feature (277)..(277): n comprises a, c, g, or t, or includes no nucleotide
agcatggtaactgcctgtactatggggacaatacataaatataccttattttgttagaatcattttgagaacagattctgttgggtagccctcaaattactgtccaaaccccatctctcttgcctggtgcctaccatggtgtctgagaagccagactctttaccttgcagcaacccttgccgctgaggggtggctttatgacctggttgcagtctgtgagaaggctcctggactggaattttcactttttctttggttgcggagagcaaaattaccngcacctaggactgctgatactgt

SEQ ID NO: 3753 - DNA, 298 bp, Canis familiaris
  misc_feature (292)..(292): n comprises a, c, g, or t, or includes no nucleotide
ctgtggtcaggaaacagctgggaaagacattaaaagtgtgtatgtgtgtgtgtgtgtgtgtgtgttggggggggcatctccgacttaaaaagatggaaacgcagcagcagccagagcccgagcgtcgtggacactgtgcagggcctgtgggtgggacgtggggaggtgacctcgccaccggcctgtcctccagcctcagacgtgggtgcccgtgtgctcccctctgccgcagcttcgagaggtctcaaagcaaatgcctcttagctcaggccttgtctgtgtggactccggnctctga

SEQ ID NO: 3754 - DNA, 624 bp, Canis familiaris
aagattgggagcagctgagctggggctgttcctagcacagtactgcttctgaccattccacaatatctaacttagttctgagggaggcttgccttcaacacccatagctcttcaacttggcttgtgtgtgtgtgtgtgtgtgtgtgtgtgtgtgtgtgcatgcatgtgcacgtgtgtgtatatgtatgcacacatataaatawgtmtttatatttatagacatgaattactgctgtctaatatatggagagcttacttatggtaaactcccagtttcataaacaagtataaaaattgaaaagatttgaaaaaatagtcatgggattatgaaatttgacattttctcacataatatttttcttgccaagtctcctaaaaaaagtttttcctaagattttatgctatatgctgttaggttatttatgatgaagtgccactgcctagaaatgtgaaaccgtactggcactgggaagtaagcccctaggagatgaaaaagagaatagtaatgccgtcgggtgagcttattacaatggacaattgttttctcacaaacaaaactgaagtttatataagccttattaaatgcagatgccacaagtttgttggatttatttacttatttgg

SEQ ID NO: 3755 - DNA, 294 bp, Canis familiaris
  misc_feature (49)..(49): n comprises a, c, g, or t, or includes no nucleotide
  misc_feature (260)..(260): n comprises a, c, g, or t, or includes no nucleotide
tgcgggggggaagggaggctgcttgggattctctccctctctctctgcncaacctgctctctctaaataaatctttttaaaaatgaaaaataaaaaaaattaaaataataaaatgagaataagaaggctaatatttctcttttaaaattctcattaaaacacacacacacacacacacacacacacacgagcttgtttaaatgcaaagcccccaaaattcactgtgtatagggttagcttaaaagataaaagcaaaggantcaaggaggattatacttattaggattataaata

SEQ ID NO: 3756 - DNA, 290 bp, Canis familiaris
  misc_feature (227)..(227): n comprises a, c, g, or t, or includes no nucleotide
  misc_feature (266)..(266): n comprises a, c, g, or t, or includes no nucleotide
acatttgtagaaagacaaacttgacagtcttttcaggacatgactacattctcttttagaagtcactcatgagtaacaatttagtgtccttgtagtactatcattttgtcagtagtgagtgttggtgtgtgtgtgtgtgtgtgtgtgtattagactgggggggaataggtaactccattggtgcatcttgaatgctagggtgccttatttagcacagctatcatgangcaggtattttttaaatattcaaatctagatactttganattgcagaattttgtcataaccca

SEQ ID NO: 3757 - DNA, 259 bp, Canis familiaris
  misc_feature (157)..(157): n comprises a, c, g, or t, or includes no nucleotide
  misc_feature (167)..(167): n comprises a, c, g, or t, or includes no nucleotide
  misc_feature (170)..(170): n comprises a, c, g, or t, or includes no nucleotide
  misc_feature (176)..(176): n comprises a, c, g, or t, or includes no nucleotide
  misc_feature (211)..(211): n comprises a, c, g, or t, or includes no nucleotide
  misc_feature (217)..(217): n comprises a, c, g, or t, or includes no nucleotide
  misc_feature (219)..(219): n comprises a, c, g, or t, or includes no nucleotide
  misc_feature (249)..(249): n comprises a, c, g, or t, or includes no nucleotide
cttttccccctgttggccactaatacaccttattctggaataatatttccctttgctttagtaggttttgaaaatcagcattattctttccacagtggtagtttacatttttacctacacacacacacacacacacacacacacacacacacactcntgcacaagtnagngagatntaaagcctctcattttttattcttgaaaccccganaggganantgttcttcatgtgccaaagaatacagccantcattatttt

SEQ ID NO: 3758 - DNA, 305 bp, Canis familiaris
  misc_feature (181)..(181): n comprises a, c, g, or t, or includes no nucleotide
acaagtattctggttaatctaaaattctcttgcttctagtggggtctctattgcctagtgtggacctgacctcagagatatagatgaaagtgaggttccaagagctattttagcctataaccccctctttgaacttcctgagctggtgtgtgtgtgtgtgtgttttattctatgaaggtangaaccatgattacataagggcttgtgcaagaatgctgcttacgcctaaattgttgatttccttaaaaggatacctattcccttgaagcagtcatgtccaaaaaatattgaactagagaatttct

SEQ ID NO: 3759 - DNA, 233 bp, Canis familiaris
  misc_feature (77)..(77): n comprises a, c, g, or t, or includes no nucleotide
  misc_feature (124)..(124): n comprises a, c, g, or t, or includes no nucleotide
  misc_feature (128)..(128): n comprises a, c, g, or t, or includes no nucleotide
  misc_feature (165)..(166): n comprises a, c, g, or t, or includes no nucleotide
  misc_feature (192)..(192): n comprises a, c, g, or t, or includes no nucleotide
  misc_feature (199)..(199): n comprises a, c, g, or t, or includes no nucleotide
  misc_feature (213)..(213): n comprises a, c, g, or t, or includes no nucleotide
  misc_feature (224)..(224): n comprises a, c, g, or t, or includes no nucleotide
gctgttggaaaaatagcaccaatagacttgctcaacacgggctttttacaaaccatcatttttttttttaagtaatntctgtaaaaggcaataaagcaaagtacaataaaatgaaattagttanggcngcatacacacacacacacacacacacactaaaatganntatagctgcacacacacaatggaatnttatccncccccccaaaaaanaaaaaaatccngatatttat

SEQ ID NO: 3760 - DNA, 257 bp, Canis familiaris
  misc_feature (29)..(29): n comprises a, c, g, or t, or includes no nucleotide
  misc_feature (31)..(33): n comprises a, c, g, or t, or includes no nucleotide
  misc_feature (36)..(38): n comprises a, c, g, or t, or includes no nucleotide
  misc_feature (45)..(45): n comprises a, c, g, or t, or includes no nucleotide
  misc_feature (90)..(90): n comprises a, c, g, or t, or includes no nucleotide
  misc_feature (163)..(163): n comprises a, c, g, or t, or includes no nucleotide
  misc_feature (165)..(165): n comprises a, c, g, or t, or includes no nucleotide
  misc_feature (192)..(192): n comprises a, c, g, or t, or includes no nucleotide
  misc_feature (201)..(201): n comprises a, c, g, or t, or includes no nucleotide
  misc_feature (241)..(241): n comprises a, c, g, or t, or includes no nucleotide
  misc_feature (248)..(248): n comprises a, c, g, or t, or includes no nucleotide
atgggatgtgtgtcatgtgtgcatgtgtngnnngtnnntggtatnctttgcatatggtgtgtgtggtacatgtgtatgcatgcatgtgtnacattgtatgtggcatgtttgtatatctggctgtgtgtgtgtgtgtgtgtgtgtgtgtgtgtgtgtgtgtgtncnagacttgtatataagaaaatggaattnctacctcancggctttagtacatgtgcctaccctgcataggtgctctcnggttatngagacatct

SEQ ID NO: 3761 - DNA, 199 bp, Canis familiaris
aaagtctggtcttcacccatcaccatttttgtatttcagtggtgtttcaggctaaaggtccctgcagagtatgtgtatgtatgtgtgtgtgtgtgtgtgtgtgtgtgtgatggggaggggtcatggggccacattttccatctaatacaaccccaccctccccccagagagcacatccatacatactcatgctcttgct

SEQ ID NO: 3762 - DNA, 760 bp, Canis familiaris
atcgggctccctgcatgaagcttgcttctccctctgcctatgtctctgtctctctctgtgtctgtcatgaataaataaataaaatcttaaaaaaaataaaaataaaaaagctttccctagttagtcttctcactctggctactcctttaccagccacccatccccacaaagtctttttagatactgttttcggtatgtgtgtgtgtgtatgtgtgtgtgtgtgtgtgtatatatatatatatatatatatacawgtgccactctgcagctcccagatgggtaggcattccttcagacctgtgcctgcatcccctctaaccaccacaatacccagctgtatgtcacaccttacaaatttcttcaattcatcttcaagatggctgtggattttacttctttcccttatgttttaatmacacagcttacatcacctcaaaactatacattaactgacacaaataaaaaggctaatgcatcctttggcaatcattattatttatttcctctctacctctattgaggaaaaaacaactttctttgccaactctcttttgccaaatactttgaaaacagccctaatgatagtgaacattttgtataactttttacagcttcacacgcattttcacattcattattttattcactgtcgtaaattatcataattagtgagctaagtggtcggttggcaccagtaatacagtctcccatttctcagatgtgaaattaaaactttgaaaggtagattataaaaacgagt

SEQ ID NO: 3763 - DNA, 274 bp, Canis familiaris
  misc_feature (233)..(233): n comprises a, c, g, or t, or includes no nucleotide
cccatacccattctttacaccagttccccagccccgaagctggagcatccttgcccatcctgcagattggtaccgattcaagtttttttctaggccccgaggccttgacctcgcccatcaaggcccacgctgtccaacttgtcggaagccaggaggcattcccttttctcgctccattctgaagtaaagaataacagtagagttgtcccaacagaggagaagttatgaagtcnaggtgggaagaggaggtgaaagtgcaatgctggggagaaaa

SEQ ID NO: 3764 - DNA, 272 bp, Canis familiaris
  misc_feature (149)..(149): n comprises a, c, g, or t, or includes no nucleotide
tcaaagatgaagtatatacacacacacacacacacacacacacacacacacacacacacggagctacagagattccagaggcttcctcgtaaccactgttccctccgacttccagaagcagggaacgcatttttgtcttgacgtgactnccatctataggtaccacagtatgtggcagaaaatggaatgaatcttatcgtttctaccaaatgatgagaaagcttccaagcttgagtcacctgtccagttgtcagagtcacttgagctcccct

SEQ ID NO: 3765 - DNA, 306 bp, Canis familiaris
  misc_feature (130)..(130): n comprises a, c, g, or t, or includes no nucleotide
  misc_feature (254)..(254): n comprises a, c, g, or t, or includes no nucleotide
  misc_feature (287)..(288): n comprises a, c, g, or t, or includes no nucleotide
ggaaaggtttatttttctttttaataaaatgtctgtttgtcattacatttcttgggtgctggatgattattgtaatgggattttaacatacgagagaagacgggtgtgtgtgtgtgtgtgtgtgtgtgtncacgcacacacgtgcgtgtgacagtttcgcacctttcaattgccagatgaacaagggcacagatgccttttattatcagcgattaaaaaaacacacacttctccttgaaggaaaattttgtatntgtaaatgaaaattatccccatgcactcttgcnnttggcgctcttcatgcca

SEQ ID NO: 3766 - DNA, 622 bp, Canis familiaris
actaattcaaagggatacatgcactcctatgtttattgctgcattatttacaacagccaaatcatggaagcagccaagtgcccatcaacagatgaatggataaagaagatgtgatatatatatatatcayacacacacacacacacacacacacacacacacacagarggggttcaytcwatatttactctgtgacttctatatccasacaaaggaaaggatggaggtgctaaggcagtagaaagaaggtcccagatatcctagttttgtttatatatagtatgtatatagaaatattattcatccataagaaggaatgaaatyttgccatttgcmacmacatggatggaactagagagtacaatgctaagtgaaataagtcaaagagagacaaataccacatgatttcactcatgtggaatttaagaaacaaaacaaacaagcaaaggaaaaaaaaaagagataaacccaagaaacagaggggacatgagtggggtggggatgggggaagtaggggatgattaaagagtgtacttatcaagatgagcactgactaacttgtatagaattgttgaatcakgggcagcccgggkggctccagctgtttagcgtcaccttcagc

SEQ ID NO: 3767 - DNA, 610 bp, Canis familiaris
  misc_feature (63)..(63): n comprises a, c, g, or t, or includes no nucleotide
  misc_feature (185)..(185): n comprises a, c, g, or t, or includes no nucleotide
  misc_feature (347)..(347): n comprises a, c, g, or t, or includes no nucleotide
  misc_feature (498)..(498): n comprises a, c, g, or t, or includes no nucleotide
  misc_feature (540)..(540): n comprises a, c, g, or t, or includes no nucleotide
  misc_feature (544)..(544): n comprises a, c, g, or t, or includes no nucleotide
  misc_feature (554)..(554): n comprises a, c, g, or t, or includes no nucleotide
tcaagtaaaatcttctatgttcttactaattttttgtcttaatcagtttttgagatgagtttnaaaatgctataagtgaactatcttaagataaatccagtagtttcagcttttgtatatttgagaccacattgttaggcatatataatttagaattgtctatcacaaggtgaattttaactgtntataattttatagtatctcttcttatctctaaataatgattttgccttaaagtattttctccaatactaatatatctgcatcaagactgacttaataacatttattctatccttctactttggatgtttctatatctttatattttaggtatttctcttgtnacacctcttgtctagttgacaatctttgcctttcaactggagagtttagtgcacttacatttaatatgattactgatatatttggaattattgctatcacttaattatttatgtgtgtgtgtgtgtgtgtgtatgtataatactacctgtnttttcctcctttcttgactacttttggaatgatttgtttgtntgtntgttgtatgngaatgattgtttttttaatgacactttttctcaacctctgtttggaatatatactc

SEQ ID NO: 3768 - DNA, 195 bp, Canis familiaris
  misc_feature (120)..(120): n comprises a, c, g, or t, or includes no nucleotide
  misc_feature (160)..(160): n comprises a, c, g, or t, or includes no nucleotide
  misc_feature (174)..(174): n comprises a, c, g, or t, or includes no nucleotide
ggcagaggaagaagctacagggctgtttttttccagtcctcaaatgcacacacacacacacacacacacacacacatttttaaagactcttcatccttttattcccttcctacatttgcntgggtttccactggggaatgatttgagacactttcatatnccagctcatctttntctaaaaaaaaaaaaaaaaaa

SEQ ID NO: 3769 - DNA, 509 bp, Canis familiaris
atgcagcaggaggcaaaatagtgcgggagggttagcacggaacctagtcttctccagcctggcctccaccactcatggtggtcacggcacataggagggttcactaagtgctttttgaatggctgtgacatggaataaatgtcattgacactygtgtgtgtgtgtgtgtgtgtgtgtgtgtgtgtgtgtgtatctgtgcmactwtggtyacyaygtgwgwtttttttttaaatgcatctatttaccaccatatattctccctttgaagtcgagaaccatgtaattaatgtcatccttgtaagtattaacagcttctgtgaggctttttccattgtgggatggagtctaaagtgatacagttttttaaattacagactaagttcacatggtgttattttacttaaaatgcttatctcagaccatcttctttcatgctggcccatcgttagaagcactgaagtaaaggctggacgaccaactaccagtggcccaccccccatcccccttat

SEQ ID NO: 3770 - DNA, 357 bp, Canis familiaris
tctgcttcaactcctctttaccagctacctcacttcatttgggtcttgatttcagaatgtcatctcttcaatgcattttgtgaccatcttgtccatcagccctctaacccatttcatcatcctctgtcgtcttgtcctgttttatttgcttcatgccacttatcactccttgaaattacatgttgtgtgtgtgtgtgtgtgtgtattccccattatgggaataatggatttatctatttgttgctataacttcaatgcctaatagtaagcactcagttaatgaacacatgagtgaatgaatgaagttatttacttccaaaaatggaaacataccgcagacatcaatttgcatcttct

SEQ ID NO: 3771 - DNA, 247 bp, Canis familiaris
  misc_feature (26)..(26): n comprises a, c, g, or t, or includes no nucleotide
  misc_feature (28)..(28): n comprises a, c, g, or t, or includes no nucleotide
  misc_feature (127)..(127): n comprises a, c, g, or t, or includes no nucleotide
  misc_feature (137)..(137): n comprises a, c, g, or t, or includes no nucleotide
  misc_feature (154)..(154): n comprises a, c, g, or t, or includes no nucleotide
  misc_feature (167)..(167): n comprises a, c, g, or t, or includes no nucleotide
gagtatgtgagacaaaatgagagagnanttgtgagattgagtgagaatctctgagacaatgagaggagagagagagacacacacacacacacacacacacacacacacacacactcagagacagagnatcagcatgntagagagctgctgtttnttcatcaaatttngggacagtatgttcatgtgaggaagccacctgaggctgggtggagatttacctggattcattagggtggagcccaggtac

SEQ ID NO: 3772 - DNA, 270 bp, Canis familiaris
  misc_feature (37)..(37): n comprises a, c, g, or t, or includes no nucleotide
  misc_feature (65)..(65): n comprises a, c, g, or t, or includes no nucleotide
  misc_feature (215)..(215): n comprises a, c, g, or t, or includes no nucleotide
  misc_feature (230)..(230): n comprises a, c, g, or t, or includes no nucleotide
  misc_feature (238)..(238): n comprises a, c, g, or t, or includes no nucleotide
ttttttctatatccccactaccttccccgaggttccngtgaagtcttgaactgtgttgtgtttanggggtggtggtagtgggggagaaagaaacaaccacagtgaattcactggggtttggtagattgaatcatcaggtttgtaacaatttcttgaggttctgtgtgtgtgtgtgtgtgtgtgtgtgtgtgtggttcggatgttcttgcatgcangagcaatggcagctntgttggantcagtggacatgccttgatggacactgggcgc

SEQ ID NO: 3773 - DNA, 604 bp, Canis familiaris
gcatcaagcttagtgggtttgcaagtggaacaaaagagttatgagaaacaccctgaaaataaagatagcagggatgattcaacaatgagagacaatctatgtagataccagggtctaatcttcccatacactctgtgtgtgtgtgtgtgtgtgtgtgtgtgtgtgtgtgtatggtgtgtgcaggggaagactgarsgctcgtggggaagatgtgctattgctggaacagctgtatytctaactcttccaaattgtaattgggttgtgtacaagaatttytcagagtgtgggtgggcagaaaaacatccagcttcacatcagaatgttaaccaaagaggaaccatgwacctttatatttttgtagtgtaaggaggaggcaaataccaagtcgtttcctatgtgaatagctcagaagtaccttacatttccagttccatcctagtgggatagtgggttagctgacatgggcgatggaatcagatttcctgggtcgaatcctcattctgtcacttacttggtgtttgaccttgggaagtgtccttaattactctgtgcctcaatttccttactcagtaaaattttgaataataatagaatgtatcga

SEQ ID NO: 3774 - DNA, 645 bp, Canis familiaris
ccatatagaaattagtggtatgcaattgataaaaatatgcgattgataaaaaaataatttctttaatgaagtcaattaaatctaacttagacagtttgataccttgtwtgtagccttgacgtttgctgacccccctgcaagtcatcctgttatcattggagcagatttgcaggtgttttacagactgagttatatactccattagtgagtcctgtaattaagtgttgtgaccgacattaaaaacaaaccaaaaagactagactgtagattaacatcagaaaccatcagtatgcatctcaccacagtagttgtattgttgaagaacttttgtttgttcttagtatattcatacatacataggtgctgatactgagtttggctatgcagtgtgctcttaccctggggtcttggacaaaaaggttagaaactgctgggtctgctgattaggttcctgactacatatatcaggggaagtgatgctcaggcagctagcccasgasagcatatcggtgtcttttagttacacacacacacacacacwcacacacacacacacacactctgttatcacctaaattcagaactgccgccttctttcgtctcccccttccgkgaccccacaatctgtctggactcttttcagtg

SEQ ID NO: 3775 - DNA, 228 bp, Canis familiaris
  misc_feature (38)..(38): n comprises a, c, g, or t, or includes no nucleotide
  misc_feature (191)..(191): n comprises a, c, g, or t, or includes no nucleotide
  misc_feature (193)..(193): n comprises a, c, g, or t, or includes no nucleotide
  misc_feature (197)..(197): n comprises a, c, g, or t, or includes no nucleotide
aatatgtttctcaaagggaaaaccactccctgaacatncattcagctcccatttgctggcccacccaacctgtctgttcctccttgcgttcttctatacccaactgtatcagtaaagtttctccagaaaaacagaaccacaactgtgtgtgtgtgtgtgtgtgtgtgtgtgtgtgtgtgtgtgtgtgtgtnanaganatttagtataagggattggctcacacagtta

SEQ ID NO: 3776 - DNA, 293 bp, Canis familiaris
  misc_feature (108)..(108): n comprises a, c, g, or t, or includes no nucleotide
  misc_feature (111)..(111): n comprises a, c, g, or t, or includes no nucleotide
  misc_feature (123)..(123): n comprises a, c, g, or t, or includes no nucleotide
  misc_feature (187)..(187): n comprises a, c, g, or t, or includes no nucleotide
  misc_feature (217)..(217): n comprises a, c, g, or t, or includes no nucleotide
  misc_feature (225)..(225): n comprises a, c, g, or t, or includes no nucleotide
  misc_feature (231)..(231): n comprises a, c, g, or t, or includes no nucleotide
tatagcagcaattagccacaatagccaaactatagaaaaaaaagtctagatggctaaagaagtggtatacacacacacacacacacacacacacacgcacacaatggnganatatagataganagatagataaatagatagatagacatagatatagatagatatgaatatcttgctatttgcagcnatgtgaaatggaactagagttttgtgctantcaaaatnagtcantcagagaaaaaatatataccatattatttcattcatacttggaatttaaggggtagggtaga

SEQ ID NO: 3777 - DNA, 567 bp, Canis familiaris
  misc_feature (309)..(309): n comprises a, c, g, or t, or includes no nucleotide
ctctctctctctctcctctctctctctctctctgtgtctctcatgaataaataaataaaagtcttttttaaaaaacaatgaacaatacctacaaggccttcatgtgcatcstgtgtgtgtggtytctgtaccatatgaattytcttatgtcatgtaaaggtgagttatgactgaatgttgttccacagtcttcacactcacagctctgcattccagtggaaagtctgctgtgcrgtcawgtgtgwgctctgtctgagggcaccatgggattcattacatttaggagaaaaatccagagttggttggcangctgatggggagaccataagagaagaaaataagatgagactctcacatcacaatatawatcacaatgaagtgtgtgtgtgtgtgtgtgtgtgtgtgtgtgtgthtatgtgtgtaggatacaaagaaatggtgattgcaagttgggaagtagcagtgtgtggggatgaggagtgaatggtgcatctatgcattttgaaggtctcatttatttttttttagtttttttgtttgtttgttttgttttttacacagagagag

SEQ ID NO: 3778 - DNA, 575 bp, Canis familiaris
  misc_feature (84)..(84): n comprises a, c, g, or t, or includes no nucleotide
caattttctggatttgtaatttttaaccatggaaggtgcgtgtgaactggccctggtaaattactaaaatgactgtacagtgtntttgcagcagatgttttttgaagcagcccgttgtagaggagacattaatgcctggtgtttaagggcagaggctttggcaagacagagtcctaagctcaaaaatgcagttcttatgcttattacttctgtataactttgggcaattactctaaatgattaataaaatgaggcggctaatagctatttttttcaccacctttgtgaacctaaatgagacagtgtgtgcaaagcatttagtacaatggcctatcatagggwtagaaacatggcagtttttgttatwtcaactattagtgtgtgtgtgtgtgtgtgtgtgtgtgtgtgtgtgtgagaatatattccaggaagaatgaccgaaatgtgtatatcttctggcactctcagatgaatataaccatgttctgggaactaaaactatcatgtagactttgtcattatgtctctgttcctcagggttttgcagaagaatcaaaacttactgaacagatact

SEQ ID NO: 3779 - DNA, 380 bp, Canis familiaris
  misc_feature (15)..(15): n comprises a, c, g, or t, or includes no nucleotide
  misc_feature (234)..(234): n comprises a, c, g, or t, or includes no nucleotide
aatcagtggcttgtnatactaattactttttttctaatgtgcataagaatgaatttagaactactaaaatgcccagtgattctctctagaaccagtctctagccccaggccaggatgggggcttcaaggacttaagaagaggctgtggaggatggcttggaagcctagcaagcttgggaagcaagactcagacacagaggctgatacccaacctggtttggggacaccggcccngggaatttcagccattgttcctggttctgaccgacttttccagtgtgtgtgtgtgtgtgtgtgtatgtgtgtgtctgcatgcatgtggacacagactcccatgctcctgcacacacacctgggtgtgtacacatgtctgggtgtgg

SEQ ID NO: 3780 - DNA, 397 bp, Canis familiaris
  misc_feature (75)..(75): n comprises a, c, g, or t, or includes no nucleotide
  misc_feature (278)..(278): n comprises a, c, g, or t, or includes no nucleotide
  misc_feature (288)..(288): n comprises a, c, g, or t, or includes no nucleotide
  misc_feature (299)..(299): n comprises a, c, g, or t, or includes no nucleotide
  misc_feature (315)..(316): n comprises a, c, g, or t, or includes no nucleotide
  misc_feature (369)..(369): n comprises a, c, g, or t, or includes no nucleotide
ctaccaagttactttgaatcctgggtgatagtctccctctttcccctccttcctttcttccttcctgaacatgtnagagcatagaatgtcctcatatgaacgcaggcggtctggggtcgggctaactggtctccttacattccattgtttctctagagaacagttcaagccttgaaacaaaggagtaggatttggccctagatttaaaatataaatcgtgtgtgtggtgtgtgtgtgtgtgtgtgtgtgtcctctatgagacaagaactggagaacanaagaaatttncatgccttgangataaagcatgctatnnggttgctttgtataccagtcaaaccagtttacacctctccaatgtgttgaccncattatacccttccgagcattaaatgtc

SEQ ID NO: 3781 - DNA, 759 bp, Canis familiaris
ccagacataaaaggacaaatattgtataattccacttataagaggcattgagaataggcaaattcatagaaacagaaaataaaacagaggttactagaggctgagaggagaggggaatggagacctactgttaatcagatacagtttctgtttgggaagaagaaaaaggtctggaaatggatagtagtgatggttgcacaacattgtgaatgaacttaataccactgagttgtatacctaaaaatggttacaatggtaaattttatattatgtatattttctttcgattttaaaacaggagtgtgtgtgtgtgtgtgtgtgtgtgtgtaagggaatagataacacaagattggcaaaatgttaaagatttttggatgtaggtggtatatacatgaggtttattttcaattttttccttttttgtgtatgtttaaaaaaattccttaataaaaaattttaaaggcttaagagacataataagcaaatataataagtatcttatttatattttgtttttgttttttagatttcatttatttatttgacagagagagaaagagagagagagcacgcatgagcaggggaaggggcagagggagagggagaagcaggctctctgctgagcagggaggccaackcagggcttaagtccaggatcccaagaccatgagctgagtgggaaggcagatgcttaactggctaagccacccaggcacccctaatcttgacttaaaatacaaaagtaaaaaagacattttt

SEQ ID NO: 3782 - DNA, 346 bp, Canis familiaris
  misc_feature (235)..(235): n comprises a, c, g, or t, or includes no nucleotide
cgacctcacttttaggaatgtctctttatgagtctgattttttttcctctgaactctacattatatggcagtaatatatccaatccatgcattttaagttaagagttgcattcattatcttttatcattcttttactttcaacttatctatatagttacatttgaagtggacctggaggcagcatatagctgggtagcaggtgtgtgtgtgtgtgtgtgtgggtgtgtgggtgtnaatccactctttcaatctcagtcttttaattaatgtatttagaccatttacatttaaagtaactattgatgtgttaaggttaaggctgacattttaatatttgtcttctgt

SEQ ID NO: 3783 - DNA, 490 bp, Canis familiaris
  misc_feature (291)..(291): n comprises a, c, g, or t, or includes no nucleotide
  misc_feature (331)..(331): n comprises a, c, g, or t, or includes no nucleotide
  misc_feature (351)..(351): n comprises a, c, g, or t, or includes no nucleotide
  misc_feature (394)..(394): n comprises a, c, g, or t, or includes no nucleotide
  misc_feature (400)..(400): n comprises a, c, g, or t, or includes no nucleotide
  misc_feature (432)..(432): n comprises a, c, g, or t, or includes no nucleotide
agtctcttgagagagtaggttatactcttatgtgcacatgattggatattattcgacaagtgataagcaaaaaactgtgctaagtctcttgtagcataaaaaagaccaagagtctggtccctccaatcgtcagggagctcacccccttaggaggaggcaagacacttgcacaaataactgaaacacacacatacacaaaagtgtaatagagtgaatgtcactatgtatttattcccttagacacagttattgatgagaaatttttacctggggtgtgtgcatgcatatgtnagtgtgtgtgtgtgtgtgtgtgtgtgtgtgcacatgcacnttgtccaagacgtgttgtcncagattctgtggaggccttctccgtatgtggcgtgtgtgtccntccctnagttggcacattggctgtgtccactgttgtangtcacaggaagccggtcggagctgttcatcaattctcaagccataacaaagcacgtgt

SEQ ID NO: 3784 - DNA, 500 bp, Canis familiaris
tggatatggggtctgaccttatctatcagtggctgagctgttgtctcatggaaatgcagtttgaaacccattaatagggtagcctgtatattataacttagaagctctgggttatcactgatgcttgcaattgctatggaaaccgggttcatatgcacctttcaaagagtctgctttaaaacaggggaaaaaaggaagaggaaaaaaaaggctccttgaaagaataagacattagtatccaacatgcataggcagggtccgtgatgcaaaaacgctctgcctacacagtgataaaaacaatcctttatattttttaggagctaataatgtataaccttgtattagagaactgtgtttacactgatgaggaagaaagcctctggcaacttccccccctgcacacacgcacatgcacacacacacacacacacacacatgaacacacatgcacccataatttttggctttccccagacttttcccagactgcatccttaaat

SEQ ID NO: 3785 - DNA, 259 bp, Canis familiaris
  misc_feature (151)..(151): n comprises a, c, g, or t, or includes no nucleotide
  misc_feature (183)..(183): n comprises a, c, g, or t, or includes no nucleotide
  misc_feature (186)..(186): n comprises a, c, g, or t, or includes no nucleotide
  misc_feature (198)..(198): n comprises a, c, g, or t, or includes no nucleotide
  misc_feature (208)..(208): n comprises a, c, g, or t, or includes no nucleotide
  misc_feature (213)..(213): n comprises a, c, g, or t, or includes no nucleotide
tctctgtgcagctcgagaaggacgtgagctgatgctcagaagaggctgtgcgagcttgcagccttgtcagaacacacacacacacacacacacacacacacacgtccttttaatctccttcatggaaaagatgtaatgtattgaaaattangtgctatagtttcttttctgtcactgaaaatnccncctgccaagcanatggctgaanatttnggacaagctggtggcctgtgtgccttgctctccctaccccaccctt

SEQ ID NO: 3786 - DNA, 556 bp, Canis familiaris
  misc_feature (47)..(47): n comprises a, c, g, or t, or includes no nucleotide
  misc_feature (349)..(349): n comprises a, c, g, or t, or includes no nucleotide
aatagaattagtgcccttagaaaagagacaccaccagagctctgtanccccttctgccatgtgagggtattgcaagaaagtgggcatttgtgaaccaagaagtcagtcctcactggacactgagtctgctggtgccttcaccttggatgccctgcctccagaatggtaagaagtaaatctctgcatttataagccactccaactatggtattggcattctgttatagcctgaatagagcaacatatcttttttaggttatgttgttgtattttgaatgccccaaattatatatatatttatatatacacacacacacacacacacacactttatttttagagtggtttnaggttcacagcaaaattgagtagacagttcagggagttccatatacctctctccaccccacatgcatagccttcctcactatcaacatcctgcaccagagcagtatatttgtgaatgcggtccaacccaagaacccacactgacacatcactaccacccaaagtgcacggtttaccttacctcactgctcactcttagtgtcataca

SEQ ID NO: 3787 - DNA, 355 bp, Canis familiaris
  misc_feature (50)..(50): n comprises a, c, g, or t, or includes no nucleotide
  misc_feature (289)..(290): n comprises a, c, g, or t, or includes no nucleotide
ggcactcattctatctctatcttggctcaatgtgccagctcctcattctnacagtctctcctacacacacacacacacacacatacacacacacaccagttttttttctcttttcttgtgccttgtcaaagaaagactaagctctgtcttgcaatatcaaatctacattcctgttgaagggaccaagacccagactgacctacatgaaatgagggtggatagatgtaggatgtgtaaatcctgtaagaatgggcatggggggagagctggagaatgcagtccatatgtnnatcccctacaatatcaatcagaataaatcagtattctagcaaataatcaaatgtaggaatatacc

SEQ ID NO: 3788 - DNA, 581 bp, Canis familiaris
  misc_feature (64)..(65): n comprises a, c, g, or t, or includes no nucleotide
  misc_feature (100)..(100): n comprises a, c, g, or t, or includes no nucleotide
  misc_feature (179)..(179): n comprises a, c, g, or t, or includes no nucleotide
  misc_feature (293)..(293): n comprises a, c, g, or t, or includes no nucleotide
  misc_feature (346)..(346): n comprises a, c, g, or t, or includes no nucleotide
  misc_feature (358)..(358): n comprises a, c, g, or t, or includes no nucleotide
  misc_feature (380)..(380): n comprises a, c, g, or t, or includes no nucleotide
  misc_feature (464)..(464): n comprises a, c, g, or t, or includes no nucleotide
  misc_feature (519)..(519): n comprises a, c, g, or t, or includes no nucleotide
agagctgctgtgaaggagacgccagtgacaagagcatggttagtcaatggcacaattattggcnnatatgtatatttgtacatgtcagtgtgtgagtcantgtgtgtgtgtgtgtgtgtgtgtgtgtgcagaggagagggagaagagagagagaaagaaagcagagagaagcaaagcanaggaagagaagatagtgagagagatgagtagatgatactctgcttgagcatttatctagttccaagctctctctgccctatctatcttcctgttattatttttgagagagctantgatttttgattcatgaattctctcccaggttttgtatgaaggctaggtcagngtcttcaagctnttatccatttaggttatatttnattagtcacttttcctccactgataccatgtaatcaaagattttgtctagcagacaagcagagttttacacagtaataattagntcatatttctattttacatcaaagattcataatagcaaatcagaacttctaatcnacattaattgaaagtaaaatcagctattaaatataaatcattattattgagacttttggcta

SEQ ID NO: 3789 - DNA, 494 bp, Canis familiaris
  misc_feature (33)..(33): n comprises a, c, g, or t, or includes no nucleotide
cggcccctcagcactgcaggaacactggcccancctttcacttcatctgagcctcaggacgcagcctcccacccccaggacgcagcctctccgccccagaccaggggtcctccagtccccagaagagccacggagcccagcacacccaggagccgagcccagaggcgcccctcgggccgggacagccctctgcagcagagggcacccagcttccgcctggaacgggcgctggtggccgagatgggtgagtggatgcatctgggttggccagaacctggaagcggcccggatggcccggattggaaaatcaaaccaacaacaacaacaacaaaaaacacttgcattaccctttagggtatgctaataccctacaggttcatagcaggaaaatttgaaactacagggcaaagaggaaaaaaaatatgctgaaaaccatcactgctgccttttggtgtcaagcctgcgggctgtcttctgtgccaatgtgtgcgtgt

SEQ ID NO: 3790 - DNA, 326 bp, Canis familiaris
  misc_feature (148)..(148): n comprises a, c, g, or t, or includes no nucleotide
  misc_feature (299)..(299): n comprises a, c, g, or t, or includes no nucleotide
tgaatcaattgaatgtatccatattttgtcattaacatcttttctgattttaaaactagtataataggttaatgaaaagcaaagaaatgtacagagaagcaggggggaaatttcaaagagtttacatatgtgcatatttccacttttnaaatttatattgtatattattgtgataatattgcctatgcaattttgtaacctactcttttcctttgtgtgtgtgtgtgtgtgtgtgtgtgtgctttattggagttctatttgccaacatatagcataacacccagtgctcatcctgccangtgctcccctcagtgcccatctcccag

SEQ ID NO: 3791 - DNA, 500 bp, Canis familiaris
  misc_feature (19)..(19): n comprises a, c, g, or t, or includes no nucleotide
  misc_feature (452)..(452): n comprises a, c, g, or t, or includes no nucleotide
tgcacacatctctgtgtgngtgcctgtacatgtgtgtgcacatgtctgtgcatgcatgtgtttagacatgtatgctcgtgcaccatgtctgtgtgtgtgtgtgtgtgcacatgtgtgaagcactggggctcaccatcattgctgagggtggccaagcccaagtcccagagacagctcattcctggtcactgtaagtgtgccagcgtccatacaccatgagccaccagagctctgagtggaggggagggtaacaggtttcatggccagaggaaagcggcagctaaaccagcggaagagaccaccctgcaccacgaggcaaaggaggaaatggggccttgccatgggtacacgctgtgcagggaagcatagaggcccatgggcaggcctggggtagaaacccgagaagcccatggagcagggagatgaaagtacaggatgtggaggacacctcnggacatgttgctaagtggaagaagccactagaaggtcacacgtcatgt

SEQ ID NO: 3792 - DNA, 447 bp, Canis familiaris
  misc_feature (238)..(238): n comprises a, c, g, or t, or includes no nucleotide
  misc_feature (329)..(329): n comprises a, c, g, or t, or includes no nucleotide
aatgcaaacactcatgcttcagcaaaacaatgaagtagcttatgcttctctgttcccatactatgtactacacaaatgtgtgtgtgtgtgtgtgtgtgtgtataaagggaaaaatattcaatcagattatgttgacagataggaatggatagaaatcccagattagtagatgaagatatggttgtctcagaccatctaactggaagttcaaatctagcatgtaatttagttcctagtntgaataacctcatagcaacagaggggagcattgtcctctttcacaacagattaagagatggaatttttcatccttggtggctgttgcagtntctttgcctaatagttacagttaaataatgattaccagtgttttaacatcctctcttaggattttggctatttgcagcacctaatcatttccttctctgtattctttaagccataaga

SEQ ID NO: 3793 - DNA, 669 bp, Canis familiaris
cctttgtctggtctcattcaggatcccaagcaggattcgacaccgcatttagacacagctcacttctcagtgtgcagaccctaaaccattccacccagcttaggtcctgagcctggaggcgccgtctgcctctctcaggaattcccagcgtctcttaggcgacatctggctgtgggtgaaggctactgggggcattcatttgacattctccctacacccccacttcgggcacacacacacacacacacacacastaaccttcctctaaccttttagggaaacactggtgtccttatcactccagtcgccttgstktcaagattcttaaagtatcagtcattcactacttagtataaaccacaggctgttatgctgtacgttgccgagatatgcagatgcagagtcctctcagatgggaatcatctagaatccagggtggaggtagggattaaagcctctgtgaggtccccctcactcctgtgactatgcccctttggggccctcacaatgctcagagtagcatttccaagcatctacttctsgaacctttgtgctagttccgtttccctgatgcccaccctccagatgsttccccaagccccacagccaaagtgctgacacaagacatcattggaaactcccttccatgcagcaggtagaggctggcag

SEQ ID NO: 3794 - DNA, 380 bp, Canis familiaris
  misc_feature (23)..(23): n comprises a, c, g, or t, or includes no nucleotide
  misc_feature (260)..(260): n comprises a, c, g, or t, or includes no nucleotide
  misc_feature (263)..(263): n comprises a, c, g, or t, or includes no nucleotide
  misc_feature (266)..(266): n comprises a, c, g, or t, or includes no nucleotide
  misc_feature (274)..(274): n comprises a, c, g, or t, or includes no nucleotide
  misc_feature (294)..(295): n comprises a, c, g, or t, or includes no nucleotide
  misc_feature (313)..(313): n comprises a, c, g, or t, or includes no nucleotide
  misc_feature (333)..(333): n comprises a, c, g, or t, or includes no nucleotide
  misc_feature (350)..(350): n comprises a, c, g, or t, or includes no nucleotide
actgtaagttttttttaaaggtngctttggctatttggggtcttttgtggttccatacaaatttcaggattgttcctgctctgtgaacaatgctgctggtgtgggaaaactggtattatcatcacttattgtcggggtgcaattctgggacagacaacacagcttaacaacaaacatcttcttttgtagtctcacattttcttctctctgtctctctgtctctctctttcacacacacacacacacacacacacacacangtntcnatcagaanaaaagcagagaaacaggctnngtttctcacagggaaacnctctcaaagtctaaagctangtcattagaagtggaanaatttctttctggagttttctgggttgggg

SEQ ID NO: 3795 - DNA, 408 bp, Canis familiaris
  misc_feature (95)..(95): n comprises a, c, g, or t, or includes no nucleotide
  misc_feature (303)..(303): n comprises a, c, g, or t, or includes no nucleotide
  misc_feature (344)..(344): n comprises a, c, g, or t, or includes no nucleotide
aaaaatgctttcaacatttcatcattaagtatgacatttactgaagcagtgtgtgtgtgtgtgtgtgtgagtgtgtgtatttcatttatgaggtnaagaaagtgcctttctgttcctcatttgctaaaagatttttaataggaatagatgttgagttgtattagatgcttcattccacatctattgtgattatcagaaaatttttcccttttaatctgttattgagataaatcacgttaattgattttctaatattaaactaaacctgcaatcctgggataaacccatttgtcataacatatnatcttttttatatattgcttgattaaatttgctcttatttnatttagaatttccatctatgtccatgactacaagaggcttgtaattttcctctcctttgctgtc

SEQ ID NO: 3796 - DNA, 469 bp, Canis familiaris
  misc_feature (48)..(48): n comprises a, c, g, or t, or includes no nucleotide
  misc_feature (64)..(64): n comprises a, c, g, or t, or includes no nucleotide
  misc_feature (160)..(160): n comprises a, c, g, or t, or includes no nucleotide
  misc_feature (300)..(300): n comprises a, c, g, or t, or includes no nucleotide
  misc_feature (334)..(334): n comprises a, c, g, or t, or includes no nucleotide
  misc_feature (360)..(360): n comprises a, c, g, or t, or includes no nucleotide
ctatgtggtagacaaagcttccattgtaatatcctaaatcatgcttgncccatcctcaccttanaatgctttattatttggggggcttcagtgcaaattacagttattgctggtaacacctggccagcctgaagaaaggaagaggaaatcagaagtgcanaccatggagattgcaatgggtgaaaaggggcatatataggtgcaggggaaacaagagctagggtcaggtgtgaaatggcccccaaaattctatcagcaagactacagtaggagtcttcaacagagggtcagtcctgtaanactctattattatatgcaactttgggtaaataantgaatgacagaaagtttgtgagtaanggtgtgtgtgtgtgtgtgtgtgtgtgtgtgtgtgtgtgtgagagaatgggcattttctaggaagaatggtcatgcttttttcagggactctatgcaccccaatgggtca

SEQ ID NO: 3797 - DNA, 342 bp, Canis familiaris
  misc_feature (123)..(123): n comprises a, c, g, or t, or includes no nucleotide
  misc_feature (223)..(223): n comprises a, c, g, or t, or includes no nucleotide
  misc_feature (244)..(244): n comprises a, c, g, or t, or includes no nucleotide
ggtgtgtgcagtgggagaacaatgctgtgccggagtttggaccatgcctggagctgggcctcccccgggggctctgcagaagtccccatgtctgtcaggtgtgtcttcctggggctgcaggcncagtgtcagaccaaagcacagttatcctgaggcagaggagcatgggagtggttaagccccccatacactccagccacttacactgtgtcccaggtattangggtgttttagggaaaaagtntgaagccctgtgaataagaggagcaggtgaggcataggaaggccaggcctggtgacaccagctctcagattggtcttgtcagggcaccttctcctatc

SEQ ID NO: 3798 - DNA, 327 bp, Canis familiaris
  misc_feature (80)..(80): n comprises a, c, g, or t, or includes no nucleotide
  misc_feature (86)..(86): n comprises a, c, g, or t, or includes no nucleotide
  misc_feature (225)..(225): n comprises a, c, g, or t, or includes no nucleotide
tctcgaatcagaggaggtgtgtgtgtgtgtgtgtgtgtggaacatagcgtatgtgcttgtgtgtgagtgtgcagggtacntatgantgcatgtgcatgcacagtatccacccgtgcaggcctggctgtgtgtaggcgctcgtgtgtgtgtgcatgcgtgtgtgtgtgtgtgtgtgtgtgtggtgaggagaagggagcagtgtgttgatcgagagcagcagagtantgacaagcagctcctgacctgggactagtggagcctcagcagcatttccttctccagccagaaggaaaagactcatcttggttcctcccccagctgtgttta

SEQ ID NO: 3799 - DNA, 705 bp, Canis familiaris
tatttcttctctcaattctgtcaatgtttgtttcatacatttgaatgctctagtgttaggtgaaaactctactcttttgmatcctccctataatatgtcattaatgtcacaaattagatatttktacattttgtatccattaatctaataatatagctgcaattattttaatgcttttatcttttcaattctatgctacaattaaggtgaattatggtktactattacaatgttataggattcggtttttgtctatatatatttacctttgccagagagccttgtatttttacatgctttcatgttgctgcctagcatcttttctttttaagagtttatttatttattcatgacacacacacacacacacagggaggcagagacaggccgacagagaagcaggcttcatgtagggagcctgatgtggggactcgatcccgggtctccagaatcaggccccgactgaaggtggcgctaaaccgctgagcccgcggggctgctttgtctagcatcctttcatttgaattcaatcattccttttaacatttcttgtaagacaagtgtaataatgaactcagcctttgtttatctgtaaaagtctttatttctccctcattttggacaatagtttgctggatatacctgtatgaattatttatcctgattttgtaatagtttaaaaaggcaagacatacgtatagggtt

SEQ ID NO: 3800 - DNA, 300 bp, Canis familiaris
  misc_feature (194)..(194): n comprises a, c, g, or t, or includes no nucleotide
  misc_feature (208)..(208): n comprises a, c, g, or t, or includes no nucleotide
tactattgcaaatggcaaaatttcattcagtttcatgactgagtaaatagttcactctgtgtgtgtgtgtgtgtgtgtgtctctgtgtatcacatctttatccattcatctatggatgggtacttgagttgtatccatatatcttgattactgtcagtaatattgcaataaacataagggtgcatatatatttnagaattagtgtttntatttcctttgggtaaataaatatccaatagtggaatatctgggtcatacagtaattctatttttaattttttaaataaactctataccatt

SEQ ID NO: 3801 - DNA, 744 bp, Canis familiaris
ggagttgagagagatgtgtgaaaacctaacacatctggaagacaatcaatcctcacagtcaacatctgggaatgtaaccagccagggttgacaaaactggcgatttaatgtgttggaagttcaccatctacagacaagtgcagagtaactgcctgtrgattgtgagagcatacatgtgccttgcatgctataatgagccattagcacccagcttgtgtgcattggaaaggcatcagaacactgaggtatgtatggagacattttcaaaagttttttcaatttgtttttctttcggagcaatatataaaaccacactataaattcagraaaagcaaacmaaaagctcagcctctctaagcttcctcatwccctatccctcatgttttaacwtgykatattcattttctggcgtcatcgtcattttcaagccabtggggtgtgtgtgtgtgtgtgtgtgtgtgtgtgtgtgtgtgtctatttgagtgtcagataccaacattawtgctacytctcctgggtccttcttcagatgcattttatcaccctctgggcaatatcagatgtcgcatagcagtagtcagtatctacatttcattttattttaaacatcaacaataattcacttwgcttagataaccatttaatgtgactctttaaaagmactcaggtaagaacaataaaaatgattaacagctttactatcttctgtgatttttagattccattcttttgctcttttctact

SEQ ID NO: 3802 - DNA, 429 bp, Canis familiaris
  misc_feature (139)..(139): n comprises a, c, g, or t, or includes no nucleotide
  misc_feature (311)..(311): n comprises a, c, g, or t, or includes no nucleotide
caaggaggaaatgtcctaaggccaccataacacaggagaaccaagtgagtggcttaaccaatggaaatgtgtcatcttgtcgctctggaggctggccttcaggaatcaagctgttggcaggttggttccctctttagtnagagagaatctgctctagactctgcccttggctggtctacagctgtcttctatccctgtctcttcacattgtcttccctccgtgtatatgactctgtccagatttctcctttttatgaggacactaattgcactggtaagagctcattctaatgacttcattttaacttgantactgttgtaaaggtctctctccaatgaagtcagattctgacgtactgcagtgggcttaagactcaaacaaatgtgtgtgtgtgtgtttgtgtgtgtgtgtgtgtgtgtgtgtgtgtg

SEQ ID NO: 3803 - DNA, 220 bp, Canis familiaris
  misc_feature (25)..(25): n comprises a, c, g, or t, or includes no nucleotide
  misc_feature (41)..(41): n comprises a, c, g, or t, or includes no nucleotide
  misc_feature (48)..(48): n comprises a, c, g, or t, or includes no nucleotide
  misc_feature (62)..(62): n comprises a, c, g, or t, or includes no nucleotide
  misc_feature (78)..(78): n comprises a, c, g, or t, or includes no nucleotide
  misc_feature (98)..(98): n comprises a, c, g, or t, or includes no nucleotide
  misc_feature (110)..(110): n comprises a, c, g, or t, or includes no nucleotide
  misc_feature (113)..(113): n comprises a, c, g, or t, or includes no nucleotide
  misc_feature (169)..(169): n comprises a, c, g, or t, or includes no nucleotide
ggttgacagcaggacccaccttccntgagcactgaaccatnagaacanactggttatttatngatgaggaggaagagngcatagttcttgggagtganaccgacagtctntgncactcacacccattcagtttactcctgagaaaatggaggcccagggagatgaggtngcatgctgaaagtcacatagcctgttagtgcaacccagtgcatgctccttt

SEQ ID NO: 3804 - DNA, 310 bp, Canis familiaris
  misc_feature (37)..(37): n comprises a, c, g, or t, or includes no nucleotide
ctgcaaagacctttttttccaaataaggtcatatgcncaggctccagaggtgtgggtgttgacatatcttctaaggagccatcattccacccacgataacctgcaaccaaccagtctgggaactcctgctcactggtcttctccagcctctcccactccccagtgtgtgtgtgtgtgtgtgtgtgtttaaagagagtcagataaagccatcacatctctcatgagatggacaaacaaagaattcaccctatacccctccaaaataggtatcctctgccatctactataactggctttcttgggatttttt

SEQ ID NO: 3805 - DNA, 375 bp, Canis familiaris
ctaagtggcccctaactatacctgaatggcaaaactggtgtgtgttttcccaaaatatgcctcaactaccacatatattagctaactgatgttgataaagaagttcatgtgggaaacagttttaaattatcatctttattatttttttctccagacttattattttccacattatcaaatagtttttgattatataatatacctggtccttacacatagtagtatgtcacaaatggttcctacaccaacgaatgaatattacatgaaattataaattttccttttgagaagatgtcagtatatttaggctgggcaccacattgttaaataactcaagagcttcccgtcatgttcatcttgcctactgatgcagcg

SEQ ID NO: 3806 - DNA, 603 bp, Canis familiaris
cagaagtttgccaagtgaggccatctaccacatgggaagacaaaccctgctttgttaatcatcaccctatgggtagagtaggccaaaagaattcttataaaagaacaggaagtacaagaggcttgtgtcttagaggaagttgcttagtacagaggaagttcttttggagcacaagagggaagaggtctgtgggtcactggagaggagaacgtgcctgtcagttagctcaggttcctaaggaagtggccagtcctcaagggagatgagtggttgggtgatgtgcctgaggacacaagctctggggttctgggtcctggcaacatwtgctgtgtctcaagcgtgtacagggcagccatcctcagagtagtgtgtgtgtgtgtgtgtgtatgtatgtgtgtgcacgtatgtgtgtatgggccagtagcatggggcttccmacgagaaatcaggttgactcacataaaatagagagagagagagagagagagagagagagatgtggtcctttttccacacccaagtaaaagcagtagctttaagcatttttctccatgacccacatcaagaaaattaaggacacctgggtagctcagtggttgagca

SEQ ID NO: 3807 - DNA, 539 bp, Canis familiaris
ctttgatagggtccctgcctgcataaacaattgactcaccccaaatcggcatgtcagagacattttgacggcctaatcccatgcaaccccatgaaaaatatattgctgggaccagtggcaccctcccagaatcagaatccagctataaatataagtggtagaccttatggcatttggcctgtcctatgcaagatatagatattcagagagtatcccagagggcggtgatggggccaaagtctattttcaaatttgagacatcttaactagaaggcacttcccaccccagcttgtcccagataccacagggacttacaaaattttaagaaaggcctaaaaaatgcagggcccctaagatgccagtgcaagacaggcactccacttgtccacttccaaaggcagttttttctctctctttttttgtctctatctctgtctctctcatacacacacacacacacacacacacacacacacaaacacacactccataccgcaaagatttactatcaactcctgaaacagtatacatttattta

SEQ ID NO: 3808 - DNA, 334 bp, Canis familiaris
  misc_feature (51)..(51): n comprises a, c, g, or t, or includes no nucleotide
  misc_feature (106)..(106): n comprises a, c, g, or t, or includes no nucleotide
cgctctgtgccttcacacagcaccgtttacacccaggtagaggcagtgccnggcgaccttgcaacatttggctacgcgtcgcctgcttgttgctttatcgcttgtntgttcttgccccacaagccgactctagcgaaagcatgacatggcgaatgggcataatcaggcatcacaaggtgtgtgtgtgtgtgtgtgtgtgtaaattaatgggctaaagtatacttaattgtattttgagcaacctatgacatcacctgaaacggcaagaaagcctgtgggttatgacaagtccgggctgggaatcgctccccttgactttggttaggccccatct

SEQ ID NO: 3809 - DNA, 271 bp, Canis familiaris
  misc_feature (153)..(153): n comprises a, c, g, or t, or includes no nucleotide
  misc_feature (179)..(179): n comprises a, c, g, or t, or includes no nucleotide
  misc_feature (189)..(189): n comprises a, c, g, or t, or includes no nucleotide
  misc_feature (200)..(200): n comprises a, c, g, or t, or includes no nucleotide
  misc_feature (234)..(234): n comprises a, c, g, or t, or includes no nucleotide
tttcttctttttcctccacatggtactacttaacaccaggcctcccaactcctgccacacacagagacacagagacacgccagcatgataaacaatggatgtcacacacacacacacacacacacacacacacacacacacataccctattgnttttggtgccagtgccatggggctangtaggttgtngatgacagacnctcatcatcaacccagggagacagacctggtttntgctcccagccttgttatctaccagttgtatgtgtgt

SEQ ID NO: 3810 - DNA, 316 bp, Canis familiaris
caaagccttcctaaggcccttgaccaggggtggttctaatctttctgttttaggtgaactatgcagttttgtttctaagtgcgaaatcctgtttgggatggttttccttttttcttatgtttggggtgtttcagaacaatcaaaaccaattaaagctcatttcaaaaatcagagagaaattcaactaagaattagaattaagtactgtcgttacctataaaattgcgtttttccttgaaatcagcctgagcctggaaatttggggaaatattcaattaggaccctcatggaaaactttagtgaattgctttggcag

SEQ ID NO: 3811 - DNA, 324 bp, Canis familiaris
  misc_feature (19)..(19): n comprises a, c, g, or t, or includes no nucleotide
  misc_feature (35)..(35): n comprises a, c, g, or t, or includes no nucleotide
  misc_feature (67)..(68): n comprises a, c, g, or t, or includes no nucleotide
  misc_feature (73)..(73): n comprises a, c, g, or t, or includes no nucleotide
agatatgttattgaatgtntggggcgggggatagntgacatgaggtggctattttatgttttagaannggagngtgtgtgtgtgtgtgtgtgtgtgtgagagagagagagagagagagagagagagagagagacagacagagatgtctgagatgccctagcttccctagtatagtctaatcccaggcaagtgccagtttagatggagatttcgccatcgttggcctctgagctgcctgcagcattggtaaataaatgcttggacttggattttggcttttgactgtcctcagtgatgtcagttagtggctgattaacggctaca

SEQ ID NO: 3812 - DNA, 289 bp, Canis familiaris
  misc_feature (183)..(183): n comprises a, c, g, or t, or includes no nucleotide
  misc_feature (187)..(187): n comprises a, c, g, or t, or includes no nucleotide
  misc_feature (201)..(201): n comprises a, c, g, or t, or includes no nucleotide
  misc_feature (231)..(232): n comprises a, c, g, or t, or includes no nucleotide
  misc_feature (234)..(234): n comprises a, c, g, or t, or includes no nucleotide
catactgttttccactgtgatttcaccaattaaccttgccatcaacagcacacgagggttcctttgcgcataccctcacccacaattatttcttacttttttgatactagtcattctgacaggcatgaggtgatatctcattgtgtgtgtgtgtgtgtgtgtgtgtgtgtgtgtgtgtgtttnaatntccctgatgattantgacattaagcatcttttcatgggtctgtnngncatctccaggtcttctttggaaacctatctattcatgtactctgcccatttatac

SEQ ID NO: 3813 - DNA, 360 bp, Canis familiaris
cagtgattggcagcagccttgatgaagtatagcttcagcttaagccctatggagaaactaaaggtgttcacttggaggctttcagtttttctgaaacagtaggtcctcttgaaggaatgtctgactagtatacaccatggacagacaccataatggaacataaatacacacacacacacacacacaattcaatgacttgacaatatattttttaaagttacatgttggttatattattttttttacatgtaggttatattaatagaataaatgagctaaagaagaaaacaagaaagcatggcattagaaaaagcaaaaaaaaagtaaagttatagacaaaataattggcataatctaaaa

SEQ ID NO: 3814 - DNA, 372 bp, Canis familiaris
  misc_feature (15)..(15): n comprises a, c, g, or t, or includes no nucleotide
  misc_feature (29)..(29): n comprises a, c, g, or t, or includes no nucleotide
  misc_feature (32)..(32): n comprises a, c, g, or t, or includes no nucleotide
  misc_feature (50)..(50): n comprises a, c, g, or t, or includes no nucleotide
  misc_feature (337)..(338): n comprises a, c, g, or t, or includes no nucleotide
gcatgatgttctgtntaccatgagatatntanacaggtgagatattgcangcatgcctaggacacacgattttgtgcctggatatctctcctctctctctctctctctctcacacacacacacacacacacacacacacacacatattatttcagataaaaggttagattaatctaacctatctaaaagctaaggctctggattagctcttttaaaaataatattccccaaataagcacagaagtgtttagaacttgtcaaaatatctagctgtaatcaaatatagtgacatccatgtcctgtgtgtggatgtaaagatgcttaattacccacacanncacgcacatggacacacacttaccaatgtgacct

SEQ ID NO: 3815 - DNA, 426 bp, Canis familiaris
  misc_feature (354)..(354): n comprises a, c, g, or t, or includes no nucleotide
  misc_feature (371)..(371): n comprises a, c, g, or t, or includes no nucleotide
  misc_feature (388)..(388): n comprises a, c, g, or t, or includes no nucleotide
tcatctgaagaaggctgcaaaagtagaagcttgggatgggtttgtgtgctgaggatgtagtcaaagcaacagagcacttcatccaaggtagcacccagaggatgtgactgatttattcatactctttggttcttggcccattatcattactggtctgtgtaaggtttctatcttattttatttttcctgctttatccctagtccccacttccatgtacccctataggtaatgacattaatgtgttgggtgaagattgataccaattacaacatgtggacatgtaggcatgtttggagattacaggtttacccaaagcacctgtgtgtgtgtgtgtgtgtgtgtgtgtgtgtgtntgccgggggcagggganttacagtagttcaggtnggctttggtttaaggaagggacatgttggcccagaggg

SEQ ID NO: 3816 - DNA, 615 bp, Canis familiaris
gagggagatggacaggcagactccatgctgagtgtggagcctgaggcagggcacaattccatgaccctgagaacatgacctgagctgaaatcaagagttggaaactcaactgactgagccaccaaggtgccccttaaccaaatctttatttatttttattttttttatacttgggaggtttattttttttggggggggggtttaaattggagttcaatttgccaacatatagcatatcacccttaaccaaatctttaaaataaatctctctctttctwtcyrcaccacacacacacatahacacacacacacacacacacacacacacacacacacacaccctgtttctgtytctctgtagaaccctaatacaccttccctggacctgctaatcaatatatatacatatatatatatggaaggcaatgtatactacatacttcttatgctaagatatgtytaaaaaatcagagaatacaaccagtttggaaattattattctctaaccaaacctcttacaatgctaaatgcaagttttatataatattcaatggaagtgggttctaccattgtaatactgaccgctgcacagtaaacaatcatagctgttgaatg

SEQ ID NO: 3817 - DNA, 440 bp, Canis familiaris
  misc_feature (23)..(23): n comprises a, c, g, or t, or includes no nucleotide
  misc_feature (29)..(29): n comprises a, c, g, or t, or includes no nucleotide
  misc_feature (55)..(55): n comprises a, c, g, or t, or includes no nucleotide
  misc_feature (66)..(66): n comprises a, c, g, or t, or includes no nucleotide
gcgagagtttagaatgaagctanatctanaccacataggacctggtggtgacacngcccaagtagngtgtgtgtgtgtgtgtgtgtgtgtgtgtgtgtgtatgagagacagagagagagagagagagcgagagagagagcacatatcttttaatagaggtcaaaatatgctgctacttggtttgaaaaatggtgctgaataaaatacagatggcttaaaatcaaggaatgaaaagaacaaacagcttatccagccagacaagcatgtctatttaaacaaaaatgtgaggactccatcaagttgcctgcctctgggctgcactgcccaaagatgggaatctctgggaatcttggggaagcacgtgagaaatgcacagatgggtgtgcaaacagtgatagggagctaccacatggactccacgtggccctcccacgcagact

SEQ ID NO: 3818 - DNA, 917 bp, Canis familiaris
ttcattgtcaagttcatttttatccccccaagagcacagccaatttttcctaaatgttataataatggacctggttgcggggctctaaagttaaaatgtagacagtgtttggraaatgctattgctaactgaatcctacaaaatgcaaggaaggacagcttcascctggaaccctgtaaaggagggaagcatgtgttgcgtgccggtgcggttggtgtatttgtgcagatagcatagcmcaggctctccgagggtaagacttcatgattaatggtgtgtattcttgacagaagcctcctttatttatctgcaatacagtttagcgattttatcaggcccctgaatgaaaaatattcagtcatascaatattgcagtgtaaattgagtagagtcactttttattatatctttctgccttatcatctgcacagtaattttctagcagaggctkgatatggaaaaggctggatttagctgtacttgacacaaagcctcttcaatttcgcctaaaagttcaggctgctcttagagatgtgtgtgtgtctgtgtgtctgtgtgtgwgtgtctgtgtgtgtataatatataagccctccctcttatccaagcaatttcaggatttgaaagaataaagataaaatgcacaaacctggatgggagaagtgttgttaatataaaaatatctaatagctgtgaactcactggtaaaaaagctcctttagtgtctaagctgtggctcagttctgagcttttggcctggcwacgtggtcccacttttttmtaatcaatcaccctccaaatccaatcagcatraaaccagaccctttcatttgtcctgggagtaatagcaaagttgaagtccacakcggcccgggggggacgtgagtcgctgtggtgatggaatatgccattccagacgg

SEQ ID NO: 3819 - DNA, 366 bp, Canis familiaris
tcactgtaatcaggatttggctgtccaaattaggactgccctaattactcctcagcaggtgccaatccgggggagggcactaaatgggaagagaggaagtgaggacgctttgccatcttcagagtcatacaataagaaaacactttctctctggctggaaaaactggattaagtaataagcaacaggcaccatggggttatatatggatgggtatgtgtgtgtgtgtgtgtgtgcgcgcacacatgcgcgggaaggagagtatgtgttgttttatagcagccatataaacgattttctattttttccctttcaaaacttcacagaattactttccccatccgtgagataattcatccctggcctat

SEQ ID NO: 3820 - DNA, 329 bp, Canis familiaris
  misc_feature (213)..(213): n comprises a, c, g, or t, or includes no nucleotide
aatttttataggcatcatcccaggtgtagaagtattctcattgcaagagtagtcaattgcaagtattgtcaatagcaatgagatggtgttttctatctataattatctgggccttgtattccctttgttctattatccaatgcattctagaggtaatgtatttttgaagtaaagggattagctgagatatctcatccttactcagtactgcanaaatcagtactggttacatgcacacacacacacacacacacacacgcatgctcacaaatagccaaactaaaaaactaaaagtgagcctctcagatacttttggggaaggctggtca

SEQ ID NO: 3821 - DNA, 575 bp, Canis familiaris
catacaccaaaatgttacagttacctctctatggatgatgggattataagtgatttttatttcctggttacctttattttctgaattttctataataaccatgtattattttggtaataaaagtaaaagtttgggtttttaaaaatgtaattctccactatattaactctagagaaatcctatatgatgaccagttacgatgcacaactctgggcttttcctaaagtcctaaatcttattaagtagtgctttctagggactgctccatttaataatagtaattcccacttcaggcggaggtttaggaagacagactatatcacctctaggtccttgaagtggaaacagacacagagctgattcggaaaagcccaaagatgaccctaattaagaaaaggtactttagtggaacctaatctgggctggccacamaccatctacatctgtgtgtgtgtgtgtgtgtgtgtgtgtgtgtgtgtggtaaaatagacacaaaatttaccaccgtaataattttttaagagagcaaggaagggccaaaggagagagagaatcttaagcaggctccaggagcc

SEQ ID NO: 3822 - DNA, 456 bp, Canis familiaris
  misc_feature (224)..(224): n comprises a, c, g, or t, or includes no nucleotide
  misc_feature (337)..(337): n comprises a, c, g, or t, or includes no nucleotide
cccttctaccatattttggctaaactcacagccaccctgagtggtccctgactccatcctctctcctcagtccctcctactagaccacccacacaatcctcatccattggttcattttttaaatccacctaacaataataataattattattattgttaatgaataacaatgattaaagattgatatttgctaaccctcgataatagccggcaagtgctgagcncaagcactgagctaagggcctataaccttagtgacagccctaggaagtcagaaccattatagggcatgagggattggaggcccagtgtctacacacacacacacacacacacnctgctccaaatggactgaacttccatttctggaacatacttcactctgcctcacctcctggtccttgccatgctattgtccccacctggaacaagccatccactggcagtctgcgtcta

SEQ ID NO: 3823 - DNA, 290 bp, Canis familiaris
  misc_feature (12)..(12): n comprises a, c, g, or t, or includes no nucleotide
  misc_feature (182)..(182): n comprises a, c, g, or t, or includes no nucleotide
  misc_feature (213)..(213): n comprises a, c, g, or t, or includes no nucleotide
  misc_feature (234)..(234): n comprises a, c, g, or t, or includes no nucleotide
  misc_feature (242)..(242): n comprises a, c, g, or t, or includes no nucleotide
  misc_feature (253)..(253): n comprises a, c, g, or t, or includes no nucleotide
aacataaccaangtacaattttaacttatttattgaattatttattgaaacattacctgccttgcagtgacttccgaaggatgctgccatcttggcccttcctacacaaaaggtaaaatgaaattaaaacaaaacaaaccacacacacacacacacacacacacacacacgagcaaataganatactagttattataataggaagcctatgcnacttttttaaaaatttatgtnacatatgnatattatctcnatggcaagaggcgggctcagaataagaacattaaggt

SEQ ID NO: 3824 - DNA, 430 bp, Canis familiaris
  misc_feature (225)..(225): n comprises a, c, g, or t, or includes no nucleotide
gttctctttggttagaaattaatctatagtcacagacaaaacaaagctaatggactcacttggtatttctacatatatcaattaagcagccacaaataccaagtgtgtatgtgtgtctgtgtgtgtgtgtgtgtgtgtgttatgtgaagagtgtatgtaaacttcaacccattaaaaagttttgctttacaaatctaacttaaataatggttagattcccaggtntatttgctgaataatattcccataggtacatataatgaaaaaatagtggaaggtagtacctaaaattttagtaatgaaacaataacaaaaagaagtaaatttcaaacaacagtgaaaatgcttttatctcaaatacataatgcttgaaggaaaacatgttaatgagagaaagaagagggagcagaatgggacattctaggatacc

SEQ ID NO: 3825 - DNA, 331 bp, Canis familiaris
  misc_feature (173)..(173): n comprises a, c, g, or t, or includes no nucleotide
  misc_feature (176)..(176): n comprises a, c, g, or t, or includes no nucleotide
  misc_feature (182)..(183): n comprises a, c, g, or t, or includes no nucleotide
  misc_feature (187)..(187): n comprises a, c, g, or t, or includes no nucleotide
  misc_feature (199)..(199): n comprises a, c, g, or t, or includes no nucleotide
  misc_feature (209)..(209): n comprises a, c, g, or t, or includes no nucleotide
  misc_feature (217)..(217): n comprises a, c, g, or t, or includes no nucleotide
  misc_feature (222)..(222): n comprises a, c, g, or t, or includes no nucleotide
  misc_feature (249)..(249): n comprises a, c, g, or t, or includes no nucleotide
  misc_feature (285)..(285): n comprises a, c, g, or t, or includes no nucleotide
aaagtcgtgttttgaaaagtgagtttcatgtatgaagtaagacaattaaactcatttttccccatacgggggtgacacattgtccccaaattatttaagtagttaattctttctccagaacacacacacacacacacacacacacactcacacacacacacacacagacaganacntctganntganatgaccactaanatctatccanatggtacnccacngtgtgactcaacagaatgacacaacanaggttctcctctgagcatttccatgacacttagganggaggcaaaatgtccctctccacatcaagataaatggtcagttgtc

SEQ ID NO: 3826 - DNA, 503 bp, Canis familiaris
  misc_feature (444)..(444): n comprises a, c, g, or t, or includes no nucleotide
  misc_feature (473)..(473): n comprises a, c, g, or t, or includes no nucleotide
tttcatttcagatttcccatcatcagtggcatctgtgtctgaacctgcttatttgaggatgaaacacttcctattttttgttaattactctttagattataagattagggctttaacaaagtaaatatttataaagattccaactactttaagaatccaacttttcttaaggcaggtattcttctaaggcttgctgtagtacctcaattttgttgtcatggtgactatataatataacttttccaaaatgaaaacctgcttttaaccatagtcttccaacaaagtagtcataaatgtagagtttagagtagacaatttatgcttattctcctacctaaactctaaatttaattgatagacatcggatttcaataattacacacacacacacacacacacacagagtaaactctctgtcagtcccctaataggaaaacatagtangcaccaacaaaggaattgttgtttttganttcatattctctctagttaaaaatcatgtg

SEQ ID NO: 3827 - DNA, 270 bp, Canis familiaris
  misc_feature (30)..(30): n comprises a, c, g, or t, or includes no nucleotide
  misc_feature (53)..(54): n comprises a, c, g, or t, or includes no nucleotide
  misc_feature (62)..(62): n comprises a, c, g, or t, or includes no nucleotide
  misc_feature (109)..(109): n comprises a, c, g, or t, or includes no nucleotide
  misc_feature (123)..(124): n comprises a, c, g, or t, or includes no nucleotide
  misc_feature (177)..(177): n comprises a, c, g, or t, or includes no nucleotide
  misc_feature (220)..(220): n comprises a, c, g, or t, or includes no nucleotide
  misc_feature (228)..(228): n comprises a, c, g, or t, or includes no nucleotide
  misc_feature (235)..(235): n comprises a, c, g, or t, or includes no nucleotide
  misc_feature (237)..(237): n comprises a, c, g, or t, or includes no nucleotide
tattctgcatactatttgtatgtcactgantattctttaatactttcacatannaatactgnccaaaacacaagtagaattctcatcccatgatgagtgggctgcaganaaaaagaccattcnntcttccacaccccttaatccttcatcagtttcgagatggattcaatttctganctgctctctgattcttcatgttgataggctgcacatcctggancagctaantgtgctnangctgccctggtggtgacatatgagttagcctga

SEQ ID NO: 3828 - DNA, 196 bp, Canis familiaris
  misc_feature (9)..(9): n comprises a, c, g, or t, or includes no nucleotide
tctaggtgngtacacacacacacacacacacacacatacacacacacacacacacacatacacacagccaaggcaaaaggagttagccctaacaaagctcttaagttgcttttaaaaattgtgtttatttatatacctcctctctatattttctaaatattttatttttaagtaatctctacacccaatgtggggc

SEQ ID NO: 3829 - DNA, 331 bp, Canis familiaris
  misc_feature (15)..(15): n comprises a, c, g, or t, or includes no nucleotide
  misc_feature (43)..(43): n comprises a, c, g, or t, or includes no nucleotide
  misc_feature (52)..(53): n comprises a, c, g, or t, or includes no nucleotide
  misc_feature (299)..(300): n comprises a, c, g, or t, or includes no nucleotide
ttccacatgagtganaccatatggtgtttgtctttctctaatntatttcatnnagcattatagcctctagttccattcatgttgttggaaatggcacgattttattcttttttatggctgagtaatattccagggtatatgtgtgtgtgtgtgtgtgtgtgcacgcacacgcgagtgtgtgtgtatctatcacctcttctttatccattcatctactgatgagcacttgggctacttccacaatttgactattgtaaataatgctgtgataaacacagggaagcaatgtctctctgaannactctgaattagtgttttgtattttgggggt

SEQ ID NO: 3830 - DNA, 440 bp, Canis familiaris
  misc_feature (39)..(39): n comprises a, c, g, or t, or includes no nucleotide
  misc_feature (52)..(52): n comprises a, c, g, or t, or includes no nucleotide
gttaacagatgcaattcattgcaaagccccagaatgttntaagtgtggagcngcactcatgagaggatttcttcaggctctagaatgagagacagtgagatagattgtgagtttttgagtgtgtgtgtgtgtgcgtgtgtgtgtgagagagagggagagagagagttctagtgtgtgtgtgatgggggaagctccttaaaagaaagtcacaaataacccagcacaataattttgggagcccagtttagtggggaaaaaaaccctatcccttaaccggccagatacatgaactaccaaaaagtccctgaacttactcatttcagttcactcaaccagagaagtgggaagaaggttattctaagataccaataagccacaaaagtgtacaaacttccttcctaatacagcacactccttgcaatctatttccttgcttgaaa

SEQ ID NO: 3831 - DNA, 250 bp, Canis familiaris
  misc_feature (103)..(103): n comprises a, c, g, or t, or includes no nucleotide
  misc_feature (115)..(115): n comprises a, c, g, or t, or includes no nucleotide
  misc_feature (193)..(193): n comprises a, c, g, or t, or includes no nucleotide
aaactatgataatgctgtatgtcaacaatacttcaataaaaaatacaaattaaaaaagaacagataacacacacacacacacacacacacacacacacaccangtagtaacaacngtaatgtgtatatcaggcacagtctacttaccaggctttcttctaaagtgctttccactttaacacatcccaccctcncaacaaccttataaaaactgggtaatattactattttacactgaaaaccaacatggt

SEQ ID NO: 3832 - DNA, 248 bp, Canis familiaris
  misc_feature (35)..(36): n comprises a, c, g, or t, or includes no nucleotide
  misc_feature (48)..(48): n comprises a, c, g, or t, or includes no nucleotide
  misc_feature (50)..(50): n comprises a, c, g, or t, or includes no nucleotide
  misc_feature (62)..(62): n comprises a, c, g, or t, or includes no nucleotide
  misc_feature (79)..(79): n comprises a, c, g, or t, or includes no nucleotide
  misc_feature (82)..(82): n comprises a, c, g, or t, or includes no nucleotide
  misc_feature (115)..(115): n comprises a, c, g, or t, or includes no nucleotide
  misc_feature (191)..(191): n comprises a, c, g, or t, or includes no nucleotide
tatgttctctcccatacctacaaggcagggaggcnnctccagacccanancaaaggtatctncttaaacagcctctcangcntggcctctccactgacagggtggtggtggtgtntgtgttgtgtgtgtgtgtgtgggggggggtcctgatataagcccaagggcttcagaaccttcattcctcagggtcntaactattctgccttgagcttctcaggtgagtcctgtccagctctccacacagctac

SEQ ID NO: 3833 - DNA, 226 bp, Canis familiaris
  misc_feature (20)..(20): n comprises a, c, g, or t, or includes no nucleotide
  misc_feature (78)..(78): n comprises a, c, g, or t, or includes no nucleotide
  misc_feature (87)..(87): n comprises a, c, g, or t, or includes no nucleotide
  misc_feature (91)..(91): n comprises a, c, g, or t, or includes no nucleotide
  misc_feature (113)..(114): n comprises a, c, g, or t, or includes no nucleotide
  misc_feature (128)..(128): n comprises a, c, g, or t, or includes no nucleotide
agagaggagagcattttttnttcatattttaaaaatcttggaggcactaccagctctgaccctcattcattataacanatatagccntganactattaatacattcttatggnnaatatacacagggntaaaatatatattttatatatgtatacacatacacacacacacacacacacacacacacacacacacacacactgggctcctaaaagcatcaactttc

SEQ ID NO: 3834 - DNA, 268 bp, Canis familiaris
  misc_feature (265)..(265): n comprises a, c, g, or t, or includes no nucleotide
agtgagtgaatgaggagagtgtgagagtgtgtgtgcaacatgtttgtgtgcgtgtgtgtgtgtgtgtgtgtgtttagatgtggggaggtaaaggcagagagaatgaataccagcctttgaatggcctgggctgtaaatgaaaagtggctaaaacacttagaatacaaaagttaaccagaggaccaagaaacccaaaggaataattcagaaaagtacagagaacacaatcaaaccagtcggtgcaatcaaaacacaatcacaaacngcc

SEQ ID NO: 3835 - DNA, 490 bp, Canis familiaris
  misc_feature (362)..(362): n comprises a, c, g, or t, or includes no nucleotide
  misc_feature (413)..(413): n comprises a, c, g, or t, or includes no nucleotide
  misc_feature (431)..(431): n comprises a, c, g, or t, or includes no nucleotide
agttttagtcatatcaattacataaatccatagtctctagcctagcggggggcaaatacatggtccatgtaaccatgaaatatcattttctttccaaacgtaagacaaacatgtccatcatctatgttctccctttcttgctgcaacccccaaatatccaagtggctactactaattatcagaattgtcatgagtgatgaaactcctcccaatactatttctgatttaaaataccacagaagttgtatctaagaatgtactaccattggccatgtatccttctaaattttatctaaatttagtgtaaaaacacacacacacacacacacacacaaaacaacctttagtcagtatgaacttangaacaagaatatcactttcagtaaaaagactttgaaaagtcctcatttgtntgggataaataatctgtntaaaaaacaaaacttagagccagtgatgacatcctctatctcaataacttttatagtat

SEQ ID NO: 3836 - DNA, 350 bp, Canis familiaris
  misc_feature (50)..(50): n comprises a, c, g, or t, or includes no nucleotide
  misc_feature (123)..(123): n comprises a, c, g, or t, or includes no nucleotide
  misc_feature (182)..(182): n comprises a, c, g, or t, or includes no nucleotide
  misc_feature (193)..(193): n comprises a, c, g, or t, or includes no nucleotide
  misc_feature (199)..(199): n comprises a, c, g, or t, or includes no nucleotide
  misc_feature (209)..(209): n comprises a, c, g, or t, or includes no nucleotide
  misc_feature (224)..(224): n comprises a, c, g, or t, or includes no nucleotide
  misc_feature (227)..(227): n comprises a, c, g, or t, or includes no nucleotide
  misc_feature (231)..(231): n comprises a, c, g, or t, or includes no nucleotide
  misc_feature (241)..(241): n comprises a, c, g, or t, or includes no nucleotide
  misc_feature (245)..(245): n comprises a, c, g, or t, or includes no nucleotide
  misc_feature (252)..(252): n comprises a, c, g, or t, or includes no nucleotide
  misc_feature (259)..(260): n comprises a, c, g, or t, or includes no nucleotide
  misc_feature (266)..(266): n comprises a, c, g, or t, or includes no nucleotide
  misc_feature (310)..(310): n comprises a, c, g, or t, or includes no nucleotide
  misc_feature (325)..(325): n comprises a, c, g, or t, or includes no nucleotide
  misc_feature (346)..(346): n comprises a, c, g, or t, or includes no nucleotide
gaagtataagtgaggtgtggtggagaaacttgatgggaacattggggacncagggcaaggtcatacttcagcaggagggactggagccaagatgacaggccagagcaatagctgaggaggaanaagatgagcatcctcctgtgtgtgtgtgtgtgtgtgtgtgtgtgtgtatacctttgatnatagggccatntggcanatgccaaccngtgaggggagcatanacngggntgtgagctcncacnttctgcngctctcnntgtccntgtaagaatggtctccatggggatataccatgatggaaaagggnactctgaggatgatntcttcttgtggaagacttgtntcac

SEQ ID NO: 3837 - DNA, 379 bp, Canis familiaris
  misc_feature (33)..(33): n comprises a, c, g, or t, or includes no nucleotide
  misc_feature (185)..(185): n comprises a, c, g, or t, or includes no nucleotide
  misc_feature (190)..(190): n comprises a, c, g, or t, or includes no nucleotide
  misc_feature (202)..(202): n comprises a, c, g, or t, or includes no nucleotide
  misc_feature (205)..(205): n comprises a, c, g, or t, or includes no nucleotide
  misc_feature (229)..(230): n comprises a, c, g, or t, or includes no nucleotide
  misc_feature (250)..(250): n comprises a, c, g, or t, or includes no nucleotide
  misc_feature (256)..(257): n comprises a, c, g, or t, or includes no nucleotide
  misc_feature (280)..(280): n comprises a, c, g, or t, or includes no nucleotide
  misc_feature (284)..(284): n comprises a, c, g, or t, or includes no nucleotide
  misc_feature (294)..(294): n comprises a, c, g, or t, or includes no nucleotide
  misc_feature (321)..(321): n comprises a, c, g, or t, or includes no nucleotide
  misc_feature (346)..(346): n comprises a, c, g, or t, or includes no nucleotide
acactgaaaagttctaggcaatgcaaaaaggcnataaaggaaataaaagttgtacagaccagaaattaagaaataatctgtcccgatttatagataacatgattacctaccagaaaatcccaaggagaactaaaatacaccacacacacacacacacacacacacacaccacaactctttgaatnatatntgcatttagcanatncgcagaatccccatgtaaaatcanntgtacttctgtacactagcngttgcnntcccaggcatttgtgcaaatgtntgtncacacaaaangttgtacatgaagattcagagcagctntattcataagagccccaaaatgganatatctcatatgcccttcaacagctgaatggtc

SEQ ID NO: 3838 - DNA, 340 bp, Canis familiaris
  misc_feature (116)..(116): n comprises a, c, g, or t, or includes no nucleotide
  misc_feature (257)..(257): n comprises a, c, g, or t, or includes no nucleotide
  misc_feature (284)..(284): n comprises a, c, g, or t, or includes no nucleotide
tgcagacagccgctttcccattgtgtcctcacatgacctctgtgtgtgtgtgtgtgtgtgtgtgtgtgcacatgcgtgcatgtgtacatgcatccctggtgtctctctgcatgtcnaaattccctcttgttgaaagggcatcaatcagattgggttaagatttaccataaaggcctcatttcacttaatcaccctttcaacgatgttatctccaaggacttacattctgaagtattggagttagaacttgtgaattntgaggtgacataattcaccccataacnctgctctaggccacagggttgagaggccaggctcagttatggatgaatttgaatgg

SEQ ID NO: 3839 - DNA, 384 bp, Canis familiaris
  misc_feature (49)..(49): n comprises a, c, g, or t, or includes no nucleotide
  misc_feature (51)..(51): n comprises a, c, g, or t, or includes no nucleotide
  misc_feature (133)..(133): n comprises a, c, g, or t, or includes no nucleotide
gggcctggcacaccgactctctgcacaaaaaccttccactgcacacagnanccagggaagctgctgacaccacccccgaagcaaaattaaacacgtttccactagcccccaaacatttaacatgtctccgcancttctcctcttggctgtcttgttcgagtcaagtgttctctcacaggcctgctgggctcgccaggaatttatatatatatatatacacacacacacacacaaacacacacacacacacatactggggagcaaagctgttaaaccccagctcatgtgagggtgcccaggggagcccaggccccgttcagaatggcaatgctggctgaggtacctggagcccagtgatttcctgtgacctcacggccagcccca

SEQ ID NO: 3840 - DNA, 405 bp, Canis familiaris
  misc_feature (41)..(41): n comprises a, c, g, or t, or includes no nucleotide
  misc_feature (278)..(278): n comprises a, c, g, or t, or includes no nucleotide
  misc_feature (283)..(283): n comprises a, c, g, or t, or includes no nucleotide
  misc_feature (294)..(294): n comprises a, c, g, or t, or includes no nucleotide
  misc_feature (298)..(298): n comprises a, c, g, or t, or includes no nucleotide
  misc_feature (302)..(302): n comprises a, c, g, or t, or includes no nucleotide
  misc_feature (305)..(305): n comprises a, c, g, or t, or includes no nucleotide
  misc_feature (310)..(310): n comprises a, c, g, or t, or includes no nucleotide
  misc_feature (315)..(315): n comprises a, c, g, or t, or includes no nucleotide
  misc_feature (318)..(318): n comprises a, c, g, or t, or includes no nucleotide
  misc_feature (342)..(342): n comprises a, c, g, or t, or includes no nucleotide
  misc_feature (348)..(348): n comprises a, c, g, or t, or includes no nucleotide
  misc_feature (363)..(363): n comprises a, c, g, or t, or includes no nucleotide
  misc_feature (365)..(365): n comprises a, c, g, or t, or includes no nucleotide
ataaatttctgggtttggattttttaaaatacatttttaanaatttttcatggaagtatggaagctgacataatttctgttgtttttaaagcacccattctgtactactttgttagggcagtactcgcaaagtactacagcaagtacgccggtatcacaactgcactacacactgacaatctccacttctcatggtcaaatgtatgcatgctttctctctctctctctctcacacacacacacacacacacacacacacttttattaaatacaagcangttanatgatgttgtngaangaancancctcntgctntantctccccttgaaatgacttgtganctctgntgtcttctatgtgtncntctgtttattgcacagaaataacagctataaggtccacta

SEQ ID NO: 3841 - DNA, 371 bp, Canis familiaris
  misc_feature (39)..(40): n comprises a, c, g, or t, or includes no nucleotide
  misc_feature (174)..(174): n comprises a, c, g, or t, or includes no nucleotide
  misc_feature (178)..(178): n comprises a, c, g, or t, or includes no nucleotide
  misc_feature (190)..(190): n comprises a, c, g, or t, or includes no nucleotide
  misc_feature (204)..(204): n comprises a, c, g, or t, or includes no nucleotide
  misc_feature (218)..(218): n comprises a, c, g, or t, or includes no nucleotide
  misc_feature (227)..(227): n comprises a, c, g, or t, or includes no nucleotide
  misc_feature (231)..(231): n comprises a, c, g, or t, or includes no nucleotide
  misc_feature (238)..(238): n comprises a, c, g, or t, or includes no nucleotide
  misc_feature (271)..(271): n comprises a, c, g, or t, or includes no nucleotide
  misc_feature (275)..(276): n comprises a, c, g, or t, or includes no nucleotide
  misc_feature (281)..(281): n comprises a, c, g, or t, or includes no nucleotide
  misc_feature (287)..(287): n comprises a, c, g, or t, or includes no nucleotide
  misc_feature (296)..(296): n comprises a, c, g, or t, or includes no nucleotide
  misc_feature (298)..(298): n comprises a, c, g, or t, or includes no nucleotide
  misc_feature (300)..(300): n comprises a, c, g, or t, or includes no nucleotide
  misc_feature (303)..(303): n comprises a, c, g, or t, or includes no nucleotide
  misc_feature (314)..(314): n comprises a, c, g, or t, or includes no nucleotide
  misc_feature (322)..(322): n comprises a, c, g, or t, or includes no nucleotide
  misc_feature (325)..(326): n comprises a, c, g, or t, or includes no nucleotide
  misc_feature (328)..(328): n comprises a, c, g, or t, or includes no nucleotide
  misc_feature (330)..(331): n comprises a, c, g, or t, or includes no nucleotide
  misc_feature (340)..(340): n comprises a, c, g, or t, or includes no nucleotide
  misc_feature (345)..(345): n comprises a, c, g, or t, or includes no nucleotide
tttttcagtacttttgtatttagccaagatgtgttaacnngtttttatgtttatatatatgcttttatttttaaagagtcttgattttctgtgctacctgaagacatagtaaaaaattttaattggtaactagaaatagtcacaaaatcatccagcccaacacatacacacacncacncacacacacacnttcacacgtacacnctcacacaaatatnctatctganttantgtctangatttttattatatatacttgctctgtgctttnacanntgttngcctcngtgacttanananacngttgatggtanttaaattncanntntnngctgtgacntgaantataaaaatatgatatggagatggga

SEQ ID NO: 3842 - DNA, 430 bp, Canis familiaris
  misc_feature (224)..(224): n comprises a, c, g, or t, or includes no nucleotide
  misc_feature (229)..(229): n comprises a, c, g, or t, or includes no nucleotide
  misc_feature (235)..(235): n comprises a, c, g, or t, or includes no nucleotide
tttctcagcttgttctacactttcctgctgcatatctgttggggatatcccatcaccccttttccatacccacagtccttcatgtggccattgctctgacaactgcactatggaagacacctctcccacagacacacacacacacacacacactcacacatcattacactcacactttcacacagtagctgaaggatactctcagcccatcatatgtgcctgtnacacnggaacngttagagagacacactcttagagagatgcagttacagaatgtgttacacacattcacttggattcttacaaagacaaatccagttgtaaaaacaacccagactcccttcctcaccctcaacccccttaccgatatgtgttttgctttcagttgaatcccaacagcctcacaatggtacaaaatagacatccaata

SEQ ID NO: 3843 - DNA, 374 bp, Canis familiaris
  misc_feature (102)..(102): n comprises a, c, g, or t, or includes no nucleotide
  misc_feature (107)..(107): n comprises a, c, g, or t, or includes no nucleotide
  misc_feature (231)..(231): n comprises a, c, g, or t, or includes no nucleotide
  misc_feature (260)..(260): n comprises a, c, g, or t, or includes no nucleotide
  misc_feature (307)..(308): n comprises a, c, g, or t, or includes no nucleotide
actgattgacagtatggaccatatggttctttttggtgggcatcgttctgtgtcctgtagggggtggaacagcctccctggtctccacctactggatgccantaacncatccccactcaattttaactatccaagatgtctccagacattgctaaatgacccccggggctgcatcacccccacagtgagaaccatgggtgtgagtcatccaagacagaattctggtggccntgtaaaatgattacatatgtgtgggtacnagtaaacaatgtgtgtgtgtgtgtgtgtcacgctcaagtatttgtcnncttcaaaagcttaagcatacagtaacgaagaattttaaaatacatctattaaatatgcatcattat

SEQ ID NO: 3844 - DNA, 254 bp, Canis familiaris
  misc_feature (13)..(13): n comprises a, c, g, or t, or includes no nucleotide
  misc_feature (24)..(24): n comprises a, c, g, or t, or includes no nucleotide
  misc_feature (196)..(196): n comprises a, c, g, or t, or includes no nucleotide
  misc_feature (208)..(208): n comprises a, c, g, or t, or includes no nucleotide
acataaaactgtntagagaaagtntatatttgaaaatgagattgtacattatctgttctacctcggtgtgtgtgtgtgtgtgttggtaagcagaaacagaatacagtgggttgattgatttcaaaaccttttaggaaacgctgtctttcagttgagaaaaggcctgctgaagagactccatgaaggaggagaaggnttgcccttgganagagagttgatgattttcctcttggctggcactgtggctggctctg

SEQ ID NO: 3845 - DNA, 227 bp, Canis familiaris
  misc_feature (26)..(26): n comprises a, c, g, or t, or includes no nucleotide
  misc_feature (106)..(107): n comprises a, c, g, or t, or includes no nucleotide
  misc_feature (114)..(115): n comprises a, c, g, or t, or includes no nucleotide
  misc_feature (122)..(122): n comprises a, c, g, or t, or includes no nucleotide
  misc_feature (131)..(131): n comprises a, c, g, or t, or includes no nucleotide
  misc_feature (160)..(160): n comprises a, c, g, or t, or includes no nucleotide
acccacgcagtgagaagagaaggcanaggagagaacagaggagacagcttggctaaaatgatatgtaaaagacacaccctgataactcaaggtaaagagtttaganngtatccnngagacanaacagaacntcccctcctccctgctagtcaacacaccngctcccgtgtacacacacacacacacacacacacacacacacacacacaccctaaccttttacactc

SEQ ID NO: 3846 - DNA, 353 bp, Canis familiaris
  misc_feature (37)..(37): n comprises a, c, g, or t, or includes no nucleotide
  misc_feature (76)..(76): n comprises a, c, g, or t, or includes no nucleotide
  misc_feature (234)..(234): n comprises a, c, g, or t, or includes no nucleotide
  misc_feature (252)..(252): n comprises a, c, g, or t, or includes no nucleotide
  misc_feature (257)..(257): n comprises a, c, g, or t, or includes no nucleotide
  misc_feature (303)..(303): n comprises a, c, g, or t, or includes no nucleotide
  misc_feature (306)..(306): n comprises a, c, g, or t, or includes no nucleotide
  misc_feature (341)..(341): n comprises a, c, g, or t, or includes no nucleotide
gttctgctttcactgacacaccttggcatgaatcacncctggctttttgttaccacagaggcctggctctgcctcntgggtattacttgctagacccctcacatcctcttacttcccctcagtggtcagcccaaatggctttcacttccagactaatctcaagcccaaggtctgaggtgattcagtcctgcctgtgaggctgtggtactggaaacctccttccgaatgatggantaccaggagcgtgtgtgnggctngacacacacacacacacacacacacacacacacacacagcacagcnggncggtgcagatggagaacaccacatctgctctcgtntctgcaatcaga

SEQ ID NO: 3847 - DNA, 510 bp, Canis familiaris
  misc_feature (444)..(444): n comprises a, c, g, or t, or includes no nucleotide
  misc_feature (449)..(449): n comprises a, c, g, or t, or includes no nucleotide
  misc_feature (452)..(452): n comprises a, c, g, or t, or includes no nucleotide
ttttctacatttaagtttatagcattccaaaaattctataccttttagagctttccaacccattccttgctctcattaatcaaggtaattcccctttgagttaggcttagtattttgttaatctgctgtgcaatttcttaattgtgtgttctgcagcctcatctccttctgcactgtctctatgattgtttatgtcatttccctgcattaaacatagaattgatttacaatggatacaattaaaattctttggaattggatataatgatactttgggccttggttacctattgagctttatctttcacaatttcctaaatgtgaaacccaatatatatatatgtatacacacacacacacacacacacacacacacaccatgctggcttgaatttcagaataatctgatataactgaccatgcatatgtatttgattgcttganatggncanatcagtggttatcaaatatgacctatgagtcatatccaggctgacatctgcttttata

SEQ ID NO: 3848 - DNA, 299 bp, Canis familiaris
  misc_feature (145)..(145): n comprises a, c, g, or t, or includes no nucleotide
  misc_feature (147)..(148): n comprises a, c, g, or t, or includes no nucleotide
  misc_feature (172)..(172): n comprises a, c, g, or t, or includes no nucleotide
  misc_feature (242)..(243): n comprises a, c, g, or t, or includes no nucleotide
aactgggttattctaattaatagacctgtataagagacttaactttctgtctttgatatttttcccatgtgtctttggcctgcttaccaaatgtgtacctgtgtatgtttaaaagcacgtgtgtgtgtgtgtgtgtgggtggagngnnacacgtgtgcacagggatatttanacactcccatgaagtaacactgattgcttttcctgttcttcacggcttctggaatttctgctctgcttgnnaccaagggctcgcgtcctcaatattataaacaaatcctttcttactttcttctagg

SEQ ID NO: 3849 - DNA, 393 bp, Canis familiaris
  misc_feature (62)..(62): n comprises a, c, g, or t, or includes no nucleotide
  misc_feature (304)..(304): n comprises a, c, g, or t, or includes no nucleotide
  misc_feature (307)..(307): n comprises a, c, g, or t, or includes no nucleotide
  misc_feature (310)..(310): n comprises a, c, g, or t, or includes no nucleotide
  misc_feature (351)..(351): n comprises a, c, g, or t, or includes no nucleotide
taatagttcccctcctaggtatctatattactctctatgaactagtttcccaattaaatatnaagaatctgtcatgtccatataaaaaagacaaaatgggaaatccttgcaagattattaacagatacacgctgaggattggtttttgtgtttgtgaaatctcttttatattttgtgggccatcatagctacattttctgtttctggacacctatggtgatagagtaagtcaggctgattacttgttatctgggattttaaataatccctacgtgtgtgtgtgtgtgtgtgtgtgtgtgtgtanganctnactcagttgtggacagtgactctcctcttgttcctggacangtgtatttgttttgatgaaactactggatatataaaagagac

SEQ ID NO: 3850 - DNA, 370 bp, Canis familiaris
  misc_feature (25)..(25): n comprises a, c, g, or t, or includes no nucleotide
  misc_feature (43)..(43): n comprises a, c, g, or t, or includes no nucleotide
  misc_feature (69)..(69): n comprises a, c, g, or t, or includes no nucleotide
  misc_feature (101)..(102): n comprises a, c, g, or t, or includes no nucleotide
  misc_feature (104)..(105): n comprises a, c, g, or t, or includes no nucleotide
  misc_feature (112)..(112): n comprises a, c, g, or t, or includes no nucleotide
  misc_feature (119)..(119): n comprises a, c, g, or t, or includes no nucleotide
  misc_feature (121)..(121): n comprises a, c, g, or t, or includes no nucleotide
  misc_feature (129)..(129): n comprises a, c, g, or t, or includes no nucleotide
  misc_feature (133)..(133): n comprises a, c, g, or t, or includes no nucleotide
  misc_feature (151)..(151): n comprises a, c, g, or t, or includes no nucleotide
  misc_feature (160)..(160): n comprises a, c, g, or t, or includes no nucleotide
  misc_feature (183)..(183): n comprises a, c, g, or t, or includes no nucleotide
  misc_feature (189)..(189): n comprises a, c, g, or t, or includes no nucleotide
  misc_feature (204)..(204): n comprises a, c, g, or t, or includes no nucleotide
  misc_feature (236)..(236): n comprises a, c, g, or t, or includes no nucleotide
  misc_feature (295)..(295): n comprises a, c, g, or t, or includes no nucleotide
  misc_feature (325)..(325): n comprises a, c, g, or t, or includes no nucleotide
  misc_feature (329)..(329): n comprises a, c, g, or t, or includes no nucleotide
gtttgctttttctgagtctactaancttgtgtgaaggattctntgtctaaggttgcctttgtgtctttngtataggatttcctttgtctccattatcttgnnannagtctcnatctgcntncatatttncatntatttgcctcacttcctncttcaactntcttctacaaactcatctttctncttctnacatctggtttaatngtagccattccgagagatggcattcaaccctngatgtcttaatgttaatataaactcatggtcctgcgtgactattcagattctgtagcanaaatgtgggtgagaaaacacacatatgcangccnaccacacacacacacacacacacacacattaatgcagtctc

SEQ ID NO: 3851 - DNA, 250 bp, Canis familiaris
  misc_feature (3)..(3): n comprises a, c, g, or t, or includes no nucleotide
  misc_feature (33)..(33): n comprises a, c, g, or t, or includes no nucleotide
  misc_feature (36)..(36): n comprises a, c, g, or t, or includes no nucleotide
  misc_feature (46)..(47): n comprises a, c, g, or t, or includes no nucleotide
  misc_feature (93)..(93): n comprises a, c, g, or t, or includes no nucleotide
  misc_feature (112)..(112): n comprises a, c, g, or t, or includes no nucleotide
  misc_feature (133)..(133): n comprises a, c, g, or t, or includes no nucleotide
  misc_feature (140)..(140): n comprises a, c, g, or t, or includes no nucleotide
  misc_feature (160)..(160): n comprises a, c, g, or t, or includes no nucleotide
  misc_feature (184)..(184): n comprises a, c, g, or t, or includes no nucleotide
  misc_feature (189)..(189): n comprises a, c, g, or t, or includes no nucleotide
  misc_feature (211)..(211): n comprises a, c, g, or t, or includes no nucleotide
ttnatgcagtctctcagggataaacaaatctgntcnatagacaagnnatggtttaaaaaaaatttgttccccatgtccctttgccagcacctnactttggtaagagtgcctntcctgaacttggtgaacacangcgcatngtctctttgttattcctttngcaacttgatggagcagtttcctnacccncaatgacctgtgtcctcaggcngtcctcctccttctcccctttgaacaacttacttacctc

SEQ ID NO: 3852 - DNA, 420 bp, Canis familiaris
  misc_feature (291)..(291): n comprises a, c, g, or t, or includes no nucleotide
  misc_feature (300)..(300): n comprises a, c, g, or t, or includes no nucleotide
  misc_feature (317)..(317): n comprises a, c, g, or t, or includes no nucleotide
  misc_feature (373)..(373): n comprises a, c, g, or t, or includes no nucleotide
ggtaattctcaagttaatgtggattttatttatctattatttatttgcatttttccccctcaagacagaaagacgaaaagccatcagtgctaggaatttatcagacctgaacctgtcttcctccctgggaagctccccacctgattttcgggatgtttctcttccactgagcccaagcaaaattatcagctggtagcaattttatgaaagttgaaatcaatacatacacacatacctaaacatgctcatgtactgatgcaaacacacacacacacacacacacacacacanacacacaanggcgatacaacttgaanaataagaaactagaccaagaaccaaatagaacattctgtatctgtccctgtcatanatgcgctgggagaatttaagcaggctctctttcccacacttccttgg

SEQ ID NO: 3853 - DNA, 365 bp, Canis familiaris
  misc_feature (288)..(288): n comprises a, c, g, or t, or includes no nucleotide
  misc_feature (293)..(293): n comprises a, c, g, or t, or includes no nucleotide
actcttacataattaccagattctaactatggcatgctatttgtttttaggaaaaacacatttggatggtagtgagttttaaaggaatctgtgttctcataaaatagataaaatcactggttaaataaagaaccagaatgatataaactaactatatatcctttcgacaaagtcaagagaataatttctaaaatccgaaaataccttcttttaatgtaaatagcattggaatgtttttctgtgtgtgtgtgtgtgtgtgtgtgtgtgtgtgtttacagggtccctgtngtganctacaacatcacaactgcagcaaacagcaagatactatcacttcctaccagtggaaatatgtaagcccaggg

SEQ ID NO: 3854 - DNA, 388 bp, Canis familiaris
  misc_feature (214)..(214): n comprises a, c, g, or t, or includes no nucleotide
  misc_feature (220)..(220): n comprises a, c, g, or t, or includes no nucleotide
  misc_feature (222)..(222): n comprises a, c, g, or t, or includes no nucleotide
  misc_feature (225)..(225): n comprises a, c, g, or t, or includes no nucleotide
  misc_feature (249)..(249): n comprises a, c, g, or t, or includes no nucleotide
  misc_feature (296)..(296): n comprises a, c, g, or t, or includes no nucleotide
  misc_feature (306)..(306): n comprises a, c, g, or t, or includes no nucleotide
acctcattctcaaaatgctgcaaaggagaaggggcgtggccagggcacaggggaaggacctcttcttcattcataaacagctgacccaagactaatctctgtcagctgggctctgggtgtgtgtgtgtgtgtgtgtgtgtgtgtgtgtgtaaggatgctgagctttggtcagagctgactctacaggccaatgaggggatgggaagggagggcngggatncnggngcgaggagaggaaagaggatagangcccttgcaaatggcatcaccatcatgaaatgagctcaaaatctaanctctcttgcnatggtgaggatctcccagcactggggggccagacgaagtactgacactaatttgtcccaactgccttcacttggcctctcag

SEQ ID NO: 3855 - DNA, 440 bp, Canis familiaris
gaaagaagagtaacatagtcctgctattctgacagacttctttctctgttctcatcccatgcttcccacacatgtgtatgtacacacacacacacacacacacactggccctggacggggtcttgaggtctgcccaccaggccctgtgtctcccaccctcttatacatgttaccccatcaggcagctaattcccttctcatgtctgaataatagtccttatggtagataatctatgctttgtttgtagatttttccagggaaagagggacacccctgccttccatgattccttaaaatcataagggttactgagtgtgtgaagggttttctctgagtggcctccttctgggtcagggcccagtcatccctgccctgggtattcccatccaggccagccttgttcagggccagtcagcttgtcctcatcaaccctgcaccc

SEQ ID NO: 3856 - DNA, 705 bp, Canis familiaris
tttgaaaaagggtaacaggaactaaaggtttacagtagaatatcacaactgaattcaattgttgcttctaaagctgtggtagttccagacattgtgattgtaatttaatccattgcatagactgatagcattcagtctcctgtcctgaatagtgctaatgccttcttttctataccacaaacacctgggtaccaagataaatttacattcatgtagcaagtcctctcccaggagtacctaaatcctctgcaatttatcattagtacctgggaccaggacttgacagagacgcccctgccttctgatatccaaagctttcgctatacagaggatgttctattggtcaacaaatcagaagactctgtcaacagccttgactgtggtgttatcacaccagcatgggtggctgataaaccctaagaaaattcagggaactactcaccaaggaaagtttcttgggattaggtggatggactcacaatctttaatccctccagarattagtctgctgtctgttggtcctctccwacacacacacatacacacacacacacacacacacacacacacacaamaaagccttgaaccttaattggcactggagacattgtgccctactgtgcatctatgaacctgcaaatctgcataagactttgaatgggcctcaaatcccatcacattggaggctatccmgcaagctgtggc

SEQ ID NO: 3857 - DNA, 454 bp, Canis familiaris
  misc_feature (350)..(350): n comprises a, c, g, or t, or includes no nucleotide
  misc_feature (364)..(364): n comprises a, c, g, or t, or includes no nucleotide
gttctgcaggtacctttaattctggagtggaaaaaaggatgcccaggttggatacctattaaattcttaatctagaattataataaaactaacgttttgacttttatatatttatctcctatattttttttctcagttcattctgaatcaaagaataaaggactattttacattgtccccctgtaggtggtgcttagaaattgtcactgcaactattactactactactactactactactactactactactattattatttccttaatgtaagaaatccaaattcaaccagtattgatgaaatcctcgagaataaagatattgtggggatgtgaaagatgaatacacncctatacgcttgtnaacatccctaaggttctccagtgaaaaccagcattagcgcctttctgccaggccttgtgtcaagtggcatcaggcatggcacctgccttc

SEQ ID NO: 3858 - DNA, 480 bp, Canis familiaris
cacttaatatggatgcatatagaaatatgtataaatataggtgtatacacaggttagtacacatacctatatttctttgctgagagcgcctaaaaaaatgacaccacagtagcaataagcacacctaccatccagaacttggtttctaatatcattctctaacaaaaggaaacagaactctaaggagcactggatgattctaagacctgggcaggaaatatacaggatgagcccagaacatcttagagtaggaagaaaaccttacacatatatacatgtatgggacggatggagagacagacacgcgcgcacacacacacacacacacacaatttatggggctatgtcaaatgggcatatgaccaaagtgaaagagttctcaatggccaaaagtgaaacaatctgaacaaccaaatagagaaaacagtattagaatacaaatcagaatataaaataggtatgcatgagtctaacctgaga

SEQ ID NO: 3859 - DNA, 346 bp, Canis familiaris
  misc_feature (133)..(133): n comprises a, c, g, or t, or includes no nucleotide
  misc_feature (153)..(153): n comprises a, c, g, or t, or includes no nucleotide
  misc_feature (242)..(242): n comprises a, c, g, or t, or includes no nucleotide
ttggtccggttctgaaaggagccctcttcggggctgcagactgctggattctgaaggcttaaagagactcgtgtgtgtgcttgtgtgtgtgtgtgtgtgtgtgtgtgtgtgtgtgtgtgactcataaactgtntatggtgtctttaggatgcngtgtggacagagaacggtctctcacagacagagaatctttatcccagtgagttggctcatttgtcgttttcataggcaactggagtctncctctgggaatactcagaactcctcagtccccaccatgtacacaatacactacagatggtggtgtcacacacaggatggacaccaggtgcagtgccgcatgctg

SEQ ID NO: 3860 - DNA, 330 bp, Canis familiaris
cttcctgccattcccttgaccccaactacgcctttctttggatgcccagggtcctttgaatgtatacacctctactgtagtgtttcctacattggattataatctccaattccttcattgaataggcttcctgaatctataggtatagtgtgtgtatgtgtgtgtatgtgcagccattcttctttcatcacagcattttcttctaagaattctcacttcttctgccaagttctccacaggcattttctctccctgcctggtgcagccaagtagaggtcatgtgacctcagtttggctaagctgggcctcccctctgaattttgtctggat

SEQ ID NO: 3861 - DNA, 350 bp, Canis familiaris
  misc_feature (187)..(187): n comprises a, c, g, or t, or includes no nucleotide
aggagataaactcctttgtcttcaagtccctaacagactgttccaggtacagtgtgcataagaagatgccctgtatgcctgagtaactagctctgtgtgtgtgtatgtgtgtgtgtgtgtgcatgttgtgtgtctgggtgtgtgttaagctgtggcaagctcagaaatttataatctagtatttgtntctctttcttccctgcttcacttcgcctattcccttattcatgttattctgagatgtcatctcccaattaaaccaaaggcattagtgttcataagaccttaactatattttcaatttctgcatcatgggaaaatacatgttgctaaactacattagattcagt

SEQ ID NO: 3862 - DNA, 334 bp, Canis familiaris
  misc_feature (140)..(140): n comprises a, c, g, or t, or includes no nucleotide
  misc_feature (233)..(233): n comprises a, c, g, or t, or includes no nucleotide
  misc_feature (266)..(266): n comprises a, c, g, or t, or includes no nucleotide
ggaaacaaaaacaaaaataaactattgagactacaccaaaataaaaaacttctgtatcgtgaagaaaaccatcaacaaacaaaaaggcaacctcccaaaccactaaaaagaacacacacacacacacacacacactgcanataatccggttgaaaaatgagcacgtgaatagacatttttccaaagaagccatatagatgggcaagagacacatgaaaagatgctcaatatcnctaatcatcagggaaacacatatcaaaaccacnatggggtatcaccttatacctaacagaatggctagtatcaaaaagaaataaccagcattggcaaggat

SEQ ID NO: 3863 - DNA, 603 bp, Canis familiaris
aattgaaagatatcctatattcaaaataaaggacagctacaggatacatgtgagttaaatgagcaggcaatccagaaatgataaacgctaatggtcaccaaacacatgaaaaaaatgctcacttgcactaataataaaatattgcaagttgaaacaatattgacatgaacattgttcaactgtgaaactggtgaagaaaagaaaaagttaacatttaatgctggaaaagggtataatgaggtcaacacattggagaggtgtaaactggtttgactggtatacaaagcaacctgatagcatgctttatcatcaaggcatgaaaatatcttgtattctccagttcttgtctcatagaggacacacacacacacacacacacacacacacacacacgatttatattttaaatctggggccaaatcctactcctctgtttcaaggcttgaactgttctctagagaaacaatggaatgtaaggagaccagttagcccgaccccagaccgcctgcgttcatatgaggacattctatgctctaacatgttcaggaaggaagaaaggaaggaggggaaagagggagactatcacccaggattcaaagtaac

SEQ ID NO: 3864 - DNA, 386 bp, Canis familiaris
atattgcctctatagaggagagctgcatcatttgtgggtgtttatattctaaaatctaatacatctaaggcaaaaattgtgagtagccaaaattatggttgaaaatcatgtaaatctacaatagtaacatatgaccgcacttatgcattatgctgtggacaaatgtaatgtctttcatcaaacatataactgaggagcccatctgaagagttaaaataggttagagtagctgaataccatgtaaagtaattggcttgtgcttagaagtcatgttaaacacacacacacacacacacgtacacaactttatggtctcaaatcatttctcacccatgctccatgccaaacagggctggatgagggcagtgatgcctgaggtagtgtca

SEQ ID NO: 3865 - DNA, 414 bp, Canis familiaris
  misc_feature (224)..(224): n comprises a, c, g, or t, or includes no nucleotide
  misc_feature (365)..(365): n comprises a, c, g, or t, or includes no nucleotide
ggcggacatacccacacagagtctggcatgaccccaaccccatcaagcttaccttttgggctacaggtgtcagacctggacgtggtggtgggtaagctgcagccttgttactagaaatgaggtctgaggaccatcacctggaagattgaaagaactgcaggacttagccaccgcactttccagacctactgaatcagaatttgcattttgacaggtgatttgancttaagtttgagaagcaccatgaaacataggaagtgagggaagctttctcttaaatagctagacaggtaattctctctgtgccacacaccccctccacacacacacacacacacacacacacacacgcatacacacgcatnctctctgattgggttcctccccttgtcagcaagaaccagtgtctgagga

SEQ ID NO: 3866 - DNA, 210 bp, Canis familiaris
tgatgaagtccgatttatctctctctctctttttttattgtgccatagtctgaatgtgtgtgtgtgtgtgtgtgtgtgttttcccaaacccaagttcatttgttgaaatcctaaccccccaaactcatggtttttagatgggcctttgggaggtgatatggagaatgaaggctaaagagaatgtagataaaattaaatttccttataact

SEQ ID NO: 3867 - DNA, 220 bp, Canis familiaris
  misc_feature (95)..(95): n comprises a, c, g, or t, or includes no nucleotide
  misc_feature (100)..(100): n comprises a, c, g, or t, or includes no nucleotide
  misc_feature (103)..(103): n comprises a, c, g, or t, or includes no nucleotide
  misc_feature (109)..(109): n comprises a, c, g, or t, or includes no nucleotide
  misc_feature (112)..(112): n comprises a, c, g, or t, or includes no nucleotide
  misc_feature (115)..(115): n comprises a, c, g, or t, or includes no nucleotide
  misc_feature (145)..(145): n comprises a, c, g, or t, or includes no nucleotide
  misc_feature (152)..(152): n comprises a, c, g, or t, or includes no nucleotide
  misc_feature (155)..(155): n comprises a, c, g, or t, or includes no nucleotide
  misc_feature (179)..(179): n comprises a, c, g, or t, or includes no nucleotide
  misc_feature (185)..(185): n comprises a, c, g, or t, or includes no nucleotide
  misc_feature (191)..(192): n comprises a, c, g, or t, or includes no nucleotide
tgttgaggttcagaaatgtaaaatgacttacccaaggccaaacataaacacgcatacacacacacacacacacacacacacacacacacacacanaaatnatnagtganagnatnggacagaatgggcaaatcagtgtgccttantaaaatntanatttctcttcagggcaaagggttnatgaanacaagnngatatggtctcgaggtggggagcacgtg

SEQ ID NO: 3868 - DNA, 500 bp, Canis familiaris
  misc_feature (27)..(27): n comprises a, c, g, or t, or includes no nucleotide
  misc_feature (44)..(44): n comprises a, c, g, or t, or includes no nucleotide
  misc_feature (48)..(48): n comprises a, c, g, or t, or includes no nucleotide
  misc_feature (91)..(91): n comprises a, c, g, or t, or includes no nucleotide
  misc_feature (229)..(229): n comprises a, c, g, or t, or includes no nucleotide
  misc_feature (376)..(376): n comprises a, c, g, or t, or includes no nucleotide
  misc_feature (390)..(390): n comprises a, c, g, or t, or includes no nucleotide
  misc_feature (414)..(414): n comprises a, c, g, or t, or includes no nucleotide
  misc_feature (423)..(423): n comprises a, c, g, or t, or includes no nucleotide
gcaaggtgtgtctgtgagcacgtgcgntgtgtgcataggccgcnatcntgtgcatgcatgtgcatatgtgcatgtatgtgtattcacatcncaggcatgtgtgctggtgcccatgcatctatgcacatatgtctcatctgtgtgcatgtgtgtgtgtgtgcatctgtatatgggtacacatttgtgtgtatcctgcctgtatgagtacatatgtgtatatgttactgcncactcatgtggggtggctgctttgcatggaaggactaacacccaggagtaagttccttaccttacaggatttatttcttattcacattatgaatatggtagccgtagattgaccacaaacacataggtcctgctcagcactgcgccncagttcactgtggnggtcaatcaaatgaatgctggtcngaatctggnggaaattactgtctctctaagcttctcgtcatatgtggtatgtcatgtccactcatgtcccactcactggccaaagc

SEQ ID NO: 3869 - DNA, 284 bp, Canis familiaris
  misc_feature (28)..(28): n comprises a, c, g, or t, or includes no nucleotide
  misc_feature (52)..(52): n comprises a, c, g, or t, or includes no nucleotide
  misc_feature (191)..(191): n comprises a, c, g, or t, or includes no nucleotide
  misc_feature (217)..(217): n comprises a, c, g, or t, or includes no nucleotide
  misc_feature (219)..(220): n comprises a, c, g, or t, or includes no nucleotide
  misc_feature (222)..(222): n comprises a, c, g, or t, or includes no nucleotide
  misc_feature (244)..(244): n comprises a, c, g, or t, or includes no nucleotide
ctgctctctcccccaacttacacacatntgcacacacacacatacacacacncactctctctttctgtctctctttcatcatcatcatcatcatcatcatcatcatcctataagggacagaataacagactttcagaaatcttaaagcagaaagaaccacctaacttcccaaggaaagacaaggacagtancaagacttgagttaccctgcacctancnnanagtagaagcaaacgaatgcaanaggtttctagaccaatggccctggaacagccttggagtgt

SEQ ID NO: 3870 - DNA, 612 bp, Canis familiaris
  misc_feature (104)..(104): n comprises a, c, g, or t, or includes no nucleotide
ttggaaagcaagaaaagacattattatcaattagttatagttgaaaaaattatgtagggttcatacaacaagttatcacttttattatattaccaactactgtntgcaaggtaaatcctgagattatgcttgagttgctaactctggaaaatgagaatagatggggacccagaaacaggtatcagagtctggatgaggatacagaatttttacatcttagttgctggcatttcaggaaattgagttagttcatttccttgagataacagagacagaggcaggattctcctaatatttattaggattcatccatgtggtgcatctaggagacacattcttgactaatgtgttaagtataaagatagccaactttaagagaaaccactatagaaaatccaaacaaaaccaataattwggraaawgtttwtttactccmaaaaaaaaaaaagagagagagagagagagagagagagagagagagaggamaggtttcagagttcttgtaaatggcttccctagtgcatttaaattaattaggtttactagaaaaacggcaaagtgtcaagagaacattattctaaataactgactcagctaaactgttaaggtggg

SEQ ID NO: 3871 - DNA, 248 bp, Canis familiaris
  misc_feature (101)..(101): n comprises a, c, g, or t, or includes no nucleotide
  misc_feature (106)..(106): n comprises a, c, g, or t, or includes no nucleotide
  misc_feature (129)..(129): n comprises a, c, g, or t, or includes no nucleotide
  misc_feature (179)..(179): n comprises a, c, g, or t, or includes no nucleotide
  misc_feature (182)..(182): n comprises a, c, g, or t, or includes no nucleotide
  misc_feature (195)..(195): n comprises a, c, g, or t, or includes no nucleotide
  misc_feature (216)..(216): n comprises a, c, g, or t, or includes no nucleotide
  misc_feature (224)..(224): n comprises a, c, g, or t, or includes no nucleotide
tcccacctcacctgacattcaaattttaatttaaaaagaggttgcaaaccactggaagttttccaggtggaccttcctttgtctctaaaactttgcatgtnctgtncacctgcttggtatgccccgganacacacacacacacacacacacacacacacacacacttcacatgattccntgnattttcagtctcnctatcccttctctttccttgntggctcangtctgggttgggcatctttaattt

SEQ ID NO: 3872 - DNA, 360 bp, Canis familiaris
  misc_feature (288)..(288): n comprises a, c, g, or t, or includes no nucleotide
ttccttggggcatgtgctccaagatacaccagtatttggagaccgtgctaaagggaagctaggttaagtctgggggtggctgggctgttcagtggcagtgaaggggcttggaaggcatgtgtgtatgtgcagtggggaactcaggagcatttgccaggcagagagtgtgtatgagtgtgtccctgttgcaccacacaaggctttgccttgttggtgcttgtggtgaggtcagagagaagtccatgtaaggacaaacaagtgtgtgtgtgtgtgtgtgtgtgtggacanaggtaagggagcagcggtgagcacactacattacgtaggcacgctgggcagaggagagaacccaggttcccg

SEQ ID NO: 3873 - DNA, 380 bp, Canis familiaris
  misc_feature (193)..(193): n comprises a, c, g, or t, or includes no nucleotide
  misc_feature (213)..(214): n comprises a, c, g, or t, or includes no nucleotide
  misc_feature (222)..(222): n comprises a, c, g, or t, or includes no nucleotide
  misc_feature (254)..(254): n comprises a, c, g, or t, or includes no nucleotide
  misc_feature (287)..(287): n comprises a, c, g, or t, or includes no nucleotide
  misc_feature (306)..(306): n comprises a, c, g, or t, or includes no nucleotide
  misc_feature (311)..(311): n comprises a, c, g, or t, or includes no nucleotide
  misc_feature (344)..(344): n comprises a, c, g, or t, or includes no nucleotide
tatgtgacaattaaaatgtgggattccatttaaaattcactttgacttaacctgtaattagggcttaacctgtaattagggctctcaggctgcccctcccagcagactttactgtcttactcaatccctccgtgccccccaagcaaaaagagaccgcaaacacacacacacacacacacacacacacacacangtctgagctgaggggttggnnttgggganctcagtgtgtgcacactaacttacctcttgcntcttcaggccctgcatgtgcaaagaatcatctntgaagacggtcagcctccntatcngttttcttctttgcaacatgcaacccttggccntgataaaaggtaatattctttgctaatttgaaggac

SEQ ID NO: 3874 - DNA, 444 bp, Canis familiaris
  misc_feature (31)..(32): n comprises a, c, g, or t, or includes no nucleotide
  misc_feature (279)..(280): n comprises a, c, g, or t, or includes no nucleotide
  misc_feature (302)..(302): n comprises a, c, g, or t, or includes no nucleotide
  misc_feature (312)..(312): n comprises a, c, g, or t, or includes no nucleotide
  misc_feature (316)..(316): n comprises a, c, g, or t, or includes no nucleotide
  misc_feature (333)..(333): n comprises a, c, g, or t, or includes no nucleotide
ttttatcgcatctacattattacaaattttnntcttctactagatataaagttctgtgaagtcagggattaaattttttcttgttaccagaaacccattttagaaagtgttgaatctgagaataagtatggatgttgcactaggcctttaaaatttgttcaggaggtggatgatggttatctagttcccagtcctactgaacacaggtcttccctgtgtgtgtgtgtgtgtgtgtgtgtgtgtgtgtgtaagagagagtgtatggaggcagttatatcnncctaaaatacattagatgaatntctttatgtntaantccctaaaaaactgatntcgagtataaagaagataatgaccataagttaatattctctaatgtgggactcccatgatttagacagtgcagatggcaattcataggtttttagtcagtctcttgccgta

SEQ ID NO: 3875 - DNA, 360 bp, Canis familiaris
ctgaggccacactcctgggctgccagtccagcacgtctgtaaatgtggtgctgctttcctcacggggactgcatttctcacagagttctctttcatttgcctaagctgacaatgctcagatgtaaagtgaggtctgactcacgatgaacacctacttaagcacacatggtaactagtagaatatctggaatttaagatactttggtataaagtatgcaagaggtgtgtgcgtgtgtgcgtgtgtgtgtgtgtgtgtgtgtgtgtctcaggttaaactacccagatgcagctagtgttaacactggaaaggtactcccagggggtaatcagctggtactacaatcaggaagatgcttatat

SEQ ID NO: 3876 - DNA, 503 bp, Canis familiaris
tgttgttcagttgtatatacagaaatgtgtataaaacatctcgttattttttaagagtggcaccgcyctggttctgtttgcacagggggccgtggggagagaataaagaggacgatgtcacagcacaggtgagcgtctggaagtgctgctgaaatcgctggtggtggggctggaagggggcctgcccccccactccgggcctgcccagggtctggcctttgcagtgcttggacgtgattccagaaggggggcccgtttgcatcgtcctgcgctgccatggtgtgtccgtggtgcccgctgtggccgggccaggcctctcctccccttgactgcaccctctgtgtgtgtgtgtgtgtgtgtgtgtgtgtgtgtggtgttggggggcggtgggctttttctggtctctccgagttaattcttggagacgcagggcgagtgctggtcctcagtcccggactcgtgaggttatttagggaggagtgacttttgaggtattctgaggt

SEQ ID NO: 3877 - DNA, 547 bp, Canis familiaris
  misc_feature (209)..(209): n comprises a, c, g, or t, or includes no nucleotide
  misc_feature (280)..(280): n comprises a, c, g, or t, or includes no nucleotide
catattgggctccatgtcaatggggaactgcttgagattctttctctccctctgccccttcttctgctctctctttttctctccctctctctcatgctctttctctctccaaataaataaatacatcttttgaaaaaaagaacttgaaattagttgaagttaacaggatttttgattaaggatatatgaaagaagatggtttactgtcnttgttttgcttcaaatttttgccctttgcctttcttcagcttttccatcgcttcctttcccatgggcactntgagttgtttttaaatttcagcttcaagaatttcagcaaaatagtatattggaaataatcttctcaacttgccttaaatattagcaagtatcgcaagtataatattctggcaccactttctaatgtgcatgtgtgcatgtaattgtgtgtgtatgtgtgtgtgtgtgtgtgtgtggttttcctacactaccaggtaattctatgacatcaatttggtacctaaaattcaccttgattctggcactatctacccaaagacagcgcaga

SEQ ID NO: 3878 - DNA, 403 bp, Canis familiaris
  misc_feature (338)..(339): n comprises a, c, g, or t, or includes no nucleotide
  misc_feature (343)..(343): n comprises a, c, g, or t, or includes no nucleotide
  misc_feature (355)..(355): n comprises a, c, g, or t, or includes no nucleotide
  misc_feature (390)..(390): n comprises a, c, g, or t, or includes no nucleotide
ttctgtctgaaatgtagttactcttacttttctttgattagttgtcagcatggtatattttctccatgtgtgtacttttaattagcctgtgtctttatgtttgaagtgggttacatgtacacaacatgtagctaggtcttctgttcttatctactctgaggagctcttttgtataaaatgattcatttaggccattaacattcagagtgattattgatttcctgggtaacatctgccgtgtttgttactgtttctgttcattgcccttgttctttgtttctatttgtctttgacattgtgtgtgtgtgtgtgtgtgtgtgtgtgtgtgtgtgtgtgtnntttnaattgagcacgntgaagagatctggttctctcccttagcatatccgntatgcctgtgttt

SEQ ID NO: 3879 - DNA, 295 bp, Canis familiaris
  misc_feature (160)..(160): n comprises a, c, g, or t, or includes no nucleotide
  misc_feature (201)..(202): n comprises a, c, g, or t, or includes no nucleotide
  misc_feature (246)..(246): n comprises a, c, g, or t, or includes no nucleotide
atgaattgtggaggaaaggggatgttgcattctgggcaggtttcattttgcagttggttcaagaagtgtgtgtgtgtgtgtgtgtgtgtgtattttttaaccgtcccatttctccttttataaaccacccattttgtaggttaacgctttcctccttganatgcgaaaagttcagaatgtatgtgaattagagaaattcgnntttccacaccagagatatcttttatgatgttaacatccgcagcncagaatgttctaattcgccttcagcaaggagtggaaatttgtccccccc

SEQ ID NO: 3880 - DNA, 388 bp, Canis familiaris
  misc_feature (50)..(50): n comprises a, c, g, or t, or includes no nucleotide
  misc_feature (80)..(80): n comprises a, c, g, or t, or includes no nucleotide
  misc_feature (106)..(106): n comprises a, c, g, or t, or includes no nucleotide
ttaagaaaatcaccagcccaaaggatacttgtacagatcttataaaccanaacacatatttttgttctaaaggtagacanaaggatacttttttaaagttctacantccttaagtattttttataaagtatctaatacttattttccccactttctactataaatctgtaactaggcttgtgtgtgtgtgtgtgtgtgtgtgtgtgtgtgattttattttgcaattttagagaatcaaatatagttggtgaaggatgaagggagcaatataacaggatgaagtttctcaaacaaaaatatcacagaatgttaaattactgactccatttcctttaaaaaaatatcgagtgcaccaactcagttcttattaaaacgaatatgtagttcc

SEQ ID NO: 3881 - DNA, 409 bp, Canis familiaris
  misc_feature (26)..(26): n comprises a, c, g, or t, or includes no nucleotide
  misc_feature (34)..(34): n comprises a, c, g, or t, or includes no nucleotide
  misc_feature (102)..(102): n comprises a, c, g, or t, or includes no nucleotide
  misc_feature (161)..(161): n comprises a, c, g, or t, or includes no nucleotide
  misc_feature (171)..(171): n comprises a, c, g, or t, or includes no nucleotide
  misc_feature (321)..(321): n comprises a, c, g, or t, or includes no nucleotide
aactgagtaactccccaaaatggccnaagcatgnaccttaaatatcatgttcagcaaaagaccaaagtagcatgttggggatgggagttagttatgggaggntacctagcaaagtaaaataaacaaggataaagttgttatgacttaaaataattaagatngtgggcctgntcaaaaaaagagctactaccagaaattactttttttctctgaaagacctatctgtacagcagggcaaacatctatctaattactgactatctcttcttattgtcctattaattaccctcctcccctttgaaatcccagacctcaaccgcnttctttagctcaggatggcatataagtctcaaccgacccaacatgtccttgagtctcatatttacatggggctcccatatgtacatag

SEQ ID NO: 3882 - DNA, 203 bp, Canis familiaris
  misc_feature (16)..(16): n comprises a, c, g, or t, or includes no nucleotide
  misc_feature (42)..(42): n comprises a, c, g, or t, or includes no nucleotide
  misc_feature (150)..(150): n comprises a, c, g, or t, or includes no nucleotide
  misc_feature (165)..(165): n comprises a, c, g, or t, or includes no nucleotide
  misc_feature (167)..(167): n comprises a, c, g, or t, or includes no nucleotide
  misc_feature (180)..(180): n comprises a, c, g, or t, or includes no nucleotide
tacatggggcataagngacatggtggggatatgtgtgtgtgnacgcatatgtgtgtgtgcacgcatatgtgtgtgtgtgtgtgtgtgtggtgtgtgtgtatgactatggggaaagggctgagggcaaaggaggttaggaaatgcatagtntgttgaatgaggagngnaaacatttttttnaagtgagaaatgtattcattttg

SEQ ID NO: 3883 - DNA, 355 bp, Canis familiaris
  misc_feature (73)..(73): n comprises a, c, g, or t, or includes no nucleotide
  misc_feature (89)..(89): n comprises a, c, g, or t, or includes no nucleotide
  misc_feature (116)..(116): n comprises a, c, g, or t, or includes no nucleotide
  misc_feature (118)..(118): n comprises a, c, g, or t, or includes no nucleotide
  misc_feature (143)..(143): n comprises a, c, g, or t, or includes no nucleotide
  misc_feature (158)..(158): n comprises a, c, g, or t, or includes no nucleotide
  misc_feature (169)..(169): n comprises a, c, g, or t, or includes no nucleotide
  misc_feature (187)..(187): n comprises a, c, g, or t, or includes no nucleotide
  misc_feature (206)..(206): n comprises a, c, g, or t, or includes no nucleotide
  misc_feature (289)..(289): n comprises a, c, g, or t, or includes no nucleotide
  misc_feature (342)..(342): n comprises a, c, g, or t, or includes no nucleotide
atacatagtaattgcctttttaaaattaagccccttttcttccactcattattttttctttgctttttaagtntatgaaaaaataacantgagctgcctcccagttcatgagaggncnactccaaataaaagcactgaatggnaatactctttcatgnatttggttagnaattctgcagtccctgtntataaagtagtcaccgtcnagatgctaagcagccttgatacattagcccttaaactataagtgaccttatgtgaaaagagctactgtttctatgcaacttgnttaccagatctacacacacacacacacacacacacacacacacacacacaccntgtagcgcacaca

SEQ ID NO: 3884 - DNA, 355 bp, Canis familiaris
  misc_feature (104)..(104): n comprises a, c, g, or t, or includes no nucleotide
  misc_feature (107)..(107): n comprises a, c, g, or t, or includes no nucleotide
catttataaattacttggataagaaaatacattatgattccaatataaagatgccacagactttcagaaataaaacccatggaggaggtggctatctacaaaangtntgatttttactttgtgtttacttatacatgaacatgtaatttttcactcccaaaaattaaggcaggccagattatatgtttgtttaccttcttgaatatgtgttacctgctttaatcaaacctgaactattactcattgaaaatttatcttcctatcgaatagcatttatattttaaatctctttgcatgtatgattatgcatctttaacccagatacatatatatggtttggtggtatacttagcac

SEQ ID NO: 3885 - DNA, 416 bp, Canis familiaris
  misc_feature (33)..(33): n comprises a, c, g, or t, or includes no nucleotide
  misc_feature (232)..(232): n comprises a, c, g, or t, or includes no nucleotide
  misc_feature (245)..(245): n comprises a, c, g, or t, or includes no nucleotide
  misc_feature (247)..(247): n comprises a, c, g, or t, or includes no nucleotide
  misc_feature (325)..(325): n comprises a, c, g, or t, or includes no nucleotide
  misc_feature (336)..(336): n comprises a, c, g, or t, or includes no nucleotide
  misc_feature (363)..(363): n comprises a, c, g, or t, or includes no nucleotide
  misc_feature (401)..(401): n comprises a, c, g, or t, or includes no nucleotide
taatatctatgccctttccttctccttggggcncaagtccgatcccttctcagttttccttcaggtatcaagtttcctcaaagcctttttctcatcaaaagcaagtgcaaagatatgatacaagttgttaacatgtggaataaaaacagtgggtttcttttgatggaaattgcaaatcttggccccatcagccatgaaacttaaataagaatatttggtgggtatttttganaggattagtgggncnaatggtttgggatagtgtctgacattcattcattcattcattcattcattctttaatttaaagtttgggattgtggcngcaggtaggcngtgaaaatttgtgctgcacacagcgcntgatgcaagtatgggggtcttagcatggagagccaganaagggaagccaggcc

SEQ ID NO: 3886 - DNA, 314 bp, Canis familiaris
  misc_feature (9)..(9): n comprises a, c, g, or t, or includes no nucleotide
  misc_feature (47)..(47): n comprises a, c, g, or t, or includes no nucleotide
  misc_feature (106)..(106): n comprises a, c, g, or t, or includes no nucleotide
  misc_feature (145)..(145): n comprises a, c, g, or t, or includes no nucleotide
  misc_feature (161)..(161): n comprises a, c, g, or t, or includes no nucleotide
  misc_feature (194)..(194): n comprises a, c, g, or t, or includes no nucleotide
  misc_feature (238)..(238): n comprises a, c, g, or t, or includes no nucleotide
  misc_feature (261)..(261): n comprises a, c, g, or t, or includes no nucleotide
  misc_feature (288)..(288): n comprises a, c, g, or t, or includes no nucleotide
ctccctggngcaatgccacacacatacacccagagccacagtccccnccctgtggccaatatttgtacttcaatccagatagttttgtgatacttcattatgaagnaatactccttttcaagtccttgaaaactctcagtgttangcagggagaagagggnagtatctgtctactaattggctctaaccctgtngcattaaggtgtgtgtgtgtgtgtgtgtgtgtgtgtgtgtttanagatttatttatttatttattcntgagagacagaaagagaggcagagacntaggtagaaggagaagcacgctcccc

SEQ ID NO: 3887 - DNA, 242 bp, Canis familiaris
  misc_feature (10)..(10): n comprises a, c, g, or t, or includes no nucleotide
  misc_feature (48)..(49): n comprises a, c, g, or t, or includes no nucleotide
  misc_feature (76)..(76): n comprises a, c, g, or t, or includes no nucleotide
  misc_feature (93)..(93): n comprises a, c, g, or t, or includes no nucleotide
  misc_feature (232)..(232): n comprises a, c, g, or t, or includes no nucleotide
ttccttaagnagtttttcaaagaaccttgcccagcccctccaggccannaatgctgaaggcagtttcattttgcantttgagggattgaaacnacctcctttaaaggctgtccaagcatttttaaaaaaaaaaaagaaaagatttattcatttatttatttatttatttatttatttatttatttatttgaaagcatgagagagtacaagcagggggaggggaagaagcaangggagaagca

SEQ ID NO: 3888 - DNA, 723 bp, Canis familiaris
atgtcatgccctgtgatgtctcggtacatacgtgcatacgtggaatgtctggsctttcatacctgtgtgtatgwgcctccccttttccaatctggcaagtccatttcagcatctctggagatgtrtgcacaaatgtctgtgygaatctgtaggatttagtaactatacattttctaagagaatctctgkyttttttttcgtgtcycaggatgcacaggtatgtgtgcatgtgtccagcatgtgtctgagaatctgagtacgtgtctatctcaggaccactgcatatgtctgcatgtrtatctacttcaaaatttgcgtgtgctccgattcaagacwtatrtggcctccgtagtttggagacagagagagagmgwgtgwgtgwgtgtgtgtgtgtgtgtgtgtgtgttatgtgtgwgtgtcaggggtgacaggaacatttgtatacttgtgtgtgtctcttcccctggctgcwgttgcctacccagtaaaagaagagtacctattccctatctctctccctcacacccatccatgctcatgtgtgccgtgaggatggggagggggccggggwgtcggcgagctcctgtgtcacaaggttaatttctccgcagccaggcaggctgggccctgaggggagtggtgggggaggggctggtccccacagtccctctgataaatatgtatttggggytgttgtgctcaaaggtcatggggggagaagga

SEQ ID NO: 3889 - DNA, 218 bp, Canis familiaris
  misc_feature (46)..(46): n comprises a, c, g, or t, or includes no nucleotide
  misc_feature (94)..(94): n comprises a, c, g, or t, or includes no nucleotide
  misc_feature (109)..(109): n comprises a, c, g, or t, or includes no nucleotide
tatacacctctccctaggctgggctttggatgagtgaaatgtgcanaataggctgttgtctgttcacattcacctaaaagcaaagtgtacccanaaagtgtttccaganagacacacacacacacacacacacacacacacacatacataaaattattgagagtgactacagcggtgcttgacacatagtagatagtcaaacaagattaattgagtga

SEQ ID NO: 3890 - DNA, 714 bp, Canis familiaris
actctagaggatccagcaattctatttctaggtctctatctgaaaaaaaatcaaaactctaaaaaatatacacacacacatatatatacacacacacaaacacacacactcctgatgtycactggagcattatttacaatagccaagatgtggaagcagcctaaatgtccatcaacagatgaatggataaagaagatgtgatacacacacacgcacacacacacacacacacaaacacacactggactattagccataaaaaaagaatgagaccttaccatctgtgacaacatagatggaccttgagggtattatgctaagtggaataagtcagcwagacaaagacaaatagtatatgattttacttataagtaatctaaaaatcaaagaaacacachaaagaaaagwaaacttagagaaaatacagagaacggactattgtttgcctgacgggattgtggttagaagggagcaaaatgggttagggaatcaagaggtgcaaacttccagttataaaacaagtcatggggatgaagaatattaagaacagtcaataatattgtatcaactttgtatggtgtcagatggtaacagcttactgttgtggtcarttggcactgtatgcaaatattgaatctcagtgttgtacaaatgaaactaatataaatggtataccattaagaaaaattattaattaatagataaacaaagaca

SEQ ID NO: 3891 - DNA, 377 bp, Canis familiaris
  misc_feature (226)..(226): n comprises a, c, g, or t, or includes no nucleotide
tacgttttgttcaggtcagtgatgtagatttgttgtgacattagcctgagaggaaaaagcagcatagcaaaaagaattaagaaccaaaagaacacacgcgtgcgcgcacacacacacacacacacacacattgctatttcagaatcattaactagtgtaattgtccaaagaaagttgcagatccccgggtaccgagctcgaattcgtaatcatggtcatagctgtntcctgtgtgaaattgttatccgctcacaattccacacaacatacgagccggaagcataaagtgtaaagcctggggtgcctaatgagtgagctaactcacattaattgcgttgcgctcactgcccgctttccagtcgggaaacctgtcgtgc

SEQ ID NO: 3892 - DNA, 401 bp, Canis familiaris
  misc_feature (264)..(264): n comprises a, c, g, or t, or includes no nucleotide
  misc_feature (279)..(279): n comprises a, c, g, or t, or includes no nucleotide
  misc_feature (288)..(288): n comprises a, c, g, or t, or includes no nucleotide
  misc_feature (323)..(323): n comprises a, c, g, or t, or includes no nucleotide
  misc_feature (326)..(326): n comprises a, c, g, or t, or includes no nucleotide
  misc_feature (351)..(351): n comprises a, c, g, or t, or includes no nucleotide
  misc_feature (360)..(360): n comprises a, c, g, or t, or includes no nucleotide
  misc_feature (373)..(373): n comprises a, c, g, or t, or includes no nucleotide
aggcactcaaccgctgagccacccaggtgtccctgtaagataaaataattacagagatggataacaggttaatggataacaggagttattggggaggtaaagggaatggaagttgttataagggggtaacaaaaagagtcttgtggttattgcatgattatcttgattgtgttagttgtaatggagggctagacatgagctaaaatcaaataaagccacacacgcgcacacacacacacacacacacacacacaaatgaatgcntgtatcactagggangtctagatnagctctacagattccaccaatataaattcccggtnttnacattgtattatgattgtgcaagangttaacatnactgatggatganagaatggtgtatgagacttctcagtgca

SEQ ID NO: 3893 - DNA, 436 bp, Canis familiaris
  misc_feature (28)..(28): n comprises a, c, g, or t, or includes no nucleotide
  misc_feature (47)..(47): n comprises a, c, g, or t, or includes no nucleotide
  misc_feature (126)..(126): n comprises a, c, g, or t, or includes no nucleotide
  misc_feature (187)..(187): n comprises a, c, g, or t, or includes no nucleotide
gcatggagctgtttgaggtttgctggancggcttgagtgtgtaagtntgtacctttcattagatttggaaagtgctcagctatcatttcttcgaaacacgcttcttcggcttcacactgtcttcgnccctcctgggaccccagggacacagccgtccgcctctctaccacgttcactcagccctgcncattttgttcgtgcacctttgtctgttgttcagtttggatgatgcactgggctgtgtccatttcattgttctacgtccatcttctcccatctcttttctgttattgagtcctttcagtgaattttttattttcatacacacacacacacacacacacattctcagatctccatttggctgtaggtcctgttcctgtgctgagactttttatctttccacttgttcaagacgtctggctttgtcccttga

SEQ ID NO: 3894 - DNA, 741 bp, Canis familiaris
aatctcatcaaggaaaagctacatttacttcctgacccctgagcccattgttcctcccctataagtcccgctgtgaccaggcaagtctcatccacccccggctggtgcatccagcaggctggtcccagagctccctccctcccctgctcccctgcatctcagccactggcttctctccatatacctaggagcttgtacctgcatcatcccaaactttgaactctgcttagttagcaatttttggaagctttaaacacttcttccagcaaaaggcaccacacttgctctttgacagcatcaagctagccagtctttctgtccatctgtgctcttctcagtgacccttccttcctgggtgagccagacttgcaccagtactgccaatgccatgcyccccgtccttgcaaacmtccccagccaaagacatggtgagctctctgtgccatattctcctaatctctctctctctctctctctctctctctcacacacacacacacacacacacacagacacacacacacagaggctgcttaaactatcagagaatgttctccaggcaggagtttggtgccactacaaatctatggcccacagccccaaacaatctcaagtgctgctggcagttcttctctgggtcgccaaccactttttgaattctctcagaagttatttctcaccttctctaatctccctgtgagcaccttcctaccacctgcccccactcttcacctctgttcc

SEQ ID NO: 3895 - DNA, 456 bp, Canis familiaris
aaagtcaggaagaaagaaaggaatttagttccattatgggtgaacaaaaagcaatcacacggagcttctagaaaacaaaacccagaagaaatcaaaaaggcaaacgccaaagttggggtggggcggattatcttggcagccttgattagtgagcgctgcctatttggggaagcacaagatgtgacctcatcacttctttctgctccagggaatccaatttgggtctacctttctgcctttgagagcctgtggtttcagaccatttttcctggcagtcttaaggagggaataaaaaaggagacatatgacctcacctgctccagtaccttccagagccggacagaagagcaaggcttcctgtgctttttgcttcctttagcctgattcatttcacaataatggaaaacacaactagggagccttaagcaaggccattgctttgtgctgtacacatgt

SEQ ID NO: 3896 - DNA, 400 bp, Canis familiaris
  misc_feature (64)..(64): n comprises a, c, g, or t, or includes no nucleotide
tatggatttctctctggaacaatgtacggacgacttacacacacacacacacacacacacacantttatacacacctaatccataggtattttccacacaattttagggactcgtgaaccccctaagtttggtccacagcccccaagttaagaattcccactctaattagtgattttcaaacagaaaggctgaaaattactcagacagctgaggccaaaagaggcaattagtccccgactagccagtacaagtacagaacttcagaacctgaagatacaggagaaatcagtgcttctactgttttcaagtcaattatagagttgtgcttatcactcagggcagatttcacttttccaacggtatcgtctgtagaacagcaatattatacccagaaatgct

SEQ ID NO: 3897 - DNA, 293 bp, Canis familiaris
  misc_feature (154)..(154): n comprises a, c, g, or t, or includes no nucleotide
  misc_feature (168)..(168): n comprises a, c, g, or t, or includes no nucleotide
  misc_feature (199)..(199): n comprises a, c, g, or t, or includes no nucleotide
  misc_feature (208)..(208): n comprises a, c, g, or t, or includes no nucleotide
  misc_feature (220)..(220): n comprises a, c, g, or t, or includes no nucleotide
  misc_feature (245)..(245): n comprises a, c, g, or t, or includes no nucleotide
  misc_feature (248)..(249): n comprises a, c, g, or t, or includes no nucleotide
ggctacttcattctgaacttaaaccaggcatgtttgtccacataattggcttagaaagtagattcgaggagttaaccactgtgagaatgaaactttcccaaattgcttagatgtgtgtgtgtgtgtgtgtgtgtgtgtgtgtgtgtgtgtgtgngagtttaacatganaaaaatctcagtatgtctactacagagcatngggaggaangattcttacccntctatcacaaaataaaatgtaatcntcnntatcagtggctgcctgtcatacacacatagctgtgactcctgtc

SEQ ID NO: 3898 - DNA, 712 bp, Canis familiaris
aagtgcgggtgtgtcaaaaaccacccaagcccgagacttgctcactggtgggttttaaatgcactggaggctctgcatggaggggaggcgagatgagtaatcctggaaacgtgctattagctgagggtcaggaatgagtctcgcctgggaagcatgccagggagtgcagggcaatgcagggtccttcaaggaaggaggggtggaagccacttgggtggaggccctactggtaggttcctcggggtcctgtttcttggctgggagatgggataagctgttgtgagcagccccgcctcccaggcctgtcttgggctgaagcatctgtagctacaggaggcccagagctgactgactgatgtcctgtgcgcccamtgcktagccagagggtracacacacacacacacacacacacacacacacacacacacacacacacacacacagctgtgacagctggccaataggcccgaactcggggcctgtccctctgcaggagagaagccacctcctcaggcttcagaatgaggcagtgcagggctcgaaccccagggtcatccctcactagctgtgtggctttgggcaagtgctcactcgtctgggctgcagtttctctatatgaaaaaaatgggataatgccatttgctacttcacagggttgcagggtagatgaaagacctaagtcatcccctagacagagttctcctggaggct

SEQ ID NO: 3899 - DNA, 523 bp, Canis familiaris
  misc_feature (384)..(384): n comprises a, c, g, or t, or includes no nucleotide
caaccaaggttgtcatgactctggctggaaaaaacatgagtccctgacatatgatgagaatatctgggcagatgcactataggttttgactccccaggctattccgaaccttgtggatgtgcagaagtggctttccctcctcattgcaagctagcacacaagagtattgagtgtgttggagtggcttgttgaaggggcagctgaagtgccagctcataggcaatactttggacctacttctccccccacaacctcatcctatcattataattacatcattttcactggctaaaataataactttttgttttacatgttatgattgtcaatattgttttctacaaagccaactaatatagtatgattatatattatcttttgtantctattattttttctggagttactacctagctcttttctacacacacacagacatgtacactttctctctctcacacacacacacacacatcatcatggcaagtatgcactgcaatgattaccctagtgttttctcaga

SEQ ID NO: 3900 - DNA, 256 bp, Canis familiaris
  misc_feature (5)..(5): n comprises a, c, g, or t, or includes no nucleotide
  misc_feature (144)..(144): n comprises a, c, g, or t, or includes no nucleotide
  misc_feature (155)..(156): n comprises a, c, g, or t, or includes no nucleotide
  misc_feature (166)..(166): n comprises a, c, g, or t, or includes no nucleotide
  misc_feature (173)..(173): n comprises a, c, g, or t, or includes no nucleotide
  misc_feature (185)..(185): n comprises a, c, g, or t, or includes no nucleotide
  misc_feature (192)..(192): n comprises a, c, g, or t, or includes no nucleotide
  misc_feature (195)..(195): n comprises a, c, g, or t, or includes no nucleotide
  misc_feature (210)..(211): n comprises a, c, g, or t, or includes no nucleotide
  misc_feature (214)..(215): n comprises a, c, g, or t, or includes no nucleotide
  misc_feature (217)..(217): n comprises a, c, g, or t, or includes no nucleotide
atatntctctttctccagcttaacttcacttagcagagcaccctcaaggcccatctatgttgtaacatatggcaagatttccttcttttcatggctgtataatattcgtgtgtctgtgtgtgtgtgtgtgtgtgtgtgtgtgtntgtgtgtgtannataatgtctntatcaantcaggcataganggatgcntangtgggctccatagannggnnantgtaaatagtgctgcagtgaacctggggatgcctatcac

SEQ ID NO: 3901 - DNA, 399 bp, Canis familiaris
  misc_feature (147)..(147): n comprises a, c, g, or t, or includes no nucleotide
  misc_feature (176)..(176): n comprises a, c, g, or t, or includes no nucleotide
  misc_feature (199)..(199): n comprises a, c, g, or t, or includes no nucleotide
  misc_feature (208)..(208): n comprises a, c, g, or t, or includes no nucleotide
  misc_feature (220)..(220): n comprises a, c, g, or t, or includes no nucleotide
  misc_feature (225)..(225): n comprises a, c, g, or t, or includes no nucleotide
  misc_feature (235)..(235): n comprises a, c, g, or t, or includes no nucleotide
  misc_feature (317)..(317): n comprises a, c, g, or t, or includes no nucleotide
  misc_feature (332)..(332): n comprises a, c, g, or t, or includes no nucleotide
  misc_feature (378)..(378): n comprises a, c, g, or t, or includes no nucleotide
tgcagcacctattttctttccaatcttatttcctactccttctttccccccttcttccatgctgcagagtcccttcgtgcattcatgcacacacacacacacacacacacacacacagcacacatacacatactctaacatacacanatatacacagcatctctgttcactctgangtgctcagtgtctctcaatgatncactctttntctatcttctanggttntgttaaaaancactttcaactattttccctctggagaagttctactcatctctcaggtctcatttcaaaagatacttctcctccatgttttntctaacttcccagantggtgtccttatcttcactagatacccaatgaatatctatctcatncattgattcaacactaaatta

SEQ ID NO: 3902 - DNA, 380 bp, Canis familiaris
  misc_feature (294)..(294): n comprises a, c, g, or t, or includes no nucleotide
  misc_feature (296)..(296): n comprises a, c, g, or t, or includes no nucleotide
  misc_feature (304)..(304): n comprises a, c, g, or t, or includes no nucleotide
  misc_feature (343)..(343): n comprises a, c, g, or t, or includes no nucleotide
gtcgactctagaggatccccctctgtctctctcatgaataaataaataaaatcttcaaaaaaataaagttcttttgaaataattagagatacataagaaggtgggaaaaaagtttagggagagtccatgttacctacaccaatttccccgatcctaccatcttgtataatttgagcacaaaatcaaaaccagaaaattggccctggtacaatccacagatctcattcagatttcaccagctttacatacaatcttgtgtgtgtgtgtgtgtgtgtgtgtgtgtgtgtgtgtgtnantctgagtnctcttatcacatgcgtatatctgtgtcaccaccaccacnatccatatacagaactccctagtggggtaccgagctc

SEQ ID NO: 3903 - DNA, 436 bp, Canis familiaris
  misc_feature (319)..(319): n comprises a, c, g, or t, or includes no nucleotide
  misc_feature (331)..(331): n comprises a, c, g, or t, or includes no nucleotide
  misc_feature (348)..(348): n comprises a, c, g, or t, or includes no nucleotide
  misc_feature (353)..(353): n comprises a, c, g, or t, or includes no nucleotide
  misc_feature (372)..(373): n comprises a, c, g, or t, or includes no nucleotide
  misc_feature (383)..(383): n comprises a, c, g, or t, or includes no nucleotide
  misc_feature (392)..(392): n comprises a, c, g, or t, or includes no nucleotide
cttgcatgcctgcaggtcgactctagaggatccccggactataaaagaatggattaaaattcacaaaggaaatgaatgagaatacaaagcgctgtcttgtttgtctgtttcggtttaacaataaagatttcagaaaacttatctgatgccaaaatttttatcaggtttctttgaaatagggctaatggcctaaaacaagactatatatatacacataacacacacacacacacacacacacacaaatctacagtgtcaactcatatgttctaagaagtaattaagataattattactctatcttttagcattaatatcngggctatcccanacacagctcagagatanattanggcaagcagagactgtganngatctcccantaaactgcntctctcttgcttcacaaccttctgtaacatctctattttgttct

SEQ ID NO: 3904 - DNA, 735 bp, Canis familiaris
ggtctttatttctctgggtactcccctgtagttttgaggatagatgtcttggatggatacttgctgtgagatttatttctatgatttcagtgtgtggttttttgggatgctacactacatagtatgttctactaacataatttcctagctgcaattgatatatgaaaaactacatttgattttgtgtatccagagatcagttataatacacttattaatttggacagtttatctgtagtaacttttgtattttctgcttacacaacttggcactgatgattttacttttttttgctttcttttttctaaggattttatttatttattcmtgagagacacacacacacacacacacacagagtcagagacatgggcagagggagaagcagactccctgtggggagcccaatgtaggamttgatcccagcatcccgggatcacaccctgagccaaagacagacactcaaccactgagccacccaggtgtccctactttttcttttcttatccttacaaattttgattyttttttcccccctcctgtttccctgtttytcctcatccaatgatgaggacattgggtataatgttaagtagaaatgattataacaagcattatttcctcamtcccaamttaccaggaaagcttttaatatttyttatttaactataatgtttgcagtaggttttttttttggggatcctctagagtcgacctgcaggcatgcaagcttg

SEQ ID NO: 3905 - DNA, 756 bp, Canis familiaris
ccctatcagtggacacttgggctgcttccatatctggtaattgtgaataatgctgcaataaatgtaaggatgcatatatcttttataattagtggtattgttttctttgggtaaatacccagtagtggagttcctggatcatatagatatttctatttttaattttttgaggaacgtccattttttccagtgactacatcagtttacattcccaccaatagtgcatggagttcccttttctctacatctttgccaacacttgttatttcttgcctttctgattttagtcattctgacaactgtaaggtgagatatcattgtggttttgatttacattttcctttttttaaaagattttatttatttattcatgagacacacacacacacacacacacacacacacacagaggcagagacacrggcagagttagaagcaggctccatgcagagagcccaatgtgggactcaatccggggactccaggatcatgcccttggctgaaggcagatgcccaaacgctgagccaccgaggcatcccattgatttacattttcctgatgatcagtgatattgaacatctctccatgtgtctgttagccatctgtatatctttggaaaattgtcgattcaggtcctctgcccattttttaattggttgtgttttgtttgttttagtgttgaattgtataagttctttatatattttggatattaacctcttatcagatatattatttagggggatcctctagag

SEQ ID NO: 3906 - DNA, 481 bp, Canis familiaris
tatttttgtctagtatcctatacagcacttagcaaatgaggcatgtatatatatagaaagtacaacaaacaataacacaattaaaacataatgtgtattacggcctgagacctttctcattttcagagcatttgcaaaattctcaggatgtctacagaccttatgcagatctttgtaagatttttgcttcaaaaagaaacaacgatatccagacacactggtatcaaaaaacaaattagaaaataactcattccacatgtccgactgctccttatatttaaatattaaacaattacagtagtggaatgaatacatgtcagataagtaaaaataaatattcaaccataagtagataaaaattccagaatacagtggaccatgagctcaactaacaatgcacaaaggctgtgtgtgtgtgtgtgtgtgtgtgtgtgtgtgtgtgtgaatgaaacctatgtgtattggatgtgtgtgtgggaaa

SEQ ID NO: 3907 - DNA, 458 bp, Canis familiaris
atcaatgataatccaagcatgtaaattcctggtgatttattgcagatataatactgagtgagatgttagagtcccgagaggaataaagagtcagcttgtttcctggagactttttctgcaacattagatgatgcaaatgccgttttcatgggaaactgcgggagacgcttcccagttatctggaaaaatattcagtgtgacaattacgcattattaattaaagagatgctcattttcttttctttttagttcgtgtgtgtgtatgtgtgtgagtgtgggctctacacccagtgaggggctcgaactcaccgccctgagatcaagagtcacatgttccaccggctgagccagccaggtgccctgagatattcatcttcttaagatttaacttacgtataaacaatacaattgttctgagactataagagccagctttgaaggagcgtcgcttacttttg

SEQ ID NO: 3908 - DNA, 398 bp, Canis familiaris
  misc_feature (215)..(215): n comprises a, c, g, or t, or includes no nucleotide
  misc_feature (253)..(253): n comprises a, c, g, or t, or includes no nucleotide
  misc_feature (316)..(316): n comprises a, c, g, or t, or includes no nucleotide
gcttgcatgctgcaggtcgactctagaggacccatcatccagaatactagatgcagaacagatttaataattataaattcagtcaatctgattaacccaccataataaactgcaaagtaaggtattttctccctctccctttctcgctctctgtgtctctgtctctgtctctctctctctctctcacacacacacacacacacacaaatatctantgggggaagagattagattactttgaccctcttacttnggtctactggtcaaaagttaatattaatatattttatgtaattaatataaagtaccctgatangttagcataaaaacttcttcagttagtattttagaaggatacctattgtatgatctccatgtgcatacaataaactgatggt

SEQ ID NO: 3909 - DNA, 494 bp, Canis familiaris
taccgcatcaggcgccattcgccattcaggctgcgcaactgttgggaagggcgatcggtgcgggcctcttcgctattacgccagctggcgaaagggggatgtgctgcaaggcgattaagttgggtaacgccagggttttcccagtcacgacgttgtaaaacgacggccagtgccaagcttgcatgcctgcaggtcgactctagaggatccccactttcaacaatattcaaagatacgggaaaaaattgaataaggtcccatttctaacttggcagcatgacaaagattagatagagagacaaatatctacacggcaacacacacacacacacacgtatgcatatatgcatttaacgttcagttctggaaaagatgctgggagacctatcattggtgatggggtaccgagctcgaattcgtaatcatggtcatagctgtttcctgtgtgaaattgttatccgctcacaattccacacaacatacgagccggaagc

SEQ ID NO: 3910 - DNA, 360 bp, Canis familiaris
  misc_feature (245)..(245): n comprises a, c, g, or t, or includes no nucleotide
gttgcatgctgcaggtcgactctagaggatcccatctatagttcacaagttgagtatattaattttctccagaaaagtcttcagcaattttcattagattgtcagatattttatactttttttaaagaaaggttttatttatttattcatgagagacacacacacacacacacagaggcaaagacacaggcagagtgagaagcaggggtaccgagctcgaattcgtaatcatggtcatagctgtntcctgtgtgaaattgttatccgctcacaattccacacaacatacgagccggaagcataaagttgtaaagcctggggttgcctaattgagttgagctaactccacattaattgcgt

SEQ ID NO: 3911 - DNA, 460 bp, Canis familiaris
gcaggtcgactctagaggaccccaaatgatcattgtctttctctgattaacctacttcgctcagcataatatcctctagttccacctatgtccttgcaaatggcaaaatttcatttttctttttgatggctgagtagtagtccattgtgtgtgtgtgtgtgtgtgtgtgtgtgtacacactgagatggatctatctatctatctatctatctatctatctatcaccatcatctatctatcatctatctatctcacatcttccttatccattcatctgtcagtggacactgaggctcctcccacagttgggtgttgtggacatggctgctgtgaacattggggtgcaggtgtcctgccatttcactgcatctgtatctttggggtaaatccctagcagcacaattgctgggtcgtagggtcgctctatttttaattcttgaggaggcaccgagctcgaatc

SEQ ID NO: 3912 - DNA, 350 bp, Canis familiaris
  misc_feature (55)..(55): n comprises a, c, g, or t, or includes no nucleotide
  misc_feature (117)..(117): n comprises a, c, g, or t, or includes no nucleotide
  misc_feature (186)..(186): n comprises a, c, g, or t, or includes no nucleotide
  misc_feature (201)..(201): n comprises a, c, g, or t, or includes no nucleotide
  misc_feature (223)..(224): n comprises a, c, g, or t, or includes no nucleotide
  misc_feature (228)..(228): n comprises a, c, g, or t, or includes no nucleotide
  misc_feature (268)..(268): n comprises a, c, g, or t, or includes no nucleotide
  misc_feature (335)..(335): n comprises a, c, g, or t, or includes no nucleotide
ctcggtacccggggatcctgagatgggaactggtaaaatgctcatgtggtgtganatacttcagtgaaagaaaggccattatgcagtgactcagggtgggaacgagtctgtgtccancctcctaaactcttctttgaaatatggtgtgtgtgtgtgtgggtgtgtgtgtgtgtgtccaaaagggangggacagcagagganaagacaaaagagagagggtganngcangggcaggactggaagggaaaacaggcacacagaccatccngggaccatagtgggagccttggaccagtgtgtctggccagagaaacagctgagagaaggacctggangtgcagtgtccccac

SEQ ID NO: 3913 - DNA, 470 bp, Canis familiaris
aaccggtacccggggatcctcctcctacacacacagcattcattctatccctcccaataaaaatttctggttgctccatatggacttattccttttgttcttacggtacagtctatttgttcttatagcatatcctgcatccttctcttctgttaacacttaggttagaattccattctgctagttcctggaggtcagggatggtgtcttatttattttctatccacactgggagcagtgtggggctttatctctgacagatatgacctgagtctggaattcaaagggcatatatctttgttcgggtgcgtgtgtgtgcatgcatgtgtgtgtgtgcgtgtgtgtgtgaactacaagcccttattagaatcttctagggtcctttattgcatgaaaacacaagtcagtcaacagtctcaggggaatttgtaggctctgctctgggctatgattgggttcactggccttgt

SEQ ID NO: 3914 - DNA, 841 bp, Canis familiaris
ggggagggattgttaaaagatttaaaaaacctggcatataggttggtagattacaagtattaatattatattaaggataaacttgatataaatcagtctgcctctccaaccgtttttacaaatttagggtaaaaaaatgttaatatttttcaaagcccaattcaactcttagcaaattattatcctcttcctctcttatttggcatcattcattgttatgctttccgctttgtgcatatagtatatgtatatagagagatagatacatacatataacgtttttttattaaagatttttatttattcatttgagagagagagaacctaagtggggggaaggagcagaaggggagaaagagggacaaggagattctgtgctgaacgcggagcttgatggagttgagaagagctcwatcccaggacccaagccaaaaccacgagtttgaagcttaaccgactgagccacccagatacttmtacaaataatgttttttaatttgtataggtagagartacacacacacacacacacacacacacacagaaatctcccttaccttacaatgtggtgatgaacacaagaacccatcataaattgaaaattgaggtattgaaaataccctaaggtgcatttaatacacctaccctaatggatgccttagcttagcccagcctaccttatatgtgctcagaacactcacattagcctacagctgggaaaaatcaccaaacacaaagcctattttataatgaagtgttgagtatttcacataattgaatgctgtactgaaagtgacaatcagaatggttgtaagcttaggggtggctgactctcatgtcc

SEQ ID NO: 3915 - DNA, 420 bp, Canis familiaris
  misc_feature (117)..(117): n comprises a, c, g, or t, or includes no nucleotide
  misc_feature (153)..(153): n comprises a, c, g, or t, or includes no nucleotide
  misc_feature (180)..(180): n comprises a, c, g, or t, or includes no nucleotide
  misc_feature (185)..(185): n comprises a, c, g, or t, or includes no nucleotide
gctattacgccagctggcgaaagggggatgtgctgcaaggcgattaagttgggtaacgccagggttttcccagtcacgacgttgtaaaacgacggccagtgccaagcttgcatgccngcaggtcgactctagaggatccccacacatataganagtcttcaaaaacaatgagaaaaaganaatgnagagaaaatgacacactaaaatttttaaatttatattataaatttgtttttgatccatatgacatacagacacatgcacacacacacacacacacacacacaatctccacattagtgtggtgctacaaaaagtaaaatacaaaaaatcagtttcagttcttgccccgaaggcatataattcagattttccagactcacagaacacagaatacaggtaagggtaccgagctcgaat

SEQ ID NO: 3916 - DNA, 391 bp, Canis familiaris
  misc_feature (268)..(268): n comprises a, c, g, or t, or includes no nucleotide
  misc_feature (294)..(294): n comprises a, c, g, or t, or includes no nucleotide
ttgcatgctgcaggtcgactctagaggatctcagggttgtgagactgagctcctacttgcgctccatgctgggagtggagcctgcttgagattctttctctccttcttcctccgcccttccccatgccacttatactctctcacacacacacacacacacacacacatcctctctttctctcttaaaaaaattatttaaaaattccctctatttaaattaatttaaatattttatttacataaatactactcaacaattagaaatttntcacaggtcgatgaaattccagtttntgttttgaaagttgcaaagttaataaacacttttaattagaattattccagaaactagctaacaaagttcattgggcaagacaaaaattggcatggt

SEQ ID NO: 3917 - DNA, 387 bp, Canis familiaris
  misc_feature (165)..(165): n comprises a, c, g, or t, or includes no nucleotide
  misc_feature (170)..(170): n comprises a, c, g, or t, or includes no nucleotide
  misc_feature (178)..(178): n comprises a, c, g, or t, or includes no nucleotide
  misc_feature (204)..(204): n comprises a, c, g, or t, or includes no nucleotide
  misc_feature (215)..(216): n comprises a, c, g, or t, or includes no nucleotide
  misc_feature (222)..(222): n comprises a, c, g, or t, or includes no nucleotide
  misc_feature (235)..(235): n comprises a, c, g, or t, or includes no nucleotide
  misc_feature (238)..(238): n comprises a, c, g, or t, or includes no nucleotide
  misc_feature (241)..(241): n comprises a, c, g, or t, or includes no nucleotide
  misc_feature (243)..(243): n comprises a, c, g, or t, or includes no nucleotide
  misc_feature (253)..(253): n comprises a, c, g, or t, or includes no nucleotide
  misc_feature (258)..(258): n comprises a, c, g, or t, or includes no nucleotide
  misc_feature (264)..(264): n comprises a, c, g, or t, or includes no nucleotide
  misc_feature (320)..(320): n comprises a, c, g, or t, or includes no nucleotide
  misc_feature (328)..(328): n comprises a, c, g, or t, or includes no nucleotide
attcgagctcggtacccggggatctcctcccagggtacattgttaaaattttcattggctggtgactttgggacttatcttagagagacatgcttctgtgcaattttgtgtagatggacacacacacacacacacacacacacacacacacacactccatgcctngagtngagcttanatacatgcatacttcagtgaaactcntgggaccttanntcttangtagtgccctcantgnaanantgtacacctnggccntcccanatatttagctctccaatttagaaacagtggcaccaaatggtctctggagcagccantctcccanctctctccatctaacaaatggtcctggggccatcatctgtcagtgctcttttctctatc

SEQ ID NO: 3918 - DNA, 825 bp, Canis familiaris
tcaggcgatgcttacaaaatgctcacagactgcagcacaccctctagggcactgggttgcacagtctggccttgactccttcccagagcaccccgaggccaggacggccgttgtgtccctccaggtgggtggtcggtcaagacggctccaccgtccaccgtctgctatttgcattcctaaggacacacacacacacacacacacacacacacatacacaccgcagcacgaarggtarggcwatgttacastcattctagastgggccagaattcctagtttccagagcaaaatggtattttytccatcttcccagagaatactcatcaccttagtcaccaatttcaaaaggagaaattaataggtagcttgctacaggcttgaagagagaaaaagagcccatcagtcagcccccgtggtgccccaggtagagtgtgccagaagccatgggaagcagggtgtgcaaaccttgtgttttagagcagaagcagacccatctctctaaggatggggaagcccattgtgagttagtgaattttacaaatcagcaagtaagaaaaaaaatatatatgtaattaaaagaattaacagcgaatcgtggcatgtacaaggttcatctattgtggcaaggataatttaattttacttatttagggtaatatttcatagtgtgctaatgagcgagctctcatctctctggtaaaagtaatgaaatgttaggattaggagacctcagtgctgctctctgttggtcctgacagggggtgagacccccggaggttgtgctccacggccggggtgcgtgcacgtggggaatagcagtgag

SEQ ID NO: 3919 - DNA, 334 bp, Canis familiaris
  misc_feature (285)..(285): n comprises a, c, g, or t, or includes no nucleotide
tctcctgcctgctctgttactcacctgggctgctgttgactcaacctaaggagtcactgctacatcccatgtgctcagtgctgtgaccagccagccagatatgcaggcgtacccacgctcttctaattcatgtccacactgggtttccctccagagcttgagggcctcattagtacatgcaagtgcattgcatggtaaacacacacacacacacacacacacacacgcacgcacgcgcactgcccaagacgaaagagccctcactgctctgtggaaatgggccangaggcatgcccgctccagttgggtccggcgctgctccacgtgtatcttc

SEQ ID NO: 3920 - DNA, 460 bp, Canis familiaris
  misc_feature (159)..(159): n comprises a, c, g, or t, or includes no nucleotide
  misc_feature (183)..(183): n comprises a, c, g, or t, or includes no nucleotide
  misc_feature (212)..(212): n comprises a, c, g, or t, or includes no nucleotide
  misc_feature (379)..(379): n comprises a, c, g, or t, or includes no nucleotide
cgattcgagctcggtacccggggactgaactctaaagcagagagagggacagagcagatacagaacactgtttttgctcaaagaggacacataaggttctgagaaactcagatatttatttaccgtaagaagaacttttaagggggaaaggagcagcanaaatgtaattaagtcaagttgcanactgtgggggaaattttttttcttgtgtntgtgtttttgttttcatttcactccatcaccctttggctggcaggggtgtgtgtgtgggggtgcagtttgccatggtgctgtggccaaggctggtctccacagcggccctgacccagcaaaggcatctggggtctgaaatcttgctcttcagctaaggctaggatancaaactggggttggaggctctaaggtgtgtgtgtgtgtgtgtgtgtgtgtgtgtgtgtgtgtgtgtgtgtgagcccccgcg

SEQ ID NO: 3921 - DNA, 306 bp, Canis familiaris
  misc_feature (65)..(65): n comprises a, c, g, or t, or includes no nucleotide
  misc_feature (189)..(189): n comprises a, c, g, or t, or includes no nucleotide
  misc_feature (219)..(219): n comprises a, c, g, or t, or includes no nucleotide
accgccagaaaaggccctgccgctttctcaggacggttctggtttataacattccaggaagactngcctcagcgcacctttcctgcaaggcctgcagtacctccgggcccccgacgacgcttaggagtacgcgctgcccccagaaaaagccagttgccccgaggtatttccagctaccttccagagcanacacctgccctaggccctcttagcctcatntcgcttcccgcgccccacccccagattaaaaggcccccaaagctctgtggaccggcttttgtttataaagccgggagaaggcaggcg

SEQ ID NO: 3922 - DNA, 491 bp, Canis familiaris
  misc_feature (340)..(341): n comprises a, c, g, or t, or includes no nucleotide
  misc_feature (345)..(345): n comprises a, c, g, or t, or includes no nucleotide
  misc_feature (350)..(350): n comprises a, c, g, or t, or includes no nucleotide
  misc_feature (375)..(375): n comprises a, c, g, or t, or includes no nucleotide
  misc_feature (432)..(432): n comprises a, c, g, or t, or includes no nucleotide
  misc_feature (443)..(443): n comprises a, c, g, or t, or includes no nucleotide
agcaatcatgagttcaagccccatgttgggctccattctgggtatagagcctacattagaaaagagagacagagagaactagaggccaacgtccctgatgagtacagcatacttaataatgagcactgagtaatgtatagaattcctgaatcactatactgtacatctaaaactaatagaacactgtatgttaactatactagaattaaaatttaaaaaaacaacaacaacaaaattttttaagagagcattttaggagaaagggtgaggaggagatatatatacacataggcatacacacacacacacacacacacacacacagtaagaatgagatatnnccanatgtnggaaactaaattccaaacacctgcncctcaccttcttctgaagaacattaaccttcctctccttcacatccagcatgtcctngaggtcatgtntctctccagcttgtgtccccttctcctccgccatatcctgaatgtgtt

SEQ ID NO: 3923 - DNA, 542 bp, Canis familiaris
  misc_feature (241)..(241): n comprises a, c, g, or t, or includes no nucleotide
  misc_feature (495)..(495): n comprises a, c, g, or t, or includes no nucleotide
ccactgctcccagcacacatggcagaggcccatcacgtcccgtggagctctcttgggccttgagcacatgtctgagttgctcatttgttcactaatgtttgagagcacctgctacatgccatgctctattctcaaagctggagatttatcagtgaaccaaataaacaaaagagccaaaaatctccatactcacaggtcccgtctatgctcctctgaatgcttagagacctttagggaaaanagccaactacttggactcccgtattcccagttgtggtctcagcacacagcacacattttttaaaaagctgctgttaggggaaaaactgaagtatgtgtcaactttggaagaacagatttgaaaacaccttaaaaggaaagctattttagttctaattatttttttatgtaatatgtaatacacaggaatgaaatacatggcgtgtgctcacgcgtgcacacacacacacacacacacacacacaattttaggtntgttgcacacccagcgtgggagccaagtgtgggcctgaactcacgac

SEQ ID NO: 3924 - DNA, 380 bp, Canis familiaris
  misc_feature (362)..(362): n comprises a, c, g, or t, or includes no nucleotide
gtcgactctagaggacaaaccaaatcagcagagaaatggctgtttgcttcttactgtatttcccctgcccttgaagaataatttttagaattgtggattggtgttccagctttggcctgctttgaagaattctctaacaaatagccgaacgtgatttgctgctgtaaggctggctgtggtagacggcatcgattgtctcccatcccttcccccatcccacccaaatctctactctagtagaaggagagtcaatcctcccagatagctaaagtaagttgtgtgtgtgtgtgtgtgtgtgttgcgcacgcgcacatgtatctatgcatgcacgggcacgttgttgttgttacatgttgtagacntatgttccttgagcatct

SEQ ID NO: 3925 - DNA, 376 bp, Canis familiaris
  misc_feature (114)..(114): n comprises a, c, g, or t, or includes no nucleotide
  misc_feature (348)..(348): n comprises a, c, g, or t, or includes no nucleotide
aggtcgactctagaggatccgggagggggcacaaaccccagaatcctaatagttgattagattgttatgtagatgacttgcttttgcttttctacatgttcttttgagtgggtngcagaattgttagactgtttggcaaacacaaggtatcccttgagtatgagcaagttttcttattgttctataaacatatgtagacctcattgtgctcatctttgtgtttatgtgagaaggcacacaagtcattcgtgcacccatgcaagtgtgcatgcacgcacacacacacacacacacacacccctggcacagctggcaaaaagcctagcattaaattccaggagagttcangtctggggcctcatgagtgaatttggct

SEQ ID NO: 3926 - DNA, 487 bp, Canis familiaris
  misc_feature (297)..(297): n comprises a, c, g, or t, or includes no nucleotide
  misc_feature (428)..(428): n comprises a, c, g, or t, or includes no nucleotide
  misc_feature (460)..(460): n comprises a, c, g, or t, or includes no nucleotide
ggggatcaaatcctgcctcctctttcattaataatagaactactaaagagaccaaggccctaaagaaggttatgagtgacagactaagataactgaacccaaagattaattgaaccccaaagtgaaatgtatattcgcattgatgagccaaggcaccagcacagcagcctatttttccaacaccatccagtgcatggagggctcattttggaagctatgcccacttttgtcttccttactctaccttgggttttgtgtgcgtgtgtgtgtgtgtgtgtgtgtgttgtgttttgtttngatacttgcaacacgcttctgaggaaaagtcttcctccagcctgtaggaaactcactagtggctttcttttgtgtctgacaggtcgcctgaaggaagaaatcacccagaggcatatgcagcaagtactctnggtgggtacagagtgcacaggaagaaggtganggtaatccaagctgtgtggtctcagaa

SEQ ID NO: 3927 - DNA, 260 bp, Canis familiaris
  misc_feature (24)..(24): n comprises a, c, g, or t, or includes no nucleotide
  misc_feature (33)..(33): n comprises a, c, g, or t, or includes no nucleotide
  misc_feature (37)..(37): n comprises a, c, g, or t, or includes no nucleotide
  misc_feature (41)..(41): n comprises a, c, g, or t, or includes no nucleotide
  misc_feature (52)..(52): n comprises a, c, g, or t, or includes no nucleotide
  misc_feature (72)..(72): n comprises a, c, g, or t, or includes no nucleotide
  misc_feature (109)..(109): n comprises a, c, g, or t, or includes no nucleotide
gaactctggggacatcaggacatngaatgtacntaantctnatgtaccctcnatggaaggcagacaccacanggcaccccctccacaggcacagacacacacacacacnacacacacacacacacacacacacacacacttctgttccaaatactaaagagctattatattcattgtgcttggctctgtccccattcatgacagcatggtacagtacttgatgacattcctggcaatttaagaattcctgtcctctagag

SEQ ID NO: 3928 - DNA, 530 bp, Canis familiaris
  misc_feature (77)..(77): n comprises a, c, g, or t, or includes no nucleotide
  misc_feature (104)..(104): n comprises a, c, g, or t, or includes no nucleotide
gtatatgacctggaatcataaaactaacagaaaacagaggcagtaatctcttggatgtcagccttagcaacatattnctggaactgtttcctcaagcaaagganacaaaagcaaaaataagctattgggactacacaaaaatattatttacaaataatatggatgataaggagttagtatccaaaatatatgaagaactcatacaacttaaagcagaaaaacaatccgattgaaaaatgggcagaagacctaaatagacatttttccaaagatgacatagagatggccagcagacacatgaagagatgttcaacaccactcatcaccagggaaatacacatcaaagtcacaatgaaatatcactttatatcagtcaaaatgactaaaatcaaaaagagaagaaataacgagttggtgaggatgtggagaagagagaatctctgcacatggttggtgagaatgcaaactggtgcagtgtctatggacaacagttcctcaaaatattgaaaatagaaatattgtatgattca

SEQ ID NO: 3929 - DNA, 210 bp, Canis familiaris
atagatgaatggataaagaagatatgtatatacatacatatgtagcacacacacacacacacacacacgcaaatgttattcagccattagaaagaatgaaatctttccatttgcaacaacatggatgaagctagagtgtgtaatgctaagggaaccaagccaattggagaaagacacataccatatgatcctctagagtcgacctgcagg

SEQ ID NO: 3930 - DNA, 500 bp, Canis familiaris
  misc_feature (9)..(9): n comprises a, c, g, or t, or includes no nucleotide
  misc_feature (12)..(12): n comprises a, c, g, or t, or includes no nucleotide
  misc_feature (92)..(92): n comprises a, c, g, or t, or includes no nucleotide
  misc_feature (105)..(105): n comprises a, c, g, or t, or includes no nucleotide
  misc_feature (149)..(149): n comprises a, c, g, or t, or includes no nucleotide
  misc_feature (184)..(184): n comprises a, c, g, or t, or includes no nucleotide
  misc_feature (212)..(212): n comprises a, c, g, or t, or includes no nucleotide
  misc_feature (281)..(281): n comprises a, c, g, or t, or includes no nucleotide
  misc_feature (333)..(333): n comprises a, c, g, or t, or includes no nucleotide
  misc_feature (352)..(352): n comprises a, c, g, or t, or includes no nucleotide
  misc_feature (367)..(367): n comprises a, c, g, or t, or includes no nucleotide
  misc_feature (373)..(373): n comprises a, c, g, or t, or includes no nucleotide
  misc_feature (386)..(386): n comprises a, c, g, or t, or includes no nucleotide
  misc_feature (408)..(408): n comprises a, c, g, or t, or includes no nucleotide
  misc_feature (420)..(420): n comprises a, c, g, or t, or includes no nucleotide
  misc_feature (457)..(457): n comprises a, c, g, or t, or includes no nucleotide
gctcggtgnccnggggatccctactaatgaagagtctgagtctaggaattatataatcacttgggtaattacaggaaagaattgacaatgtntattgttagtgtncaaaaaagattttatctttgagaatagagcatacttaccaaatngaaaatgtaaaaactcctcctagaagctatctgtnaatagactcatcaacatgttgcccttgnattttgactgattatttctgaggaaagccaatgtgagtgtgtgtgtgtgtgtgtgtgtgtgtgtgtgtntggggtgggcagtggttaataaaacatcttccagctctttggcttcgaggcngggaccagctgtccaaatnaatgtgagattcatnggtccnggacctgacatanattacactgagaggaaggaganggtttaatgganattgaaagtaaatcccattgccctgtactgggctttntcatacaatgatgatcccagctgcatcattatgatgacttcta

SEQ ID NO: 3931 - DNA, 561 bp, Canis familiaris
aattaatcattgaatatgctttaaaaaattcagagcaaaatgtatttkggcaaatatctactgtyctgtttacttatcttttccctcagtagtagctctaaacacattaaaagacagaggaagaggaagagaagggaagcaaagaaagagacagtacgtgtgtgtgtgtgtgtgtgtgtgtgtgtgtgtgcatgtgtgcatatatcggtgtgcatgtaraacatawgttttcaggttttccaggctcaatcataggccatctatatattgactggattgtaatgaatacagtaaccaggagttgaagggagatatagattattaacactaattattactacagttcattaattcaatgactttataaaaattgagcagtttgataggactgaatttagttttaaatctttattcaacttggtaaaaagagcaaacaactacatatcacaggtttatttaaatcatctatttctttcataaggtcttttctctgttgatttgtaataatcaagttaagattcattaaatataaaaaatatatataaatatattttaaaagat

SEQ ID NO: 3932 - DNA, 390 bp, Canis familiaris
  misc_feature (63)..(63): n comprises a, c, g, or t, or includes no nucleotide
  misc_feature (74)..(74): n comprises a, c, g, or t, or includes no nucleotide
  misc_feature (83)..(83): n comprises a, c, g, or t, or includes no nucleotide
  misc_feature (207)..(207): n comprises a, c, g, or t, or includes no nucleotide
ggagagttgactgtaaggcccaacatgggccagggcaatagatagctcaaagattcactagantcccttacccntcagccccngagtacatcttggtactgtgtatggctcgggaactctgtttagggatgtacataaaaaagcttctgaagttaagtttccactacccagggggtgggggctcagagcatatgtgattttaaaganaatcacacacacacacacacacacacacacacacacccatcagaatttttgggttgagatttatgcctactacatatatcatctcatttaagactcacaacacaggtgcctgggtggctcagtcagttaagcatccaccttcggctcaggtcatgatcctctagagtcgacctgcaggcatgc

SEQ ID NO: 3933 - DNA, 470 bp, Canis familiaris
  misc_feature (61)..(61): n comprises a, c, g, or t, or includes no nucleotide
  misc_feature (107)..(107): n comprises a, c, g, or t, or includes no nucleotide
cggtaccggggatcttgctacttgaaagtaagtagcaaaatcccaccctcctcagggaggnaagtggcagagctcatttgcatatccatcctctctctatggctacnactgcttcccactgcccatcttcccctcactgctgccctgtcacctttgtcctgccgcacagtgccctgcctgcccttccaaacctctgcacagggtgtgaccctcctagtcttcccaaatgtttctgggaaaaggatgcagtggtacacaaggagaacattaagaagtctgaaaaccatacacagcaaaactgtgttgcttttgcatcgtcaataccttaataccttctttttttaatatcattcttcaggaatctgaagctttatttctcaaagcaattaaagctcatccaaatgctgcaagttaccatggtaatttgggtaaggaagtgtttcagtttgaattgtattgaagtcctgtgg

SEQ ID NO: 3934 - DNA, 232 bp, Canis familiaris
  misc_feature (9)..(10): n comprises a, c, g, or t, or includes no nucleotide
  misc_feature (216)..(216): n comprises a, c, g, or t, or includes no nucleotide
ttctaaganntgtgtgtgtgtgtgtgtgtgtgtgtgtgtgtgtgtgtgtgtttgttttaagaaattaacacattaaaaaagtatctaagtaagtcatatttacaagtcataattgtatgactagaccaactccaataatcccccactcagtgtatcccctttttatgataaactttgattttcttcctttgtgtgtgaaagatcctctagagtcgncctgcaggcatgcaag

SEQ ID NO: 3935 - DNA, 385 bp, Canis familiaris
  misc_feature (12)..(12): n comprises a, c, g, or t, or includes no nucleotide
  misc_feature (40)..(40): n comprises a, c, g, or t, or includes no nucleotide
  misc_feature (55)..(57): n comprises a, c, g, or t, or includes no nucleotide
  misc_feature (71)..(71): n comprises a, c, g, or t, or includes no nucleotide
  misc_feature (77)..(77): n comprises a, c, g, or t, or includes no nucleotide
  misc_feature (84)..(84): n comprises a, c, g, or t, or includes no nucleotide
  misc_feature (93)..(93): n comprises a, c, g, or t, or includes no nucleotide
  misc_feature (97)..(97): n comprises a, c, g, or t, or includes no nucleotide
  misc_feature (105)..(105): n comprises a, c, g, or t, or includes no nucleotide
  misc_feature (121)..(121): n comprises a, c, g, or t, or includes no nucleotide
  misc_feature (128)..(128): n comprises a, c, g, or t, or includes no nucleotide
  misc_feature (309)..(309): n comprises a, c, g, or t, or includes no nucleotide
tgtggtgttatnacaccagcatgggtggctgataaacccnaagagaattcagggnnntactcaccaagganagtttnttgggantaggtgganggantcacaatntttaatccctccaganattagtntgctgtctgttggtcctctctacacacacacatacacacacacacacacacacacacacacacacaacaaagccttgaaccttaattggcactggagacattgtgccctactgtgcatctatgaacctgcaaatctgcataagactttgaatgggcctcaaatcccatcacattggagggnatccagcaagctgtggcacactctgtacatttgggtcctctagagtcgacctgcaggcatgcaagctagcagtgcc

SEQ ID NO: 3936 - DNA, 283 bp, Canis familiaris
  misc_feature (180)..(180): n comprises a, c, g, or t, or includes no nucleotide
  misc_feature (184)..(184): n comprises a, c, g, or t, or includes no nucleotide
  misc_feature (192)..(193): n comprises a, c, g, or t, or includes no nucleotide
  misc_feature (207)..(207): n comprises a, c, g, or t, or includes no nucleotide
  misc_feature (237)..(237): n comprises a, c, g, or t, or includes no nucleotide
  misc_feature (240)..(241): n comprises a, c, g, or t, or includes no nucleotide
gtactataaatcagttactatatgttaaatgctaagcacagacactaaggcagcaacaaaacttaacaattaattcaacaaatatttattgaatacccactgtgtcagtttctgttcttgtgacaacacagacagacacacacacacacacacacacacacacacacacacagaaacaangttngggcttcnncccccatctcatanatgccttcattccttcattcagcaaacttnggnnggggcctcttgcacacagcacaatgccgggcactgagacaga

SEQ ID NO: 3937 - DNA, 400 bp, Canis familiaris
  misc_feature (179)..(179): n comprises a, c, g, or t, or includes no nucleotide
  misc_feature (372)..(372): n comprises a, c, g, or t, or includes no nucleotide
  misc_feature (375)..(375): n comprises a, c, g, or t, or includes no nucleotide
gatggaatgtctttctgtgtaacaggacaaagctgccaacatcttgggaggcttggcaccttaatagaggaagcaatgaacatttgtttattgcaacattcctaaaaggcacactacgttctctgagatttggagctggaatcattaggtttcttctctcctcattcctcagccagttntggtctgctattttatacttctgtgaatagttgagtgattatctcattagaatgattacctaggtttctcaaattctttcaaaaaactaactcttactttcaatgaacaggttcccctccctatctgaaagtagggtgttcctatgaaaactttcacaagcaaaaatgacctaaaatgaagaagcaattaccnctnacgtctatgggaaaaattttaagca

SEQ ID NO: 3938 - DNA, 606 bp, Canis familiaris
  misc_feature (65)..(65): n comprises a, c, g, or t, or includes no nucleotide
  misc_feature (183)..(183): n comprises a, c, g, or t, or includes no nucleotide
  misc_feature (509)..(509): n comprises a, c, g, or t, or includes no nucleotide
ggggacaatggaatatttagagaatccagaaacaggcccacacttacacagcaatctatgacaanggaaggaaacaacccaatgggaaaaagaccacctcttccataaatggtgctgggaaaactggacagctacatgcaaaagaataaaaccagactacttttttatactacacaaattcanaatagattaaagacctaagtgtaaaatcttaagccagaaatctcctaaaagaaaatataggcagtaatctcttagatttcaaccttaatatttttctggatatgcctccccaagcaatggaaacaaaagcaaaaacaaagaattgagactacaacaaactaaaaagcatttgacaagcaaaggaagccattcaaccaaaaagcaacttaccttgcaaatgatttaccttgcaaatgattcatccttagcatccaatacagagttaatatccaaaatatacaaaaatacagacaactcaacaccaaacacacacacacacacaccanattgaaaaatgagaagacctatattagacatttttccagaaaagaattcagatggtcgatagacatatgaaaagacaattatcatcatattattagg

SEQ ID NO: 3939 - DNA, 837 bp, Canis familiaris
  misc_feature (462)..(462): n comprises a, c, g, or t, or includes no nucleotide
attgttataatgaatgaaatcagcattctcctgttactctcaaagcatgaatcagtttttgccttaggtggatgactgtttattaaactgagtttactaagccacatggtgttgctaggccataattactgaattcaagtcccactgccaattcagggcctttcctaaatattgtggctttctccttctataaaatcaagatgattaaacttttcatctatctatctctggtgttaggaagattgatgaaactgtattaaggaatcacattttgtttcttggatgaaagatgttttgtaaatgcaatgaatcaaaacgttattatttcaagttgtatgacattatggagtatctgtggagaaaccttgccttggcattgtttggttatttctatttttacaatagttgtaactgttaaattgggagtcatctgtgggaatacaagggtctaaatatttcccnaggataaaaaagtatgtgtgtaatgtgtgtgtgtgtgygtgtgtgtgtaagagagacagactgaggaggcttgaaccctagtttccttgataaattattcccacagggctatagttgctgtgaggattaaatcaggataataagtaatagcatttagcaccatgcctagcacatggtatcatccagtaaatgatagctgctattattattttcttaactggattgattttggcagtttattttttgatatttgtttctactttggtcttattctacaaaattctttttttaaaactatttatttatttatttatttgagagagagagagacagagagaatcgggggataggggcagaggaagagggaagagcaga

SEQ ID NO: 3940 - DNA, 397 bp, Canis familiaris
  misc_feature (115)..(115): n comprises a, c, g, or t, or includes no nucleotide
  misc_feature (138)..(138): n comprises a, c, g, or t, or includes no nucleotide
  misc_feature (268)..(268): n comprises a, c, g, or t, or includes no nucleotide
  misc_feature (271)..(271): n comprises a, c, g, or t, or includes no nucleotide
  misc_feature (277)..(277): n comprises a, c, g, or t, or includes no nucleotide
  misc_feature (285)..(285): n comprises a, c, g, or t, or includes no nucleotide
  misc_feature (293)..(293): n comprises a, c, g, or t, or includes no nucleotide
  misc_feature (296)..(296): n comprises a, c, g, or t, or includes no nucleotide
  misc_feature (301)..(301): n comprises a, c, g, or t, or includes no nucleotide
  misc_feature (319)..(320): n comprises a, c, g, or t, or includes no nucleotide
  misc_feature (326)..(326): n comprises a, c, g, or t, or includes no nucleotide
  misc_feature (336)..(336): n comprises a, c, g, or t, or includes no nucleotide
  misc_feature (376)..(376): n comprises a, c, g, or t, or includes no nucleotide
ctggtacaagcttaccttctctgtttatatccacacccaccctcacatgcccacatttatccttacatggaatgcatgtgttttctgtaactttgggtcagtaatgggccccggntgtcacggcatgtttacctgtanaatgaccaactacatctctctctgagacaagcaacaagcttgttccctgaactcctccctggaaaggaagatacataggagtgtgtgtgtgtgtgtgtgtgtgtgtgtgtgtgtgtctagagtcccaaantgngatttnggtgcctnggggtccnganggacntgtcacgccgcccttccnngacacnggcaccagancagacaatactacagtctgccttcctgcccgtgctctttntctgtcgtgtgtgccaatgtg

SEQ ID NO: 3941 - DNA, 394 bp, Canis familiaris
  misc_feature (265)..(265): n comprises a, c, g, or t, or includes no nucleotide
  misc_feature (270)..(270): n comprises a, c, g, or t, or includes no nucleotide
  misc_feature (298)..(298): n comprises a, c, g, or t, or includes no nucleotide
  misc_feature (305)..(305): n comprises a, c, g, or t, or includes no nucleotide
  misc_feature (332)..(332): n comprises a, c, g, or t, or includes no nucleotide
  misc_feature (357)..(357): n comprises a, c, g, or t, or includes no nucleotide
  misc_feature (364)..(364): n comprises a, c, g, or t, or includes no nucleotide
caattatttttgaacttttacaaatagaaatattgtgacttcaattcctaattcttttggccaagaattttaacattgtataggttctagatatgctgtttctcagtaaggtccagtgacctacctgcatctgagtcatctgggttgcttgttagaaaacaaccttctccccacccagagaatatattcttgcaatacacacacacacacacacacacacacacacagaaccacagtccctgggtacatagccccagcctctganagtanaataaacctccaagctattcctcccttnaatgtgngagaaccactgctccaaaacacctaanatattaccctatcgcagtgtttgantcatgcngggtgttctaggagaagatggtatattgaa

SEQ ID NO: 3942 - DNA, 494 bp, Canis familiaris
  misc_feature (108)..(108): n comprises a, c, g, or t, or includes no nucleotide
  misc_feature (301)..(302): n comprises a, c, g, or t, or includes no nucleotide
  misc_feature (306)..(306): n comprises a, c, g, or t, or includes no nucleotide
  misc_feature (319)..(319): n comprises a, c, g, or t, or includes no nucleotide
  misc_feature (334)..(334): n comprises a, c, g, or t, or includes no nucleotide
  misc_feature (343)..(343): n comprises a, c, g, or t, or includes no nucleotide
  misc_feature (350)..(350): n comprises a, c, g, or t, or includes no nucleotide
  misc_feature (359)..(359): n comprises a, c, g, or t, or includes no nucleotide
  misc_feature (364)..(364): n comprises a, c, g, or t, or includes no nucleotide
  misc_feature (367)..(367): n comprises a, c, g, or t, or includes no nucleotide
  misc_feature (384)..(384): n comprises a, c, g, or t, or includes no nucleotide
  misc_feature (390)..(390): n comprises a, c, g, or t, or includes no nucleotide
  misc_feature (403)..(403): n comprises a, c, g, or t, or includes no nucleotide
  misc_feature (411)..(411): n comprises a, c, g, or t, or includes no nucleotide
  misc_feature (441)..(441): n comprises a, c, g, or t, or includes no nucleotide
  misc_feature (448)..(448): n comprises a, c, g, or t, or includes no nucleotide
  misc_feature (463)..(463): n comprises a, c, g, or t, or includes no nucleotide
  misc_feature (472)..(472): n comprises a, c, g, or t, or includes no nucleotide
ttgatttcactgaaggttttaaatgactcttttaatctataatatatctgaacgtgtctacaagtctttaaagtctttatttgcttcatttcaagggtacagagctanagcctgggaggtcagttggtaggaaacaaaaaaggggagaagcaagattaagagtcatccctagaagagagaggaaggactggtgtttcatgagatgcttcccaattgctggagtggtaacaccaaggctttcctctggttccttttctttctctttcacacacacacacacacacacacacacacacacacnntgantggtgattcagtntcctctaaaaataangtatgagcngtggctntatgtatangtganatnccaacttcttcattcantccccngggtggatagatntctccatntctagtgggaaagacacctacttacacctntggaatntgctactcttccatntctttaccntcaccaccatggaaaagacaaa

SEQ ID NO: 3943 - DNA, 368 bp, Canis familiaris
  misc_feature (83)..(83): n comprises a, c, g, or t, or includes no nucleotide
caaatcatgagtacattatactgtttcagaagcagacagtacctttgttcaaagagaaaagcttcctccatgttaccaagtanatttttgcagtgatgtgtgtgtgtgtgtgtgggggggtacatactgaatataacttaggttaagttttagctctcacttttcccttagccaggcacagaatcacggttcacttatctgtgacttgagaataacaaatcctactttttaggattgtgattaggtcatatacccagggtctataaaagagatttgtaatagatatccagtgaatgatgatggtggtgatggtggtggtgatagtgagcagcaagagtagtagtaatattagtacttgataaatagtt

SEQ ID NO: 3944 - DNA, 565 bp, Canis familiaris
actccagcgagacctacagggaatgagtcaatattttgcagaagagggagaatgaatgtggaaatctgactggggttcaaatctccactccaccacctaatatgtgtytgacactaggtaagtcaccaattcacgtattcttcagaaaaacagtgctgcctgacctcccatgactgtggcaagcaagaacttccatcaggtcttatacaaagttgatgcttaatgaatgttagcagcctatatcccaaaggtacgttcatcttcagaagtagtaatatttggctatggacaaaagacacacaacacacacacacacacacacactggtattttacccagttgaagatgattattaactattaatgataattaccacattgtacgaataaattgcattatataaagagcaactctcttcctaagtttccattaacaaaggaaaagctaaaattctcaaagtctcataagtccagtccatctttctttgccatctaataaaacactttttatttcctttcatgggcttaaacttcactaaaaggcaaattgtcttgagggcatgcct

SEQ ID NO: 3945 - DNA, 261 bp, Canis familiaris
  misc_feature (42)..(42): n comprises a, c, g, or t, or includes no nucleotide
  misc_feature (81)..(81): n comprises a, c, g, or t, or includes no nucleotide
  misc_feature (100)..(100): n comprises a, c, g, or t, or includes no nucleotide
  misc_feature (121)..(121): n comprises a, c, g, or t, or includes no nucleotide
  misc_feature (127)..(127): n comprises a, c, g, or t, or includes no nucleotide
  misc_feature (131)..(131): n comprises a, c, g, or t, or includes no nucleotide
  misc_feature (133)..(133): n comprises a, c, g, or t, or includes no nucleotide
  misc_feature (139)..(139): n comprises a, c, g, or t, or includes no nucleotide
  misc_feature (142)..(142): n comprises a, c, g, or t, or includes no nucleotide
  misc_feature (149)..(149): n comprises a, c, g, or t, or includes no nucleotide
  misc_feature (160)..(160): n comprises a, c, g, or t, or includes no nucleotide
  misc_feature (162)..(162): n comprises a, c, g, or t, or includes no nucleotide
  misc_feature (169)..(169): n comprises a, c, g, or t, or includes no nucleotide
  misc_feature (175)..(175): n comprises a, c, g, or t, or includes no nucleotide
  misc_feature (195)..(196): n comprises a, c, g, or t, or includes no nucleotide
  misc_feature (229)..(229): n comprises a, c, g, or t, or includes no nucleotide
tttccatctaccaccttcgtcttgtgcagtttctaagggatntatgtgtgtgtgtgtgtgtgtgtgtgtgtgtgtatgtgnatgtctgtgtgcactgccncctctgcacagcccagagtancccagnagangncatgtntcngagcaanagggttctctncnctgttcngatgcngatgtgactgcccacattcnnggggaccttcagctcaccctgcctagtgaggtntgcccactctcactctgcagtgccagtgggtc

SEQ ID NO: 3946 - DNA, 620 bp, Canis familiaris
cattaaattctttwaccttctacaacgcgattacaaaaaggaatacttcatttaagtgtaatactgtctttatggacgtaccgtggtcggaaagtggagctaaaggtcacgaacgaatacacgtgagaacagggacaaaggcgggacgtccctggagcctagtctagcacagcgagcccagtgggtaggggaagggaascagggatgaacagagacttatttggggggcagtggtggtattgtcaatgagctgcttctaggagcttaaacccaagggccggctcaggggccagacacacaggcgtacagctttggtaccatatctcaaagctgcccaaagtcctggccttgtgtcacacacagcagtcgtccccagtcagctttgtttttgtwttctctccaatytacatacacacacacacacacacacacacacacacacacgcgcgcatgcatgcacacgcaatcgagggtgtsttcttkgaccgtccaagctswtatgtctcaggtacctccctgctgtcaaaatcaaagcacgccagactccatcaagccaagcacccttctttcgtaggagagaagccagcacttcgctttcctggatgaacatgagcactcag

SEQ ID NO: 3947 - DNA, 775 bp, Canis familiaris
  misc_feature (451)..(451): n comprises a, c, g, or t, or includes no nucleotide
  misc_feature (496)..(496): n comprises a, c, g, or t, or includes no nucleotide
gacatacccactgttgtctttccacctggactcacccatctcagtctccccattacacaactgggtctcctccctcatcccagaagccacacagagagacacccaatctacagggagggtgcacctggggcaggcatgaccaggctcccataggaagcagagaagcccagtgacttgaaggacataacgggcacctttggggatgatgcgcccatctggaagcttgatgtcctccgtgcagcggcgggaaaccaaggtcactggcgggaatggcgtaggctctccttgatgcacatggtggtgaagggcagctgggtcaggtcatccctggggagcataaaacatggaatgtgggtgacttcaggccagaccacagcaacactcacttcctcaaacaggcacacacacacacacacacacacacacacaagcacacayatgyattcaggancaacgtgcaggamaccagtctagggtctcagasttgtcccatgcnacatatcactmatcctcagcatgcaaaatatctgacccccaaccaatcagagcagcacccacaggcttctgcacacccagcattaaccctttaactgatgaattatgyggcagtcagggaatagctgggagtggtgccaggatagtcaggggacccagggcagcagtagtttaccagccygtatgaatcwatttcwatatttaaaaacccatacattctgtcctatgctattaactttttttcattgtattccagggtcccaatttggattaattagaa

SEQ ID NO: 3948 - DNA, 480 bp, Canis familiaris
  misc_feature (121)..(121): n comprises a, c, g, or t, or includes no nucleotide
  misc_feature (142)..(142): n comprises a, c, g, or t, or includes no nucleotide
  misc_feature (158)..(158): n comprises a, c, g, or t, or includes no nucleotide
  misc_feature (161)..(161): n comprises a, c, g, or t, or includes no nucleotide
  misc_feature (169)..(169): n comprises a, c, g, or t, or includes no nucleotide
  misc_feature (204)..(204): n comprises a, c, g, or t, or includes no nucleotide
  misc_feature (215)..(215): n comprises a, c, g, or t, or includes no nucleotide
  misc_feature (252)..(252): n comprises a, c, g, or t, or includes no nucleotide
  misc_feature (301)..(301): n comprises a, c, g, or t, or includes no nucleotide
  misc_feature (353)..(353): n comprises a, c, g, or t, or includes no nucleotide
  misc_feature (366)..(366): n comprises a, c, g, or t, or includes no nucleotide
  misc_feature (388)..(388): n comprises a, c, g, or t, or includes no nucleotide
  misc_feature (411)..(411): n comprises a, c, g, or t, or includes no nucleotide
  misc_feature (470)..(470): n comprises a, c, g, or t, or includes no nucleotide
gtaccggggatcaagtcccacatagggctccctgcatggagcctcgcttctccctctgcctatgtctcggtctctctctgtgcctctcatgaataaataaataaaatcttaaaaaaaaaanattaagcatctttgcctctcnatagtgaatagatttncanatatcatncacttaatgctaccaaaatagcacttataaagcanaataatgtttncctcattataaaagtgtatggtgtctatgtgcatgantattgaaagaagtaaaattatgtgcttgtaaaggatttgctattctgtnaaggtttgcacacacagacacacacacacacacacatagagacataaacacnttttatttttganataaaatgtatatacagtgganggcataaatcttgtgtaaaattnggaatttaaaaaatgtataaatctaggtaaccgatgccttaatgaaggtatggaacatncccatccttc

SEQ ID NO: 3949 - DNA, 405 bp, Canis familiaris
  misc_feature (157)..(157): n comprises a, c, g, or t, or includes no nucleotide
  misc_feature (169)..(169): n comprises a, c, g, or t, or includes no nucleotide
  misc_feature (200)..(200): n comprises a, c, g, or t, or includes no nucleotide
  misc_feature (205)..(206): n comprises a, c, g, or t, or includes no nucleotide
  misc_feature (233)..(233): n comprises a, c, g, or t, or includes no nucleotide
  misc_feature (245)..(245): n comprises a, c, g, or t, or includes no nucleotide
  misc_feature (254)..(254): n comprises a, c, g, or t, or includes no nucleotide
  misc_feature (258)..(258): n comprises a, c, g, or t, or includes no nucleotide
  misc_feature (285)..(285): n comprises a, c, g, or t, or includes no nucleotide
  misc_feature (296)..(296): n comprises a, c, g, or t, or includes no nucleotide
  misc_feature (303)..(303): n comprises a, c, g, or t, or includes no nucleotide
  misc_feature (313)..(313): n comprises a, c, g, or t, or includes no nucleotide
  misc_feature (335)..(335): n comprises a, c, g, or t, or includes no nucleotide
  misc_feature (347)..(347): n comprises a, c, g, or t, or includes no nucleotide
  misc_feature (366)..(366): n comprises a, c, g, or t, or includes no nucleotide
catcccagggaaatgttagctgaaacccattctatgtcacatacactgctgccttgtcctactgggatgctgaagtcgtgcagttgagtttttattcaaataggaaacttccacacacacacacacacacacacactcacacactcccatgaattanccatcaccttgntagagtgggcccatctttgctgcctgtccantcttnnggactcctggttttattctctaacacnggttaacctacnggctttgtnccanccacccatttgatatttatatctcgtntcagcatttanggttgantttgagtganataagaaacagagcactggganggccacccagangtagagaaaactctcccantcctggctttgacctccttctgggactggtcatttgcca

SEQ ID NO: 3950 - DNA, 334 bp, Canis familiaris
  misc_feature (33)..(33): n comprises a, c, g, or t, or includes no nucleotide
  misc_feature (92)..(92): n comprises a, c, g, or t, or includes no nucleotide
  misc_feature (106)..(106): n comprises a, c, g, or t, or includes no nucleotide
  misc_feature (108)..(108): n comprises a, c, g, or t, or includes no nucleotide
  misc_feature (115)..(115): n comprises a, c, g, or t, or includes no nucleotide
  misc_feature (131)..(134): n comprises a, c, g, or t, or includes no nucleotide
  misc_feature (150)..(150): n comprises a, c, g, or t, or includes no nucleotide
  misc_feature (167)..(167): n comprises a, c, g, or t, or includes no nucleotide
  misc_feature (178)..(178): n comprises a, c, g, or t, or includes no nucleotide
  misc_feature (193)..(193): n comprises a, c, g, or t, or includes no nucleotide
  misc_feature (204)..(204): n comprises a, c, g, or t, or includes no nucleotide
  misc_feature (207)..(207): n comprises a, c, g, or t, or includes no nucleotide
  misc_feature (219)..(221): n comprises a, c, g, or t, or includes no nucleotide
  misc_feature (225)..(225): n comprises a, c, g, or t, or includes no nucleotide
  misc_feature (241)..(241): n comprises a, c, g, or t, or includes no nucleotide
  misc_feature (263)..(263): n comprises a, c, g, or t, or includes no nucleotide
  misc_feature (278)..(278): n comprises a, c, g, or t, or includes no nucleotide
  misc_feature (299)..(299): n comprises a, c, g, or t, or includes no nucleotide
  misc_feature (307)..(307): n comprises a, c, g, or t, or includes no nucleotide
ggagtcccacatcgggctccctgcgaggagccngatgctccctctgcctatgtcgctgcctctgtgtgtgtgtgtgtgtgtgtgtgtgtgtntctctctcatgaananatagatnacatctttagataaannnnaaaatgagtgtgtagnaataaaaatgtacagcnaggcaacaaanacataagacgagtancagatatgtanatncagtcttcttgnnnttcngacaatgaatatatcngaaccatacaaatgaagagaanctcatcaacatatanataataatgagagaggaaaanattgtctntcgataaatatgacgagtgtgcgtgtc

SEQ ID NO: 3951 - DNA, 875 bp, Canis familiaris
tcctctctctctccttttgaaaacataaataataaaattcttagtctttgaggaacaccaatatataaatacaaaatataagaatataataaagatatatgtacaagagtttatgaaagcggaaaagggcccaaatctgtttgggtgagattgaccaggcctgasaatgggtaagagcccaactctcgtatcaaactacctgggttcaaattccaggaccttctctttttagctgtgtgaccttaggcatgtaacttagcctctttgtgctcactttcctctataataaaatgtggataattatagtacctaattgataattaaatgarataatttgtgaagcccttggaatagtgcctgatacacagtaaacattaaactgttcgctagaatttattaccattgtcaatgttattatgaagcttttcagaaatgttttgaggcagagatgtttcaagaaaagcaacgtaacttaaggccaatcaggtgtaggtgtgtgtgtgtgtgtgtttgtgtgtgtgtgtgttaggggaggtggagggagaagtgaatgtgatgcccatatttctagcttaagtgaagagttggataatgacatcattaactaagaagggaagacagacgaaggagagtttctaacctggaaattgtatttctaatcttataaacaaatgagcaagtatatagcaaactgaattatctcagaattgaaatatagttttcagaatgagaaggtaaaatactaatgacaattggcagcagaaatgtaaagtgataaacattctaaaaataataaacattctaaaacacttggtgatgcagtcggttaagcatcctactcctgattttggcttaggtcctgtcctctagagtcg

SEQ ID NO: 3952 - DNA, 510 bp, Canis familiaris
  misc_feature (55)..(55): n comprises a, c, g, or t, or includes no nucleotide
  misc_feature (199)..(199): n comprises a, c, g, or t, or includes no nucleotide
  misc_feature (369)..(369): n comprises a, c, g, or t, or includes no nucleotide
tcagtcaaaattttgattcagtaattcatcattggtcttgattagatattatttncatacattccatcaataaattcatcccttgaagtcttctatccttatttctccagcagtacttagttgatgcaggaaaggaaaagaattctacatttcattagcatggagggcagaaggaatgattgacagtatattgtgtttngagtaccattctgcaggctaatcagtacatctagcgttcttttctggtaaaaaagtgaacttcaacctttatctcccttttatatatgtctatttctgtggtttatggtagcttcccttaaatacacacatatacacacacgcacacatgcacacacacacaccccatanacccctcaatgaccttgccttcttctctgtagcctactcttcaaagctggcccttctactttgattgaatcccctccaaaatctttatggacctaataccattaattattcttttcatctctttaatcttcaaccctctct

SEQ ID NO: 3953 - DNA, 475 bp, Canis familiaris
  misc_feature (173)..(173): n comprises a, c, g, or t, or includes no nucleotide
  misc_feature (218)..(218): n comprises a, c, g, or t, or includes no nucleotide
  misc_feature (269)..(270): n comprises a, c, g, or t, or includes no nucleotide
  misc_feature (279)..(279): n comprises a, c, g, or t, or includes no nucleotide
  misc_feature (296)..(296): n comprises a, c, g, or t, or includes no nucleotide
  misc_feature (445)..(445): n comprises a, c, g, or t, or includes no nucleotide
gggggatcccgtgcactcagatgccttacgtcaaggaatgaagttacacattaaaatacaagaataagtaatctaaaaatactctgaccatttaaactgtgtgtgtgtgtgtgtgtgtgtgtctgtgtgtgtgtgtatctccgtatatgtgaaaagtggaggaaagctagtanactgttaccaagaaataacctagattccttctcaaagtaatgatntgtcaagaacacttatactggtataagtacattgcctaattcttttggatnngggtgtttntcactgaattctaagtntacaatgactttttaaacatctcttaaaggatgaggaagtagatatatacccacaaattatctcgtgaatgtcgggttacaataatagcatttgaattaagtcaaattgtgatttatagtaatataattctacatagtgaacagacatntcacttttataccctttgtgtataactctc

SEQ ID NO: 3954 - DNA, 510 bp, Canis familiaris
  misc_feature (40)..(40): n comprises a, c, g, or t, or includes no nucleotide
  misc_feature (108)..(108): n comprises a, c, g, or t, or includes no nucleotide
  misc_feature (120)..(120): n comprises a, c, g, or t, or includes no nucleotide
  misc_feature (131)..(131): n comprises a, c, g, or t, or includes no nucleotide
  misc_feature (433)..(433): n comprises a, c, g, or t, or includes no nucleotide
taaaagtgtattataaagtgaaatagccaactagctgtantcattaacattttgtgaattaaaaaaaatttaattagcagaaaaaaatagtaaagagaatctgaggcngaaggaaacctngaaatgtatanactttgctctataaaacaacaacaacgacaacaaaaaaccaactcacgttcttggtatcttttggattttcaggagaccagtcagaacattgtcaagaactggttccatgctagggcttgacacttaacatcagtatttaccccctcttctagtccaggtctttactaatgaaccctatgctgtctatgtgctgaggagtctctgggaatgctctccatctctgcctctttgctagtatccaccatcaaggacttgaactccagttgtgtcaaaatggttagcattgtttcctacagctganaataccctggaagcccactaaaggcacagaattattctgcctttggggtgtatgtggaagggctgctgcagttgcct

SEQ ID NO: 3955 - DNA, 217 bp, Canis familiaris
  misc_feature (5)..(5): n comprises a, c, g, or t, or includes no nucleotide
  misc_feature (115)..(115): n comprises a, c, g, or t, or includes no nucleotide
  misc_feature (173)..(173): n comprises a, c, g, or t, or includes no nucleotide
ggacncaagtgtgtgtgtgtgtgtgtgtgtgtgtgtgtgtgtgtatgacattcctttaaggtttgtttgtttttcagtctcattccctagtatttggatatatattcttacattntaggctacaaaataactctgattagcaaaaatagtgtctattctgacaattagggcantagtagtttgatcctatagagtcgacctgcaggcatgcaagctt

SEQ ID NO: 3956 - DNA, 541 bp, Canis familiaris
  misc_feature (348)..(348): n comprises a, c, g, or t, or includes no nucleotide
gggacagcagaagaacaggaggtcaagataggtargtgcaggcrcyctcccgaacaagaaaaagttagaaaatagatgcctctcgcctgacacttcaagactgggtgtcacacatggaakacaaggggattttggtgacaccgagatkggtcgcatgtggctctacagcamaraagcagcaaacacttctaggtcactgtttgtcaatcaggaattaggacattttcttgaagtactggtgtctcctataatgtccagcatttcctcactttcccatgatatctacttggagtgttcacggyatggtgtgtgtgtgtgtgtgtgtgtgtgtgtgtgtgtgtgtgcrtntgtcttacaacctaaatgactgagggytcagcctaygcattawaaaactgtactggaggaaatatcttatmtacccaattgaatgggctgatatctatcttccaattaaatatgctctagaaacatcatagatgtgcccccaaagcattccgatacacaatctccccaaaactgatcctctagagtcgacctg

SEQ ID NO: 3957 - DNA, 460 bp, Canis familiaris
  misc_feature (59)..(59): n comprises a, c, g, or t, or includes no nucleotide
  misc_feature (163)..(163): n comprises a, c, g, or t, or includes no nucleotide
  misc_feature (173)..(173): n comprises a, c, g, or t, or includes no nucleotide
  misc_feature (182)..(182): n comprises a, c, g, or t, or includes no nucleotide
  misc_feature (208)..(208): n comprises a, c, g, or t, or includes no nucleotide
  misc_feature (244)..(244): n comprises a, c, g, or t, or includes no nucleotide
  misc_feature (278)..(278): n comprises a, c, g, or t, or includes no nucleotide
  misc_feature (339)..(339): n comprises a, c, g, or t, or includes no nucleotide
  misc_feature (422)..(422): n comprises a, c, g, or t, or includes no nucleotide
cggggtctccacgacctgggccgaaggcggcactaaactgctaagccacccaggctgcncaaaactacttattttaaaaattaataacttaaaactgccacacacacacacacacacacacacaaaaacaaatggtccacaaaacattctctttgcttctganggtttaacantgcattgtnatcatcaaccagtctttcactaatantctcaaatggccaattgatacaaagaggcctcagantgttcttccaccactgattaacactggggtggcnggtattcgatattatattcatttagccttctgagctttctgggtggacttggtgaccttgngagctccagatgccttctttgtccactgctttgatgacacccacagtgactctccgtctcatgtcatgaacagcaaaatgggngagaggaggatactcagagaagctctcaacacacatac

SEQ ID NO: 3958 - DNA, 543 bp, Canis familiaris
  misc_feature (26)..(26): n comprises a, c, g, or t, or includes no nucleotide
  misc_feature (219)..(219): n comprises a, c, g, or t, or includes no nucleotide
  misc_feature (241)..(241): n comprises a, c, g, or t, or includes no nucleotide
  misc_feature (508)..(508): n comprises a, c, g, or t, or includes no nucleotide
tagcccttctcacatttccccttctntagaactcatcacctctatttctaaaatcttaacagaagtcttcctctttacctagaatttcctagaattcacagttttcacttttattctcaattaacctggtctttgccaccattgtgacctccaacccctagaatccaaccatgattcctctaattgaccacaacctttcctaaaattattggcttggcntctccataggatggaccctgtngtctcccaagttctccatagcatctagcctgaaacatcccctagctccaccacagaagtcctgaaaaaattaggtaaatgccctcagaagcctctctctctctctggctctggagcttgtgcatatgtgcttgtgcatgctctgtctctcaagcatgcacatacacagctatgaagcagaaaggacatctcttttatatatgtgtatatatatatacatatacacacacacacacacatatacacacacacacacacatagattttnagtgatatctcttctaaagagactatcatgtgtgt

SEQ ID NO: 3959 - DNA, 356 bp, Canis familiaris
  misc_feature (99)..(99): n comprises a, c, g, or t, or includes no nucleotide
  misc_feature (238)..(238): n comprises a, c, g, or t, or includes no nucleotide
actggaacatggaagaacactagccattttatgtgctggctttattttttaaaaagtgcttggaaatcttgggtgcacagaaatacagagctgtcatanatcacaagaaacaagagtagccattactttaactcctatgattgtatgctacttaaataccttattctacttaaccctacatacacccattctacacctgtaggaattcaggtatggagaagttatgtgacctacccanagtcacacggctgtaagagcctcagtttgtagaccaaagccactttcactcattaggctgcacagcaatacaaactacacaggcagcatatcctggcagagtcctctagagtcgacct

SEQ ID NO: 3960 - DNA, 463 bp, Canis familiaris
  misc_feature (69)..(69): n comprises a, c, g, or t, or includes no nucleotide
  misc_feature (93)..(93): n comprises a, c, g, or t, or includes no nucleotide
  misc_feature (111)..(111): n comprises a, c, g, or t, or includes no nucleotide
  misc_feature (337)..(337): n comprises a, c, g, or t, or includes no nucleotide
  misc_feature (419)..(419): n comprises a, c, g, or t, or includes no nucleotide
agatggggggtcttcaaacacagactttgctacttctgagctcccgggaggaagggactggactgtggncacgcactcagggatgcctgccantatctttcatgctcagcntgtatggaaaatcaggtggcactgtgctggtcacctgagcaggccacatggcaaggtggttcagagtgagctccctggagtttgcttggttctgcaacctggtgcctgcacctgctggctgtgtgagctgaccaagttgcccaaacttactgagcctcagtttccccatccacaaaaataagatagagatgtttgtgtgccgtatgcagagctggtgtgaggacanaatgggagtctcgtgcgggaggtcatggacagctcttggcatgtgttatttatcctcattatttacatcctcagagaatgcnggaatgatacagatgaggctccttctcccacaggggggtctgga

SEQ ID NO: 3961 - DNA, 210 bp, Canis familiaris
  misc_feature (61)..(61): n comprises a, c, g, or t, or includes no nucleotide
  misc_feature (125)..(125): n comprises a, c, g, or t, or includes no nucleotide
  misc_feature (157)..(157): n comprises a, c, g, or t, or includes no nucleotide
  misc_feature (162)..(163): n comprises a, c, g, or t, or includes no nucleotide
tcgagagtctgcccagatacacacacacacacacacacacacacacacacaatacaatttnatgcaatgcaatatagtaacataatatctggacagtgcacaagttaaatactttgatttatttnatcctcataacaaaccctttctggttgctgtntattnnactcctttaaaagatgaggaagcagagggaatgatcctctagagtcg

SEQ ID NO: 3962 - DNA, 532 bp, Canis familiaris
  misc_feature (243)..(243): n comprises a, c, g, or t, or includes no nucleotide
  misc_feature (263)..(263): n comprises a, c, g, or t, or includes no nucleotide
gggacgaatccctcatcgggctccctgcatggagcctgcttctccctctgcctgtgtctctgcctctctgtgtctctacgaatgaataaatgaaatagtttttaaaataagcacggtaaaaggacaggaagaaaatgttcaaaatcactaaggatggctatctttgaactatggggaggttaatgactttggggggttatttctaacttttctgaattttagaattttatatatttctattanatgtaatttaaaatgtttanaacttttattgtggtaaaatatacatagaatttaccattttcataattttcgagtgtacatctcagtgttaagtattcacattgttgtacaaccatcaccaccacccatctccatccagcttcttccccaactgaaattttgtcctccttaaacaaaaactgcccattacttcctcccctaattgctggtaaccactattctactctctgtctctataattttgactattgtagatacctaaatatggatatctaaaatggaaccatac

SEQ ID NO: 3963 - DNA, 239 bp, Canis familiaris
  misc_feature (24)..(24): n comprises a, c, g, or t, or includes no nucleotide
  misc_feature (28)..(28): n comprises a, c, g, or t, or includes no nucleotide
  misc_feature (32)..(32): n comprises a, c, g, or t, or includes no nucleotide
  misc_feature (196)..(196): n comprises a, c, g, or t, or includes no nucleotide
atccatgtcatagcatgtaccagnactncatngtgtgtgtgtgtgtgtgtgtgtgtgtgtgttatgtgtcactttttttaattccttcatccattgatggacatttgggttatttcaaccttttggctattgagaataactgctgctatgaacatgggtatacaaatacctgttcaagtcccctgctttcgatttngggtgtatatacctagaaatagaatactggatcctctagagtc

SEQ ID NO: 3964 - DNA, 387 bp, Canis familiaris
  misc_feature (179)..(179): n comprises a, c, g, or t, or includes no nucleotide
  misc_feature (187)..(187): n comprises a, c, g, or t, or includes no nucleotide
  misc_feature (202)..(202): n comprises a, c, g, or t, or includes no nucleotide
  misc_feature (241)..(241): n comprises a, c, g, or t, or includes no nucleotide
  misc_feature (312)..(312): n comprises a, c, g, or t, or includes no nucleotide
tttctaggtattgggtagtgtgaacttaaatactaatcaactttgctttagattgaacaggcatggcattctctgtcaagccgcaaaccctagcctttgtgtgtgtgtgtgtgtatgtatgtgtatgtatacatgtgtaagtttgtgtgtgtgtgtgcgtgtgtgtgtgtatactctanacaggtangagcgtggcattgcnaacttctgaagttgtcaaaaatccactttttactctaantcactaaatcaatggttctaagcttcaggcctctttgaaatgctgctgagcaaactgttctctgacttttntagtagcttccttcgtagatgccactaactctccacctagatgctcttcaacccatatctaacacttgccacctc

SEQ ID NO: 3965 - DNA, 380 bp, Canis familiaris
  misc_feature (49)..(49): n comprises a, c, g, or t, or includes no nucleotide
  misc_feature (94)..(94): n comprises a, c, g, or t, or includes no nucleotide
  misc_feature (106)..(106): n comprises a, c, g, or t, or includes no nucleotide
  misc_feature (121)..(121): n comprises a, c, g, or t, or includes no nucleotide
  misc_feature (124)..(124): n comprises a, c, g, or t, or includes no nucleotide
  misc_feature (127)..(127): n comprises a, c, g, or t, or includes no nucleotide
  misc_feature (131)..(131): n comprises a, c, g, or t, or includes no nucleotide
  misc_feature (133)..(133): n comprises a, c, g, or t, or includes no nucleotide
  misc_feature (141)..(141): n comprises a, c, g, or t, or includes no nucleotide
  misc_feature (173)..(173): n comprises a, c, g, or t, or includes no nucleotide
  misc_feature (196)..(196): n comprises a, c, g, or t, or includes no nucleotide
  misc_feature (241)..(241): n comprises a, c, g, or t, or includes no nucleotide
  misc_feature (263)..(263): n comprises a, c, g, or t, or includes no nucleotide
cccgctgtagtaaactgtgtgctgaaggaagccctcacttggcaccctntagcatgtcctttttcaggattacacatgctgtcaggggcctctntgtctctatctntttctgtacacctgntcnatntaantntctctttnttacacacacacacacacacacaccacttctntactgactgggtcaaacccatgntccccagtggagcttaaacccttctggggcctctcctgaggtccntacatgcattccctccaacagntgggaaacacatttcccacagccaagccccagtctggacttccttccactcagcagacgaccctactccttgggtttctaataaaatgttctcaccgaattatccagggtctcaatt

SEQ ID NO: 3966 - DNA, 840 bp, Canis familiaris
tcctagaggatcaaattgaaagggtctctcacggagaggcaagggtaactactaaaggacaagaggtcctccccctcatcaatctggatttccaaccacagcagttcatatggggcagagttctctgcaccatcacttggcatactgcagggaggtcaccaaatgggaagcaatagtcacagccttacttgcaaggaccctggtatccctcaaaccatgcccttggcacatctactcctgatattgcacgtgtgtttgtgtgtgtgtgtgtgtgtgtgtgtgtgtgtgtgtgtgtctgcctgcatatgtgtctgagacacggatacattctctggtgaacactctctccaacattccagccaaaagccagaagtcaagtgggaaatatgtactccctgggcgctccgggagagtttggggtcacaggcctctccacagtgcaatgattcatggctcagggagtcggcatgagcatgctgttccatggtgagcctggcactcactgtctgggtattcggagacactttctggaaagggccttgtgggaatacacatacagacacacacacagagcccagactttcatcaacctgagactgctgcatgtccacacaatgtatggttgaggctgggaagtagtggtggacgagtgtatggtaccgcatacaggacatcagacacgaaaaactggtattgcatcccaaaatctcctttcctggttccaaaataaacaggcctcaaaggggacgcttgtttgtgcttgtgcaccaggcggggcttccgtcatgcctagggtcgaagtctacaggcgcagtagcaggttaaagagacgagaaacaa

SEQ ID NO: 3967 - DNA, 850 bp, Canis familiaris
tagggctctcattacagcctctgagctacsaggggaccacttgamtacaatgcagaggtgatgagttctacagtgtgtgctgagctgcttggtgccccgagggattagggcctggagccatggasacaaacagatacacagagcctgggctcataggacatgtacttcagtgggagaagaagagaataaagacacacacacacacacacacagaaataadatgtcagkgtgttctaccacaggtaygtctctgagcccttgarggggagstgcttggactccttcacctctgactcwcacccytctagaagttgtcctgtastcasccctctcctcwctgtccacggamgtcctgatgctgctgtcaacaaggctccctgggcctcattttcctcatctacagaatgggtggttagaactcggtcttcaggactcttctacttaacaattttgaggcaataagtaactgaagtgggacaggggcaaaggtgaaaatttttttcctccttctatgcttataaagatattgttgttgcgaatattcatttgggtggatgtttttaagttccttgaagtcagaggccacatatccatatgttgtatttgattttgtgcaaatctttagcaaaaaaggtgtacattcaatcaaacaccaaccaaaattaaagttgtggaagcatcaggaagataaacgttgcttataatccccagctgctgccttggaaggagaggctgtgggtagtgagcacggtgatgggcactcaaggtcaagcttaggcttwacctttgaacttctcagcgagtcattgaaccctagcccctgcctctccaaggaagtgcagtcctctag

SEQ ID NO: 3968 - DNA, 738 bp, Canis familiaris
aattatatttgtgccamaaatttcctttacataaaaacatgaaatatctctaaatgtaaaatarmttaaaataccttatgattgaggcctcagaaaatattagctctttgaagaagaatctattaataagtttttaaaacagagtaggcaacagacaaaatatatacctcaaaaaaatcaaaagttcaattactttttgattacaactacaataattgttttgttgatatgactgatatcraaaaaagtaggatttactakttgacaaagcacaaactttagagtcagataaactttgatttaaatgccaacattgttattttatagcacatgtgtagctttgggcaagtcagtaatctctgaactgcagtctcctcacttgtrwaacacagcagtbccamtcttgtattgtcattgtaaggacwtgagagtgtgtggttgtgtgtgtgtgtgtgtgtgtgtgtgtgtgtgtgtgcatgtacagtgctcaataaataatgacttttaattgcattgctgatttttggatgcattgagagattaatttcatattattaaggacagtcaggttgaaagcatattcatttatccatccattcctatatttcatctcaattttcacaacaaacctgtaaaacacataccatgtaccctctactgatgaaaaactgaacaattcaactggtattacacagtgactatatatgatatgggattaaagcttagtcctctcagagt

SEQ ID NO: 3969 - DNA, 889 bp, Canis familiaris
  misc_feature (472)..(472): n comprises a, c, g, or t, or includes no nucleotide
ttcgagctcggtgccggggatcattcttatggaagctaaaatataatctcgattgtgccactgctctgcycccaaccttctaaaggtcccataagaataaaaccatagtccttacccaggcatatgaaatmtggccccctgctacctctccagcctcatttcctgtgttataggcacactggcctccatgctgttactccaaccagctaaagcctttgttgtcatttgcttgaattcccttcccccaaatatctacatgggccattctttcccttctcacggctaactgtaatagctcccatcctgctcttcctaattacccctgaccccttgcactgttttagttttccacataggactagatacacacacacacacacacacaccacacttgtgttttytccctattccaatttcagttccatagggtaaaatcttacstgcctcattctctgcccatgtgcccggcgtntaggagagtgcctggtacacactattaggcactccataaatatttgctgaatactgtgaatgatggggtataaaaagaagcacccagttggtgtttccttaagggaagcacaggtgttttattattattttccccattttctgtagttcaggagggaacttccacactttccacagtccacatggcccagcctgagcagggtttytgcccagaggcaaggagagttygtcgctgggccctgaagctggcttcatggcacgctcccaagtacacccgggaatytggcctgcatccctcagctaggactgtgctctcagacagtcagatgtgaaccctaaaacccatcagaaacaaataaatatattcaggggaaaaaaaaagacataaagtgggattttccagtatctggtcctctag

SEQ ID NO: 3970 - DNA, 459 bp, Canis familiaris
  misc_feature (130)..(130): n comprises a, c, g, or t, or includes no nucleotide
  misc_feature (358)..(358): n comprises a, c, g, or t, or includes no nucleotide
  misc_feature (410)..(410): n comprises a, c, g, or t, or includes no nucleotide
tagaggacctgtctctgtaactggggacactatcattcctatcacccaaactgtaacttgacacacttgaattatcaaaggattacacatacacccacacacacacatacacacattaatcaaagaagcnacaaatgaggattttattgtcttcccagggtatgcaatataaaacttacagctttttccttactattgtgtatttatctgtgcttcttacttgaaggggcgatataagatataacacaatctctcattacatttcttctaggtatttggcacaaaatctgacaattttaagtcctgaataaatgtttcttgaatttaaaacaaatcctcctctcctgtgaattttgtntcattaatatactcataatctgtttgcccctctccactcttaattatagttnccattgcgattctcccccttctggtcttacttcttttcaatcactttgt

SEQ ID NO: 3971 - DNA, 612 bp, Canis familiaris
tggaaatgtatagcttttgactccctttacctagtttgtccatccccctcccacccasacatgtacctgmakcmaccaccactttgtcctctgtatccatgastacagttwttgtgtgtgtgtgtttttttaaagattccccatacaaatgaactgtacagtatttctctttctctgtctgacttatttcactcacaagatacccgtaaattttatccatgttgttgcaaatgacaggattcccctctttttcttattactgagtaatagtcctctgtgtgtgtgtgtgtgtgtgtgtgtgtgcacagcatyttctttattcatacacctactgatggacagttcagttgtttccacgtctcgtctcggttcttgtacataatgctgcagtgaacttggggtgccaggtatctttttgaatcaatgattctgtttcttttgggtgactaaccagtagtggaattaccgggtccatttttttactttctgaggaacctycataccgagtggctgtcctttctgcattcccaccagcagtagaccctttccccacatcctcgccaacaccttttgtttctcgtggtttttattctaccccttgtgacaggtgtg

SEQ ID NO: 3972 - DNA, 173 bp, Canis familiaris
  misc_feature (25)..(25): n comprises a, c, g, or t, or includes no nucleotide
  misc_feature (41)..(41): n comprises a, c, g, or t, or includes no nucleotide
  misc_feature (44)..(44): n comprises a, c, g, or t, or includes no nucleotide
  misc_feature (58)..(58): n comprises a, c, g, or t, or includes no nucleotide
  misc_feature (62)..(64): n comprises a, c, g, or t, or includes no nucleotide
  misc_feature (137)..(137): n comprises a, c, g, or t, or includes no nucleotide
  misc_feature (168)..(168): n comprises a, c, g, or t, or includes no nucleotide
tttaatatattgccccttacttccntagattagtttttgtngcntgcaaccaggaaanatannnacacactctacgatatgtgtataatcttattctctgtgtatgtgtacgcttgtatatatgttccctctctaangcacacacacacacacacacacacacacacnccctc

SEQ ID NO: 3973 - DNA, 472 bp, Canis familiaris
  misc_feature (171)..(171): n comprises a, c, g, or t, or includes no nucleotide
  misc_feature (189)..(189): n comprises a, c, g, or t, or includes no nucleotide
  misc_feature (201)..(201): n comprises a, c, g, or t, or includes no nucleotide
  misc_feature (203)..(203): n comprises a, c, g, or t, or includes no nucleotide
  misc_feature (269)..(269): n comprises a, c, g, or t, or includes no nucleotide
gaagtccatgacagctcacacagccacgcccccatgccttcacacatttggtgtcttctaccaggatgccttccctctcagctgactcctcctccacttttgagacttggctccagcatcacttcctctgcaaagcctcccctggccctatccattcgattcggtctgcantaaacctgctcttctctntggcactcatcntntgtgctttgatgacagttttaccaactgagcattggcaaccctgtctgttttacttatctgatttncatggactgagagtccctgaggattgtgactgtatcttctatttctaaatctccagtgccaagtgaagggggatgctcagttctgacctgaatgtagacatcggatggggtatgtgggcagattttatgagtatttactatgcacaccaggttcttttggtatgttaccctccttcatttttctcagagtagccttcaaggca

SEQ ID NO: 3974 - DNA, 316 bp, Canis familiaris
  misc_feature (38)..(38): n comprises a, c, g, or t, or includes no nucleotide
  misc_feature (59)..(59): n comprises a, c, g, or t, or includes no nucleotide
  misc_feature (70)..(70): n comprises a, c, g, or t, or includes no nucleotide
  misc_feature (91)..(91): n comprises a, c, g, or t, or includes no nucleotide
  misc_feature (230)..(230): n comprises a, c, g, or t, or includes no nucleotide
acatcaattgatggcaatgggaatgttccttggctccntcggcccccatcttacttagnacatttcagtntggaggaaacaggaatcattnaagactcctgataccaatacaaacataaacacaacacaacacacacacacacccatacacacagagctgtgaaagctcaaagcagagcttcctactgcacctgaaggaagaatacatgtcaaaacacgctatttctgtngaccttatgtgatttataggaaaatgctggaactatctttcctgaccataagattccacgcttttgggcagccccggtggcgcagt

SEQ ID NO: 3975 - DNA, 470 bp, Canis familiaris
  misc_feature (140)..(140): n comprises a, c, g, or t, or includes no nucleotide
  misc_feature (278)..(278): n comprises a, c, g, or t, or includes no nucleotide
  misc_feature (345)..(345): n comprises a, c, g, or t, or includes no nucleotide
  misc_feature (432)..(432): n comprises a, c, g, or t, or includes no nucleotide
tccataaccggagcctgttctcccactcaccttcacccattttgcccacgctcccactggcaatcatgagtttggtctctgtgtttacaggtctgattcttctgctctttgtttattcatttggtgtgcttttgttcttntggtccacatatgagtgaaatcatatggcatctgtctttctcaatctgacttattttgcttagtataataccctttaggtccatccatgttgttgcaagtatcaaaatctcatcccttttaatggctgtgtgatattnacacacacatacacacacacatatacacacgccacatcttcctatccatttatcagtggactcttcngttgcttccatagcttggctattgtaaataatgctgcaaaggcaagaggtacatatatgcttttgaatgagtgttttcattttcttntgggtgaatactcagtagtggaattatcagacctctag

SEQ ID NO: 3976 - DNA, 319 bp, Canis familiaris
  misc_feature (31)..(31): n comprises a, c, g, or t, or includes no nucleotide
  misc_feature (33)..(33): n comprises a, c, g, or t, or includes no nucleotide
  misc_feature (51)..(51): n comprises a, c, g, or t, or includes no nucleotide
  misc_feature (55)..(56): n comprises a, c, g, or t, or includes no nucleotide
  misc_feature (61)..(61): n comprises a, c, g, or t, or includes no nucleotide
  misc_feature (68)..(68): n comprises a, c, g, or t, or includes no nucleotide
  misc_feature (71)..(71): n comprises a, c, g, or t, or includes no nucleotide
  misc_feature (74)..(74): n comprises a, c, g, or t, or includes no nucleotide
  misc_feature (84)..(84): n comprises a, c, g, or t, or includes no nucleotide
  misc_feature (273)..(274): n comprises a, c, g, or t, or includes no nucleotide
  misc_feature (282)..(283): n comprises a, c, g, or t, or includes no nucleotide
  misc_feature (297)..(297): n comprises a, c, g, or t, or includes no nucleotide
cacaatgggactttgaattgttccccagcananaaattagtgtgatgtccntgcnngcttntctttgncanagnaaacgtggcnaacctgtcagatgctctgtcccaggccatacacaccaccttatcaatatctgaatgggttcttttaaacttagagctttatagacatgaaaaagattagtagaggaagactatacctaaatctctatgcagtgtgtgtgtgtgtgtgtgtgtgtgtgtgtgtgtgtgtgggtgtgtgtctttgtgtggnngatagcannagccacaataatantccatggatgtggtgtgtgcat

SEQ ID NO: 3977 - DNA, 261 bp, Canis familiaris
  misc_feature (12)..(12): n comprises a, c, g, or t, or includes no nucleotide
  misc_feature (21)..(21): n comprises a, c, g, or t, or includes no nucleotide
  misc_feature (33)..(33): n comprises a, c, g, or t, or includes no nucleotide
  misc_feature (57)..(57): n comprises a, c, g, or t, or includes no nucleotide
  misc_feature (77)..(77): n comprises a, c, g, or t, or includes no nucleotide
  misc_feature (85)..(85): n comprises a, c, g, or t, or includes no nucleotide
  misc_feature (89)..(89): n comprises a, c, g, or t, or includes no nucleotide
  misc_feature (99)..(99): n comprises a, c, g, or t, or includes no nucleotide
  misc_feature (143)..(143): n comprises a, c, g, or t, or includes no nucleotide
  misc_feature (145)..(145): n comprises a, c, g, or t, or includes no nucleotide
  misc_feature (161)..(161): n comprises a, c, g, or t, or includes no nucleotide
  misc_feature (163)..(163): n comprises a, c, g, or t, or includes no nucleotide
  misc_feature (165)..(165): n comprises a, c, g, or t, or includes no nucleotide
  misc_feature (221)..(221): n comprises a, c, g, or t, or includes no nucleotide
  misc_feature (258)..(258): n comprises a, c, g, or t, or includes no nucleotide
cctctcctgggncagggcacngcaaatccattngcctcctactctctacaggaagcncaccttgcacagtgacttanaactggantgcncaatgcatanagcttaagttctctccaaaagagctcatctctggtgattgcaanangatccacacagtgtgncnanaaatgtgtcaccctccacacctcaatctctctctctctctctctctctctctctcncatatacacacacacacacacacacacacacacacancct

SEQ ID NO: 3978 - DNA, 370 bp, Canis familiaris
  misc_feature (10)..(10): n comprises a, c, g, or t, or includes no nucleotide
  misc_feature (40)..(40): n comprises a, c, g, or t, or includes no nucleotide
  misc_feature (76)..(76): n comprises a, c, g, or t, or includes no nucleotide
  misc_feature (124)..(124): n comprises a, c, g, or t, or includes no nucleotide
  misc_feature (235)..(235): n comprises a, c, g, or t, or includes no nucleotide
  misc_feature (283)..(283): n comprises a, c, g, or t, or includes no nucleotide
  misc_feature (289)..(289): n comprises a, c, g, or t, or includes no nucleotide
  misc_feature (296)..(296): n comprises a, c, g, or t, or includes no nucleotide
cttacttagncaccatgtcattactcttgatgagaagganttaattgtaaatacaggagctgttattctggattcntcatttaagtagtgagaattggctcaaagctattggggttaatgtctntctttaattgtacaatgcaagcgcatgtaattaccatccccaatgtccactcagaaacatccagcttcagggaggacatggctatttatgactaaggtcatactgtattcntttcctttattctccaggaggatgccctgctatagctttgtgtcttcntggccntctgtgngcattaaatatagagatgagtggaactcccttttctttcagaatatttgttttctcattttctactagtagaat

SEQ ID NO: 3979 - DNA, 120 bp, Canis familiaris
  misc_feature (14)..(14): n comprises a, c, g, or t, or includes no nucleotide
  misc_feature (22)..(22): n comprises a, c, g, or t, or includes no nucleotide
gtaaactgcaaatncttttaanagagttctcatgtatttctttgccattccttcttcccactgtgccaaaaacagataattacacacacacacacacacacacacacacacacgcatata

SEQ ID NO: 3980 - DNA, 390 bp, Canis familiaris
  misc_feature (95)..(95): n comprises a, c, g, or t, or includes no nucleotide
  misc_feature (226)..(226): n comprises a, c, g, or t, or includes no nucleotide
  misc_feature (296)..(296): n comprises a, c, g, or t, or includes no nucleotide
  misc_feature (368)..(368): n comprises a, c, g, or t, or includes no nucleotide
caccaggaaaaggagctgggattcaaatgtaaatctgcatagtaccaaggcatgagctcgacatattcctcagaccatatcttcccagtgcagtntccatcccccaccttcccgcattctctctgtctccctcctcaaagcatctacaaaagttgtaaaaatgctgatgcttctaaaccccagatagcgtaataagtgcttcaagttcttctcttgtactacatgncctttggaagcttggaaacgtaagaactttgaagtgtcttctactggtatgcagggaggtcagcttcaangctatcataataactcagggaaagggggttggtgggtcggaccaaggtaacagtggtgagagggagagatgngaaaattttgagggatattaag

SEQ ID NO: 3981 - DNA, 420 bp, Canis familiaris
  misc_feature (12)..(12): n comprises a, c, g, or t, or includes no nucleotide
  misc_feature (16)..(16): n comprises a, c, g, or t, or includes no nucleotide
  misc_feature (42)..(42): n comprises a, c, g, or t, or includes no nucleotide
  misc_feature (58)..(58): n comprises a, c, g, or t, or includes no nucleotide
  misc_feature (62)..(62): n comprises a, c, g, or t, or includes no nucleotide
  misc_feature (141)..(141): n comprises a, c, g, or t, or includes no nucleotide
  misc_feature (184)..(184): n comprises a, c, g, or t, or includes no nucleotide
  misc_feature (197)..(197): n comprises a, c, g, or t, or includes no nucleotide
  misc_feature (260)..(260): n comprises a, c, g, or t, or includes no nucleotide
  misc_feature (267)..(267): n comprises a, c, g, or t, or includes no nucleotide
  misc_feature (292)..(292): n comprises a, c, g, or t, or includes no nucleotide
  misc_feature (358)..(358): n comprises a, c, g, or t, or includes no nucleotide
  misc_feature (362)..(362): n comprises a, c, g, or t, or includes no nucleotide
  misc_feature (364)..(364): n comprises a, c, g, or t, or includes no nucleotide
  misc_feature (368)..(368): n comprises a, c, g, or t, or includes no nucleotide
  misc_feature (390)..(390): n comprises a, c, g, or t, or includes no nucleotide
ctcagaggatcnagtnaattatactactgggtatttactccnaaagatacagatgtantganatgaaggggtactggcaccccagtgttcatagcagcaatgtctacaatggccaaaccatagaaggaggcaagaagtccnttgatagatatacacacacacacacacacagatagatacacanatacacacacacnatggaatattacttagccactagaaaggatgaatagaatacctaccatttacatcgacatggnacccagngactcttacatggtacatggaccanagtgttgtatttaataggtacataggaaaaaacccaattaccaccccatgctttcaaagatattantccnanggcnaagtaaagaatacatttaggtnaatattgagtaaataacagcatacgtgata

SEQ ID NO: 3982 - DNA, 420 bp, Canis familiaris
  misc_feature (72)..(72): n comprises a, c, g, or t, or includes no nucleotide
  misc_feature (161)..(161): n comprises a, c, g, or t, or includes no nucleotide
  misc_feature (175)..(175): n comprises a, c, g, or t, or includes no nucleotide
  misc_feature (233)..(233): n comprises a, c, g, or t, or includes no nucleotide
  misc_feature (243)..(243): n comprises a, c, g, or t, or includes no nucleotide
  misc_feature (252)..(252): n comprises a, c, g, or t, or includes no nucleotide
  misc_feature (258)..(258): n comprises a, c, g, or t, or includes no nucleotide
  misc_feature (291)..(291): n comprises a, c, g, or t, or includes no nucleotide
  misc_feature (314)..(314): n comprises a, c, g, or t, or includes no nucleotide
  misc_feature (317)..(317): n comprises a, c, g, or t, or includes no nucleotide
  misc_feature (338)..(338): n comprises a, c, g, or t, or includes no nucleotide
  misc_feature (349)..(349): n comprises a, c, g, or t, or includes no nucleotide
  misc_feature (358)..(358): n comprises a, c, g, or t, or includes no nucleotide
  misc_feature (368)..(368): n comprises a, c, g, or t, or includes no nucleotide
  misc_feature (371)..(371): n comprises a, c, g, or t, or includes no nucleotide
  misc_feature (377)..(377): n comprises a, c, g, or t, or includes no nucleotide
  misc_feature (382)..(382): n comprises a, c, g, or t, or includes no nucleotide
  misc_feature (388)..(388): n comprises a, c, g, or t, or includes no nucleotide
  misc_feature (392)..(393): n comprises a, c, g, or t, or includes no nucleotide
gaagctgggccaagagatggaatttatgcaaatgggacctgaggagggttcaaggagggggcagttcctgcntatgcctctctactcagaatatccagggccagacaccttaggaagggggaaagagaactactcaggaggaacattggctttcatcctcnatgctaagcttgcncaggggtgtatgtgtgcgcgcgtgtgagagtgtgtgtgtgtgtgtgtgtgtgtgtgtnaggcagtganccttcgttntctctngaaccttgttcttgctaagaatagcccacgtancaaaatgcctgtagggcatatangtntagcagaaagaaaattagtgntttgggaacangaaaactgngttaatcgtngcntcacgnctganaaaacngagnntttcttctggggtctggaggtctccaa

SEQ ID NO: 3983 - DNA, 230 bp, Canis familiaris
attcgagctcggtacccggggatcctatcataacamaattaaccytgcccaaaggtaaggggtttttgtgtgtgtgtgtgtgtgtgtgtgtgtgtgtgtgtgtgtgtgtgtgtgaaaagaagatataagwcagtcctaagamactccaaaggctacaaamactttctgtgacactctggagagagcaaaacttctgtcccttccctaawgagagtctgacaaggtcctct

SEQ ID NO: 3984 - DNA, 244 bp, Canis familiaris
cggggatcttccccattcactaattataattagaacatagctttagggctgtaggattttgtggtgattgggattatttgtgtgtgtgtgtgtgtgtgtgtgtgtgtatgtgtgattgagaatatttaatgatacaaaacattaaattttctaggtgaggtttatgtaaagtccacaataggctgcaataataataacctttttctgtcttcaacaaataacacattattataaattctgggtt

SEQ ID NO: 3985 - DNA, 344 bp, Canis familiaris
  misc_feature (121)..(121): n comprises a, c, g, or t, or includes no nucleotide
  misc_feature (132)..(132): n comprises a, c, g, or t, or includes no nucleotide
  misc_feature (294)..(294): n comprises a, c, g, or t, or includes no nucleotide
  misc_feature (304)..(304): n comprises a, c, g, or t, or includes no nucleotide
  misc_feature (311)..(311): n comprises a, c, g, or t, or includes no nucleotide
aattcaaagtatggttttccctgagttcatatcacttttgcaacatcataaagtaaaaaaaacataaaccatcataagtcaggcaccacctgtaattcaaattctaagagtaaaagaacanggcagatgaantatttgaagaaataatggtcaagaattatccataggtaatgaatgacaccaaatcacagacccaaaaagttcagaaaacaccaagcaaagtacacacacacacacacacacacacacacaaatgcatatatctcttaggcatatattcaaaatacaaaaganacagagaaantcttganagcagatggagggggaggcattttatatagagg

SEQ ID NO: 3986 - DNA, 370 bp, Canis familiaris
ggggaggaccggttattcagcttctcctgcacagctcctgtgtggatacaaacctgagcccaggaaggtcagccaggtatcctgcagtaaccgaatccgtggtgttgcggtgcttatcagcaccatcatcggcctctgcagttgtggttgaataagattttgctgttgtcatcttgtttggtaacagcaatagcaagtgttgcaagggtaattgttactttggaagtgccctcttggcaggtcctggtggtgtacctctatgtgtgtgtgtgcgtgtgtgtctgtgtgtttgccatccttccgagtcttcccagagcagctctgggaacttggattccacctcaaggaagtaagtaagcatggattggat

SEQ ID NO: 3987 - DNA, 207 bp, Canis familiaris
  misc_feature (10)..(10): n comprises a, c, g, or t, or includes no nucleotide
  misc_feature (35)..(35): n comprises a, c, g, or t, or includes no nucleotide
  misc_feature (42)..(43): n comprises a, c, g, or t, or includes no nucleotide
  misc_feature (53)..(53): n comprises a, c, g, or t, or includes no nucleotide
  misc_feature (58)..(58): n comprises a, c, g, or t, or includes no nucleotide
  misc_feature (64)..(64): n comprises a, c, g, or t, or includes no nucleotide
cactttcccngcttttgatgcatccctccatcccnaattttnntacactcccngggcnctcatnttttttttttttttacgattttatttatttattcaacacacacacacacacacacacacacacacacacacacagaggcagagacacaggcagagggagaagcaggttccctgtgggagcctgatgcgggattagatcctcta

SEQ ID NO: 3988 - DNA, 906 bp, Canis familiaris
tagaggacctggagactgggattgagtcccacgtcgggctccctgcatggagcctgcttctccctctgcctgtgtctctatgtgtctcatgaataaataaaatcttaagaaaaagtagaaaagaggttattggaggaaatactaacccttctacagtaaatatttgaaacataacctctaagaacgaatttaaaagattactaagtataataaaatgttttaagcacttaaaatcagctcgcctcctgccgcctcctccagctgaagattgattgaaatgtgatttgtgtccccacctggccagggtgagttggaccccctgcaacctgtagggcaggcatctcagcccttggcccctttcggtgggataagggaaaccttctcccccaagggtggctgcccaccactctggtgattgggcamgtaggggtgagggcaggcaactggtctgtgagggtgtgtgtgtgtgtgtgtgtgtgtgtgtgagtgtgtgtgacatccggaaaccaggttgtgaggagagaggggggtcagccagctcatggccatgaggggagcaggagcctggaggacctttagcacagascactgttagaccatcacggcactcactcttcctgtggcagaaacacccggtggcttagttcagttgcctcacacaaccacttatgttagttttggtctataggtaagtgtcggctcttattattcattgcatttgaggagttttcagccattattccttaaaacattcttactctttatttcccgtccttcaggattcctattacgcgtatgttggtgggacagctggtatctagaagtttcttagtctgtgctcatctttcttcattctttttccctttctgctcctcagactgagtggtttcaattgatccccgggta

SEQ ID NO: 3989 - DNA, 480 bp, Canis familiaris
  misc_feature (130)..(130): n comprises a, c, g, or t, or includes no nucleotide
cacaattctatgcctgaagttttagtatcatcgatggttctaataatcagatataatgtgttagaaatctatagatactataaatcagatattttcccccactaatagagacattctaaaatatctcctntagcaaattatttgcttaagaagcggcagggatgatattttccatatagttgaaaagagaatgtttcagacaccaaaccataacttatcctttgtcaagacccattaaaaatattttgatgtgtgtgtgtgtgtgtgtgtgtgtgtacatgcgtgtattctcatatacctggggaacagcatgaaactcttgctttgttataggagtacataactgctgcgttatgtcctgtctttctaatcttctgcctatctaattatctatgtaacatttagaagggaactgggtcattgtgaagcagaatgtttaattaaccaaaaagaatctagttctggaaatcaaatatgtat

SEQ ID NO: 3990 - DNA, 410 bp, Canis familiaris
  misc_feature (74)..(74): n comprises a, c, g, or t, or includes no nucleotide
  misc_feature (145)..(145): n comprises a, c, g, or t, or includes no nucleotide
  misc_feature (170)..(170): n comprises a, c, g, or t, or includes no nucleotide
  misc_feature (182)..(182): n comprises a, c, g, or t, or includes no nucleotide
  misc_feature (222)..(222): n comprises a, c, g, or t, or includes no nucleotide
  misc_feature (242)..(242): n comprises a, c, g, or t, or includes no nucleotide
  misc_feature (292)..(292): n comprises a, c, g, or t, or includes no nucleotide
  misc_feature (294)..(294): n comprises a, c, g, or t, or includes no nucleotide
  misc_feature (304)..(304): n comprises a, c, g, or t, or includes no nucleotide
gctctcattcagagcttccccaacagagacattttcatccacagtggctctaagcatacaggtacatagacacntaactactcatacagtgcagcgggattggttggcggcagagaattttgaatgcccactcaaagtgctgtanagtcagtaaggattgggagggagantcatttctcttngccttgcaaagtggattgctgcattctacttcacttctanagaatcaaataaagcaaganatttgtttctcaagttctacatatgctgaatgacaaggcatggtacatanangtgctacccnagctgtgtgaaggagtgtgtgtgtgtgtgtgtgtgtgtgtgtgtagatgcaatttgtagactactagaagctcacctcatccatttttttctgattttgttgtcct

SEQ ID NO: 3991 - DNA, 420 bp, Canis familiaris
  misc_feature (413)..(413): n comprises a, c, g, or t, or includes no nucleotide
tcagtagaacaggacagaaacagactcacactcacatatgcacctgacttagggcaaagttaccaccatcaacaagctagagagaagggatggtgctttccagaagtggtgcaggattaactggatattcaggtggaaaagtcaggtaacctggtaccctggaagccaggtaagactaggggccccacctgccttgtccaccgcacccaccgcgctgtccccacctgtgcctggaagcccacccggttgtatgagcctttgtgacagcctcttgcatcattagtgtccttgtgcagtgtgttcccctccacacatacacacacacacacacacacacacacacacacacactattctgggattggtctgtgtgaaccaacagcatgtggcagagcgacagcgtgtcactttgntgtggag

SEQ ID NO: 3992 - DNA, 849 bp, Canis familiaris
  misc_feature (311)..(311): n comprises a, c, g, or t, or includes no nucleotide
ggtgcatggagcctgcttctccctctgcctgtgtctctgcctctctctctctctgtgactatcataaataaataaaaattaaaaaaaaaatgaaaagtggatgaaatttaaagctacctataattctgtcttccagtgataaccatgactgtgtgtgtgtgtgtgtgtgtgtgtgtgtgtgtawaaaacagacatgsrrggctrttktgtatgstgytcyhcacccwaacagttatctgttcaatttagttatcaastgskgcrtcaaaacaacttcaaacttgtgagtwaaaacagstattktgtttwyncccatgaytctgtggctccggaatctggtrgggggcacagctgggatggctgstccctgctccacggtgtgwggggcttcgggtgggatgcctgacatgacacagcaggacttattcactcccatgctgttacctcagtgttcctccatgggattgctttgtccaagcactttgtcatctcctggggcctctccatgtggtctctctctctccggccggctggctggcctggacttcttacatgcgggcctcagactctaagagcataaaagcaggcctttttaacacctggactcagaggtccctaaacagaactgtctccacattccactggtcagagcagtgccaggcctgacccagacgcaatgggtctggggaatggacctcacacctcatgggatggaggctagctagcacacagtatatcatgaggtgttcctgtgttgttcattactttccagaagcctgatttttaggagatacagagatttcttttgatattttatktaaccaaaccactgatttgtggctatgatag

SEQ ID NO: 3993 - DNA, 330 bp, Canis familiaris
  misc_feature (244)..(244): n comprises a, c, g, or t, or includes no nucleotide
  misc_feature (248)..(248): n comprises a, c, g, or t, or includes no nucleotide
  misc_feature (262)..(262): n comprises a, c, g, or t, or includes no nucleotide
gtgaccgggggatcatcatgcaacagcaattcagctccccttgttgcctgaggtttggccccagccaccctgctgcttaaagtcttaggatggaagtttgggttggcatccaccagcctcaaagacactgcatcagtgagtccgtgtgtgtgtgtgtgtgtgtgtggtgtggaaggtaccaaccagctgaagcagctagtatgccacaaagtggcacaaaatgctgctctttgggggaagaganaganagggagagaatganagagaggtcattcttctctctcttcttataggggcacaatccaatcatgagggttctatcctcatgaa

SEQ ID NO: 3994 - DNA, 964 bp, Canis familiaris
  misc_feature (492)..(492): n comprises a, c, g, or t, or includes no nucleotide
tttcatttccttacctgtttaaaaggggatggcaatkttcacattaaaggatggtcctcaagattaaacaggagaatgttccagagaacattttgggacctgcaatactaatatcctgaacaaacgcaaatgtwaggaatggtcattactccccgtgcacgctcagcctctgattcacctcgggatgagaaaccagatgctcttgtttccattttgtgcagcggccacttcaaagtcttgtgaagtctacccaktaaggcggggtgagtggascccccgtgtcctgatagcaaggccctgctgtgasctctctgttgctgttgtagagacttgcctacagataagtaatgctgcccagggaacgtcagaaagtctcttatgagccataaaggtktygtttttgtyttgtttctggtgtgtgtgtgtgtgtgtgtgtgtgtgtgtgtgtgtgaastcggatattcttgaaratwmwaaagcawakagattagnggacaagcaaagtcagggatctgactctgtttaaatagaactgcaaaatgcttttgttcatttgtccatggtaccgagacaaataccagtccctggggctgtgtttcccactccagggaatgccgtctacagacccttccatccttccagacctacctctcttttcagctstctctctccataccatcataaccctcccaccttcatctcaacaggtggacccacaggtgggttgatggggaggtagagcatgaggawccaagcttaagaaattctttcaccccaaaacatctcctgaatatctcattgctaatgactgaaatcctgttcttggccaccaattcttttagattaaaaaaatcacctcctattaaaacccaagtaacccctggcagagtcacaaagaaaactgctgcaccttaatatgaaggactgacccgggagccagcaaattcttctacaaaggtcctct

SEQ ID NO: 3995 - DNA, 454 bp, Canis familiaris
  misc_feature (35)..(35): n comprises a, c, g, or t, or includes no nucleotide
  misc_feature (40)..(40): n comprises a, c, g, or t, or includes no nucleotide
  misc_feature (42)..(43): n comprises a, c, g, or t, or includes no nucleotide
  misc_feature (55)..(55): n comprises a, c, g, or t, or includes no nucleotide
  misc_feature (66)..(66): n comprises a, c, g, or t, or includes no nucleotide
  misc_feature (68)..(68): n comprises a, c, g, or t, or includes no nucleotide
  misc_feature (76)..(76): n comprises a, c, g, or t, or includes no nucleotide
  misc_feature (136)..(136): n comprises a, c, g, or t, or includes no nucleotide
  misc_feature (184)..(184): n comprises a, c, g, or t, or includes no nucleotide
  misc_feature (244)..(244): n comprises a, c, g, or t, or includes no nucleotide
  misc_feature (255)..(255): n comprises a, c, g, or t, or includes no nucleotide
  misc_feature (309)..(309): n comprises a, c, g, or t, or includes no nucleotide
  misc_feature (346)..(346): n comprises a, c, g, or t, or includes no nucleotide
  misc_feature (351)..(351): n comprises a, c, g, or t, or includes no nucleotide
  misc_feature (358)..(358): n comprises a, c, g, or t, or includes no nucleotide
  misc_feature (409)..(409): n comprises a, c, g, or t, or includes no nucleotide
  misc_feature (443)..(443): n comprises a, c, g, or t, or includes no nucleotide
aacctgcataccttccctccttctgatatcacgtnttgantnntccctgccaacntcctcccagtntntatctgtntctctctttgtctctctgtctcacacagatgcactgacacatgtacccactcactctcantacacatgcgcgtgcacacacacacacacacacacacatgacctcagntctggcagggagggtctgtaaactctgacccgggcccctctccagacccaccctgcccangcgcccagctngggagcagcccaggaaacctgctaggagggtaaaagggctggacgaggccttcntccatttcccacccacccacccctggctcatcccttnacggncacatgntcaggccttggcctctggtcgttccccaaacccaacccagagaggggtgcntgacacccacagccaccagcgcgggctgttgctngtctcacacag

SEQ ID NO: 3996 - DNA, 280 bp, Canis familiaris
  misc_feature (81)..(81): n comprises a, c, g, or t, or includes no nucleotide
  misc_feature (138)..(138): n comprises a, c, g, or t, or includes no nucleotide
  misc_feature (228)..(228): n comprises a, c, g, or t, or includes no nucleotide
agaggacttctgggatgagcatgcaggaagtccatggaaggagggtctcagtccaggtgtgtgtgtgtgtgtgtgtgctcnggtagcaacaggacccaatggacaggcaggaaaggggctggggtctgccacatgganacagtggtgcagcccacatcagagggtggcctgtgacagtttgggggactggcacagggtaagtgctgcagagagcagggcaagacctanctgtggggtggggggtcaagccaagactccagtctacagaacgaaaggaaag

SEQ ID NO: 3997 - DNA, 464 bp, Canis familiaris
  misc_feature (45)..(45): n comprises a, c, g, or t, or includes no nucleotide
  misc_feature (56)..(57): n comprises a, c, g, or t, or includes no nucleotide
  misc_feature (102)..(102): n comprises a, c, g, or t, or includes no nucleotide
  misc_feature (146)..(146): n comprises a, c, g, or t, or includes no nucleotide
  misc_feature (148)..(148): n comprises a, c, g, or t, or includes no nucleotide
  misc_feature (165)..(165): n comprises a, c, g, or t, or includes no nucleotide
  misc_feature (343)..(343): n comprises a, c, g, or t, or includes no nucleotide
  misc_feature (361)..(361): n comprises a, c, g, or t, or includes no nucleotide
  misc_feature (372)..(372): n comprises a, c, g, or t, or includes no nucleotide
gctggagtcctgtgttggcccgcctgctgtcccccacagggtcangcagtgcttgnnaggcttcaataaatatttcttggaagggtacataccacacagcanggtgccactttttcccactctattgtcaaagtagggcaggaganangcatttattgtactaanttatttgtagcagcatatttaactctaaagaaatcagcaagccccctattactctaggcctatggccaggtctttaaaatatctttgttatagtaatatttttctaactgtattttctataataagatttgaccttaatttgttcttttaccacaattctagtcaaccaattataggnctagatgtagccaatcanaagaacacaanaaattgagaccatgtactctgaaactgcatttctaggagatgttaacagatgccacacacacacactcacacacacacacacacacacgggc

SEQ ID NO: 3998 - DNA, 395 bp, Canis familiaris
  misc_feature (78)..(78): n comprises a, c, g, or t, or includes no nucleotide
  misc_feature (99)..(99): n comprises a, c, g, or t, or includes no nucleotide
  misc_feature (106)..(106): n comprises a, c, g, or t, or includes no nucleotide
  misc_feature (122)..(122): n comprises a, c, g, or t, or includes no nucleotide
  misc_feature (133)..(133): n comprises a, c, g, or t, or includes no nucleotide
  misc_feature (141)..(141): n comprises a, c, g, or t, or includes no nucleotide
  misc_feature (153)..(153): n comprises a, c, g, or t, or includes no nucleotide
  misc_feature (175)..(175): n comprises a, c, g, or t, or includes no nucleotide
  misc_feature (281)..(281): n comprises a, c, g, or t, or includes no nucleotide
  misc_feature (327)..(328): n comprises a, c, g, or t, or includes no nucleotide
cctcttggattcacaatgtgcattagcataggaaaggctgacaagtcccaaggaaagaaaacaatctttgagcacttnccagttcttaatttattgganccaaacntccgtgaagacacagntgagtcacctnccatagtnagaacatcagcntgggaaacctcacctggcatantgtcctcattagagtgacagggacactggagaaggtgtgggacaaagcagcacacacagcctttggaatcaaagaagtatacactggattgcaactctattacctnagagctacagtctgatgtaagcaaataaaaaagcgtcgtgtcctcnntggacaagaattgtttgagcacctccctgtgtgccagacactgttctaatcacttgggatttaccag

SEQ ID NO: 3999 - DNA, 262 bp, Canis familiaris
  misc_feature (12)..(12): n comprises a, c, g, or t, or includes no nucleotide
  misc_feature (50)..(50): n comprises a, c, g, or t, or includes no nucleotide
aaacccagaccnggagacaccgcaggtatctttcacaattcagccacacnacacacacacacacacacacacacacacacaccacggaatattacccaacagtaaaaaggaaccaactattcagacgtgcaacaacttggatgaatctccagggacttatgctaagagaaaaaggctattctcaaaaggttagataccatatgttccatttatataacttttcttgaaataacaaaattacagaaatagagaagagtcctct

SEQ ID NO: 4000 - DNA, 792 bp, Canis familiaris
accacatggtcatagatrtcaactcattttaatgaagcctaaaagacatattctcgtgacccctaaaggagagaatacgagagtcagttgtamaacattttwaaatgtttctatcccattgggaaattttaaaatgtctctcaaataacttcaggaaatcttttcattcacaatctgtgtgtgtgtgtgtgtgtgtgtgtgtgtatttwtatgttagacttatttagggcaaagacaatttatgcccaccatttctagtgtaattattgagttagagtaattatagtagatgctcagtaaagttttgacaataaatgaacaaatggatgattaaatgctagaaatatcaggacttgcattttttgactttctaacacaactagatagaaatatttcctgaaaaattattatcagatattatgaattaactttattgtctttgtaacttatcatcaacccaaacaagcaaagcgtgttattcatgaaaaaaattaaagccaaagtttcaaaagttaatattgagagaatagaataaatcaaactgaaaactttcccatatgttcggtagtaaagaammaaagaaaaacaaaccttaaaatatgcctttgwaaacacgaagagaagaggaggtcctgagagcccaagatagagtgtktcaaatggcagggggatwatatgaaaatgtgaaatgtgaaaatgagtgaggcacacagtcctccactccatcaacactctctgagatgctgtaaaagggacatattggagctcaagcttaactcagaagtgggaatt

SEQ ID NO: 4001 - DNA, 600 bp, Canis familiaris
  misc_feature (48)..(48): n comprises a, c, g, or t, or includes no nucleotide
actcatccaacatgtgcccttgcattttgactgattatttctgagganagccaatgtgagtgtgtgtgtgtgtgtgtgtgtgtgtgtgtgtttgggtgggcagtggttaataaaacatcttccagtctttggcttcgaggcagggaccagctgtcccaaattaatgtgagattcataggtccaggacctgacataaattagactgagaggaaggagaaggtttaatggaaattgaaagtaaatcccattgcacctgtactgggctttttcatacaatgatgattcccagctgcatcattatgatgactttctaaagtgaacttggcaccctgggttcttttctggggagaatgaggaggcaggtagagacagtacatcatatttttattccattgacaggagaccaatcagttaaaaaaaaatcagtaggttatataaaaagtaattacaattaactctatttaattctgaatgcaaataaaatatccaaataattatctaaatgtatttggtttgatttgatgttagctgggggggaaaacatttaaacttaatctttgcaatacgacacttgggtcatcacaattttgtctatatgtc

SEQ ID NO: 4002 - DNA, 350 bp, Canis familiaris
  misc_feature (150)..(150): n comprises a, c, g, or t, or includes no nucleotide
  misc_feature (163)..(163): n comprises a, c, g, or t, or includes no nucleotide
  misc_feature (192)..(192): n comprises a, c, g, or t, or includes no nucleotide
  misc_feature (225)..(225): n comprises a, c, g, or t, or includes no nucleotide
  misc_feature (240)..(240): n comprises a, c, g, or t, or includes no nucleotide
  misc_feature (304)..(305): n comprises a, c, g, or t, or includes no nucleotide
  misc_feature (325)..(325): n comprises a, c, g, or t, or includes no nucleotide
cggggctcttttcttaatttacatagcaattataacgtaaaattgtgcttatatgtaaagcagagtgaggctgtagactcttcattcgttgtgacagcaaccccttctacactttctggaggcacacacacacacacacacacacacacnccatacaccacanatcatttcctaaacaacccttaggaggcngtattgccactgttgagaactactggagtgganaccaggcgtacccanaaagcatgaggaatgcctccagctgccttcgggcactcctagaaagcatccggttctccaggtnnttacccaatggctctctcanctgcaaaatccaagacgtgcacacc

SEQ ID NO: 4003 - DNA, 376 bp, Canis familiaris
  misc_feature (34)..(34): n comprises a, c, g, or t, or includes no nucleotide
  misc_feature (124)..(124): n comprises a, c, g, or t, or includes no nucleotide
  misc_feature (133)..(133): n comprises a, c, g, or t, or includes no nucleotide
  misc_feature (232)..(232): n comprises a, c, g, or t, or includes no nucleotide
  misc_feature (326)..(326): n comprises a, c, g, or t, or includes no nucleotide
  misc_feature (341)..(341): n comprises a, c, g, or t, or includes no nucleotide
  misc_feature (350)..(350): n comprises a, c, g, or t, or includes no nucleotide
ctctctccttccccctctgcccctccccctgtgngtgcctgtaagctctctcataaataaataaataaataaataaataaatcaataaatagagttttagtccacatccatctcggagtatttntgatggatnaatgtacgtacattgtggttatttttccaattattaagtatagaaatatatatatgtgtgtgtgtgtgtgtgtgtgttttttttttcaaaaactagcanaatttacacatgctgtgtgtggcaagtaactattctccttttgagaagcagctcttggtgtgctattagtactatagtggagagtgggtatatnactacaggatgcaanctggactgntgctcatgaactgagtggtgtctgat

SEQ ID NO: 4004 - DNA, 347 bp, Canis familiaris
  misc_feature (43)..(44): n comprises a, c, g, or t, or includes no nucleotide
  misc_feature (48)..(48): n comprises a, c, g, or t, or includes no nucleotide
  misc_feature (66)..(66): n comprises a, c, g, or t, or includes no nucleotide
  misc_feature (80)..(80): n comprises a, c, g, or t, or includes no nucleotide
  misc_feature (91)..(91): n comprises a, c, g, or t, or includes no nucleotide
  misc_feature (111)..(111): n comprises a, c, g, or t, or includes no nucleotide
  misc_feature (131)..(131): n comprises a, c, g, or t, or includes no nucleotide
  misc_feature (166)..(166): n comprises a, c, g, or t, or includes no nucleotide
tgggctgttcctgctgagagtccagatgtgccagccataaatnnaccntgagggtcctcagtgttntattcctcaccctntcaaagcaganagaattcctttctttggccntgtgttatatcccagaacantggtcacaaagtagtcctccaattccctaggaccnaagtgtgtgtgtgtgtgtgtgtgtgtgtgtgtgtgtgtatgacattcctttaaggtttgtttgtttttcagtctcattccctagtatttggatatatattcttacattctaggctacaaaataactctgattagcaaaaatagtgtctattctgacaattagggcattagtagtttgtcct

SEQ ID NO: 4005 - DNA, 324 bp, Canis familiaris
  misc_feature (8)..(8): n comprises a, c, g, or t, or includes no nucleotide
  misc_feature (48)..(48): n comprises a, c, g, or t, or includes no nucleotide
  misc_feature (52)..(52): n comprises a, c, g, or t, or includes no nucleotide
  misc_feature (56)..(56): n comprises a, c, g, or t, or includes no nucleotide
  misc_feature (58)..(58): n comprises a, c, g, or t, or includes no nucleotide
  misc_feature (88)..(88): n comprises a, c, g, or t, or includes no nucleotide
  misc_feature (96)..(96): n comprises a, c, g, or t, or includes no nucleotide
tgtttatnataatcgctctgctcatccagtttcacacataagtgccanatanaatntntctccacatcattctctctctctctctccngtctctanacacacacacacacacacacacacacacacacacaagcctcatggctaaatgagcacagtgcagaggcaaagtaaaaggtgatgtctttacaggatattaagaaggaaagaagggcaagactcccttgggctctcagtaatatcctatttatataaagtacagccttttttcttggctaaagagaaaagtcagacacacagcattaatatttcactttctgtcctcta

SEQ ID NO: 4006 - DNA, 857 bp, Canis familiaris
tctgtgatttgctgagaacatcggcctctccactgaaaaggaaggatcagattcagaggatttctaggctctcttctcaactgaaaacattatgattcagtwattctcagcaatggacagaaaccactaaacttattttcacatttttcagacttgtgttgggaaaataaatccagaagtyccagcttgtgaaattaaaaggagggtgaatttacctgactactcacccaggcacatgcacctcacacacacacacacacacacacacacacatacatgcacacacactctgctcccctaacaagatgccaatagtactgaaactcaccagaactgcaagctgtragagtaaaagacacaaaggctgaggatgacgtgwgcagtmaagcctgtcgagggaactatctaacagactgaattttaatatgatagactacaggctaccaaggacctacctacatttgaaagccawgtgtcagagagagacagagtacgtgtatttttctgtaaagtagtgggtagtgtctttaaaacggttytctctgtgtttaaattgagatgattctatttctcccatgcatcaagttatttttaagttcagaatttcagagggtattatccttaattgagacattcacttttctacttkttctctttgtcctaaaaaacatctctaggracaagtatgaagtgacttttctgtttcttttttatttttttaaatattttatttatttatcatgacacacacacacacacagagagacagagagaggcagagacaacaggcagagggagaagcaggctccatgcagtgagcccgacatgtgactcatcctgggaatccaagtcctcta

SEQ ID NO: 4007 - DNA, 963 bp, Canis familiaris
gggggcacttatatgtaactgtatttttgatactgatggcaagcccacatgctggggtrggacagatatcattctttccttttatattggccacctgaggctcagcagaacttgtgttttatcttggtcacactggaaagagcaaggccagggcgggaatacagattttgcaaacctagtgtagttctctcgtycctcctctcacttgtcctgcaggctggaatattcatatcctaaagttgtagtgacatgtkctttcacaaaggtaggtattcagaggatgtwaatttcactgtaggatttttagggggtaatcaaatgatttaaaacattgcttcatataaacaaataatagacatattaagggaaacaattcaaattttccatgacttcaaaagagaatacttgaaagattgactctagaacaaacattccttttagctcttcctttcttttctcatccctctcaccagacacacacacacacacacacacacacacacacacggagctgaagacaccatttagcccagaagaggacccaggrattacacacaatwataaaaatacaaagaaaaaaawataaaaaaggaaatgaaaaaaatgaaccctaattgcctgacagggaatgattgctatttgggtgtagggtatcctgggaaagacagaacataagggagggaagcctgaggtaactctaactgccacaaaagaaaataaaggtaaataagtaacgacaacaataaactaatggacattgttgtatgccaaatgaaattagcataacaaagctttcttcctgttagcaaagaggcagtgaaggacatgtctgattttgcttgtctgtttcaatcccctgtttacaaatgggaaatctactttttttcacataatcttccctttttatgaaatgccagtcagttgccatttaaaaaagaggactatttgagaaagagtcctcta

SEQ ID NO: 4008 - DNA, 482 bp, Canis familiaris
  misc_feature (14)..(14): n comprises a, c, g, or t, or includes no nucleotide
  misc_feature (56)..(56): n comprises a, c, g, or t, or includes no nucleotide
  misc_feature (65)..(65): n comprises a, c, g, or t, or includes no nucleotide
  misc_feature (68)..(68): n comprises a, c, g, or t, or includes no nucleotide
  misc_feature (71)..(71): n comprises a, c, g, or t, or includes no nucleotide
  misc_feature (76)..(76): n comprises a, c, g, or t, or includes no nucleotide
  misc_feature (79)..(79): n comprises a, c, g, or t, or includes no nucleotide
  misc_feature (87)..(87): n comprises a, c, g, or t, or includes no nucleotide
  misc_feature (121)..(121): n comprises a, c, g, or t, or includes no nucleotide
  misc_feature (345)..(345): n comprises a, c, g, or t, or includes no nucleotide
ccaattcccatagnttggtgagcactgtggggagaggacacacagaagaggagtgngaagggaanatncantagtnttncaccctgngaaccaggcagtctgttcccacatatgtgccccnggctagtgtgtgtgtgtgtgtgtgtgtgtgtgtgtgtagcgggggctgggctggtgcacagctgcctcctgactgggcaatgtttgcccatttccaaagcagtcatcatgcgcatccgtggctcttgtctagaggctggggatgatggtatagctgggagtggaggcgggtactgctcatggccagtggtctcagccacaggaacatttccttgggccgagggnggcccagggcctctttgatgtgttgggtggtactgggtctgcctggaccccagccacagatggcagcccctgctgtcactcagagaaaatagctattgagcatgtggcccattaggtaagaagcagagaaagatcct

SEQ ID NO: 4009 - DNA, 360 bp, Canis familiaris
  misc_feature (46)..(46): n comprises a, c, g, or t, or includes no nucleotide
  misc_feature (71)..(71): n comprises a, c, g, or t, or includes no nucleotide
  misc_feature (80)..(80): n comprises a, c, g, or t, or includes no nucleotide
  misc_feature (89)..(89): n comprises a, c, g, or t, or includes no nucleotide
  misc_feature (114)..(114): n comprises a, c, g, or t, or includes no nucleotide
  misc_feature (121)..(121): n comprises a, c, g, or t, or includes no nucleotide
  misc_feature (125)..(125): n comprises a, c, g, or t, or includes no nucleotide
  misc_feature (140)..(140): n comprises a, c, g, or t, or includes no nucleotide
  misc_feature (156)..(156): n comprises a, c, g, or t, or includes no nucleotide
  misc_feature (162)..(162): n comprises a, c, g, or t, or includes no nucleotide
  misc_feature (271)..(271): n comprises a, c, g, or t, or includes no nucleotide
tcctggttgttcccagaccaacttcctcagcagaggggccagggantgggggccaagtagaatgtgtcacncacgtgtcnagaaccctntcccgttttatggggtttgagagcngcagacntatntgccatctgtcccgntaggaggttttagatnttgtgnactaggttgtgtgtgtgtgtgtgtgtgtgtgtgtgtgtgtgtgtgtgtttggatgtactgctttcctcctttcatgctccttcagaaacagactatccttcctgttgtngccgataggccccaaccatcgcctacaggtgaggcctcctatatgtgttcgtacctcccctgcattatggctgcatttttgtcttgctt

SEQ ID NO: 4010 - DNA, 375 bp, Canis familiaris
  misc_feature (45)..(45): n comprises a, c, g, or t, or includes no nucleotide
  misc_feature (94)..(94): n comprises a, c, g, or t, or includes no nucleotide
  misc_feature (100)..(101): n comprises a, c, g, or t, or includes no nucleotide
  misc_feature (205)..(205): n comprises a, c, g, or t, or includes no nucleotide
  misc_feature (335)..(335): n comprises a, c, g, or t, or includes no nucleotide
caatctggtttgaggtgtgtgtatgggagcggagttaagagacanaaggcgtttacttcctggagcttttgtttacaacagtgtgcatacacanacgccnntgtgtgtgtgtgtgtgtgtgtgtgtgtgtatagctatagatacggaaactattttatttttctttatcatagggggaaaaaatccaccatagttcaccaaccanggccaaggtcaagatgtctaaccaaattataaaatgtaatatttgccacaactcctccaacataaacagatttaaaagacatgcagtttcgaattaggtggctgcttgcaaggctgttttaatgtgaggntgcccgcagcatcctggtaaataccctcatcctgtcctct

SEQ ID NO: 4011 - DNA, 894 bp, Canis familiaris
  misc_feature (806)..(806): n comprises a, c, g, or t, or includes no nucleotide
cggggcatccaaaggggcaccttcacctcaatgtttatagcagcaatgtccacaatagccaaactatggaaagagaccagmtgctcatcaacagatgcatggattaagaagatgtgatacacacacacacacacacacacacacacacacacacacastggmatactacacagccawcaaawrtgawctcktgtcatttgcartgatgtgkatggaattagagggtattatgctgagcaaaatawgtcagtcagagaragacawttmwcatatgmyctcactcatatgtggaatttaagavacaamasagaggagggagaaaggggaagagaggaaaagataagatgatmtctgagagggaggcahmccataagagaccctgaactctaggaaacaaactgaggggtactggaggggagggaggtggggctatgggatacctgggtgatgggcattaaggagggcacatgatgtaattagcactgggtattatataagactgatgaatcactgaactctacctctgaaaccaataatatatgttattaattgcatttcaataaaataaaaaatgttcactggcactatgtatattaatgtaacacaatgtttatttactcaagttttcagcttgtattgcctggtatgcttttgtaagaagccaatttttgcgtattgttacagtttcaggttgaagatggaaatgtaatttggggagccatcaacatatagatggtaattaaaggtatgcaactggaaaatattacctggagaataagtgtagatgaaagagaggtggtccaganacaaagtcctatatgctcttaggaaaatggagatattggggcaattgagaattgcttctaggattaagaggttttaagttagtcctct

SEQ ID NO: 4012 - DNA, 520 bp, Canis familiaris
  misc_feature (32)..(32): n comprises a, c, g, or t, or includes no nucleotide
  misc_feature (408)..(408): n comprises a, c, g, or t, or includes no nucleotide
  misc_feature (482)..(482): n comprises a, c, g, or t, or includes no nucleotide
cggggatccaggcacttactgtcgtttgccangagggccccagtgctactcgctctgggtggggggtcggaggaaagctaagggcagcctcagtggatgctcctcaccacctctagaatctccccctctccccaaggtccaccaccagttgcctgggtccttctgtctctgctctcagctaaatccccatagaggccactttgggtttttctgagctggtctcccccacaccctgccctatcccataacaaactccaattccccaaaagtggagatgggaagcttctcctgattcaagcctcccagatgctcccgggttatctgattccactcccgagtaggggctatgttcacagtttggggctgagcagtgctggtacccaccccccaacacacacacacacgcanacacacgtgcacacacacaacttcagtgagagcaacctcctacatgcatatgaacacacacgtgtgcaaacgtntgcacacacatagagaacacacctgcacagacacctta

SEQ ID NO: 4013 - DNA, 617 bp, Canis familiaris
cggggatcgatgcccttataagaagggcatacagacacgtagacatacagggagactgtcatgtgaacatagagagaaattaaagtgagaccgccactagccaaagattgccagtaaccaccagaagctaagagagagacttaggacagattctagctcagagcctttggagggttgtggccctgctgacactttcatttcacactgtaacctccaggactgtgacatatcaattgctgttgcttacacacacacacacacacacaccctccccccatttgtggtattttgtcatggcagccctgggaaactcatatggtgcccagtctccagaatatgaaagtawgtactttaaattacacaaaagcacatattaactttctcttagataatgaaatgaagggaggaaaaggctacttgtcacagtgacatggcaaatatagaccagagactggattagagattggtcattctaacattkcamggcgggcataactataaaaggatgaaagtttcaactaagacactgagattgatatcacattttattttattttatttttaaagatttcatttatttgacatagagagagaatcagaaaggcacaagtgagggg

SEQ ID NO: 4014 - DNA, 310 bp, Canis familiaris
  misc_feature (21)..(21): n comprises a, c, g, or t, or includes no nucleotide
  misc_feature (25)..(25): n comprises a, c, g, or t, or includes no nucleotide
  misc_feature (127)..(127): n comprises a, c, g, or t, or includes no nucleotide
  misc_feature (288)..(288): n comprises a, c, g, or t, or includes no nucleotide
atagtaggtgctcaggaaatngcanatgtgcagaggtgtgttcagggcatcttagaggacaacaggcaacttgtgtgtgtgtgtgtgtgtgtgcacgtgtgtgtttggcaattccagcacaaatatntcaagtttctatagctctcacatgagacacgcggttgaggcaggctggaaagcatggcacacgataactaacgtggacgtaggtgtccagttgttctagacggtgagccaaggcattcctccccacacagacaagggctttttctcctccagcaagtcaantgctcaggccgggacctctaga

SEQ ID NO: 4015 - DNA, 759 bp, Canis familiaris
  misc_feature (122)..(122): n comprises a, c, g, or t, or includes no nucleotide
cctcatttgggaatgacacattaggatttgttgtgcctgctggactaggagctccctggcacctggcacagggtctggttgtggtgggcactgaataaatgtttgccaaattgagggttggnaaggaggaagtagagyaatgaggagagggagtactgaccttcaagagtctgaggacggtggtcttcagagcactgtggccctgggtagggacagactatgggcatgaggcacctatgaggctcctgtacaccccactaccagttccccatcatctccctctggcctggctgagggtggtcatgaacctctcctgtccatagttttgtgcagagtctgggggtgccacctggcagtcttatgatgatccctgagcttcagctcgagactcctagtagtgtcagttccatacatgggatgtgtgtgtgtgtgtgtgtgtgtgtgtgtgcgtttcagaattaagtttgagacctgacatttghacaacaccaatttatgargttctagamaggaggaacctgggcaagaggttctagggtggtcggtcttgagatttgtttattgggtgaaattgttctgggcatttatggcagataatcactttatagtctcactttataataatcacggtaatgatttattgagttttcatctgacacagtacaacattaagatggtagccgctctatctcgcttaacctgaatggtcatctcattaggttggcattatcatctccatgtaacaagatgaacaaactg

SEQ ID NO: 4016 - DNA, 217 bp, Canis familiaris
  misc_feature (87)..(87): n comprises a, c, g, or t, or includes no nucleotide
  misc_feature (110)..(110): n comprises a, c, g, or t, or includes no nucleotide
  misc_feature (151)..(151): n comprises a, c, g, or t, or includes no nucleotide
  misc_feature (204)..(205): n comprises a, c, g, or t, or includes no nucleotide
tacccaagcacaacatggtgacgagaaggctgtgccttctgtgtgtgcatgtgtgtgtgtgtgtgtgtttgtatgtgtgtgaaggangtgtgggagcttggtagggtganggtgcaagggccataaacctacttgtggcgaatggataaanaatatggatgacttggaatttgaggggccatttaattgtggaaagaataaaannctcacctattat

SEQ ID NO: 4017 - DNA, 420 bp, Canis familiaris
  misc_feature (23)..(23): n comprises a, c, g, or t, or includes no nucleotide
  misc_feature (29)..(29): n comprises a, c, g, or t, or includes no nucleotide
ttcaagccgttctccatgattgnttccangctgtagtgtgagaggctgctacagtgtttaagggctgtgtgtctgtgtgtgtgtgtgtgtgtgtgtgtgtgtgtgtgtgtgtatgggcatgcccggtgtttgtataccccagactgtcagctttgatcctttcatttttcattttggggttctttatcatatttacttgaagaaagccccccccctccccacagctcataatagctcaaaaattagagtttagaaaaatagatgaacttaacgagcagtggttctcccaacagtgtgagcactgagcagtgaattttgaggtaattctccttgacaagtacgcagggggcagctgccctggactgctggttaggtacaactccatatgctttaacagttggtagagctggaggtggtact

SEQ ID NO: 4018 - DNA, 683 bp, Canis familiaris
  misc_feature (612)..(612): n comprises a, c, g, or t, or includes no nucleotide
taccctgctaatgtttaagataagcaaggatgtacttttatggggggaaaaaaaaaccacattaaaagcaaaagaaaagatttcttcaatctcgtctttgctccaaaggaagtaaaaagctacagaatgmccaggattagcaaaatctatttccaaaagaaagacacactgctggtaatttgacagcccattatgatgtataaggaaggttagcatcttaaggacaatggttcaagatgtgaggctatctttcatttaatggacaagtactacttgataaatgatcaagctactccagtgttytttgccaggatgtytcatttcccytagtaaaggaagacagctgtccggggatataaatctttgattattcccaattccttaagtttacragaattaaaaaaaaaaatgtttcagatctgtgtcaattactttgaacattcatwtaccttcctgaatgtggcgctagcctggtaaattctcacacacacacacacacacacacacacacacgcatcacgcaggcgcgcgccaccctgcatctcatctaagaagaagaaaagcaacaaggacaaaccacagcctccatacatcaaaagstgccagcacttncagcgcacggtcaccaagctcgcaggcactcccaggtcgtcccgcacacactcagggggtcctctagagtc

SEQ ID NO: 4019 - DNA, 839 bp, Canis familiaris
ggtccaaagagaggccaaaatatctcaattgggaccttgggtattttgagcattcactgggtattacctgaaccctaccaggtcatttattcactggtttgttcactcacttattcattcgttcattcaacaggtgtttactatgggcctaacatgtagctgctcatcatagcaggtacaaaacaaattcctgaacaagattaacagactgcttcaggtaatgattgacattgggccagttactcaatttactcattggtgagatgagtataatagtagtacttgcctcatagatatgtgggaaggagtgaattaatacatgtaaagtgcttagaagactacttggaaaatgggaaattcagtaaatactagctgctgcttagtattaatagaaggccatttgggtgtcaaattaggaattgttatttccaggagattatcaattttttccattctccccccacacacacacactcacactgacacccacacacccacacacatacwcacacacacacacacacatacacacactttggtcagtgcaaaatcataggatttaaagtagctcaacttttccagaccttaaaacttcagagccttgtccttttccttcccttatacatctcacataagattcttctgtttcagaagattctcattcatattccttcctttaattttagcaactgtagaattcctgtatttgttcagtcgttttattctcatacttgttgctatctccttgcacttgcttctttaacacctacaactggaaacagtttaaaagatggaaacagaaagtcctggataaaattctccaccttctaccttcacca

SEQ ID NO: 4020 - DNA, 300 bp, Canis familiaris
  misc_feature (253)..(253): n comprises a, c, g, or t, or includes no nucleotide
cggggatctctccatttaagtcttttatttcactcagtaatgttttgtggcctctgtatgtgtgtgtgtgtgtgtgcacgtgtgaagtatatgtgtgatgtctgtggtatgtgtgtgtgatatgatttcttttaagttttaatttaaattccagttagcttcaggtgtatgatatcttccatgcatcacctggtgctcatcatgacaagtgcacttctcagtcgtcatcatttatttcccccactccccctcncaactcccctctggtgaccatcaatgtattccctgtagttaggagtc

SEQ ID NO: 4021 - DNA, 479 bp, Canis familiaris
  misc_feature (84)..(85): n comprises a, c, g, or t, or includes no nucleotide
  misc_feature (92)..(92): n comprises a, c, g, or t, or includes no nucleotide
  misc_feature (130)..(130): n comprises a, c, g, or t, or includes no nucleotide
  misc_feature (137)..(137): n comprises a, c, g, or t, or includes no nucleotide
  misc_feature (163)..(163): n comprises a, c, g, or t, or includes no nucleotide
  misc_feature (187)..(187): n comprises a, c, g, or t, or includes no nucleotide
  misc_feature (220)..(220): n comprises a, c, g, or t, or includes no nucleotide
  misc_feature (227)..(227): n comprises a, c, g, or t, or includes no nucleotide
  misc_feature (229)..(230): n comprises a, c, g, or t, or includes no nucleotide
  misc_feature (232)..(232): n comprises a, c, g, or t, or includes no nucleotide
  misc_feature (242)..(242): n comprises a, c, g, or t, or includes no nucleotide
  misc_feature (248)..(248): n comprises a, c, g, or t, or includes no nucleotide
  misc_feature (262)..(262): n comprises a, c, g, or t, or includes no nucleotide
  misc_feature (280)..(280): n comprises a, c, g, or t, or includes no nucleotide
  misc_feature (282)..(282): n comprises a, c, g, or t, or includes no nucleotide
  misc_feature (286)..(286): n comprises a, c, g, or t, or includes no nucleotide
  misc_feature (310)..(310): n comprises a, c, g, or t, or includes no nucleotide
  misc_feature (315)..(315): n comprises a, c, g, or t, or includes no nucleotide
  misc_feature (362)..(362): n comprises a, c, g, or t, or includes no nucleotide
  misc_feature (377)..(377): n comprises a, c, g, or t, or includes no nucleotide
  misc_feature (391)..(391): n comprises a, c, g, or t, or includes no nucleotide
  misc_feature (404)..(404): n comprises a, c, g, or t, or includes no nucleotide
  misc_feature (434)..(434): n comprises a, c, g, or t, or includes no nucleotide
ccgctgagccaccagggattccccaccgacctcttcttaaatacacattccatacacacaacaccactcggtgatgctcaccannacatgtntctgcagacacaagacatgtccatcagcatgcagatgngcacgtncacatgctaggcacagcagtgtgtgnccactggatgtcaatgcaggtgtncacacacacacacacacacacacacacactggnacacacnannanatgtacacanacacanagcgtcccacatgngcatgtgcacactagggnanaganatctgcactcccaccagagcacangggtncgcacacactggcacgcgtgtttgccagcacccaccctgagctattngccgtaagactgggnttggccacaggctntgtccacagtggnttcacttggctccgctgccttctgcctggngcaggttgctctggccattctgcctcctgtgacaacaggtcgcaa

SEQ ID NO: 4022 - DNA, 817 bp, Canis familiaris
tcttcatggtagcagtcatgaagggtaggagacagagagtggccggcctgcaccgagcaccttggctttcarcctcagtgatgggagccattgaagagttatatctggtttggcttggtttcccattttaaccgtttttaagtgtacagttcggtggcattaagcacattcacaaagtggtgcaatcatcaccgctaatcatttccagaactttccatcatcccaaacagaaactctgtccctattacacaataactccctatctcccctgctccccaactcctgagaacctctgttctacctctgtctctgaatttacctattctaggkacctcacagcagtgggagtsatgcacaacatgcgtatgtgtgtgtgtgtgtgtgtgtgtgtgtgtgtgtgtgtgtgtgtctggtttattccacttagcatartgtcttcataarggckaatccatagtgtagcttaaatcagaatttccatcctctttccattgcactcatagaccacgttttgttcatacattcatctgttgacactggggttatttctgccttattgtgaatagtgcygcagtgaacattggtgtgtcatccgaggggttttaggcaagtaaggaactggcttcccctcaggaagacttgtcttaaagctgagctgaggatgcatttaagagggacaatactggaaccagagaaagcaatgatgagactatgaagcagccaaattaaggaaaaaatagagcgccgtcaagaccaatgccatggacccgctaacaattctcaggtcatatcaccacattccagaattgtccagcct

SEQ ID NO: 4023 - DNA, 834 bp, Canis familiaris
cggggatctcagggtcttggaactgagcctcacatcaggctctgcactcacccagaggtctgcttctccctctccctgtccccatgctcatacacacacacacacacacgcgcgcgcgyacacacacacacacacayatattctttctctcacavataaataaataaamayttaaaaaaaagaactaccagtgacaaataatttttcttcttccatttttttgcctctgggcattttgtctgtaaatgatttttctactaaaaaaagtgatataaaatatgatataaaaatagtaacggtatgtagttaaatattaacacattatgcattctatatgtcaacacctaattcacagaatagttgctaatttgtgtatctatggtgtgaagcagatacctcttgawtttctacctttaattttggagtgcacctaatttcttgaatatggtaatggtgggtagattttagacctaatggctcccttcwcatttaaatatatgccacctacttttgcttttagaattcttaagtgttgcttacttttgaagaaggaagacacaagtcattttttcgtawcatgctcacttcctaaatgttgtaaatcactgaagaaaggaacaattgtatcctgtacatttattctttgtgcccccaaatwacaattctcagcacttcatacatgtcagtaccccagacaatcacacactttcctcatctgtctgaacattttcttactattcatttaccaattcaacaaacatccagtgagtgtctactgtggataaacactacaaggcaggtaagaaagacagaaatggaaaagagacaccagtt

SEQ ID NO: 4024 - DNA, 894 bp, Canis familiaris
ggcatctgctgagccctaggccccagctcatcacccactccctagagctagatcctccctagcacctggcaaatgagggaaccctccactctcaactactatgcaaaatcattataatatcaggtgagttcaagggatccaggcagggaagccagattccaggttgggaagaggaaatctgacctacagyaaagcatccctttgatctcggagccactctgtttctaagtcagcaggtcttcctgattctgcctaaagagttgaggcccctccgtcttattctcagctcttgaatgtgggktgacagtggattcatttccctagagggcagtgtgtatgtgtgtgtgtgtgtgtgtgtgtgtgagacactattcttkagcacatgtgcagtttcwcagctcagcccaggsctcggaaccctgccttacttacttttgctcttttgcccattgctccatgttggacataatctgatcattctctcggcgtatcctacagctctytttaggcgcagaccgctggggcaggcaacaaggctttggtacaagaagaaaatgagatggttagaggtgggagadcataggcctgtcacctccctattccaawatcagkcctcttctctcttcctggaagaagaaacattggttctgctgtccaacccctaggccagagttggaactgccacagcaggatctccaccacccgcagtgcgtgcacacaaagktgacatctctggrcagggcactgtttattgtagagacaaagtagttgcgtatacttacaatgatgatttttgggcaaaggtactaagacagcatgttttgcaaaagcggtatgttaaatccgttttttaacagatggaaggaaaaatatcttgaggaatggatgcctttt

SEQ ID NO: 4025 - DNA, 530 bp, Canis familiaris
cccctgctgaggaggaaagggcagtcctggcccataaggaccacaggttttgtgtgtgtgtgtgtgtgtgtgtgtgtgtgtgtgtgtgttgggagggggcaggatgyattgmcaggtgmragcaaaatacagagcagsacaggacttggggaagtccaaggtgatggggccccgaggagagaagaggctcaggtgtcaatcaggagggccttaggaaggaagctgctctggaggagggtgtgtgaacaccaacaacagtacagtcatgtgagcatgttgggcccggcctgggaaggccgagggccargctagagcatggacctcattctctgggtgctgcggagccagtgagatgttgcgttcagacagtaaactgagcacagatgcattttagcaacatcactctggttgtggaaggccagacctgtgattacaaatggtatcttgggttttgtctagacttttaaggcaagaattaggttggagttggtaatcaagtggagggagaggcccagacttgttgtttttct

SEQ ID NO: 4026 - DNA, 368 bp, Canis familiaris
  misc_feature (36)..(36): n comprises a, c, g, or t, or includes no nucleotide
  misc_feature (271)..(271): n comprises a, c, g, or t, or includes no nucleotide
acagactcctcgatgtcgaggatgttggtgcaagantcaatatccccaaggactctgagacattggacttcaaaggcctttatcactccaggctactgttgcctttctaaggtgtttgaaagtgagagtttaagaagactcaaaaataaacaccgaagtgttattttgcttctaaaaatgatgtttagaaacttcacagcaaaatattaagttccacgacagataacaatgaaggaggttcagagtaaagaaattttctcatgataaaganacacacacacacacacacaacatctatcatccttttcttgctcaccagaagggaagaatgagccatggtagcgtaatagctccttagggaggaaatc

SEQ ID NO: 4027 - DNA, 298 bp, Canis familiaris
  misc_feature (82)..(83): n comprises a, c, g, or t, or includes no nucleotide
  misc_feature (96)..(96): n comprises a, c, g, or t, or includes no nucleotide
  misc_feature (100)..(100): n comprises a, c, g, or t, or includes no nucleotide
  misc_feature (109)..(109): n comprises a, c, g, or t, or includes no nucleotide
  misc_feature (118)..(118): n comprises a, c, g, or t, or includes no nucleotide
  misc_feature (121)..(121): n comprises a, c, g, or t, or includes no nucleotide
  misc_feature (139)..(139): n comprises a, c, g, or t, or includes no nucleotide
  misc_feature (149)..(149): n comprises a, c, g, or t, or includes no nucleotide
  misc_feature (160)..(160): n comprises a, c, g, or t, or includes no nucleotide
  misc_feature (165)..(165): n comprises a, c, g, or t, or includes no nucleotide
  misc_feature (168)..(168): n comprises a, c, g, or t, or includes no nucleotide
  misc_feature (175)..(175): n comprises a, c, g, or t, or includes no nucleotide
  misc_feature (180)..(180): n comprises a, c, g, or t, or includes no nucleotide
  misc_feature (185)..(185): n comprises a, c, g, or t, or includes no nucleotide
  misc_feature (191)..(191): n comprises a, c, g, or t, or includes no nucleotide
  misc_feature (195)..(195): n comprises a, c, g, or t, or includes no nucleotide
  misc_feature (202)..(203): n comprises a, c, g, or t, or includes no nucleotide
  misc_feature (215)..(216): n comprises a, c, g, or t, or includes no nucleotide
  misc_feature (225)..(225): n comprises a, c, g, or t, or includes no nucleotide
  misc_feature (229)..(229): n comprises a, c, g, or t, or includes no nucleotide
  misc_feature (233)..(233): n comprises a, c, g, or t, or includes no nucleotide
  misc_feature (235)..(235): n comprises a, c, g, or t, or includes no nucleotide
  misc_feature (237)..(237): n comprises a, c, g, or t, or includes no nucleotide
  misc_feature (274)..(275): n comprises a, c, g, or t, or includes no nucleotide
  misc_feature (281)..(281): n comprises a, c, g, or t, or includes no nucleotide
  misc_feature (290)..(290): n comprises a, c, g, or t, or includes no nucleotide
cattcttttcaattctagcttctctgcattaaacacacacacacacacacacacacacacacacacacacacacacacgcanncctctctttttanttanacagttgtntccgtgatntgncccctacaggtagacggntggattggcnggtggctgacnccagncantgaaganctgcncatgntgtggntggntgcattnntacagctatganncatataaantganatgngnanatttactctctttacagcctcccctttacactctganngttccncatttcttntgctgttt

SEQ ID NO: 4028 - DNA, 402 bp, Canis familiaris
  misc_feature (83)..(83): n comprises a, c, g, or t, or includes no nucleotide
  misc_feature (275)..(275): n comprises a, c, g, or t, or includes no nucleotide
  misc_feature (288)..(288): n comprises a, c, g, or t, or includes no nucleotide
ttgggctgaaaggtgtccttcagcaccataactcttcccgtttcctcagctccagacggagtatatcccagggtccacacggngctttatttaaatgctcacattagcagaaggacggggatcccattgaatcatcatctcctgtcaaagagccaagagttgttcagaaggagaagtttttcccaaagaggctaaatccctagtactaattagtggtggtggtggcagcggtggtagcggtggtggtggtggtgtgtgtgtgtgtgtgtgtgtanatggtggtggcantcctgtgttccactgttttaaaataggagcagtctattttgctcactgtctgagccatagggtgagtaaccttgacccctaaaaccctccatgggtgtcatgtgtgtgtgagtc

SEQ ID NO: 4029 - DNA, 260 bp, Canis familiaris
  misc_feature (19)..(19): n comprises a, c, g, or t, or includes no nucleotide
  misc_feature (27)..(27): n comprises a, c, g, or t, or includes no nucleotide
  misc_feature (41)..(41): n comprises a, c, g, or t, or includes no nucleotide
  misc_feature (53)..(53): n comprises a, c, g, or t, or includes no nucleotide
  misc_feature (75)..(75): n comprises a, c, g, or t, or includes no nucleotide
  misc_feature (108)..(109): n comprises a, c, g, or t, or includes no nucleotide
ttgtgagcggataacaatntcacacangagacagctatgancatgagtacganttcgagctcggtacccctcccntgggtttcgttaagggaggaagttatattcagnnacacacacacacacacacacacacacacacacacacacacacacacacagtctgtgccctccaaactctaaactatgaggttttattttcagaataagtacttccataagtacagaaattctggacagtaagaggacaataaatacggggt

SEQ ID NO: 4030 - DNA, 500 bp, Canis familiaris
  misc_feature (270)..(270): n comprises a, c, g, or t, or includes no nucleotide
  misc_feature (276)..(276): n comprises a, c, g, or t, or includes no nucleotide
agaaagccaagcactataaaaaaaactgtacagagaaaataataatcacctaaaacccaccacccagaattaaatattaacaaccttcctgatatctttctttttatacacatgcacacacacacacacacacactcaatcgtacgtgtatataagataatataccataaatactgtttgtagcctgctcctatttttttttaagatttccttatttcttttagatagaaagagggagagagcaccagcaggaggagcagagggggagantcccanggagtctgtacacggagcagggaacccggccgaggctcaatctcacaaccctgagatcacaagctgagctgaaactgagacagatgcttaactggctgagccactggggtacccctgctgcctggtctttattcaacaatacacaatatgcattgttgtagaatgaactccatgacatataactgagtgagagaaaacactgtgagcgtactaagaactcacac

SEQ ID NO: 4031 - DNA, 724 bp, Canis familiaris
  misc_feature (38)..(38): n comprises a, c, g, or t, or includes no nucleotide
tttccccatgattgttttcagttaaaatgttcgttcangttaaatacaaattgtgtttgttatactaagctgaaatatgacaatcagtgtctgytcaagtttaactagagacacttctgtgcacaaagtcaatgtttcagggtatttgcttctcatctctcttcctgtttctctgcagttccagcttcatcactgagtgagggttgtttccaggaaaggacctkatccatctgtgcaacgtcctggtgatgayccaggagtggagagctctgtgctagaaagaagagctgaatgagaattctccatcactcttgcttgaggtgcacctgaagattttaattattcatgctaccagaattggttccttcttgtkagatggatastgccaataattacctttccttatatctttagagttctattttccaagaaataagatacttgagttgtttgaaccctgccaagggataatgtggtaagaraaaaaatgtaggwattttggarggagatmtgtacmtccytccygtacacacacacacacacacacacacacacacacacacatataargyatattatataactctttcatgcttccagctttctagagcttaattttttcacttgtgaaagggccatagcaactatacaaattgataaaatgtgtatagagcatttatatatactaccatatgagtaataggcatttaataaacattaaatg

SEQ ID NO: 4032 - DNA, 289 bp, Canis familiaris
  misc_feature (153)..(153): n comprises a, c, g, or t, or includes no nucleotide
  misc_feature (160)..(160): n comprises a, c, g, or t, or includes no nucleotide
  misc_feature (195)..(195): n comprises a, c, g, or t, or includes no nucleotide
  misc_feature (198)..(199): n comprises a, c, g, or t, or includes no nucleotide
  misc_feature (215)..(215): n comprises a, c, g, or t, or includes no nucleotide
  misc_feature (220)..(220): n comprises a, c, g, or t, or includes no nucleotide
  misc_feature (224)..(224): n comprises a, c, g, or t, or includes no nucleotide
  misc_feature (235)..(236): n comprises a, c, g, or t, or includes no nucleotide
  misc_feature (240)..(240): n comprises a, c, g, or t, or includes no nucleotide
  misc_feature (246)..(246): n comprises a, c, g, or t, or includes no nucleotide
  misc_feature (251)..(251): n comprises a, c, g, or t, or includes no nucleotide
  misc_feature (260)..(260): n comprises a, c, g, or t, or includes no nucleotide
ttatatgggtatttgtctttttctgtcctcacttagcattatatcctctagatccatccatattgtcataaatggcaagattttctatgactaaataatattcctctgtgtgtgtgtgtgtgtgtgtgtatgtgtgtgtgtgtgtgtgtgtantacatcntctttttccattcatctgtgggtggacactttggntgnntctataggttggctantgtanatantgctacaatanntatngggtgnatatntctttttanttagtgtttttattttctttgcataaata

SEQ ID NO: 4033 - DNA, 339 bp, Canis familiaris
  misc_feature (17)..(17): n comprises a, c, g, or t, or includes no nucleotide
  misc_feature (26)..(26): n comprises a, c, g, or t, or includes no nucleotide
  misc_feature (69)..(69): n comprises a, c, g, or t, or includes no nucleotide
  misc_feature (85)..(85): n comprises a, c, g, or t, or includes no nucleotide
  misc_feature (115)..(115): n comprises a, c, g, or t, or includes no nucleotide
  misc_feature (154)..(154): n comprises a, c, g, or t, or includes no nucleotide
  misc_feature (159)..(160): n comprises a, c, g, or t, or includes no nucleotide
  misc_feature (171)..(171): n comprises a, c, g, or t, or includes no nucleotide
  misc_feature (327)..(327): n comprises a, c, g, or t, or includes no nucleotide
tacccatctattcagtnagagatgtnttggcagagtatagaaaatctcatctctgctctgggtcagcantactatgtgctatttnttgttgttttcaaaatactcacacttcccnacttctttctcaccccaggatgtattggtcaagggaccnaccanngtatattttanaaaatatttgtgggctacacacacacacacacacacacacacactcatatagacatatatagacatattcatctagacatatatacacatagtcgtgcatatttcaaagcttaagaaccattgacatacttaaaaaaattccctgcagaaaagggncctctagatcgc

SEQ ID NO: 4034 - DNA, 424 bp, Canis familiaris
acattgtattcagagcttttgaagttacacagttcaaaaaaaggtaaaaacttaggagttttctccatttttctgaggtgttttccatgattctcacaaggtgaaaaactgttttatttgatttactgggcattatttctactttgtcatgctggacaactataaccatatagttagcatggtgcccagaatttagtaggtagtcagctagatttttgtttttaaatgaatgttcaggtggtctataacagaagccatcttttggtaaatgaagtgctcagttttgaggttctcttctggttgatatgaaatctgccatgactttatagatatatttgaggggaggatggaacagtgttgtgcgtgtgtgtgtgtgtgtgtgtgtggtgtgtgtgtctgtcttattaaagacaggcatgtctat

SEQ ID NO: 4035 - DNA, 453 bp, Canis familiaris
  misc_feature (241)..(241): n comprises a, c, g, or t, or includes no nucleotide
  misc_feature (287)..(287): n comprises a, c, g, or t, or includes no nucleotide
gcctttagctgaagatggtatttaagttggtggcttaggttaactaggagagttactcatttttcctgagtgtctctcatgtatacatgggatatacatggtaataagcttctacttgttaaatagataaataaataaataaaagagattgacacaggaagtgcaaaaatatcactagtgtatgtatacccaagacaagtgatacagaattaagtctgttgggccattattgaatggcttntactgtctgtgccattacacttgtggccatgatgttcagatgtttntcatcaatggctgcatagacaggtgaaccaatcaagggacttcaggaagctaagaaagctgttaaattattcatctactatagctttgggtgttgattcaagattttgatttcttaaactggccaagtatgagatttaccattgactgtataaagtaaaagaaaaa

SEQ ID NO: 4036 - DNA, 408 bp, Canis familiaris
  misc_feature (125)..(125): n comprises a, c, g, or t, or includes no nucleotide
  misc_feature (186)..(186): n comprises a, c, g, or t, or includes no nucleotide
  misc_feature (208)..(208): n comprises a, c, g, or t, or includes no nucleotide
  misc_feature (238)..(238): n comprises a, c, g, or t, or includes no nucleotide
  misc_feature (262)..(262): n comprises a, c, g, or t, or includes no nucleotide
  misc_feature (279)..(279): n comprises a, c, g, or t, or includes no nucleotide
  misc_feature (354)..(354): n comprises a, c, g, or t, or includes no nucleotide
  misc_feature (372)..(372): n comprises a, c, g, or t, or includes no nucleotide
  misc_feature (388)..(388): n comprises a, c, g, or t, or includes no nucleotide
gtatattacatttccaggatttatctataacttggagtttgtattccttgaccaccctcctccatttcccccattccctgcctctggtaaccataaatctgatcttctaagtgttttttttttcnctttttcttttttttccagatttcccatataagggagatgatgaagtatttctctttctcngtcttatttcgtttagcataangccctcaagctcaatctacgttgttacaanggcaaagatttccttcttttttanggttgaatatataatangcacacgtacacacacacacacacacacacacacacacacaactctgtttccatgtcttgactgttgcaaataangatacaatgaaatatttnccttttgatattctcntgtgacaaatataggccata

SEQ ID NO: 4037 - DNA, 448 bp, Canis familiaris
  misc_feature (419)..(419): n comprises a, c, g, or t, or includes no nucleotide
ttacagctttgttttcattgctttgttatataaggtttgctttcctgacagattataaatatcctgaacactgacaagatcacagtttagactatctcctcatatctctcaaattatccaacctaatgcttatgtagaactagaaaaagggagcatgggctatataaatagtagtggcctaaaagaaacaggcaggcctaggatgaggatcttttgtttccatcttagaaggcagaggaggtatatgcagtaaaaggaaaagtgaatcatctactaagaaacatttactcattcactcattcaccaacgacctaatgagcatgtgtgaggagccagaatcttgtctcccaataccacacacacacacacacacacacacacacacaccactagatgattttattcctgcagcagtaaanatatctggcaggggatcctctagagtcga

SEQ ID NO: 4038 - DNA, 624 bp, Canis familiaris
ccacatttgaggacatctgggtatttcagcttgtgtttgcaagttgamcagtgaacatttagatttttaaactccttgggggaaagcaggggttagctgagttggcaaagtcagaggataaaaggccacctgccatctcataaacaagacaaaaaaagtctttctttccttactttcttggctacttccatcctgcagggagcagcagatgttcagcctgaaataaaaggtgtcagakwtgcatacacacacacacacacacacacacacacacacacataggcaggagtcaatttatgcacattccttgagaataaaamactacctagggtgyattcacctagaatcctcaaacctgccctactggtgttactcaggtccctacattccccactgcacttctgatggttgtttaagctaccatcaaagtctggagcctgccctcaagttctcctgtagactagggtaacagaacccaccctcttgacaaggttctgtgacatgaagatgatgttgctgctgctaatagtataatagctcctgtgaacaaagctatatggtaagcactttacaaacattgccttctgttactattatagtattcttggagattaattgctaagt

SEQ ID NO: 4039 - DNA, 206 bp, Canis familiaris
  misc_feature (178)..(178): n comprises a, c, g, or t, or includes no nucleotide
acccatacagccatcaagtggtcgcttatatgaggaaagcagctattatatgaggtacaagttccatagggcacctggctccccaggtctctgaggctgaaagtgccactgccattgctgtcactttgtttctattagacacacacacacacacacacacacacacacactatcctgntcttcagcattacatgcctgatgcccca

SEQ ID NO: 4040 - DNA, 470 bp, Canis familiaris
tatttactggaaaattgaaaaagtgatcaccaaagatcggtgctactacttatgagaatgctaagtggccattccaactccactgtggctacaaacgagatagtattgtgggtgacattatggtggcagggggacatgcaggggtggaattcctgaccctggtgacactgactgattccctagacaaagaagcttaaagacaggacagggtaagacctcccctgaagtgtacctcattgctactcaaaaatatttttttcaggaggagacagaaactaaaagaggtccatggttttacctgactttaaattcaaaatttattaaaagaacttaatgagaagatgaaaagggaaccagctgatttttgcacctctgcccacactagtttggatgaattttaagatctattgagatggccaattggcagtcatatttcatgatctccaaattaataacttattaagaaccca

SEQ ID NO: 4041 - DNA, 422 bp, Canis familiaris
  misc_feature (8)..(8): n comprises a, c, g, or t, or includes no nucleotide
  misc_feature (24)..(24): n comprises a, c, g, or t, or includes no nucleotide
  misc_feature (80)..(80): n comprises a, c, g, or t, or includes no nucleotide
  misc_feature (96)..(96): n comprises a, c, g, or t, or includes no nucleotide
  misc_feature (103)..(103): n comprises a, c, g, or t, or includes no nucleotide
tgagaganagaactatccattctngtatatgcgtatgtagatgagcatgtgtgtgcaaaactgatgggtgaataagaganatagatggaggagganacggccntgaactgctctgggtggagagatagaccctctgatctatggggtgtatgatgagtgtgtgtgtgtgtgtgtgtgtgtgggagtgtgtgtgtgcgcgtgcatgtctgaatctgcctggtcagtctgggtcagtgtatatgtccatgaactttacgagcgtttagttcaataccactgggtgcagattccgagttcctgttttaccgccccagcagccgccagccagcccatctgttaaaacatagcatgtacacttcagtcactgcagttggagcactagggtggagtgtgggtacgggggcaacccttagtagggtcct

SEQ ID NO: 4042 - DNA, 605 bp, Canis familiaris
  misc_feature (326)..(326): n comprises a, c, g, or t, or includes no nucleotide
tgcttctgggtcttcacctttcctcatttacctccaagggaactggtgccatgtatcaaagcaggccacctgatgccaggcccactgatgcctccacctcctgacttgacatttgaaaagaaatacatttgtgtgtgtgtgtgtgtgtgtgtgtgtgttttamagatttatttatttattagagagagagagagagagagagactgamacatgggtgggaggggcagagggagagagaatctcamgcagactccacactgagtatggmgcccaacatggggcttgatcttaggaccctgagattctgacctgagctgaaaccaagngtcaagcctttaactgactgtgccactcaggcaccactacatttgtgttttaaatagtaacatgtccatgtggttcaaaatgcaaaacaataatggggacagtgaaaaggctttmtcccacccagcctctacctccatccacccgtcctcccacactgccccaaataggtaaccattcgtcctattttatagggtttgtgtgtaaagtttgaaaagcaaatagaaatatagatttttatctttccttaccttttatgtagaaaagggtcctctagagtc

SEQ ID NO: 4043 - DNA, 647 bp, Canis familiaris
aaaacatggcttggtttccatggtgatttgcacattctgtctcatgatgctttctaaggagcctatcttaatctcgtcagccctatagagactagtctccaccgtatctcattacagggaaaggttccttaagaaaacaatgtaattcctaatgcttcttccaccagggcaaaaatcccaaagtactgcataataactagagttaacaattttgtactacatatatttgaaatttgcttagagagtagatattaaatgctctcaacacacacacacacacacacatacgtatacacgatgccaactatttgaggtgatggatgtgttaactgactttactgtggtgatcatttcacgatccaaatgtgtgtcaaatcatcacgtttaactttatatcattccatgtgtcaattatatctccatgaagctgggaaaaaaaattgtactttggaagcagagatctgttgggttcaaattcactgatttgcctctctctaatgcatcccatagttgagagtaacttgtttctggttgtgagctggtgttatcatcaggagatagtaaacacttagcatccatgctgtgaagcagcttgatgacactggggatgtgtgtctgtgtgactgctgcatggatctatgcatggg

SEQ ID NO: 4044 - DNA, 445 bp, Canis familiaris
aaagttattacaatattattgactatatccttaagctgtacaatatgtccccatgacctagttgttttataattggmagtgtgtaccttataatctccaccacctattttgcctacatccatctctccctgctctggtaacccaatagtttgtttttttatatatgattgtgttcctatttatctgtttgttttgtttagattccatatatataaatgaaaccatatgctccttatctttttctatctgacttatttcacttggcataatagtctctagatccatccatgttgttacaaatggcaagatttcattcttttttatggctgagtattatkccatcacacacacacacacacacacacacacaaacacacagactcttgttttatccattgcatctattgatggacacttgggtgcttctataatttggggtcctctt

SEQ ID NO: 4045 - DNA, 536 bp, Canis familiaris
acctgcctctctctctgtgtgtctttcatgaataaataaataaaatcttttaaaaagagacatgagttcctcttgttggmgaggaaaatattttagttctacccttttamattcttggttaaggccctatcataaaagacagatawacaagagararacaacagaagttttttttttaaatwtatttatgakagtcacacacacacacacacacacacacacacacacacacagagagagagagaggcagagacataggcagagggagamgcaggctccatgcaccgggagcccarcgtgggattcgatcctgggtctctaggatcatgccctgggccaaaggcaggcaccaaaccgctgtgccacccagggatcccaacaatagcagtttattaacatgtatacctcatgtatacatgggatatatccagggaaaaataaataacttccagagttggcttatgttttaggcctaaatcccatttttagttgaagacaaagaaggatacggtttgttatgcagaattaagtcagtg

SEQ ID NO: 4046 - DNA, 340 bp, Canis familiaris
  misc_feature (179)..(179): n comprises a, c, g, or t, or includes no nucleotide
  misc_feature (230)..(230): n comprises a, c, g, or t, or includes no nucleotide
  misc_feature (285)..(285): n comprises a, c, g, or t, or includes no nucleotide
ggtaccctgttgaggatggagcgcacgaagtcacctggctctgaccgcgggtgcagtcagtgaccgacaccctacacctcccacgggaatggagctcgcgggaccacgttgcttgtttgcatgtatgtgtgagtgtgtgtgtgtgtgtgtcagtgtgtgtgtgtggtaaaatacacgtnacataaagtttaccatcgtaactatacatatttttaaagatttttgttcanggcacctgggcggctcagatggttaagcgagttctgcctctggctcaggtcatgntctcggggtcctgggatcaagccctgaggcctgctccctgcttagtggggagtcg

SEQ ID NO: 4047 - DNA, 470 bp, Canis familiaris
  misc_feature (109)..(109): n comprises a, c, g, or t, or includes no nucleotide
  misc_feature (247)..(247): n comprises a, c, g, or t, or includes no nucleotide
  misc_feature (410)..(410): n comprises a, c, g, or t, or includes no nucleotide
cattttatttaaggtgtaagagtcaaatccaagatgtgctgggataatcctgtattgattaggctgagatttatgtcatagtttctcattcattctgttggaatatggnggcaactcggctgttacactctttttgaaaacctgaatttgttccaatgtgattaatatattagggaataatttgcataatgcgaattttactcttgcttatgcacaattttgtctatgagaagtacaaggtgagtanacatagaaagccacaagcagtagaatcaagatgcttaggaatacacacaatgcacaccgacacacacacacacacacacacctcacacatctaccggccacctcattcgcttcatgtggtgagagccacacccttccacaactagtattactctcttctctcncatttcatgtagcccttcctcccagtaagacatgagctaaacacttctgagacttacttc

SEQ ID NO: 4048 - DNA, 336 bp, Canis familiaris
  misc_feature (11)..(11): n comprises a, c, g, or t, or includes no nucleotide
  misc_feature (156)..(156): n comprises a, c, g, or t, or includes no nucleotide
  misc_feature (165)..(165): n comprises a, c, g, or t, or includes no nucleotide
  misc_feature (168)..(168): n comprises a, c, g, or t, or includes no nucleotide
  misc_feature (174)..(174): n comprises a, c, g, or t, or includes no nucleotide
  misc_feature (199)..(199): n comprises a, c, g, or t, or includes no nucleotide
  misc_feature (207)..(207): n comprises a, c, g, or t, or includes no nucleotide
  misc_feature (225)..(225): n comprises a, c, g, or t, or includes no nucleotide
  misc_feature (235)..(235): n comprises a, c, g, or t, or includes no nucleotide
  misc_feature (260)..(260): n comprises a, c, g, or t, or includes no nucleotide
  misc_feature (272)..(272): n comprises a, c, g, or t, or includes no nucleotide
  misc_feature (286)..(286): n comprises a, c, g, or t, or includes no nucleotide
ggtcaggacanactccaggaagagtaccaaaaagcccaaagaatttcttcccggacaaacatttactgagtatctacttggtaagaagctaggtatgcagaaaggaaacacacacacacacacacacacacacacacacacacacacaccccttgntctccaggngcncagagnttcgcatccgcactcccctgacgcnctctattncccctccccactacacanggagagggantgatttctttacagcatgtcttcancatcccttagancgaactccccctcncattcgtgtgtgtgtgtgtgtgtgtgtgtgtgtgtgtgtgtgtgtgtata

SEQ ID NO: 4049 - DNA, 278 bp, Canis familiaris
  misc_feature (177)..(177): n comprises a, c, g, or t, or includes no nucleotide
  misc_feature (180)..(180): n comprises a, c, g, or t, or includes no nucleotide
  misc_feature (194)..(194): n comprises a, c, g, or t, or includes no nucleotide
  misc_feature (197)..(197): n comprises a, c, g, or t, or includes no nucleotide
  misc_feature (201)..(201): n comprises a, c, g, or t, or includes no nucleotide
  misc_feature (211)..(211): n comprises a, c, g, or t, or includes no nucleotide
  misc_feature (214)..(214): n comprises a, c, g, or t, or includes no nucleotide
  misc_feature (220)..(220): n comprises a, c, g, or t, or includes no nucleotide
  misc_feature (229)..(229): n comprises a, c, g, or t, or includes no nucleotide
  misc_feature (234)..(234): n comprises a, c, g, or t, or includes no nucleotide
  misc_feature (237)..(237): n comprises a, c, g, or t, or includes no nucleotide
  misc_feature (243)..(243): n comprises a, c, g, or t, or includes no nucleotide
ttagctgccgcatcacttacatgatagaccccctgtctgttccagaagaaggcagtcgtgtaaaagggttgtctcccagggccacaagacaccctcaaaacgcacacttgattcatgttggcttctccagcctatacacacacacacacacacacacacacacacacacacacacangantgagagggggagtncgntctnggggatgatnaanacttgntgtaaaganatcantcnctctcngtgtgtagtggggaggggtaatagagggcgtcggg

SEQ ID NO: 4050 - DNA, 519 bp, Canis familiaris
taaacaaaggtgttcatttctaggagaataatctgagcctctgccaggtgccaccagttactttggaaaggtaggctttgtgtttgttgaatctagtgaaacttgacctgtgatttcaaacaaggagatggcaagggcaagaaaaagtatgaaaactttttcagaaggtttatgtgaccctgcagagcatggcatctgcccaacactagccatgcttcttgctctgckgatgtatttcagttctttgaaacatctttcttgcctggaatcccctacggatattctatattgttccctctgcttaaaacatttccctcccatccctcctaaatggaactttccatttgcatattttaaaatagcataaaactaggagtcacctttggccaactctcctagttataatacacacacacacacacacacacacacacacacacctgctaacttcacctacagtttcaagcatgttcatctctgcagctttgggtgtgatatatgattgtcaagctcaactgg

SEQ ID NO: 4051 - DNA, 477 bp, Canis familiaris
  misc_feature (284)..(284): n comprises a, c, g, or t, or includes no nucleotide
  misc_feature (288)..(288): n comprises a, c, g, or t, or includes no nucleotide
  misc_feature (345)..(345): n comprises a, c, g, or t, or includes no nucleotide
  misc_feature (419)..(419): n comprises a, c, g, or t, or includes no nucleotide
  misc_feature (434)..(434): n comprises a, c, g, or t, or includes no nucleotide
  misc_feature (441)..(441): n comprises a, c, g, or t, or includes no nucleotide
ttagtgctgaatgagaaagaaacatttcatgagattccataatcacatgatacaagggagtatcatgagcgtgcttaatccaaacaaacaataccaagatagaaaaaaacctcagcatataaattggtttaagtctttctgaactttcaatccccatcagtatgtggcagaaacaaacattacaaagaatttccacagaaaattttaaataaattaaagcaaacagttctaaaacacacacattcacacacacacacacacacacacacacacacactatttanaganggcacaattgagaatgagggccttgatttaaaatgaccagaaataccagatactganatcataagattttaatatattttaagaaataaaagttattaaaaatatgactaaacagtatcttaaaatacatnatttataagcagatntatttancccccaccccagaacttctagaagttacaaaaaata

SEQ ID NO: 4052 - DNA, 350 bp, Canis familiaris
acaattgaccttcctagaagcagagcagggccaaaagatggatggagcctgggcccctaaatcacttgcggaggaaagttgcccacctgttgaccaacaacaaaggctttgaactgttatatgagaaatgaacatctgttgagttgcaccattaagatgccagggtctgtttgttatagcagttgtgttgctgttacaaattcacagtgcttcctagaaaggactcagaacactgctcctctctccccgaggcccccaaacacacacagacacacacacacacacacacacacccgggcacagtcctctccaagtcatgaaattttacagagctgagaggggatccttgt

SEQ ID NO: 4053 - DNA, 736 bp, Canis familiaris
tgtcaaatatttggctaagctggctattttaaaccaagaagaacatgcttcttaaaatgtctgagatacagaaaggactctcaaatctgctctaccatgccagcttgactcatcacttaagtcacaatattgcattttttaaaaattccacattttgccaatttttatccttagggattttacctctttcatcaacctctcatatcttaataaaaccatccatttaaagaggcttggggtatttaaaggtctttctaaacagtaagaagttaagacatttctaagaactcactgtcagttctaagagaagtacaaacctgtttaacaacaacaaatatacacacacacacacacacacacctctatggaatatataatggttttatccccaaattttctcttttgaaggattaaagagatactcaaacccaacacatatgtgaactgttagtgaaaaatacaacttctataaagaaaggaaagctgccgaactactttttcaagtgaaacattttaggagattgctctaacctggggcacagtacattctctctatggcatcgctgtcacaggaatcttcaacctcactccacctgctaaaatacgttagctgaatgtgtcctwaaaacwaaacgacaggagaaatcaaaacatttttctcttccattttctgcagaagtgaactgtaattatccttttgtagctaaaaacagtatcattaagaataatggcatca

SEQ ID NO: 4054 - DNA, 330 bp, Canis familiaris
  misc_feature (9)..(9): n comprises a, c, g, or t, or includes no nucleotide
  misc_feature (11)..(11): n comprises a, c, g, or t, or includes no nucleotide
  misc_feature (30)..(30): n comprises a, c, g, or t, or includes no nucleotide
  misc_feature (101)..(101): n comprises a, c, g, or t, or includes no nucleotide
  misc_feature (105)..(105): n comprises a, c, g, or t, or includes no nucleotide
  misc_feature (135)..(135): n comprises a, c, g, or t, or includes no nucleotide
  misc_feature (163)..(163): n comprises a, c, g, or t, or includes no nucleotide
  misc_feature (176)..(176): n comprises a, c, g, or t, or includes no nucleotide
  misc_feature (227)..(227): n comprises a, c, g, or t, or includes no nucleotide
tctagaggncnctcttcagatcgctagtanttgtcctttctgtggccatcgttctttgtgtgtgtgtgtgtgtgtgtggccatcattcttattttcctgtnaatnagaattgtcatcctcttctatcaagtgtanctcatgtattaatttcattttatcaganataattccctgcnattaattgctttgatccttgcaagaaactgggatctgagcctttgtgtatntgtctgatcttcctctgacctggtctctcttggccaagaagagattcccacaggacttctagcaatgtgaccggagctacgtgaagctctgaactgggcctga

SEQ ID NO: 4055 - DNA, 751 bp, Canis familiaris
atctaactacaccctgcttgattttccaggtcactggagcggaagttgtcaccaactgcaattagccagcactcaccggagcatgaagcaatgtcttggcttctgtcttctgcatgatgctcccttccagggggaggtgctctatcttcccagtctgagcaaagagtaaatgggtcccaggtggcaggggaatcacagcagtaggaactgagggtccatgatgaatcgggggagccactgtacttagacctgtgtggcaggagaggtcattgagcaaggcctatgggcagcaggaatgtatgcggtgwggcacgcatgtgggtgyacgkrcacacacacacacacacacacacacacacacacacatgaatgccayyttcacggcaccacagacygcacagccacatgatgcccatgttgcatctaacagacaaggggcagawagcccacaaagggcgtttgtgaagtagataaagcagggcatgagytgtacatgaaaggtcacatgaaaaaaacaaaaaaccatgaaaaaacccaagggcttagccttctccttaatagaaacagaaataatgtaaccattcatcccctgctgcatgcactggctgccacatgaaccaaaacgacagccagagcagtccccgaagcccctgtccctgmtcacactccactggaagatgctgagcttcccaaagtcgacctgccctacacaccccgtcctgcctggtgggcaagtccttggaccccaccc

SEQ ID NO: 4056 - DNA, 883 bp, Canis familiaris
cattgatatagagtgtatactttgccctggaaaatggtgcttcatcctcacgaggtaacatctcaaagctggtgctgaaattgccactcatattggcaactaagcatgtacaagggtgtttcttgtggccttcttggtggtgacaaaaaaagctggagacaaagacaaagtgcagtagccggaggatggcagtatactagattgtaaaatgtcagctgtaaaagtgtgtgcaacatggggattctggaaatggctgaataaataatggttgttgcacgctaaatcatataatggcagtcattggaaataatgaatttgaactatacctgtagacttggagggaatttttcacaagacatggttgaaacagaaatgcatagttcaaagcaagtgtttatgaatyccattttgtgacatagcattatttaacataacattaaccctccctctatgtatacttgagtatttgtgtgtgtgtgtgtgtgtgtgtgtgtgtgtgtgtgtatacatacaaaactactaaattgctaacatgatttggggatatggtatagtgtgagcatgccttctgagaatctctactttcccaccttctttgccttcttttctcacacttaccctctccatgacctggaaggctcattcccagtggcttgtcttggaggctaaatctgctggttccaagctgtgcggcaaaggcagtctgcttaggggtggggttgggtagtgatggggaggaattaaagaaacattccaaatactcataagtgtacagtaatgataataatattgttagaatggtggcttgtagcaattagtgtgcctacaaaagaccagcatccatacgttaacttgtcttttgataatctggatgattaataga

SEQ ID NO: 4057 - DNA, 420 bp, Canis familiaris
  misc_feature (395)..(395): n comprises a, c, g, or t, or includes no nucleotide
  misc_feature (410)..(410): n comprises a, c, g, or t, or includes no nucleotide
tactgcgcgacgaagctcaacctaagatgaatccggagacggaattgtggattaaatacccaattgcatttgaactcactatttttataggatggggtactcggaaattcaacactaatgatgggaaagaatattaagaattaatgagtgtatagaaagaataaagaggcgatgattctgaaacactccgtgtattggttgatttattttgacaggtgcagtttagtctttaacgatttcaaataacacttcgtagtaggatactaaaagtcctgctgtgtgtgtgtatgtgtgtggtaataaaatgtcggtaatataagtctgagcagctaaatcttcattaagaataagtggttcttcggggttgtctgtcagcgaagtgaaattatgcagtnctctgtactttatgncctctagagt

SEQ ID NO: 4058 - DNA, 852 bp, Canis familiaris
atcaagtgcccccctaagtgcccgtcacctcgtcaccccaaayccctatccacctccctttctacccccttgttcattcacagagttaggagtctctcaagccctgtcaccctctctgatatttcccactcattttcgctcctttcccctataatctctttcactatttttatattccccatatgagtgaaaytatataatgtttgtccttctctgattgacttacttcactaagcatcataccctccagttctacccacattgacgcaaatggwaggtattcaattcatcctttctaatggctgagtaatatcccattatatacatacacacacagacacacacacacacacacacacaccatatcttctttatccatwcatttttcgatgggcactgaggctccttccacagtttggctattgtggacattgctgctagaaacattggggtgcaggtgtcccggtgtttcactgcatctgtatctttgggtaaatccccaaacagtgcaattgctgggtcgtagggtagctccatttttaactctttggaggaacctccacacagttttccagagtggctgcaccagttcacattcccaccwacagtgcaaggggtcccctttctccacatcctgtccattatttgttgttttctgtcttgttaattttccccattctcactggtgtgaggtggtatctcattgtggttttgatttgcatttccctgatgacaagtgatatggagcattttctcatgtgcttgttggccatgtctatgtcttctttgatgaaatttctgttcatgtctttggctcatttcatgattggattgtttgttctttgctgttga

SEQ ID NO: 4059 - DNA, 334 bp, Canis familiaris
  misc_feature (241)..(241): n comprises a, c, g, or t, or includes no nucleotide
tatacactactgggatatttatccaaagaaacaaaaaacacttattcaaaaaagatatatatgaacacatatgtttattgtagcattatttataatagccaagatatagaggcaacccatgtccatccattaaagaatggaaaaggaagatgtggtatacacacatatgtgccacacacacacacacacacaggaatattacacaggtataaaaaggatgatttggggccatttgagacancctggactgacctggagggtattttgctaagtgaaaataagtcagactgagaaagacaaatactatatgatttcactcatatgcagcatctaa

SEQ ID NO: 4060 - DNA, 826 bp, Canis familiaris
ctttcatccaaatctccaccctccccaaaatgttatttttaaaggcagagtagtttggtgttttgtttggggggactggactgtctttctatcataaatactgctcttgaggaggtataataatatacctcttaattatttccttattatgatacccagaaatgaaattacaaggttggwagaaaagaatatttttggccaatggttgccaaattgttctccaggatggtttatcaatcttctctcaacccagcagtgcatgagtgtgcatgcttttccactgtgtcaccaattctagagactatcatcgttcatctttaccaacctgagagacaaaaatttttactttgkcttaatttacatctttgagactgaacattgaaaattctcatttcttcttttttgagtttttacactcatatttttakaccctccatgcctctgtttcctattgttgtcacctaatactattgtgccagtgatatgaaagcagagggaagtgacacaaaaggtcatgaggtagatgtgtactgtggtacctctgtgtgtgagcatgtgtgtgsacatgtgtgtgtgtgtgtgtgtgtctgcagaaaatggatgatggtgggagtggagatttatgtatttaagtcgctagtggggttgcccgagtggctcagtggttgagcgcctaccttttgctccctgcatggagcctgcttctccttctgcctgtatctctgcctctctctctgtctctcatgaataaataaataaaatcttaaaaaaaaaagtcactaatgggactctgtttcttacccactgttggacagagccccttctc

SEQ ID NO: 4061 - DNA, 832 bp, Canis familiaris
  misc_feature (786)..(786): n comprises a, c, g, or t, or includes no nucleotide
ccaagctcattatcctttaatcctgggcttaatgtcccaaattaaatttgttttatgtcgcagttctgaaatatcaaaagcttttcttgatagcgtgtattatcataattcagtctagcatggaaattggaataaaagaaacggcttttcatttcttaagattacactgatatttcctcaaatgcctgcctttgtctctgagcttaaagaaaacacgttattttaycattaaaaagaatattgacaacttttttcccccctccaagaaatattttgtatttttctttcttttgaaaattgaaccatccttaagtagtgatatacagatggtttggttaaaaggcagtgtagtgtcagttaaggtctcgtttttcagagctagaatgttaaatgggctttttctctctatacatatttgtgtgtgtgtgtgtgtgtgtgtgtgtgtgtgtgtgtgtgaagaaatggttwcattggmgctaaaaaaatcaaaatgccctcttgtttcagtgagacatcgtgacacacacctgttgcattttcttacgcaggtttaaggcttgattttatgtagttaatttattttctgattcattgtttatacattttttatttccacatttttttccttaaattcctgcttgaagggacaataaaatcataatttgaggtcaagtaataatagctatattttcacttatcagggggttgggattttcctggaacgtgactggatgaaacatttagaagtagaaatgtcaattgctgtttggagtttagtatagtttncaagggaattattccagkgccgtgcatgtacccatgtttgtgtata

SEQ ID NO: 4062 - DNA, 413 bp, Canis familiaris
  misc_feature (52)..(52): n comprises a, c, g, or t, or includes no nucleotide
  misc_feature (211)..(211): n comprises a, c, g, or t, or includes no nucleotide
  misc_feature (224)..(224): n comprises a, c, g, or t, or includes no nucleotide
  misc_feature (231)..(231): n comprises a, c, g, or t, or includes no nucleotide
  misc_feature (248)..(249): n comprises a, c, g, or t, or includes no nucleotide
  misc_feature (257)..(257): n comprises a, c, g, or t, or includes no nucleotide
  misc_feature (333)..(334): n comprises a, c, g, or t, or includes no nucleotide
  misc_feature (389)..(389): n comprises a, c, g, or t, or includes no nucleotide
tcgagttcttaagccaagtccatttccccttcttataaagtaacactaccangaacagcatcaggattgtgtcggagaacatcctggtctttaggggaggcacactgaagtattcagagtagaagtgccatgttggcaactggctctcatgcagtacacacacacacacacacacacacacacacagtgtaagagaccaggcagtcatggncacgtgttaacanggagtgnctctcagtgagacaganntgggtgtncactcgtcccattctttaaatttttctacaggcttgatatttttcaaaattaagtttgcaggggaaaaaaaagatnnctgaaaaagtactcccacagttgagagtctctctgttgacctcctgccagtagangtatggcttagggtctatcctcca

SEQ ID NO: 4063 - DNA, 796 bp, Canis familiaris
gatctgaaataattaaaaatgtctgtttagacatagacagggataaatgcctcaggtaaccgagccgttttcacaaaaccaaattctactcagagcctgattactgtgttttagatacaattcgaaggaacagcaaaccaaagtctatgggagcaaaccaaaagtagaaagagttctcacagactcttcctttctgctagaaaggaactgatagaaaaaaacccttcttctaccagacataagatgctcgccccatgcttgtaggatatcactgtaggtacagctaaatttaacaattgttaatcacaggaataagtcatccacggttgaagaactagttttataaatatwtgggacatwtataatctgtaatagaactttctattaagtgtgtgtgtgtgtgtgtgtgtgtgtgtgtgtgtgtgtgtgtgtgtgcatwcatagttcattttatgttttcaagttcccaagggcaggawatccacattcattttgacaggtgatttctagctccaavtcacaaggacmcatttgcctacatttamtcttcaaactggsttttgtgggctattttctctagttctttccaaacttagtctcggtccttgcattcactctctacagaggsagactgagtcgctattcctgcyacacactacactcctgttagctggaaaatcccctggggtgagggggcctatctcattccccaatggttccagaaacattatcaattgacaatacacaaccagttgcacagagaaagaggttttaaagcctcgtttttgtcctctag

SEQ ID NO: 4064 - DNA, 959 bp, Canis familiaris
ggggatcgaaatcccacgtcgggctcccggtgcatggagcctgcttctccctctgcctgtgtctctgcctctctctctctctctctctctgtgtgactatcgtagataaataaaaaaaataaaaaaaacctttaagatataattctttactataatatagtatagtaataatattatgcatttgtatttcaagggyyttttaaaatacctacctaggttttcttatttatattgaggaggaagatttcattttgatgcagctgtgccctcatatgtagacataagtgacttctctttagcaaaaacaaagtttccaaaaatgtatgtgtgcatctgtattaccaaccttttcaaaaagacacttatacaagtagtatgtagtattaaaaaaaaaaaagctgtgttagkgttggttttttttttttaaycatttcthacmayttaarrggtrtcacacacacacacacacacacacacacactcctgtgtacactgaagaataaaacacagcatatgtacctgtatgtaacacatacataaataatgcacttatacacgatacatacatgtgttgtatatatatgtgcatgtgtgtatatatttgattaagaaataaattattttcattcaataatgtaaaataataaccagaagtctgacacaaagtgtacctctgatttttctctctagatttatgaattccaaatgacattcccaaagcaagctattaaacttagtttctaatgattttaaaaatggcttttagaaactctaaggtttcaatataatttaagcatcatttcccagtttcccagtgcttctataaagtttwacaagcaaatatcattatattttggcttttagcttaagagtttttaaagtcaacttagagaaaatggaatcatgttgatgagactcatgatcccattgaaataaagtaacgatggctcagtcctcta

SEQ ID NO: 4065 - DNA, 371 bp, Canis familiaris
  misc_feature (40)..(40): n comprises a, c, g, or t, or includes no nucleotide
  misc_feature (48)..(48): n comprises a, c, g, or t, or includes no nucleotide
  misc_feature (89)..(89): n comprises a, c, g, or t, or includes no nucleotide
  misc_feature (129)..(129): n comprises a, c, g, or t, or includes no nucleotide
  misc_feature (155)..(155): n comprises a, c, g, or t, or includes no nucleotide
  misc_feature (174)..(174): n comprises a, c, g, or t, or includes no nucleotide
  misc_feature (187)..(187): n comprises a, c, g, or t, or includes no nucleotide
  misc_feature (197)..(197): n comprises a, c, g, or t, or includes no nucleotide
  misc_feature (203)..(203): n comprises a, c, g, or t, or includes no nucleotide
  misc_feature (235)..(235): n comprises a, c, g, or t, or includes no nucleotide
  misc_feature (248)..(248): n comprises a, c, g, or t, or includes no nucleotide
  misc_feature (254)..(254): n comprises a, c, g, or t, or includes no nucleotide
  misc_feature (363)..(363): n comprises a, c, g, or t, or includes no nucleotide
tcagtaagttcctggccaaagtttgcacaagggatagccnaagtcccntaaaagtctattaagtaagacaatatctatttcttccaccntctaggcactctaactcatcagcgatgattactttgaagntactttcttgcttacttctatagcantggggataggcaatgcccngcatacccagccntgggaaaganaaaganaaatccagtctcccactgagaagataaatacntatgtctaggacntctccntaaactcttacttttgtgtgtttgcatgtgtgtgtgtgtgtgtgtgtgtgtgtgtatgaaaagcaaaggtagctgtgtgtgaaaaattagtaagtactgatatgatggncctctaga

SEQ ID NO: 4066 - DNA, 983 bp, Canis familiaris
aactttcatgaggttgcaattaatatgtcagctaggtaagagatacatgaaaaaatgctcaatatcactggcatcagggaaatacaaataaaaaccgtgatgaaataccacctcacacctgtcggaatggctaaaattaccaacacaggaagcagcagatgttgacaaggatgcagagaaaggggaagcctcttacactgctggtgagaatgcaagctggtgcagccactctggaaaacagtatggacgttcctcaaaaagttaaaaatagaactaccctatgccccagcaactgcactactagatatttatccaaaggataaaaaaatagttattcgaaggggcacatggaccccaatgtttatagcagcaatgtctacagtagccaaaatttggaaacagcccagatgtccaacaacagatgaatggataaagaagatrtggggtgtgtgtgtgtgtgtgtgtgtatagttgttctatgtgtgcatatacatatacatatatcgtgtgtatattgtgtatatgcacacaatagaacattactcagccatcaaaaagaaagaactcttatcatttgtaacaatgtgaatagaactagagtattaggctaagtgaaaaaagtcagtcagagaaagacaaatgtcatatgacctcattcatatgtggaatttaagaaacaaaacagatgaacatatgggaagggaaggaaaaataaacagaaaaacaggcaaaccataagagactcttaattctaggaaactgagggttgctggaggggaaggagatggggaatggggtaacaggatgatggacattaaagggcacatgatgtaatgagaactgttataagcaactgatgaatcattaaattctacccctgaaactaataatactctatatgttaactaaattgaatttaaattaaaaaaaaatttttaaatgtcatccagggctgcagtcatctgaaggcttaactaagactg

SEQ ID NO: 4067 - DNA, 460 bp, Canis familiaris
  misc_feature (42)..(42): n comprises a, c, g, or t, or includes no nucleotide
  misc_feature (76)..(76): n comprises a, c, g, or t, or includes no nucleotide
  misc_feature (152)..(152): n comprises a, c, g, or t, or includes no nucleotide
  misc_feature (160)..(160): n comprises a, c, g, or t, or includes no nucleotide
  misc_feature (169)..(169): n comprises a, c, g, or t, or includes no nucleotide
  misc_feature (178)..(178): n comprises a, c, g, or t, or includes no nucleotide
  misc_feature (189)..(189): n comprises a, c, g, or t, or includes no nucleotide
  misc_feature (263)..(263): n comprises a, c, g, or t, or includes no nucleotide
  misc_feature (275)..(275): n comprises a, c, g, or t, or includes no nucleotide
  misc_feature (278)..(279): n comprises a, c, g, or t, or includes no nucleotide
  misc_feature (284)..(284): n comprises a, c, g, or t, or includes no nucleotide
  misc_feature (406)..(406): n comprises a, c, g, or t, or includes no nucleotide
ttccatgtatcacccagtgctcatcatgacaagtgcacaccntaatccctatcacctattttacatacaccctacntacctctcctctactaaccatctgtatgttcactatagttaagagtctgtttcctggtttgtcttttattttcctntgctgatntattttgtntcttaaatnccatatgtgantaaaataatgcagtatttctctttctctaacttattttaattaataatacactctctagctccatccctgtcantgcaaatagcanganntcatnttatggctgaataatatttcactgtgtgtgtgtgtgtgtgtgtgtgtgtgcacatactatatcttctttatccattcatctattgatgaacacttggactgcttctataacttggctattgncaataatgctgctataaacctggaggtacatgtatccctttgaattggtgtttt

SEQ ID NO: 4068 - DNA, 440 bp, Canis familiaris
  misc_feature (243)..(243): n comprises a, c, g, or t, or includes no nucleotide
taagtaagtacaaaatggccagcagagctgcgctcaccagggtgctcagtaagtattacctggtgatggcaattacatggtggcgtagagactaggcaagagactggttccagaagctccctagtgtgaaaatgaatcctgtcctccttcgcttttctcactctttcatacacacacacacacacacacacggtccttgtctactttgcttggctcaataagcatttttgcagcaaacccttntcgttctcaaagcagaatgtcctgcagtataatttatccttaaaatacacttccatgtaaggttgtccaactgttcatctgtactaccaacaagtaagcaaaacgatgtgaagggagggggcaaattctacctctgtgttctagagcaacatcagaagagagtatttgaaacctaaatattggggcacctggtggct

SEQ ID NO: 4069 - DNA, 440 bp, Canis familiaris
attctatatagccaactgattttcacataattctttagttaatttttgtctaacctttacatccatagccaacctatggttatgattaatgtaggcatgtaattcagtcacggagtgttcattgatattttcctcaattcttaaatctttggggggcttattaggttttttctagcttatacacacacacacacacacacatatgtacatatatattaaaagcattgcagaccttacatgtctaacttccactgtagctgcaccctatagattttatgttgtactttcattattgtctagtttttatttcattctcaaataggttggattaaattgcttcctctttttaaaaaaatggtgtagaggcactactttatgaccatgaaacctcttcaaagtcctcagcctatattcacctattctgacattttttgaagtgc

SEQ ID NO: 4070 - DNA, 421 bp, Canis familiaris
  misc_feature (403)..(403): n comprises a, c, g, or t, or includes no nucleotide
tcagggaaatgctgtgtcatgtgcatgtgtcaggtgcatatacagagctgagtgtgtacatagcccacctgtatccctcccccgacacgtgcatgcatgtgtatagacacacacacacacacacacacacacacacacattcatacctatcagaagggacctgacatgaagcaggacttaccccagtggttcacacgcagagcccttaatgaagaggtaaggacagagttaaaggtgcaagcagggcatggtgaggtgttgagactcatgacaaaaggaagctcttccatacctaaggctgatgtgacaggaggagaaatagtgtgactagggcggaaagagtctgagccttggaagtgatgctgcctggtgggagctgtaggcacaggggacacagctactnccagagatgtggccctaa

SEQ ID NO: 4071 - DNA, 300 bp, Canis familiaris
  misc_feature (127)..(127): n comprises a, c, g, or t, or includes no nucleotide
  misc_feature (130)..(130): n comprises a, c, g, or t, or includes no nucleotide
  misc_feature (143)..(143): n comprises a, c, g, or t, or includes no nucleotide
  misc_feature (165)..(165): n comprises a, c, g, or t, or includes no nucleotide
  misc_feature (199)..(199): n comprises a, c, g, or t, or includes no nucleotide
  misc_feature (225)..(225): n comprises a, c, g, or t, or includes no nucleotide
tgcccagactcttcagctccagaactttctttgagcgaggtgggtgcaggaaagtagccagcccagcgtacaaccgtgtgtgtgtgtgtgtgtgtgtgtgtgtgtgtgtgtgtgtgtgtgcgcgtgncanggacggtcttggnctgttccagcctgttgcctgtngtttcgatttagccaggctgggttcagggaggcntgggtttagttccccaccagtgtgcncactcacccagcacaggccagctcggtgtgggggtgggggctggtttctctccagtcctttcaagggctgctccg

SEQ ID NO: 4072 - DNA, 873 bp, Canis familiaris
ccatggaggagttcctgccacaggctgacctgaccttgagttgggcctgagttacgtccaaatgctggggttttggcaactgcctggggagatgtggcaaagccccgcccaggcggcctgggttgggatacagggcctcctttgctcctggtgcaaagtgccagtcaagtagtcaaatccccagccaggtcttcctctcctagtggttctctcacagcagcccagggccctgaactcaccctgtgggggaacagggagctaaaaccagaacamcaaaaaagaaggaactttgacgggggccgggcagaagagaacccagatgtccctgcagggtgcccaagtctcttctggaaggtctttagagacaggctttaacctgcctgcaaccaaggggaggtttgkgagaggagccaaacactgtcattagagctgctgctgaatgtttcccmagggtttctytgtgtgcccctcagagcggatggtgtcacasgaagtgtgtkctgagtgtgtgtgtgtgtgtgtgtgtgtgtgtgtgtgtgtgcgcctgatagagaccagctgtaagggcgttgtccctctatataagagacaagtggagttgatggggctgtggcmgagsggatgtatgagaggctggagcagtgtggctccatggccctgcssagtcatgccctggacycagagagtaccatttctggggtggccccagcccagtttctaggagcagacccttggggatggtggacgaagggatggaagggaagggaggagtcagacctgttctatagaggaagaagcagggcgggttctgcgtaggactttgtccagtcatgtggaggaggaggagccagcagagcytggcagttgctaggt

SEQ ID NO: 4073 - DNA, 924 bp, Canis familiaris
  misc_feature (34)..(34): n comprises a, c, g, or t, or includes no nucleotide
atcaagctgagcctccacacaagacccaccatgnaggccacacaacacagtgatagactagggagctaaagccatgtttgttgtgagtcaggaccccaggccagcaacatgggcggcccctggcaggcatctgacatgcatacacgcatacacacacacacacacacacacacacacacacadatatatatttatttatttamtctgcccccccacccaagtgrggccaggttcttatcacacgtggacattttgtgacactartgtcacatawatgttaagtamtcccaggmgcamawacaacawtttccaraagmacagataccatttttggytcacttttagaaawgtcatcagatgtagagggcaggwttccccaaaastggattcccaaattgtgccaytctcatctcccaaacgccacagagatggggcccagstgacggsagycctcttccagcctgaccaggcagctccaggcccacccaccacaaacccggsctctgtcckcgctgccagacctgtgggctgggccagcagcctcacttccttttgagatgacaaaggctgcatccctctgacacagatgacactgtgagcggacagtacttctctgccagggacccccccgtacccctggctcggtctcggctacagccaaagggcaggccatggccacggctcctctccttgtcccaccctgccccacctcactccaggatgcagacacctccaaaccaagctgtccttcggaaaaggctcattctgctagtgtggcatcttcttagaagcaggaaggataatgaagttattattaaaaggacttttctattttcttcaaggagaaaatacatgtaagaagttttagcaagtttcaggacaaatacaagtcctttttttctccccaaatcattacatcccacg

SEQ ID NO: 4074 - DNA, 417 bp, Canis familiaris
  misc_feature (357)..(357): n comprises a, c, g, or t, or includes no nucleotide
aatttttatatgtacctactttggaaagagaattaccaagtcaaactatccatgttaatggaggtgaagagacaatggttggaactggttttgctatgtaaatagatgtttccatctgtggtctccaaatcagaacctaaagaagtgctcaaaattggactcatttatgaggaccactgcattacaggcacactcacacacacacacacacacacacacacgcactctcaagtgcaatgcaaaagcatggtttccaaatatctgcacttagtgcttcagaatacatatctcctagaaaaacttcactggttttaatcccaagaaaatgacaaatcttgattaacctagctaaagcanatagatgtactaattgtgtctgtgttatgtaatgcacttctgataagaattaattaatgt

SEQ ID NO: 4075 - DNA, 796 bp, Canis familiaris
tgttctgcwgagggaagggccccatcacccctcttcacttgcccactcaggccacacatacacacacacacacgcacacacacgcacacacacgcacccatgcaccaccgccaccaccacctcacatcctcatatatacataccactccacacacaccacccccatgccacacacacacacatagcatacatgccatatgcacacatcacctcacacacacacaccatatgcacacacactttcatatatacatgctactccacadadatatacaccagacgtgtgctacccacacacacgtatcctacatgccatatgcacataccacctcacacacawatacacacacatgctcacagcacacacacacacacacacatctgcaccaccccacacataccatcctccacacactctgaccccagtcagacctatgcctttctctccacacccatggggctaaaggagtctatcaacagatatgattggaaggggcagccccagggtagttacccaaaccctgcctttatgccgggataaatcaggtgagtacagtgcatggctaaaccaggagcatgcgcggggggacggaatcttgcagccatctcaggagcctctcaagagcagagagacccagcctagaacaaccccacatccacgctgctggcagagactgtcttcatacccgagaggaagcaagtaggagtcccctaggagacgctattttacaagtaccagaagagatgcctgcgtggctcagtcagttaagtgtccgactcttgatttcagctcaag

SEQ ID NO: 4076 - DNA, 919 bp, Canis familiaris
actcactcttttttctctagtctctccctagacaacctcaattattcccacggrttttttacttttaattactttatttatttttgagaaggtaatccatggacaaaggacaaaatacaaaagagtatgcagtggtaaccaaccttacctatcacctttgttcccagttatccaatatcactcccccaggtaaccggtagcttctttaacgtttcagagataatcagcatattttatactatcttccccttcactttcctttttttccttataaacacaaacagtagtctacaatgtttggtaccttttttctccctaaatagtacatcttgaatatcactatgtatcagtatatacagagctgttgcattctttttaatagttatatgttattctactcaaaatgtgtattaaaaacttacttaaccacctccactggcagacatttagggtgtttccaaactcttaccactataaggaatgttgcaatggatatatttctgtgtgtgtgtgtgtgtgtgtgtgtgtgtatgtatttgcaatccacattcttgaccacattattttgtaacataggaacttatatgtgaaatttgaagagacttgctacactgawagttatatgcatttattcttatttttttaagttttattttttaatttaagtaatctctatagtcagtgtggggcttgaactcacgacctcgagataaagaatcccatgctcttctgactgagtcagctaggcacccggaaagttatatgcatttaaaatgacagatgttctcattcaccacagaggtactaccttataggtactaatttgagagtaacataattcttatgaaattaaatactgtggacatattcatggttccccaaatcgtatcataagtctcttttaagcttattatcttga

SEQ ID NO: 4077 - DNA, 500 bp, Canis familiaris
  misc_feature (49)..(49): n comprises a, c, g, or t, or includes no nucleotide
  misc_feature (439)..(439): n comprises a, c, g, or t, or includes no nucleotide
  misc_feature (446)..(446): n comprises a, c, g, or t, or includes no nucleotide
  misc_feature (450)..(450): n comprises a, c, g, or t, or includes no nucleotide
ttgtaagttcagtctcctccaaaatggggataaccacggtttcttggcnaggctatgctggggattaagtatgtctgcatctgggacataggaaatgataaataaacctagggatggttattgatgaggacccagaaggaatcaatgctattgtaggtgaattcagaaagctttaccctcaaaaatattttgaggttgcagggacctaataatggtagcaaatgtgctttatttcacagaatatgaatgggcagagccagaagcaaacaaagtagattaaattatactttttgtagttttttcctattcctgattaattcgctattttaagatacacacacacacacacacacacacctttgtcttttttcccttctctgtggtggttagcgcatgactgaacggagactcgttgagacaagtgaggcggaaagtgaantcctganatanacagcgtgaacatcagtaatactttaatttccatgtttcatggttatgca

SEQ ID NO: 4078 - DNA, 370 bp, Canis familiaris
gtttcacaagtttaggcaagttgtattattacatttcccttttcttccagaataagtgtaggcaatgctgaaaccattgtgctagtatctggttgacaaatctgagggaacagtaagttagtgctgagcatatgtatgtatgggtgtgtgtgtgtgtgtgtgtttgtgtacatacttttaaatctgtactgtattataaataatattacaacgctaatgaacttttcattctcattggacttaggcaatctattcaacactctcagacattggacaggagaatcagtgtgtctgtttcttgttacttatttctgttttaccctgattacatggctctagctttcttttgactttttctttcatattaatt

SEQ ID NO: 4079 - DNA, 590 bp, Canis familiaris
  misc_feature (37)..(37): n comprises a, c, g, or t, or includes no nucleotide
ctgcacaggctcaaatactggctctactattcagctntgtgattttaggcaagttacacagtgtcattgggtctcaggtcctccacttggacgttatacacacacacacacacacacacactttgatgagagaagtcaatgagacaatttatgtaagtaacttggaagagtgtctgatacatagtgaggcttaattaagattagcaataataattataatagtaaatataaccaaagtattatattattatggataataataatgctgttattgttattgccataattcctgctaggtaaggggcgcgtttggttatgaaagaaaagcctcaaggaatatggtagagagatacctcataggaaaattttctgtgggagttaacaaagtgactagaagttatcaggaagacaaaagaagatgataaaccagtattcaagcttcttcccctttcatggttaaagacactctatatttgtcttctctaatattttatctctcaccagctttgagccattgcccatcacaaatcagcctctttttctcttttactctgtttttaacctacagatatgtagggcctacagaattt

SEQ ID NO: 4080 - DNA, 340 bp, Canis familiaris
  misc_feature (35)..(35): n comprises a, c, g, or t, or includes no nucleotide
  misc_feature (70)..(70): n comprises a, c, g, or t, or includes no nucleotide
  misc_feature (88)..(88): n comprises a, c, g, or t, or includes no nucleotide
  misc_feature (206)..(206): n comprises a, c, g, or t, or includes no nucleotide
  misc_feature (210)..(210): n comprises a, c, g, or t, or includes no nucleotide
  misc_feature (284)..(284): n comprises a, c, g, or t, or includes no nucleotide
  misc_feature (298)..(298): n comprises a, c, g, or t, or includes no nucleotide
actggtcagagtgacagttggtttaactacatgtnaaagatatttgatgttatgaaatattaacatttanattatctcataaattgantatctgtctaatctatgagaaattgttccatttctgtgacatagaagaatctcactctcactaggataaacttcatgaagactgggagatgtgtgtgtgtgtgtgtgtgtgtgtttantganacagtgcatagcagctagtaggtgttcactaaatatttgctaagtgaaagaatgaggagcccaaacctaacaancggcatcttctcangaagaataggagtatggtgtattcacaagacagaacatcaat

SEQ ID NO: 4081 - DNA, 399 bp, Canis familiaris
  misc_feature (50)..(50): n comprises a, c, g, or t, or includes no nucleotide
  misc_feature (59)..(59): n comprises a, c, g, or t, or includes no nucleotide
  misc_feature (78)..(78): n comprises a, c, g, or t, or includes no nucleotide
  misc_feature (112)..(112): n comprises a, c, g, or t, or includes no nucleotide
  misc_feature (160)..(160): n comprises a, c, g, or t, or includes no nucleotide
agagagcgaggctcacaaaatgtccgtggatttcacaataattaagactnataagaacnatctctgtattctattttntgaaagccacgcacacacacacacacacacacantccacaagaaactgggaaagggggagctaggaaacaatacaggtggangcaggaagagaataatcctacctggacaccctggattccacgggttttgtttttaactgatggttggaataggtacgatttaactgcagaaaccgcctctggctgagcccagagtggccaacagagggcactggtccagggccttagagcctttccaatccggagctcaggcttggccccccgctcactcgggtcatccatatttctggggggaatgttagtcacaagaggtcctctag

SEQ ID NO: 4082 - DNA, 580 bp, Canis familiaris
aactctcttctttctcacctcatagatggtcagggcccaggacttgtttcctgtaaccacacttgggcatcttgcttgtgtgtgtgtgtgtgtgtgtgtgtgtgtgtatacacccatgtgagttctagcttcttcaccctcaartgartgagttaagtcagccttacactatytcmcagttgtcttcagtataggattgagaggactgaggtcacctttagccttggcaaatcaaaatgawytctctattccagtttcagtcaaagacgcctgccttttgtcaattttgggatgcatgcccaaccactaataaagattgttcacttttgttttcatctgtttttgtctatacaccattacagaatcctgggaaaaggagtaagtcttaagccttgattccaagtaagtccaaatggaatataagcccagagtgtgacatggctgttgagaaaactgatgttatcttaggtgatatttctagaatcatgtagagaccagaaaggagcagtaataacctttatttggcagtggtcagactatagggaaatggtgcttgcttctgagcttcacatgaaaagca

SEQ ID NO: 4083 - DNA, 470 bp, Canis familiaris
ttaaattttcttgaaggccaactgaaaaaggcggcaagttggttgtttaagaatgccgaacctctgaaatctctttctctgggtacgagtggccgcgagagccaggggcctatggcggcgcggctcatttctggagtggaggtgaaagccgaaagcgtgtgcatctgcttcatcgacgactgcatggattgtgacgtccctctggctgagctcaccttttcccgtgagtgttttccgaatgttcacattcatcttgaagatttgcggttattgccgagttatttgggggcccgtcttctttttcttctttttcatttttcttttgggtgtgtgtgtgtgtgtgtgtgtgtgtgtgatgttcatgctccccacttagtagtactatgggtgaaatttagttaattgttttacatatgtttttcattatttgtattttaaagaaatgtctatgtatttgccatatgtggcct

SEQ ID NO: 4084 - DNA, 180 bp, Canis familiaris
  misc_feature (32)..(32): n comprises a, c, g, or t, or includes no nucleotide
  misc_feature (103)..(103): n comprises a, c, g, or t, or includes no nucleotide
  misc_feature (175)..(175): n comprises a, c, g, or t, or includes no nucleotide
tatgggaccttgcagtaataatgatgtatcangtgtcgattcatcagttgtgacaagtgcccccctcccctgccccgctggaaaatcttgacgtaagagaggntctctctctgtctctctgtctctctctgtgtgtgtgtgtgtgtgtgtgtgtgtgtgtgtgtgtgttttgggngagac

SEQ ID NO: 4085 - DNA, 450 bp, Canis familiaris
  misc_feature (370)..(370): n comprises a, c, g, or t, or includes no nucleotide
agttgtagcaaagagaattaatgaaggcagccacactgaactgcagattttcaatgtagattaaacagcctcatagtggacgttaggactttcatagctagagagaagtcaatgtctggctttaaagcatcaaaggacaggctgactctctaagttaggggctaatgcagctggtgactttaagccaaagccaatgctcatttactattatgaaattcctagggccctttagaattatgctaaatcccttctatctgtgctctataaatggaactgcaaagcctagatgaccgtacatatatttatgacatggtttcttgaatgttttaagtccactgttgaactgactgctcagaaaaaaaaagattcntttcaaaatatgactgctcactaacaacgcacctggcacccaagggctttgacagagaggtacagtgagattaatgctgt

SEQ ID NO: 4086 - DNA, 214 bp, Canis familiaris
  misc_feature (28)..(28): n comprises a, c, g, or t, or includes no nucleotide
  misc_feature (111)..(111): n comprises a, c, g, or t, or includes no nucleotide
  misc_feature (121)..(121): n comprises a, c, g, or t, or includes no nucleotide
  misc_feature (160)..(161): n comprises a, c, g, or t, or includes no nucleotide
  misc_feature (163)..(163): n comprises a, c, g, or t, or includes no nucleotide
  misc_feature (177)..(177): n comprises a, c, g, or t, or includes no nucleotide
  misc_feature (184)..(184): n comprises a, c, g, or t, or includes no nucleotide
  misc_feature (193)..(193): n comprises a, c, g, or t, or includes no nucleotide
  misc_feature (197)..(197): n comprises a, c, g, or t, or includes no nucleotide
caaagtgaaataatggcaacataatttntatgaaaagcgatgagtgatactaccccccaaaaaagacatccgcacacacacacacacacacacacacacacacacacacanatatatatanacacatacacatgcacacaaaaccaaccaaaaaaatctnntntgccataaaaattnatatctnagcggcatngatntgtgacaagaatttaaa

SEQ ID NO: 4087 - DNA, 500 bp, Canis familiaris
  misc_feature (151)..(151): n comprises a, c, g, or t, or includes no nucleotide
  misc_feature (160)..(160): n comprises a, c, g, or t, or includes no nucleotide
ctgctcaggatataagagaggacacacaatttcctttctgtgtgaagcttttgttttagggagagggtggcaatgaaaaaattaataagcagacagtatgtcagattctgagagtcactgtgaaaaaaattaagcaagataaggtaggganggcatgcantgtgtgtatgtgtgtgtgtgtgtgagagagagagcatgcgtgtgtgtgtgtgtgtgcacgtgctcatgtgtgttatggcatgggggtggggttgtgggttgttattttatatagaatggttagggaagccctcatcaccaatcatgtgccatttgagtagacagaaagtgaggaaagagccttcaggaataagaagccgcaaatgcaaaggccctgaggtatatttgttcatggcagtgtctgagaagctataggaagttagcatggctggggcaggatgaaccaaggggatgatagttgggaggttaggtcagaaagacccctagacagatcctctaga

SEQ ID NO: 4088 - DNA, 857 bp, Canis familiaris
aatagggaaaatttggttaatagccaagatttacactagacaagcatatatttaaaaaaatgcamytcttcctttgattaaaaagtatcaagttattgataaatcacatgatataatagttaaaatattataagacttaataatgaaagatatccatcccctgccatattcctttctatcaatgaagccctcttaatgtcttgtatctatccctttatatttctaaataataaacttataccagtgtttctagatttatcagttttagagtttcttgacttcctgccaggaacagaagaatccactactctgattatttatttcctgtttatttctttaaagatgtaattagaktggaratcattcacacacacacacacacacacacacacacacattctagtacamgcataccttaragagattgctggytctgttccagaccagcacaatagagtgagtattataagtgagttatgaattttggtttcctactgcatataaaagttatccttaggggtgcctgcgtggctcagtcggttaagtgcctgactcttggtttgggctcaggtcatgggtgtgagatggagccccacatggggcttcctgctcagtgaggagtctgcttgagattctctctctgcccctccccccacgtgcatgctttctgtctctctaaagtaaataatctttaaaaaagttatctgaacactgtattgcagtctattaagtaagcaatgatattatgtctaaagagacaatgtacatatcttagtttttaaaatgctttgttactggggcacctggtggctcagtggttgagtgtctgcctttgtcttaggttgtgatcctctaga

SEQ ID NO: 4089 - DNA, 214 bp, Canis familiaris
  misc_feature (14)..(14): n comprises a, c, g, or t, or includes no nucleotide
  misc_feature (99)..(99): n comprises a, c, g, or t, or includes no nucleotide
  misc_feature (109)..(109): n comprises a, c, g, or t, or includes no nucleotide
  misc_feature (113)..(113): n comprises a, c, g, or t, or includes no nucleotide
  misc_feature (205)..(205): n comprises a, c, g, or t, or includes no nucleotide
ttcaggagggagangtcacaacgacgggttttagcatttcaagaagccctcgatacctaatattcatgccccagtgtgtgtgtgtgtgtgtgtgtgtanaacccttaanattnttcatctgggcttagtttttaaaaatcataacagagacccgaatcggtaaccatatcccctctccgtcgctctgggagggctaagcctcttntctgctcgc

SEQ ID NO: 4090 - DNA, 629 bp, Canis familiaris
aattacatggccttctggccggacaacacmcttgtdgcttagggrcagtacttgcctttggdgyaaccytcttccacttgctcaacctccatcccttctggasagtggmmggagtgasacagcaatgcctggagagtgtgtggsacccaaaccctttattctcattttaatttggctgtgagtcacaatgcragamgsmagtyctcccccaaaattcaatcgcatgtccatagaagataaactggaggattatcttcatccagacttgaaccatggccatttctgaagagwtggyctctatgcgatgtttcccttttatttattttcatgtcttaagaattgaccaatatcttttgtcttwtaaagaagcaaggttgccattctagagtggcmatttttttttkggagtggcaaaatttttttaktgaattaagaaccattgggaattgtgactgayacattgkactagcacatatgkatgtgtgtgtgtgtgtgtgtgtgtgtgtgtgwattwacttatttaacctaatgacgacctmgggctgtgataagcagtctttgatgaacagaactaaaaagggctstatkaaghtcagagaagaarkgcagmcaattcagttgtatatgat

SEQ ID NO: 4091 - DNA, 657 bp, Canis familiaris
gttttctaatctcatgggggagcataggaaagtaaatgcattagtgcgcattgaatggccccscgmkrgagcattctgagctggactggtcctaggggraaatcaagggctagttctaatctcattttcaggtaggsraagggtrgagaagtgactttctggggcaggctcttgaaaaacaggcataaacagggaacaatgggaccattcctttctgacctactcaacctggtgcttgatacgaaatgagtatggratgtgtgtgtgtgcgtgctgckacgbggtgtgtgtgtgtgtgtgtgtgtgagagagagagagagagagagataagtataaccttgagamccctcttaggagsgtaaagcktgccamcaaatcccccctgcatagggatggatttgcccctttttttcttataaaaacctgttttctgagtgccatacaaaaagtggttcagtggtgccaccgtgagcttcagggctccttgatgactacctaatccccaccccccaactcccctctgccccacctcctgccacccaaagctctttaactcaaacctaaaagttacagaacagggctggggagacactgggagagtgggagacaatggggtgaccgctggctgaagacccacagcctgggaaggtggaagtg

SEQ ID NO: 4092 - DNA, 430 bp, Canis familiaris
  misc_feature (23)..(25): n comprises a, c, g, or t, or includes no nucleotide
  misc_feature (177)..(177): n comprises a, c, g, or t, or includes no nucleotide
  misc_feature (182)..(182): n comprises a, c, g, or t, or includes no nucleotide
  misc_feature (212)..(212): n comprises a, c, g, or t, or includes no nucleotide
  misc_feature (281)..(281): n comprises a, c, g, or t, or includes no nucleotide
  misc_feature (326)..(326): n comprises a, c, g, or t, or includes no nucleotide
  misc_feature (345)..(345): n comprises a, c, g, or t, or includes no nucleotide
catctactatataaattaaggtnnnaatacgtcctatacgcaaaaggtgttaatatccaaaatatacaaagaactcctaaaacacaacagtaaaaataactcagtccaactgaaaaatggaaagaaggcatgaacagacatttctccaaagatgacctacagagagccaagagaccnatganggagatgtgccacacaatcctcattatganaatgcaatcaaaaccaaaatgagatatcacctcataccatcagaatggctaaaataaaaaacacagggnacagtggtgggtggagggatgtggtggaaaaaggacacttgggcnccggtggggtgggagtgtnaattggtgcggcctatggaaaatagtatgaaagttcctccaaaaattaaaaacaggaaataccatgtgattcagccatcccaatg

SEQ ID NO: 4093 - DNA, 330 bp, Canis familiaris
  misc_feature (13)..(13): n comprises a, c, g, or t, or includes no nucleotide
  misc_feature (17)..(17): n comprises a, c, g, or t, or includes no nucleotide
  misc_feature (24)..(24): n comprises a, c, g, or t, or includes no nucleotide
  misc_feature (34)..(34): n comprises a, c, g, or t, or includes no nucleotide
atccatagatgancggntatagangatgtctctnacacacacacacacacacacacacacacacacacatacacacacacacacacgcaggattattactcagttgtagaaagattttgccatttgtgataatatggatggacccagagggcatcgtgctaagtaaaataagtcagaaaaagaaaaattccatacatatgatttcacttctttggggaatctaaaacacaaaacagaaacagacccataaaaatacagagaataaactagtaattgccagatgggaagagggtcaaaggatattggataaaacaggtgaagagctttaag

SEQ ID NO: 4094 - DNA, 300 bp, Canis familiaris
tgcatgctgcaggtcgactctagaggacctggttcaggttatctaattaccttctgacaatttctagctaaaaaatgatgccccagctaggtagaatgatatgaaatatcatctcctccttctagtgagatggacaacatcatcaactcagccaaccttcatcttcttttttcttttctctctgtgtgtgtgtgtgtgtgtgtgtgtgtgtgtgtgtgtgtgtgtgaggagtggtggtggacgagagagggagggagagaatctcaagcagacctgccacccaagacagagcccaacgca

SEQ ID NO: 4095 - DNA, 515 bp, Canis familiaris
actcagtaaaatctcaagaggccataggctcagctgtgykggctggtcagctttcctracaggwaaacctttccatgtgggtcatgctctctctaggtgaacaagtctaaccgggatgcstsgaaccccgtgkcccaccagggckytctgkagacmmasgaaavccaggtaacagaktgdgatgagggacccacasccctgtgtgtgtgtgtgtgtgtgtgtgtgtgtgtgtgtctgtgtgcgcgcgtgcgtgcatgcgaggakgatgcatgcaggtgaatgcacatgccttctcacctgctgccaggtgacagctggcttgtgctgtgtacagtgactgtaggttctgacaccgttcagtcaccaactctggcaatttggaagagagagwttgacagttaattaacaaggacttstagaaaggakcaaggaatctcttaacagttgcagagtttgggacacctgggtggctcaatcgctgagcgtctgcctttggcccaggtcgtgtcctctag

SEQ ID NO: 4096 - DNA, 408 bp, Canis familiaris
atataccactcagagagaaccacttctaatattctaattttttggtgtctctctctctctctctctctctctctctcacacacacacacacacacacacacacatgcacacagagacacatgggcgcatgcatagtattagttgtttgtaatctcaaacaatgttaacttatataaaagtaataaagagtgagctcagctagctgctaggcagggggactattagggaaattttaatggaaattaaaaccaaactatgtaaaggaattttatatgcttgtttatttttaccaccttttcatgaagtttaatcaccatgtactaaagggaccctggcatccaaagccattgaatcatttatgcatggtggtggagccgtcaatcgaacagagacattcgggtcctctag

SEQ ID NO: 4097 - DNA, 942 bp, Canis familiaris
ccgatcttaattccttgaggggagggacttctccccaaccctccatcctagtccctacttagtcctacgaacatagtaaatgctcaataaatgtttgttaaatagamttattgaataataaggactcatctaataccagtgaaatgaataaaataaaacaataattaaataaataatggctttgagagatgataattctctttcttgatatacttataaaccactaatttatttctttgtttaaaacagcatgggcactaagtggggagaactctaacagaagcagattagaagttaaggactgcagggtctaaagtaggacctcccagtttctctgctctgatacctgttaaagagcccaggatgctgtttctaggttacttgaggattttttccccagctcttcacttagaatgagtcttaggtcataaatagaactcagctccttttctgtttcttgatgccttcagagactcattttctataktctgtagtgaaaaaaaaagtggctttttgamaaaaagatggagtgggggaaaaatagggtaaagcccamatcaacctgcctgaataaaagacctttgtcataaatgagagatrtttcagcagcttcaagagcagatatgwgtgaccgtcttgggggatgtatgtgtgtgtgtgtgtgtgtgtgtgtgagagagagagagagagagagagagtgagtttagtaggaakatsttcccagcatgtccagacacgtaagtgggacaagacaaagtgtggaactgaccactgacttatgaaaggttaaaacattagaattttgttcccaaggtctcctgctgtgcccaaacwatcccagttgctacaaaagacactacttatgattctatacatcttttctttatatgacttctcattaagtattcttacytagacttatttttawgttcaattagtatt

SEQ ID NO: 4098 - DNA, 282 bp, Canis familiaris
caaaaataacctatctgcaaggctgttgagtccaatattgtccacaatggcaaaaaggcaactccaaaggtcaatgatatacttgactagataaatcccaatacttcatcattctgatgaataataaagctatctataaaatgataatgtaagaaaatacttacctcttacaaaaagtatagaactgtgaaaaaagtgatttgtttttgttcaaaagtatttgtgaacacaaatgtaaagagagccaggagacaatatacaataaagtattatagtgttatg

SEQ ID NO: 4099 - DNA, 191 bp, Canis familiaris
aagctggattaccaagaaggatccccaggaacagagatttcctgctggtctgtggagctgtagttatgtgggaggggttaagcccaccccccatgccacatgactatgaccagagggctgcccgtggggcctgggctgggacagggagcaatattttaactcattacaaataaagaaaggtgctgtaatcc

SEQ ID NO: 4100 - DNA, 480 bp, Canis familiaris
catcaaggtccaagttgacgaagtagtttgtccccgcgaccacctggctcctgaatgtcacggggacaaactacttcatcaaggtccaagttgacgatgacgaatttgtgcaccttcgagtatttcagagtctcccgcatgagaacaagcccttggcctcgtccagctatcagaccaacaaagccaagcacgacgagctggcgtacttctagttccgctctgagcgggcccatccacgtggttccgtgtggttccgtcctctctgggcgtgtctgggatcaaaagccaatgctgaaaaaaaaaaaaaaaaaaaagccaatgctgttgctttgcagggccacttagggagaggctgtcctgcacctgtcttggtccctgctcctaactcccgtgggcgagacaaagtcagcacagtcactgaccttcattacgttcatcgagggcttatagtctctttaaatacatatttgtagatctttg

SEQ ID NO: 4101 - DNA, 675 bp, Canis familiaris
ttggagctgtcgccttcattcaccagaaacggggtggcatctgctgggccttgctgaggatcctgctcgccctggcagctttctccacagccaccgctgccatcgtcatcggagccagtaatttctataggcaccgcttttatttgagagacttcatctgtgatgtctcctcgaaggcctggtcctgggcccccctgagccctagcactccaagcccagaagaagccacaaggctgcacctgtgtctctcctatctgagcatgctggaggccctgttcataagctttcaggtcatgctgttgggtatctgggttctgctgctcctggcatctctggttcccctgtgtctgttctgctggagtaggtcccgacataagaaaatagaccagaagaaactgctggaagcaaatggaatctagccttgcttctcctaagtgctcatgcctggactctttctggactgcctctggctcctgggagaaggatcaggctggggaaaagagactctacgctagctccagttaccttcctccactgccaacagccacagccatggccagagtcccctccaccaatcatcacaccactcttgcccatttctggctcacctttaccattccgccttgcctcgtggcccctcatgagcaatgaagacaaaaaactgtcttgtttctc

SEQ ID NO: 4102 - DNA, 363 bp, Canis familiaris
ggacaaggcttatgttaaaaaaggacaaacgtttgataaattcaaacacagaagttattcatgggaaaaatgcccaagtctgaagacagtataatcaatcgggaaaaaagtatctgtaactcatgttacagatcaagagctaatctccctcatatataaagagtacacgcaaattaataagaagaccaacaatatatagaaagaaaggtaagggatttgaatgtgtagttcatgaaaaaggaatagatatggctttgaaatatatgaagtgtattccacttcatttgtaacttacctattcatttagtaaatatgtatcacagttctctaagtgcccctaggcagtagagaatagagcactgg

SEQ ID NO: 4103 - DNA, 676 bp, Canis familiaris
ctcgccctgtctttggtgggtacagtgttccttttcagtatcccaaaagctgtgacgggggtgtccccacttacctagaaagcattaccagtcaacaagaagcattctcagatgcagaccttacgtagtgttctttttgcaatgatctatttatttaacctatttatatttatttaatttttactctgaaatatatccagttataattgcacttggcttttaaagcacatcagatttgttttggacaacacacccctgaccactctaaaactggaaaaggaaaagttatactggatttttccacaggatggacgcctcacagtagttttatcattaaagggtgaaaaatttggtcagggtaagaattttcatttctgagtgatttttttttaaaacaaattctgtgccattgtgtcttctctgtggacggttgtttaatgggtatgtgttaattgtgtgatagaatcctctctgtgaacctacaatcctctttttagctttatattttataaactgccagattgtacaatttttatgtgtatttttaaagcttgatgtgagggtaattatctaagttaaacagcctatttttgtacctcctgtacagttttataattctgctgattgatgatggcgtcttatgtggcgccaaccacaaataaagatagttttagac

SEQ ID NO: 4104 - DNA, 249 bp, Canis familiaris
ctgaagaaattgaaaggatggttaatgatgctgagaagtttgccgaggaagacaaaaagctcaaggagcgcattgatactagaaatgaattagaaagctatgcctattctctaaagaatcagattggagataaagaaaagctgggaggtaaactctcctctgaagataaggagaccatggaaaaagctgtagaggaaaagattgaatggctagaaagtcaccaagatgctgacattgaagatttcaagg

SEQ ID NO: 4105 - DNA, 475 bp, Canis familiaris
  misc_feature (289)..(289): n comprises a, c, g, or t, or includes no nucleotide
ggactgtggcattggtggtcactaaacttttctgccccaaagtggtgttgggacataaagaaccagagtgtgacacgtttcagtttctcctcagaagccattgtgcagaacttcagaggtgggcaggtaaagaagtattatctaaacaagcatgcagtaacaatatcaaagcctgtgtgacattttatgtacagttgctgggagtccataagtcatgtgtatgtttttttctcttaggttcattttccagacactgaaagagcagaatggctaaataaggtaagagtanaatatactaaataccagattatcaatgggagttagaagatgagttgccatctttccattttggggaatttggatgttgacaatatgtgaactcatttggacttagtgggctggctcctgctctccaaaacactgagtcataactaatatattactttcctaaatggtgaaaactgtgtctttaatg

SEQ ID NO: 4106 - DNA, 437 bp, Canis familiaris
tatatatttgtttgtaagccatcctaaatccttccagagctagaagggatatatttaagcacataaattagtcaatggaggcccacctgcgacttagagcttcatgaggatccttaactgcccagggggtccgagaacatatccagaacttgtctgcacagatttctctgtgctgactggacagaaaatcggcatatgtagcccaccgagatgctaacagctgacactggcctgattgttgctttgctctgtattttaaaaggagccatcaaggacttacctaatgtgagtgacatgggaatttcaagtgctgtagaaaagccagcaagggacctcatagtagtgtttgtccaactatagagcccgacgtattagggggttataaaatcagggttatgatcaacagttttttaaataaaaaattttaaatttttact

SEQ ID NO: 4107 - DNA, 197 bp, Canis familiaris
gtgctcagcaaagccctgagtcagcgcaccatcaccgtcggcgtgtacgaggcggccaagctgctcaacgtcgacccggacaacgtggtgctgtgcctgctggcggccgacgaggacgacgacagggacgtggcgctgcagatccacttcaccctgatccaggccttctgctgcgagaacgacatcgacatcctgcg

SEQ ID NO: 4108 - DNA, 242 bp, Canis familiaris
gccaaggaggagcctaaacaagccgatgtgcctgctgctgtcactgctgctgctgctgctgccaccacccctgctgcagaggatgcggctgccaaggcaacagcccagcctccaacggatgctgcagagagcagccaagccgaagaaaagatagaagctgtagatgaaaccaaacctaaggaaagtgcccggcaggatgagggtaaaggagaagaacgtgaggctgaccaagaacatgcctg

SEQ ID NO: 4109 - DNA, 195 bp, Canis familiaris
tgaggagttcaacatcaccatgcagattatgcggatcaaacctcatcaaggccagcacataggggagatgagtttcctgcagcatagcaaatgtgaatgcagaccaaagaaagatagagcaaggcaagaaaatccctgtgggccttgctcagagcggagaaagcatttgtttgtacaagatccgcagacgtgtaa

SEQ ID NO: 4110 - DNA, 188 bp, Canis familiaris
gcacgagccccgaagccgtccccgaagccgtccccgcagcgagcgaacgagcgccgaggcgtggggaaaatggcagacaggttttcacttaatgatgctttatctgggtctgggggtgggaaccctcaaggatggcctggtccatggggaaaccagcctgctggagcagggggctacccaggggcctc

SEQ ID NO: 4111 - DNA, 320 bp, Canis familiaris
  misc_feature (53)..(53): n comprises a, c, g, or t, or includes no nucleotide
  misc_feature (56)..(56): n comprises a, c, g, or t, or includes no nucleotide
gcacgagaagggaagaaggcgaaggggaagaaggtggccccggcccctgccgnggngaagaagcaggaggccaagaaggtggtcaaccccctgttcgagaagaggtctttgaactgtgggtggggacaggacatccagcccaagagggacctcacccgctttgtcaagtggccgcgctacatccggctgcagtgccagagggccattctgtttaaacgttttaaggtgcctgctgccattaaccagtttacccaggccttggtccgtcaaacagtttcacaactgttgaagctggtccacaagttcagtccagtgtccaa

SEQ ID NO: 4112 - DNA, 393 bp, Canis familiaris
gcacgagggcggggggaggggacactggctctttgccgtgcgcgccgcgctctctgcccctcagtcgccgccgccggcctgcctcgccgcccgcacgctccgccgtctttccgcagagggggttggattacccgcagtgctccgccacgtcaggccagtgtccagagccctggctcctcatctcactcgggcctatgccaaggatgtaaaattcggtgccgatgcccgagccttaatgcttcaaggtgtagatctcctagccgatgccgtagccgttactatggggccaaagggaagaacagtgattattgagcagagttggggaagtcccaaagtaacaaaggatggtgtgaccgtggcaaagtcaattgacttaaaagacaaatataaaaa

SEQ ID NO: 4113 - DNA, 427 bp, Canis familiaris
gcacgagcatatgttgaaaaatggaaagacagaagaccttgcttgcatgtacaagttatttagtcgtgtgccaaatggcttgaaaacaatgtgtgagtgtatgagttcctatttgagggaggaagggaaagcccttgtttctgaggaaggagaaggaaagaatcctgttgactatatccagggcttattggatctgaagagtaggttcgatcgcttcctccaggaatcatttaataatgaccggctctttaaacaaactattgcgggtgactttgagtattttctcaacctcaactccaggtcccctgaatacctctcattatttattgacgataagctgaaaaaaggagtcaaagggctaacagaacaagaagtagaaacaatattggataaggcaatggtcctttttaggtttatgcaagaaaaa

SEQ ID NO: 4114 - DNA, 132 bp, Canis familiaris
gcacgaggccgcgccgccatcatggacacgagccgtgtgcagcccatcaagttggccaggggcaccaaggtgctgggcaggaccggctcgcagggacagtgctcgcatgtgcgggttgttgtgatggacgac

SEQ ID NO: 4115 - DNA, 168 bp, Canis familiaris
gcacgaggaactagtctcgagttttttttttttttttttaagcagggcctttcacctagggactagcatgcactgcttgtggatgaaagaaatgaacattatttacttctggctggggggatgtaatattgcaaaatgcaatacagttggagaaaatgggtttttaga

SEQ ID NO: 4116 - DNA, 394 bp, Canis familiaris
gcacgagccgctgtgccaagtgtggcaaaggcctcgagtccaccaccctggctgacaaggacggcgagatttactgcaaaggatgctacgcgaagaatttcggacccaagggctgggggtgtgggcaaggagccggggctctggtccactctgagtgaggccaccgccgtccaccacacgctgcccactcctgtgcttctcattgccgttcccttcccagcagccttggcgacctccaggattcctcctccctctctcagccccgccacacatcactaatgacttgaacttgggtgtctggctccctttggtttggagtctgcctgaggttcccccccacacacacaaggggctccctctgcctgggttctgacaccatccccagcaggagacc

SEQ ID NO: 4117 - DNA, 392 bp, Canis familiaris
gcacgagggaagtgcgaggaagcgcctactaccttcggtctcggcagcggaggcaaccgcgactccaaggagccgaggagatgaacacgcgaagggcgacccgcctgctggagcaggtgaggggcagcagcagcagtcaccgtctccggtgacgaccaggagagggttacgggactttcatccgtctgacgaggatgaaccatctacacaaactattttaagccaagcagtcccgaagaaaactatccagagaatacaagaaactccagtggtgagtgaagatcctgtaatcagcctgtgtagaccccctctaagaagtccaagatctgattcggcatacaaaacaaatggaaatactaaaatgagtgaattagaagccaccagtgttcaac

SEQ ID NO: 4118 - DNA, 175 bp, Canis familiaris
  misc_feature (33)..(33): n comprises a, c, g, or t, or includes no nucleotide
  misc_feature (36)..(36): n comprises a, c, g, or t, or includes no nucleotide
gcacgaggcgggggcggccgaggcggcggccgnggnggaggtcggctcagccccgcagtttgaggagctgctgcgcctccgagccaagtctctcgttgtggtccatttttgggcggcatgttgtccacagtgtgtccagatgaatgatgaaatggcagaattagccaaggaacac

SEQ ID NO: 4119 - DNA, 409 bp, Canis familiaris
gcacgaggccggtgaagcggcagaggatggagagcgcgctggaccagctcaagcaggtcaccaccgtggtggccgacacgggcgacttccacgccattgacgagtacaagccacaggggggcaccaccaacccgtccctgatcctggctgcagcgcagatgcctgcctaccaggagctggtggaggaggccatcacctacggcaggaggctgggcgggtcgcaagaggaacagattaaaaatgctatcgataatctttttgtgttgtttggagcagaaatattaaagaagattccagggcgtgtgtccacagaagtggacgccaggctgtcgttcgacaaggacgccatggtggcccgagcgcggcggctcatcgagctctacaaggaagctgggatcagcaaggaccg

SEQ ID NO: 4120 - DNA, 358 bp, Canis familiaris
gcacgagtgcagatctgggacacggcgggccaggagcgctaccgtacaatcaccaccgcctactaccgcggagccatgggcttcctgctgatgtatgatgttgccaaccaggaatggttgtgtgccgtgcaggactgggccacacagatcaagacctactcatgggacaacgctcaggtaatcctcgtggggaacaagtgtgacctggaagatgagcgtgtcgtgcctaccgaggatggccggaggctcgctgatgaccttggttttgagttctttgaggccagcgccaaggagaacatcaatgtgaagcaggtctttgagcgccttgtggacatcatctgtgagaagatgaacgagt

SEQ ID NO: 4121 - DNA, 324 bp, Canis familiaris
  misc_feature (26)..(28): n comprises a, c, g, or t, or includes no nucleotide
  misc_feature (58)..(58): n comprises a, c, g, or t, or includes no nucleotide
  misc_feature (87)..(87): n comprises a, c, g, or t, or includes no nucleotide
  misc_feature (115)..(115): n comprises a, c, g, or t, or includes no nucleotide
gggacaaaagctggagctccctctcnnnggcggcgcaaggcggctagaagaaaacccnggctgcaggcggcggcggcggcggcgggncctgcgaccgagaaaaatctgctaaaanggctctctacccatctcttgaagacctgaaggtagacaaagttcttcaggctcaaactgcctttttttttaatggtttgttggcagcaattttgtctgaagcttatgaaaccatctctcaagatggaaatctctatcctaaactatatccggagctgtcccagtacatgggcctgagtttaaatgatgaagaaatccgtgcaaatatgg

SEQ ID NO: 4122 - DNA, 321 bp, Canis familiaris
tttagttgatatgtcaagggttcaagatgatgaagttggtgatggtactacctctgttactgtgctagcagcagaattactaagggaagcagaaactttgattgcaaaaaagattcacccacggcggtcattgcgggttggagagaagccacaaaggcagcaagacaggctctgttgaattctgcagttgatcatggttctgacgaagttaagttccgtcaagatttaatgaacattgcgggaacaacattgtcctcaaaacttcttactcatcacaaagaccactttactcagttagccgtagaagctgttcttagactg

SEQ ID NO: 4123 - DNA, 233 bp, Canis familiaris
  misc_feature (122)..(122): n comprises a, c, g, or t, or includes no nucleotide
gcacgagtgcagccttcccctgcagctgtggtgtagagggggtctattttcttggatggatgaaaaggctgtactgagcaaatctctagaagtgagccctgtcctttttttggaggcctgtngatcgcaggagctgactgcactttccacccctcaggaataggtgcgaactgcaattcttgcgtgctcaggcttctgttgcctagtactttctgtacttcatccctctggat

SEQ ID NO: 4124 - DNA, 399 bp, Canis familiaris
gcacgagccgccatgtcttccggcgccagcgtgaacgccctgcagcgcctggtggagcagctcaagctggaggccggcgtggagaggatcaaggtctcgcaggcagctgcagagcttaagggtactgcatgcagaatgcctgcaaggatgccctgctggtaggtgttccagctggaagcaaccccttccgggagcccagatcctgtgctttattctaaaggcggtaaggaaggagctcactgaggaatgctttcaggcgcaaagtgatgaataactaactgcctccaagtctcaagaaaacacttttctccagccaaacaacttttacatatttcagacctttccttacctatttcagatccttcagatccttttctttcccagaatttcagccaaaat

SEQ ID NO: 4125 - DNA, 283 bp, Canis familiaris
  misc_feature (14)..(14): n comprises a, c, g, or t, or includes no nucleotide
gcacgagggtcagngccccttcctcgaccttcactgggcctcccgcaccccctagctgcagccaggccagaggcaagaagaccgtgacaagcaccactcgacgcccatttcagaccggtggtgggagaaagcagtgaccagcctctctgggccacacgtgccttacttgcggggaaccttaaggaaaccttcccgcctcccgcttactttctaaacccaggccgtgttttaaaagtatcctctctcgagagtaggcatatccttccctgtccctgtccacacg

SEQ ID NO: 4126 - DNA, 269 bp, Canis familiaris
gcacgaggcacgatgtcccacaggaagttctccgctcccaggcatgggtccctgggcttcttgcctcggaaacgcagcagccgccaccgtgggaaggtgaagagctttctcaagggtttgttggcaagcctgtccacctcacagccttgctgggctacaaggccggcatgactcacatcgtgcgggaggtggaccggccaggatccaaggtgaacaagaaggaagtggtggaggcttgtgaccattgtggagaccccacccatggtggt

SEQ ID NO: 4127 - DNA, 317 bp, Canis familiaris
  misc_feature (8)..(10): n comprises a, c, g, or t, or includes no nucleotide
  misc_feature (12)..(12): n comprises a, c, g, or t, or includes no nucleotide
  misc_feature (22)..(26): n comprises a, c, g, or t, or includes no nucleotide
  misc_feature (28)..(28): n comprises a, c, g, or t, or includes no nucleotide
  misc_feature (47)..(49): n comprises a, c, g, or t, or includes no nucleotide
  misc_feature (56)..(58): n comprises a, c, g, or t, or includes no nucleotide
  misc_feature (61)..(61): n comprises a, c, g, or t, or includes no nucleotide
  misc_feature (64)..(64): n comprises a, c, g, or t, or includes no nucleotide
  misc_feature (71)..(72): n comprises a, c, g, or t, or includes no nucleotide
  misc_feature (76)..(76): n comprises a, c, g, or t, or includes no nucleotide
  misc_feature (81)..(82): n comprises a, c, g, or t, or includes no nucleotide
  misc_feature (87)..(87): n comprises a, c, g, or t, or includes no nucleotide
caaaagcnnnanctccccttcnnnnncnaagttaggcgggcgttatnnnaaccccnnnctncantaagtcnncacnagccnntatantacgcactgccttgagcctcctcatccgagccgaactaggtcagcccggtactttactaggtgacgatcaaatttataatgtcatcttttttttccgggggggtgggataatcttcgggatggtcatgaaaaaaataaccgaaggctttggaaactgactagtgccgttaataattggtgctccggacatggcattcccccgaataaataacatgagcttctgactcctt

SEQ ID NO: 4128 - DNA, 207 bp, Canis familiaris
  misc_feature (27)..(32): n comprises a, c, g, or t, or includes no nucleotide
  misc_feature (35)..(35): n comprises a, c, g, or t, or includes no nucleotide
  misc_feature (56)..(56): n comprises a, c, g, or t, or includes no nucleotide
  misc_feature (64)..(66): n comprises a, c, g, or t, or includes no nucleotide
  misc_feature (72)..(72): n comprises a, c, g, or t, or includes no nucleotide
  misc_feature (203)..(203): n comprises a, c, g, or t, or includes no nucleotide
gggaacaaaagctggacctccacttcnnnnnncgncgctatggcgggggctatatnataccccnnnctgcangctcgagtttttttttttttttttttggttgtcaaatgatcctttattgaaatattttcctttgttgttaactcgctgggcattccactgcaccactattgatgtcatctattttttcaggggttgtgggngcca

SEQ ID NO: 4129 - DNA, 136 bp, Canis familiaris
cgacaacgggctagaggaacaccccgggcctgcaggaattcggcacgaggcaagactctggtcccatttcctagagtggggagcctccctggcacaaacccagctgcttctcccagaccagggggcccaatggcta

SEQ ID NO: 4130 - DNA, 333 bp, Canis familiaris
gcacgagggagaattcagcaagctgtgaacgtttaggacgccccgtgcgttctttacgtaggtcgtacttaataaaccgtggcccccagatgacagcacaggtgtctgcgagtggatgttgggctcgggactgtcctccgtggattcagggccttgggaaagccatgtgcagaaaattgtattcatttggtacttcttaatactgtctagaatagaccgacagctaagcccatatttggatcttgaggataattgttgtgcccacattcaggtgtcccttaacattaggctgtgagagtagcggtggtggtcggttgctcagtgggccagacc

SEQ ID NO: 4131 - DNA, 186 bp, Canis familiaris
gcacgagtgaagatgaaggtttccggagtcggcagtttgcagccttagtggcatctaaagtattttatcaccttggagctttcgaggagtctctgaattatgcactttttgctgggtagttgttcaatgtcaatgataactctgaatacgtggagactattatagcaaaatgcattgaccactaca

SEQ ID NO: 4132 - DNA, 390 bp, Canis familiaris
gcacgagccgcagcgagcgaacgagcgccgaggcgtggggaaaatggcagacagtttttcacttaatgatgctttatctgggtctggaaacccaaaccctcaaggtttgcctggggctgtggaaaccagcctgctggagcagggggctacccaggggcctcctatcctggtgcctaccctggccaggcacctcccggcggctaccctggccaggcacctcccggcggctaccctggccaggcaccacccggcggctaccctggccaggcaccttccggtggctaccctggccaggtacctatcggtggttaccctggccaggcgccatctggcaccttccctggtcccacagtacctgctatttctggtccaacagttccaggtacccaa

SEQ ID NO: 4133 - DNA, 278 bp, Canis familiaris
  misc_feature (5)..(7): n comprises a, c, g, or t, or includes no nucleotide
  misc_feature (11)..(11): n comprises a, c, g, or t, or includes no nucleotide
  misc_feature (38)..(38): n comprises a, c, g, or t, or includes no nucleotide
  misc_feature (65)..(65): n comprises a, c, g, or t, or includes no nucleotide
  misc_feature (69)..(69): n comprises a, c, g, or t, or includes no nucleotide
cttcnnnggcngggaagccggagctagagaataccccnggctgcaggatgcggcacgagggtatncagncagatgggaccctgtaaaagctgtaaaatgataacagagcaacccgatagcagaagggtcaactcttctgttggattttctggtttgttttttacagggaagttcgggtattgctttgtgggattttatgaacacagagatgcagctgctgcattagctgctatgaatgggagaaaaattttgggaaaggaggtcaaagtaaactgggc

SEQ ID NO: 4134 - DNA, 439 bp, Canis familiaris
  misc_feature (7)..(7): n comprises a, c, g, or t, or includes no nucleotide
  misc_feature (18)..(22): n comprises a, c, g, or t, or includes no nucleotide
  misc_feature (24)..(24): n comprises a, c, g, or t, or includes no nucleotide
  misc_feature (41)..(43): n comprises a, c, g, or t, or includes no nucleotide
  misc_feature (50)..(53): n comprises a, c, g, or t, or includes no nucleotide
  misc_feature (58)..(59): n comprises a, c, g, or t, or includes no nucleotide
  misc_feature (65)..(67): n comprises a, c, g, or t, or includes no nucleotide
  misc_feature (198)..(198): n comprises a, c, g, or t, or includes no nucleotide
aagctgnagctcccttcnnnnncngggtatgggagctaaannnacccccnnnnctgannaattcnnncacgagggcggttagtctcctcagcgctgcccatagcaagatgtcttcaggaaatgccaaaattgggcatcctgctcccaacttcaaagcccacagctgttatgcttttttggccaggtgtggggcctcancctatctgactacaaaaagaaatatgctgaattcttcttttatcctcttgacttcacctttgtgtgccccacggagatcattgctttcagtgacagggcagaagaatttaagaaactcaactgtcaagtgattggtgcttctgtggattctcatttctgtcacctggcttggatcaacacacccaagaaacaaggtggactgggacccatgaacattcccttggtatcagaccccaagcgt

SEQ ID NO: 4135 - DNA, 178 bp, Canis familiaris
  misc_feature (88)..(88): n comprises a, c, g, or t, or includes no nucleotide
  misc_feature (90)..(91): n comprises a, c, g, or t, or includes no nucleotide
gcacgagccgcctccccgaagccggccccgaagccggccccgcagcgagcgaacgagcgccgaggcggggggaaaatggcagacaggncnncacttaatgatgctttatctgggggttgttgcccaaaccctcaaggatggcctggtccatggggaaaccagcctgctggagcagggg

SEQ ID NO: 4136 - DNA, 433 bp, Canis familiaris
tcggaaaatacggctcacgccctgggacttactctacggtaaaccccgcttccccgcgaagaccgagcaaaatcccaaaacaaagctgcggatggagctggaactcgatgagggcttcccaaggggtgaaaacgtttatttagtgttttgttgttgttttgttgtcgttgttgttgttttaaggagtgttttaaccagcggtgcctacgtcgtgtcggatttcttaaggaaagcacccagacgctttgcgtcccgcttgggacagaggaggagcgtttgcgctcaaagtggaattacgtggatcatacctaaatccgagcacctcgaagcgtagcgtggaaaacaagggtctaggacttgtcatcgacgggatcggtgtacgaagaatgcttacaagcaccgttcacaatgaacactcttcgttcccaaaagt

SEQ ID NO: 4137 - DNA, 426 bp, Canis familiaris
gcacgaggaactagtctcgagttttttttttttttttttaaagattttatttatttctttggcagaaagagagtgcaagctgcgtgcaacaggcagagggtgagggagtagcaggctcggcgcagagcaagaactcaaggtggggcttgatccaggaccttggaacttatgacctgagccgaaggcagacacctaaccaactgagcatctgccttcggctcggggcacggtcccagggggtccgggattgagtcccacatcaggctccctgcagggagcctgcttctccctctgccttgtgtctctgcctttctgtctctcatgaataaataaataaaatcttaaaaaaaaaaaaagtttatcaaacttatgggcacagctaacacaatactcgactgataatctaggatgctaagtgcacacact

SEQ ID NO: 4138 - DNA, 163 bp, Canis familiaris
  misc_feature (127)..(127): n comprises a, c, g, or t, or includes no nucleotide
gcacgagtcaatatttctcaccctcttcatcctatttcaactaaaaatttcaaatcactactacccagaaaacccggtaaccaaatctgctaaaattgctggtcaacataatcctgggggggagcanatgaacgaaaatctattcgcttctttcgctgccccc

SEQ ID NO: 4139 - DNA, 251 bp, Canis familiaris
gcacgagctgcagcggtcgcaggcggtggggaggggagctgctcggcggcccgcggacccgaccctttcagcgctctgctcccgcgcctgcctacctcgctcctcggttccatgacgcgggtggccaccttcaagggagtcgatcccaacagcaggaatagctctcgggttttgcggcctccgggcggtggatccaatttttcattaggctttgatgaaccatcagaacaacctgtgaggaggaacaaaat

SEQ ID NO: 4140 - DNA, 400 bp, Canis familiaris
gcacgagccgacatggcccagtttaagcagggagtgaggtctgttgccggaaagctctcggtctttgccaacggagtcatgacgtccattcaggatcgctacggttcttaaatcccacgggggggtacctatttctggagaaattcctctttccgtgaactggtgaccacagcacagactgcagcgaagaccagcagactgttttgcctctttgtcacgtagtatatacgcattgctgatttttagtatttctttgaagaaattctcatttttgatgtagtagaagctttattgtaagttctgctgtgctttcctgccatcacacgccccgcttggggcagaactgtgcacatgcttgctttattttcttgggatctagttccaacagccaggggcccag

SEQ ID NO: 4141 - DNA, 398 bp, Canis familiaris
gcacgaggcagttgccgccacatcggggatttctggctcttttctcttcgccttaaattcgggtgtcttttatgaataatcaaaagcagcaaaagccaacgctatcaggccagcgtttggggggccagaaaaagagatgaaaaagagaggtttgaccctactcagtttcaagactgtattattcaaggcttaactgaaactggtactgatttggaagcagtagcaaagtttcttgatgcttctggagcaaaacttgattaccgccgatatgcagaaacactctttgacattctggtggccggcggaatgctggccccaggtggtacaccggcagatgacatgatgcgtacagatgtctgtgtgttcgcagcacaagaagacctagagaccatgcaagc

SEQ ID NO: 4142 - DNA, 219 bp, Canis familiaris
gcacgagccgtgctgcttatggcggcgctggagagggggcgctgagctgttgggtatgaagtgtaacagaacagactttaccacctgaaacttgctgcttcaagttcagatcagacgagtggcaaacctcgaaacaacaagaccaaagaagagtacacttaagttgaagacacaacacttgatctgaaacaagaagtttgtgcctactcaacagttttg

SEQ ID NO: 4143 - DNA, 235 bp, Canis familiaris
  misc_feature (6)..(9): n comprises a, c, g, or t, or includes no nucleotide
  misc_feature (11)..(11): n comprises a, c, g, or t, or includes no nucleotide
  misc_feature (39)..(41): n comprises a, c, g, or t, or includes no nucleotide
  misc_feature (47)..(47): n comprises a, c, g, or t, or includes no nucleotide
  misc_feature (52)..(52): n comprises a, c, g, or t, or includes no nucleotide
  misc_feature (54)..(54): n comprises a, c, g, or t, or includes no nucleotide
  misc_feature (80)..(82): n comprises a, c, g, or t, or includes no nucleotide
  misc_feature (180)..(180): n comprises a, c, g, or t, or includes no nucleotide
  misc_feature (183)..(183): n comprises a, c, g, or t, or includes no nucleotide
ctttcnnnncnggggaaggggggggcggaaaaaaacccnnnctgcangaatncngcaagaggcgcgagggcgccgagcgnnncttgaagatgcaaaaccagcgcggcggccgcgccctcttccaggacgtgcagaaaccgtcccaagatgagtgggggttgtccctgggggcgagggganccnccctgcttctggagaagagaatgaaccaggcccttctggatctgcatgccct

SEQ ID NO: 4144 - DNA, 237 bp, Canis familiaris
gcacgagagcccgaggaagaaggcggcggcggcggtggcggtgactgagcgcagcccagtgacaggatggctgggcacagattggtgttggtattaggagatctgttcatcccacggcgtggcaacagtttgccggctaaattcaaaaaactgctggtgccaggaaagattcagcacattctctgttctggaaaccttggcaccaaagagagttatgactatctcaagactctggcc

SEQ ID NO: 4145 - DNA, 245 bp, Canis familiaris
  misc_feature (119)..(119): n comprises a, c, g, or t, or includes no nucleotide
gcacgaggctggccgacgccatcaacaccgagttcaagaacacgcgcaccaacgagaaggtggagctgcaggagctgaacgaccgcttcgccaactacatcatgcggtttttggagaantgttgagaggagatgcttcagagagaggaagccgagagcaccctgcagtctttccgacaggatgttgacaatgcttctttggcacgtgttgaccttgagcggaaagtggaatccttgcaagaagag

SEQ ID NO: 4146 - DNA, 187 bp, Canis familiaris
  misc_feature (14)..(14): n comprises a, c, g, or t, or includes no nucleotide
  misc_feature (17)..(17): n comprises a, c, g, or t, or includes no nucleotide
  misc_feature (21)..(21): n comprises a, c, g, or t, or includes no nucleotide
gcacgagcgaaggnagnaagnacattaataaggaaataaaaaatgctctcaagggggtgaaacagataaagaccctaattgaacagacaaacgaagagcgcaaatcactgttcagcaggctgttggaagccaagaagaagaaagaggatgcactaaatgataccaaggattctgaaacgaagctgta

SEQ ID NO: 4147 - DNA, 350 bp, Canis familiaris
  misc_feature (258)..(258): n comprises a, c, g, or t, or includes no nucleotide
  misc_feature (329)..(329): n comprises a, c, g, or t, or includes no nucleotide
  misc_feature (341)..(341): n comprises a, c, g, or t, or includes no nucleotide
gcacgagggaggtttgaaactcggcgtcgggagttgaggctccagttcttgtgctcccaaaagaggaatcggggcccggtgagtgatttgaataaattgaggagtctttaagagggcccggcaggccggaaagagccggcttggcatctgcaccagccatcatctatctccacagaggcctctggcccagcggcccggaggctcctgggcggggaaccgggaagaccgagtggtctggagtcagaggtcggacgtggncgcggaaatggctgagatctgagtcatttgtcacaggcatccccttctcgccccgggccgggcccttctcnaccttatttctnctggttgag

SEQ ID NO: 4148 - DNA, 246 bp, Canis familiaris
  misc_feature (100)..(100): n comprises a, c, g, or t, or includes no nucleotide
  misc_feature (214)..(214): n comprises a, c, g, or t, or includes no nucleotide
gcacgagtgcttcttcaacccctgatagcactcgctctgcccgcagtgggcgaagtagagtcctggaggcactgaggcagtctcgtcaaacggtacctgntatcaacacagagccctcccagaatgaacagatcatttgggatgacccgacagccagggaagagagagcaaggcttgccagcactctgcagtggcctagttgtcccacacagtnttctgagcttcaggttgacattaaaaaattgg

SEQ ID NO: 4149 - DNA, 258 bp, Canis familiaris
  misc_feature (225)..(225): n comprises a, c, g, or t, or includes no nucleotide
  misc_feature (229)..(230): n comprises a, c, g, or t, or includes no nucleotide
  misc_feature (236)..(236): n comprises a, c, g, or t, or includes no nucleotide
gcacgagcttctcttggagtcaagaagcctaccaaagccctgctctttgtaatcctgagcccagtggggccttatttttcaagtggaacctttaagccagtgtccctgtgggccaatccgaagtatgtgagagcctggaaaggtgggactggagactgcaagatgggagggaattatggctcatcactttttgcccaatgtgaagcaatggatagcggccttgtncagnncaggtntcttttgtggctcttaatggag

SEQ ID NO: 4150 - DNA, 420 bp, Canis familiaris
gcacgaggaaaaaagaaaaaaaatggcatgaagtagaatgttcatttaagaatgttcatttttacagcccacccaccatctcccaggtggttctgacatataaggtgcttaggccccactttcagaatcactaatttatggagttcacagacagattttaccagaaaccatatggctcaagcctacctaaaatggcctgttgtggaagagaagaaagtgcttcagctttatttgtattctctgtcctggttttggtaagtgctgtttcagtctgtgtgttcgagtcttaagccaggctcccattaattagtaagaaaaccaggccctccaggcaaaaacttgaggctgtagagcttgctcactcgcactctctttcccatcttcctcctcttttgtctccaaagaccccctttacctgga

SEQ ID NO: 4151 - DNA, 399 bp, Canis familiaris
gcacgagattttccagaagtttaaaactaaaatagcgcttgagccggaacaggttctcagatacggcagagggattgcacccatctggatctctggtcaaaatatccctcaactacctgaaggccgacagactgggcaagagtgtcgattggggtgtcctggctgtcttcacctgtgctgaaagctgtagactggggattggctacacagaggaatttgtctggaagcaagatataacagatacaccctaaagacactgtaaagcctcacagatgctcttaatctcttagaccttgcaagaccacttctacactttatcctaagagacaaaagtacaaagatgttgttttaggcgagtttacaatgtgtaaatattagtgaaacaataatgcccagtga

SEQ ID NO: 4152 - DNA, 393 bp, Canis familiaris
gccgagagaaaacatccttattgaaatttgcattttttatgaatttcttacagttttatttagcccactgccctcctttctatttaggaaaacaaatgtgcacactgaaccaattgctcctattctgtgtcttggttatctcatctgaaaagagtttggactagatgagtggttttcaaacgctgttctgtgaatcctcctccagggttggggagattctgggtgctgccttcttccaagcaactctgctttcatcacttttacactgggccttctacatattttcacttgaacttggaaaacataggattagataatctctgttccttttagttctaatattctgattgtagcccacttaccattttattatgaagagttagggccagagag

SEQ ID NO: 4153 - DNA, 215 bp, Canis familiaris
gcacgagcatctgtgcccctggaggacttgatgctggagcctacagccatggctgggaacctgactgtgaagatgctgggaggtgaggagttcctggtgcccctgagggactctatgctggcatcagagctgaagcagcagatagccctgaaaactggcgtgcctgcgttccaacagcgcctagctacccacccggctggcacagtgctgcagga

SEQ ID NO: 4154 - DNA, 372 bp, Canis familiaris
gcacgaggctggtgtgtgaaacctccttcaacaaaaacgaaaaatcagagaccgaaccaggctgcccctttatctatatcattcgaaaggatatagatgtttactctcagatcttgagaaaactcttcaatgaatcccatggaatctttgtgggcctccagagaattgaagaagaattgactggaaaatccagaaaagcacaattggttcgagtgagtaagaactaccgctcagtcataagagcatgtatggaggaaatgcaccaggttgcaattgctgccaaagatccagccagtggtcgccagttcagcagccaggtctccattttgtcagcaatggagctcatttggaacctttgtgagattcttttta

SEQ ID NO: 4155 - DNA, 526 bp, Canis familiaris
  misc_feature (9)..(9): n comprises a, c, g, or t, or includes no nucleotide
  misc_feature (18)..(19): n comprises a, c, g, or t, or includes no nucleotide
  misc_feature (26)..(26): n comprises a, c, g, or t, or includes no nucleotide
  misc_feature (36)..(36): n comprises a, c, g, or t, or includes no nucleotide
  misc_feature (41)..(41): n comprises a, c, g, or t, or includes no nucleotide
  misc_feature (48)..(49): n comprises a, c, g, or t, or includes no nucleotide
  misc_feature (60)..(61): n comprises a, c, g, or t, or includes no nucleotide
  misc_feature (85)..(85): n comprises a, c, g, or t, or includes no nucleotide
  misc_feature (96)..(96): n comprises a, c, g, or t, or includes no nucleotide
aatataacntcttcactnnaaagggnaaccaaaagnctggnagtctcnncaccgcggtgnngcggccgcttctaccaactagtgngatcccccggngcttgcaggaaaaatttaaagactcaaagagaacaatgatttttatgctgaacttacatgataagtgctttcaaactttgatgtagggccttcctatttattataatccagaataaacccctgatactgacttgagtaaggacatgactcttccatcagtgctctgtggtgatacacatgagggagaaataaaagagtgaattataggatcaactacttgtagtaaagtacatgacacccaacagctctctgtgtgcataggggaaaggaaggaacatctgccaatgactccagagaatccgaattctcactgatggcaggggacgtgccatcttacctaagtagttatcatcctctgatttccctgagaaactgtgctgcctcacatcgatattggtagcaccggctgggattcggaccacagtattgt

SEQ ID NO: 4156 - DNA, 422 bp, Canis familiaris
gcacgagccgagaagaatccagccagtctctgccctgcacccaccaggcactttggagaagacactggagtccgaccgggacccctgccctcccagagcaaaccagcagagaggatcatagcacatagcagccacctcccttgaggacaaatagcttaatgaaggggacacttgagttgcttatggggtatggctgggcattatgccagaccaagacaaaccttgggagcaaaggcagactgcggaagggctgactgctctgggggcggaacagtgagtttactgtggcagaaagtaggctgctcggctaagtgagaagtctaggaaggccagagtggtgagggctcgtttgccaaccttagtttgatttcatcaggacccaaagaatttaaagcagggaagggacagtttttttttttggt

SEQ ID NO: 4157 - DNA, 420 bp, Canis familiaris
gcacgagctaaagtgagtacccgttttacccccacacacttgctagcattgctgttatcatttttggaatctgtactaatccgacaagcaataaaaatatctcaggctttgtttacttgaatttcctcagttagtactaagaccgaccatctcgtgcttattgatcacaggtatttcttacatcccaattgtttagatgtgtcttttcccatttttgtaccaggcttgtctttttcttattgatacgtaagaactctttatatgttaaagatataaacactttataatgtgttctgcagttatttccccagtttattattttctttttaaattttatggtcttatttacatatggaggtttgtccctttttaatacttgaccaagaatatatacatataatgacatcatcagtcttttaa

SEQ ID NO: 4158 - DNA, 171 bp, Canis familiaris
gcacgagtggatgtcacccatatgctgttgagtcattgtcctctaaagacttgtgaattgtagggaccactgaaccctggggctgacttggaggctcatgtcctcaggcttgtgatttgctctcttttggtcagtttctcaggaaggcagatgggagctggggtgggagag

SEQ ID NO: 4159 - DNA, 422 bp, Canis familiaris
gcacgagccggctccgtgaggctcgttttgcaggtgctgaaattgttcgcgcacttcttaatcatgtctgaaccaatcagagtcctcgtgactggagcagctggtcaaattgcatattcactgctgtacagtattggaaatggatctgtctttggtaaagaccagcctataattcttgtgctgttggatatcactcccatgatgggtgtcctagatggtgtcctaatggaactacaagactgtgcccttcccctcctgaaagatgtcatcgcaacagataaagaggatgttgccttcaaagacctggatgtggccattcttgtgggctccatgccaagaagggatggcatggaaaggaaggatttactcaaagcaaatgtgaaaatcttcaaatgccagggtgcagccttggagaaatatgc

SEQ ID NO: 4160 - DNA, 417 bp, Canis familiaris
  misc_feature (371)..(371): n comprises a, c, g, or t, or includes no nucleotide
gcacgaggccagggtcgcgggccgggacgggcgggccgccagcatgcgggaggtggacctggacgagctggacgcgcagcaggtgcagctgctggccgagatgtgcatcctcatcgatgagcacgaccggcggatcggggcggagaccaagcacaactgccacctgaacgagaacatagaccgagggttattgcatcgagccttcagcgtgtttttattcaacacagaaaataagctcctgctgcagcagaggtcggatgctaagatcacctttccaggttgttttaccaacacatgttgcagtcatccattaagtaatccacaagagcttgaggaaagcgacgcgatcggagtaagacgagcagcacagnaggcgtttagaggctgaattaggaattcccatggaagaggttcctc

SEQ ID NO: 4161 - DNA, 417 bp, Canis familiaris
gcacgccggccttgcgggccgccggtgaaataccactactcttatcgttttttcactgacccagctcgggacccccggctgcgcccgccccgagcggctgctcctgggtcggaccgcgtgctggatcgctggggcctttggtccctgcgcgtctcctggcgcccaggaagcccaagtgccccgacgctcagctcgcaggacgcagttctgtgcggaatcgagtccttccccggtgcggcggcggccgtgggggggagcgactgcggatcgctgggcggcgggcccgacccgcggtgcccccggcgctcacatcgccgcctctgatgcgtccccgcagacccagaactctcggattacttctgagctggaagagcaacccacatgaagatgaaggcagagattgcgctggtgtttcta

SEQ ID NO: 4162 - DNA, 192 bp, Canis familiaris
gcacgagccggccagctcgccctgttcagcgtctctgacaaaacgggcctggtggaatttgccagaagcctcacgtctgtgggtctgagcctcctcgcctccggagggaccgcgacagctctccgggatgccgggctggcggtcagagatgtctctgagctcacaggatttcctgaaatgttagggggacgt

SEQ ID NO: 4163 - DNA, 415 bp, Canis familiaris
gcacgagccgagtgtctcaggatctcccaagcccagtgatgaaacaccacctagtgacacttcaggcaaaggatacattgttgttgtgattgttctctgtgtctctgctggccttgtagtcattgtcatcgtcgtgttcgtagtgtatcgacaaaagaagaaagggaaaagtgatattagagcggagtacagtgcataccaggataaatcagctacgacagcagagtagatgcgctaaatggtttctacacatcagtttatcttttgagatccacagtaaattcacacagcttctatggaaaacagtataaaccttcctcaaaaaattaagaacagagaactaccagatgatccagcagttctactcatgggtatacatgcaaaggaaacaaaataactgtgtagcactgttact

SEQ ID NO: 4164 - DNA, 420 bp, Canis familiaris
gcacgagcggaggagggcagcggccggcggccgggcaccgcagggagagtccgcgggttcgcgccagcgccgggcagccgccagcagccgccagcagccacacaggtaccccgggaaccggcggcggcgtgtgcgtgtggcccgtgtgcgggcggcggcgccggagtagcgcggagcggcagccggttcgggcgggtggcatcatggacgagaaggtgttcaccaaggagctggaccagtggatcgagcagctgaacgagtgcaagcagctgtccgagtcccaggtcaagagcctctgcgagaaggctaaagaaatcctgacaaaagaatccaacgtgcaagaggttcgatgtccagtcaccgtctgtggagatgtacatgggcaatttcatgatctcatggaattgtttagaattggtg

SEQ ID NO: 4165 - DNA, 421 bp, Canis familiaris
gcacgagggcatataaccttgggatttgaaggtatgtttcattaagtggtttttctctttcaagttagtatggatcttcttgcaattctttaattgacggtattatcagtaaaaatagtaagtcaattcacaattacccaagtgcctgtcgtttgcatatgcatgcatggcacattgttcaccaatttaataaatgagttcgattgtcttacagaaaagagctggcttgtgctgtcaggctcgctttttctcagagacagataagcagaatgaatcttgttctctctctctattgggcaatctcaaagttggcttttagctgacttacgaaagtgaatgtgtacgccgaccctctagatgaggtcaaatagcatcagtttccatctgagagtttaaatggagagttaaattatcttaaact

SEQ ID NO: 4166 - DNA, 402 bp, Canis familiaris
ttcggcacgaggtgaagttgaatcaacagagtatgtaaatagacaatttatggcagaaacacagttcagcagtggtgaaaaggagcaggtagatgagtggacggtcgaaacagtggaggtggtgaattcactccagcagcaacctcaggctgcgtctccttcagtaccagagccccactctttgactccggtggctcaggcagatccccttgtgagaagacagcgagtccaggaccttatggcgcagatgcaggggccctataatttcatacaggattcaatgctggattttgaaaaccagacactcgatcctgccattgtatctgcacagcctatgaatccgacacaaaacatggacatgccccagctggtttgccctccagttcattctgaatctagact

SEQ ID NO: 4167 - DNA, 233 bp, Canis familiaris
  misc_feature (105)..(105): n comprises a, c, g, or t, or includes no nucleotide
gcacgagaagatgcaaagtcttattgtgttgcagcagtctctttgttccttggagaaccccccccctttcagtagcgctcctgcacttgagaggggtgacagccntcacaagttaattgcctcctggtgtcgtccgctctgtttctggtgactgtccttttgcacaggttggtggctgtgacatctgtcggctccagtctggcctgttctctgaatctgccactgatcctgtt

SEQ ID NO: 4168 - DNA, 416 bp, Canis familiaris
gcacgagagaatggtggctactagccacgagtggatattgagtgcatgacctgtgctgttccgaggaactgaatttttaacttaatttgaatagctttttgtggctagttactggctgtcttgttggacagtgcagaccgttgctactcagaagtatagatcttctgactgtcaatcagtgtacatttaaaatgcaggctttactccacacccttgacatctgtattttaataggatgtccaggttacttatatacatgttaaattttgagaaacaaggtcttcaatttggagggtgggcaggcatgggtatggaattcagttttgttttaattatctttacctctgggtggcagcatttcctgtaatacacagaaagtaggagaaaatgtgatttttgccttatttttgttcttt

SEQ ID NO: 4169 - DNA, 419 bp, Canis familiaris
gcacgagcgggagtccgtaggcatgcgcgacaggcatttggactaagaacacaaactgaagccttaggatttctggcgagtccgcgctctcgccgagtctcgggctattcacggaccagtctcctcgtcccccttctccccactctgaaagctaaggtccctgggcaaacagcgtgtgagatgggacggacatcgaaggacaagcgggatgtctactaccgcctggccaaggagaatggctggcgtgcccgcagtgccttcaagctgctacaacttgacgaggaattccatctcttccaaggcgtgacacgggcagttgacctgtgcgcagccccaggcagctggagccaggtgctgagtcagaaaattgggggccagggttccggccatgtggtggctgtggaccttcaggctatggc

SEQ ID NO: 4170 - DNA, 417 bp, Canis familiaris
gcacgaggtgcctcctccgaactcgcatgggctagctgttggacccggtgttccggtctcaggtacttcagcctgggaggatggtgtgcattccttgcatcgtcattccaattctgctctgggtctacaaaaaattcctggagccatacatataccctctgatttccccctttgttagccgtatgtggcctagaaaagctcttcgagaaacaaatgataaaaacaaagggaaagtagactgtaagggtacagacataaatggattaccaacgaaaggatcaacggaaatctccgataaaaagaaagactaaagtaattgttccaaaggatttcattgttttaaaaatggacctgataatatgaagcaccttgcttgtaattgtctcttaccttttttctctgagaccagaaatcgag

SEQ ID NO: 4171 - DNA, 240 bp, Canis familiaris
  misc_feature (222)..(222): n comprises a, c, g, or t, or includes no nucleotide
  misc_feature (224)..(225): n comprises a, c, g, or t, or includes no nucleotide
  misc_feature (229)..(230): n comprises a, c, g, or t, or includes no nucleotide
  misc_feature (235)..(235): n comprises a, c, g, or t, or includes no nucleotide
gcacgagccgcacctgcgcgtcacgtgaccccgcgcgcccggcgtcttccagggggaccgggtgcggccggcggcccgcggggcggcggcggcaggacattttgcctcaaataaagaacatggtgaaactaattcacacattggcggatcacggagatgatgtcaactgctgtgcgttctcctcttccctcttggctacttgctctttggacaaaacacatntnncgcnnctgtnacttc

SEQ ID NO: 4172 - DNA, 388 bp, Canis familiaris
gcacgagggaccttgagaggcagagttctcaggttgggcaatgctgagaactactaccttaggcttttaccttctgtctccaccctggaaatggggcaggaggcacagaggacagtctgtttccacagctccgtcatgctctaccacctctgggacagtccttagtccttcctctgccttcctctccctctgcctcacctcctccacttggatgatgttcgcctctgtcaggggctatctcctccggtcctggtaccacatcccctgtcctgcatcaggagtctgtctccttgatgggctctcagccctgagtgtccagggctggccagggtcccgttgagtggtccacaggggctctggaactgggaatgcatggccggcctgtgac

SEQ ID NO: 4173 - DNA, 222 bp, Canis familiaris
  misc_feature (203)..(203): n comprises a, c, g, or t, or includes no nucleotide
  misc_feature (205)..(205): n comprises a, c, g, or t, or includes no nucleotide
  misc_feature (208)..(208): n comprises a, c, g, or t, or includes no nucleotide
gcacgagagttcgcactggcacctaccgccagctcttccaccctgagcagctcatcacaggcaaggaagatgctgccaataactatgcccgagggcactacaccattggcaaggagatcattgaccttgtcttggaccgaattcggaaactggctgaccagtgcacgggtcttcagggcttcttggttttccacagcttctgngnagngggggaaccggttc

SEQ ID NO: 4174 - DNA, 236 bp, Canis familiaris
  misc_feature (215)..(216): n comprises a, c, g, or t, or includes no nucleotide
gcacgagactagtctcagttttttttttttttttttacagaccacatgacttttaaatagcagatcaatcatgccacctggggtgataagacagattgaacacttatgaagtgaataactttattaaggtcctgaaggtgagtgtccggaggtgctgggtaaaacacatcacaggtaagaacgggaaacctacctcagcatttcctggaaagggnncacaattctattgggaaggg

SEQ ID NO: 4175 - DNA, 418 bp, Canis familiaris
gcacgagggagcgcaatggcggagaccgtggcggacacccggcggctcatcaccaagccgcagaacctcaacgatgcctacgggccgcccagcaacttcctcgagatcgatgtgagcaacccgcagacggtgggggtcggccggggccgcttcaccacctacgaaatcagggtcaagacaaatctgcctattttcaagctgaaggaatctactgttagaagaagatacagtgattttgaatggctgcgaagtgaattagaaagagagagcaaggttgtagttccccctctccctggaaaagcatttttgcgtcagcttccttttagaggagatgatggaatatttgatgacaattttattgaagaaaggaagcaagggctggagcaatttattaacaaggttgctggtcatcctctgg

SEQ ID NO: 4176 - DNA, 416 bp, Canis familiaris
gcacgaggcctgataggggttttcgaaaggacccggcgactttatattcatctcaaatataaagatgtgtgacggccttttaagcttccatttacccttaggtaacggccgtctccgcggagtaggggatttgatggcaacggcccttggcagccagcttcggatcaggctccggagtggacgcccctagcggaggggtcctccgggcagccgcaggccgacggccgagcgtagcgatggcgcctggacccggcgggcggctccggccggcgctgcggctgcggctgctgctggctgcggtccttcaagcggtgtctacattcggggcagagttttcatcagaagcttgcagagagttaggcttctccagcaacttgctctgcagctcttgtgatcttcttggacagtttaacctg

SEQ ID NO: 4177 - DNA, 290 bp, Canis familiaris
gcacgaggattttgccaactactattaccagacagtaacttgtgtgtcagcaaggacaatttttagcttatgttttgttccacacctgacaaatagtgtgtgctaaattaatattcattaattatggagaaagggctaaatttttcaaaagtaccttggatttttacagtgcttttattcccaaaacctagaaattgtttccagagggtgcctgggtggctcagttggttaagcatgggtggctgagttagttaagcgtctgcctttgctcaggtcatgatcctggagtc

SEQ ID NO: 4178 - DNA, 420 bp, Canis familiaris
gcacgagtgtctgcgagtcaggattcccgatccagagacaatggccccgatgggatggagcccgaaggcgtcatcgagagtaactggaatgagattgttgacagctttgatgacatgaacctctccgagtcccttctccgtggcatctatgcttatggtttcgagaagccttctgccatccagcagcgagccattcttccttgtatcaagggttatgatgtgatcgctcaagcccaatctgggactgggaaaacagccacttttgccatatcgattctgcaacaaattgaattggatctaaaggctacacaggccttggtcctggcacccactagggagttggctcagcagatacagaaggtagtcatggcattaggagattacatgggtgcttcctgccatgcctgcattggggggacc

SEQ ID NO: 4179 - DNA, 357 bp, Canis familiaris
ttattacttatttataacagcctcttatgtttttttatgccttcttgccagatggtagcttcgccccattggctcctcagccaagcacatacaccaaatgtctgaacctgcggttcctctcgtactgagcaggattaccatggcaacaacacatcatcagtagggtaaaactaacctgtctcacgacggtctaaacccagctcacgttccctattagtgggtgaacaatccaacgcttggtgaattctgcttcacaatgataggaagagccgacatcgaaggatcaaaaagcgacgtcgctatgaacgcttggccgccacaagccagttatccctgtggtaacttttctgctcgtgc

SEQ ID NO: 4180 - DNA, 251 bp, Canis familiaris
  misc_feature (221)..(223): n comprises a, c, g, or t, or includes no nucleotide
  misc_feature (229)..(231): n comprises a, c, g, or t, or includes no nucleotide
gcacgaggggccgctctagcttgcggcctgtctatggtcgggcccggagcgtccagctgccccggacagagctcctgtgtatggcgccgcaggctctggctccggggccccgataacgggccgcccccgcagcacccggcgccgagtgagggtcttctctgatccgagaatggctactcctcggtacgagccagtggctgagattggggttggtggccctnnnatggannnacggtgtaacaagggccccc

SEQ ID NO: 4181 - DNA, 204 bp, Canis familiaris
gcacgagtcaacaccccagccatgtatgtggccatccaggctgtgctgtccctgtacgcctctggccgcaccactggtattgtcatggactctggggatggcgtcacccacactgtgcccatctacgaggggtacgccttgccccacgccatcctgcgtctggacctggctggccgggacctgactgactacctcatgaagatc

SEQ ID NO: 4182 - DNA, 425 bp, Canis familiaris
ttcggcacgagctccgacaaaggtcggttctacgcctttggtcgtgtattctcggggctggtgtccactggcctgaaagtcaggatcatggggcccaactacacccctgggaagaaggaggacctgtacctgaagcccatccagagaacaatcctgatgatgggccgttatgttgagcctattgaagatgtgccttgtgggaacattgtgggtctagtgggagtggaccagttcctggtgaagactggcaccatcaccacctttgagcatgcccacaacatgagggtgatgaagttcagcgtgagccccgttgtccgggttgctgtggaggcaaagaatccagctgaccttcccaagctagtggagggtctgaaacggctggccaagtcggaccccatggtgcagtgcatcattgaggagtccgg

SEQ ID NO: 4183 - DNA, 212 bp, Canis familiaris
ttcggcacgaggatcatggctgataacccatcctgggatggtgagaagaccattatcatcacctgcagcttcacaccaggctcctgcacattgacagcctataagctgacccccagtggctatgaatggggtcgccagaacacagataagggcaacaatcccaagggctatctaccctcacattacgagagggtccagatgctgctgtcaga

SEQ ID NO: 4184 - DNA, 419 bp, Canis familiaris
gcacgaggtcggatgaggagaaggtacgcatagctgctaaattcatcactcatgcacccccaggagaatttaatgaagtgttcaatgatgtccggctactacttaataatgacaatctcctcagggaaggggcagcacatgcatttgcccagtataacatggatcagttcacgcctgtgaagatagaaggatatgaagatcaggtcttaattacagaacacggtgacctgggtaatagcagatttttagatccaagaaacaaaatttcctttaagtttgaccatttacggaaagaagcaagtgacccccagccagaggacgtagatggaggtctgaagtcttggagagaatcctgtgacaatgctttaagggcctatgtgaaagatcattattccaacggcttctgtactgtttatgct

SEQ ID NO: 4185 - DNA, 395 bp, Canis familiaris
gcacgaggtctcccaggggcacagtcagagagtcagacctcctgcactcttgcagcctgcaaatttctgccctgcgttgagcttaccctatctactccaggaccccagagccttagcagaaggtgccaatgctatccccattccttaggactaggggatccagcccaagaatctatcagtcccagaaacaaaggtcatgtagtcactgacctcctatcaccaggggaggctaggtcatgctgggcatcaggagaggcctctgtccagggaggctgggtgtctctgctacatgtgctttatatagacccagctctgtagaggccagggactattggaccagaagcctgggctctgggggccctacatttcagactcagtccacttccctggagcct

SEQ ID NO: 4186 - DNA, 265 bp, Canis familiaris
  misc_feature (177)..(178): n comprises a, c, g, or t, or includes no nucleotide
  misc_feature (199)..(199): n comprises a, c, g, or t, or includes no nucleotide
  misc_feature (203)..(204): n comprises a, c, g, or t, or includes no nucleotide
gcacgagaaactcgctctacccccaggcagtgtcatttcataccctttggagaacgcagttccttttagtcttgacagtgtcgcaaattccattcactccctattttctgaagaaactcctgtagttttgcagttggctcccagtgaggagagagtgtatatggtgggggaaggcannctcggtttttgaagatctctntgtnncattacgacagctccgcaaccgcctgtttcaagaaaactctgttctcaactcacttcccct

SEQ ID NO: 4187 - DNA, 421 bp, Canis familiaris
gcacgagagagaactagtctcgagttttttttttttttttttcttaacaaacaaaccaaaacggtatcctttaagatggcaactctcaaaacctacaggagggcagcctgacttcctgttcatcctgcggcgttatcttcaaaacggcagaggctgctcagatgcctcctcctggcagccagcagctgctgtgcacacaccggagcccacctcgtcgagcgcaaacccgggccttggacggaaggcagaagcagaattcactctcgtgccgaattcggcacgaggcgcgcgccatttctagtcgttttcaaagcgcctcgcgctgattctcacgggcccggccggcggccccagctctgccctggattggtagcttatgtcgatcttgatgaaagagcaattgatgctctcagggaattta

SEQ ID NO: 4188 - DNA, 181 bp, Canis familiaris
gcacgagctggcattcattctttctctaataggtatacttgtttatcgatcacacctaatatcatcgctactatgcttagagggcataatattatcactatttgtaataatatctgttactattctcaacaatcacctcacattagccagcatgataccaatcgtactactagtatttgct

SEQ ID NO: 4189 - DNA, 420 bp, Canis familiaris
  misc_feature (393)..(393): n comprises a, c, g, or t, or includes no nucleotide
gcacgagcgcattctcaagtctccacaagaggtgaaacctggtgaaaggcactataacatggcaaaaagttacccaaatgaagaaaaggatgcttgggatgtgaagatgttgctggagcaatttagctttgatatagctgaagaagcatctaaagtctgcctagcacatctgtttacgtatcaagattttgatatgggaactcttgggttagcgtatgttggttctcccagagcaaacagtcatggaggtgtttgcccaaaggcttattatagtccaattggaaagaagaatatctatttgaatagtggtttgaccagcacaaaaaattatggtaaaaccatccttacaaaggaagctgacctggttacaactcatgaattgggacacaattntggagcagaacatgatccggatggccc

SEQ ID NO: 4190 - DNA, 417 bp, Canis familiaris
gcacgagtgagttttttttttttttttttctctatccagttcctttattgggggtgagagtacccaggagaggccatccactccccaaacccagggcccaaagaggccggcacagtccctctcagcctagcccttgcagtgctgtccatgggcagctcccgcactttgcagcctcaggtcatgcagggagttgtgaccatctcagggacctcagtggatacttccatgggcactgccagtcgctggggtgtcacataagagcccatacccgctgccctttccgcctcctcctgactgtagggctccacgctcagctgctttagccttttcttgtggtctttggatcggaagtgggtcttcagggtggcggaatcaatgaagtacctcgcgcaggccagacagcgatgcaggccgccc

SEQ ID NO: 4191 - DNA, 209 bp, Canis familiaris
  misc_feature (71)..(71): n comprises a, c, g, or t, or includes no nucleotide
  misc_feature (75)..(75): n comprises a, c, g, or t, or includes no nucleotide
  misc_feature (134)..(139): n comprises a, c, g, or t, or includes no nucleotide
  misc_feature (154)..(154): n comprises a, c, g, or t, or includes no nucleotide
gcacgagctggccgctcgctgcgcggccctcgcgggggggctgcgggtcctggcgcggccgtggctggggnggtntcggcgccctggcccaggcgcgcgcggctggctcgctcggcgtgggcaccgccgccctnnnnnncgggccggaaccgcncaggcgtcggctcggcctatcggccgctgcggtggtgaactcggcgccccgcccc

SEQ ID NO: 4192 - DNA, 294 bp, Canis familiaris
gcacgaggaccgacggagcctgctttacgaccggtggccctgttgactgcacccggaggctgcagtgtccccagcttcccgcaggcccggaagagccgctcagcccagagttccttgattgaccgtccagagtgagcccggaagggcgcccgagcaaggagaaaacaactcacaccacgttcccccacccccggccgggccagagccctgcccttgccccatgtaatgtgcatctgctgtatacccaggcccaggttaggccctttcctaggcggacttggggaaacctgaagg

SEQ ID NO: 4193 - DNA, 390 bp, Canis familiaris
gcacgagctggtttaccctcgaccctccattaacattgctataagtgaattcataatccgttctttccacttaccctctttccttatcaccaaggaagctccagatccagtatcttgtttggcccccaaactgaagcagcttctgctcttgtctcccagcagcagtgagccgctcagtcttttccacagggagttaggagcctacattccttgagtcatgagcttattgctgaaaatccctttccctgaacattttggccagcagaaattaatgtaactgacaggcatattgattctaacatttttttcatgagttgcttttttatttaaattttttaaatgaccaaacctgtggggcaggggatgcccagaggagtggtaatattaaag

SEQ ID NO: 4194 - DNA, 421 bp, Canis familiaris
gcacgagctcagtcctggtaacacccagacactgacagagctggagctgaagtggcagcattggcatgaggaatgtgagcgtcacctccaggacagcacatttgctgccagccctcacctggagtctctctgcaagatcttgctaggagatgaagccgccttgttggagcaaaaggagcttctgaataactggtatcatttcctagtgacccggctcctgtattctcatcccacagtaaaacccattgacctgcacctttatgcccagtccagccttgacctgtttctgggaggtgagagcagcccagaacccctggacaacatcttgctggccgcctttgagtttgacatccaccaagtgatcaaggagtgcagtattgctctgagcaactggtggtttgtggcccatctgacagacctg

SEQ ID NO: 4195 - DNA, 319 bp, Canis familiaris
gcacgaggtcagaaggcacgaactccgaccctgtgaccctgcgtcggaggatgctggctgcggcggccgaacggaggctccagaagcagcagatctcctagcgctcgctcgccgccggccccagcagcgcggccgcagaggcccgggccccccgccgtgtgccagggggctcggcccgctgcgctgtacaaagcatgtggtcttactagtgtttggacagctgacaaacttaatccttttttgtaatactttctatgtgacatttctcttccatttagaaacactgcacatttgaactcaaggcatgatctctggtgtt

SEQ ID NO: 4196 - DNA, 417 bp, Canis familiaris
  misc_feature (405)..(405): n comprises a, c, g, or t, or includes no nucleotide
gcacgagcaaggacggagatggcactatcaccaccaaggagttggggacagtgatgagatccctgggacagaaccccactgaagcagagctccaggacatgatcaatgaggtggatgcagatggaaatgggaccattgacttcccggagttcctgaccatgatggccagaaagatgaaggatacagacagtgaggaggagatccgagaggccttccgtgtcttcgacaaggatggcaacggctacatcagcgctgctgaactgcgtcatgtaatgacgaacctgggtgagaagctgaccgatgaggaggtggatgagatgatcagagaggctgacatcgatggagacggccaggtcaattatgaagagtttgtacagatgatgactgccaagtgaaggcccctgngcagctggtgat

SEQ ID NO: 4197 - DNA, 420 bp, Canis familiaris
gcacgagcgtctcccctccccgggcccgccgctcagagccagccctcggccacctccacgcagcgctctcggaccgccccgaggcctccgccgccgccgccccagcgccgcgcagccgccgccgccgccgcctctcctcagcctccgccatgacgaccgcgtccccctcgcaggtgcgccagaactaccaccaggactccgaggccgccatcaaccgccagatcaacctggagctctacgcgtcttacgtctacttgtccatgtcttattactttgatcgcgatgatgtggctttgaagaactttgccaaatattttctccaccaatctcatgaggagagggaacatgctgagaaactgatgaagctgcagaaccaacgaggtggtcgaatcttccttcaggatattaagaaaccagacc

SEQ ID NO: 4198 - DNA, 419 bp, Canis familiaris
  misc_feature (375)..(375): n comprises a, c, g, or t, or includes no nucleotide
gcacgaggggctgcccgctgtgtgcgctgggccccccatgagaacaagtttgctgtgggaagtggctcccgtgtcatctccatctgctattttgagcaggaaaatgactggtgggtgtgcaagcacatcaagaagcccattcgctccacggtcctcagcctggactggcaccccaacaatgtgctcttggccgcgggctcgtgtgacttcaagtgcaggatcttctcggcctacatcaaggaggtggaggagcggccagcacccaccccgtggggctccaagatgccctttggggagctgatgtttgagtctagcagtagctgtggctgggtgcacggcgtctgcttttcggccagtggtagccgcgtggcctgngtcagccacgacagcaccatgtgcctagccgatgccgacaagaa

SEQ ID NO: 4199 - DNA, 420 bp, Canis familiaris
gcacgagtggaggagcagctgtccgatgaggagaaggtgcgaatagcagcaaaattcattattcatgcccctcctggagaatttaatgaggtgtttaatgatgttcggttactgcttaataatgataatcttctcagggaaggagcagctcatgcatttgcacagtataacttggaccagtttactccagtaaaaattgaaggttatgaagatcaggtattgataacagaacatggcgacttaggaaatggaaagtttttggatcccaaaaacagaatctgtttcaaatttgatcacttaagaaaggaagcaactgatccaagaccatatgaagcagaaaatgcagttgaatcatggagaacttcagtagaaactgctctgcgagcctatgtaaaagaacattatccaaatggggtctgc

SEQ ID NO: 4200 - DNA, 418 bp, Canis familiaris
gcacgaggttcctcagtcagtggggttgtggccactgtgtttggagcaacaggattcctgggccgctatgttgtcaaccaccttggacgtatgggatcacaggtgatcataccctatcggtgtgacccatatgacaccatgcaccttcgtcccatgggtgacctgggtcagattatctttctggaatgggatgggagaaacaaagattctatccaaagagcagtgaagcacagcaatgtggtcattaatcttattgggcgagaatgggaaaccaaaaactttgattttgaggatgttttcgtgaagattccccaagcaattgccaaagtgtccaaggaagctggagttgaaaaattcattcatgtttcacatctgaatgctgatattaaaagctcttctaggtatctgagaaataagg

SEQ ID NO: 4201 - DNA, 417 bp, Canis familiaris
gcacgaggcaccttccagcacgccatgcagggctacaaccaggccgaggtgaagcagcgcgacaactgcaagatccgcatccagcgccagctggagatcatgggcaaggacgtctcggacgaccagatcgaggacatgatcgagcagggcaagtgggacgtgttctccgagaatttgctggccgacgtgaagggggcgcgggcggccctcaacgagatcgagagccgccaccgcgagctgctgcgcctggagagccgcatccaggaggtgcgcaagctcttcgtgcagatggcggtgctggtggaggagcaggccgacaccttgaacgtcatcgagctcaacgtgcagaagaccctcgactacaccggccaggccaaggtgcaggtgcgcaaggccgtgcagtacacgaggaagaac

SEQ ID NO: 4202 - DNA, 311 bp, Canis familiaris
gcacgagagagctctgtgaccagcgtgtatcctccaggtcacagacagaggaggattgcacagaggagctctttgacttcctgcatgcaagggaccactgtgtggcccacaaactctttaacagcttgaaataaatgtgcatacttcaccccagccttcatcacctgggcatcaggatatttcatggttttgaccatgcatttgtttcgtatccgtctaactgtatgttcatgtggacctcatggattttggcttagacagtagcttctaagtaattagcagtgattcctcttaataaagtccaatgatct

SEQ ID NO: 4203 - DNA, 424 bp, Canis familiaris
gcacgagggctctaccgcactgcatgcttcggggagggcaagcgggattatgcctgtctcacaggcggggggctggtcggaggttggaacccagcttctgtggccatccgcacaccccattcctccaactggctgttagagtggccaagctggtgtcttgtgtccccctcctaggaaactgggcgatgggcttttcctccagtgctgcaaggaagtggcagcccgctacccgcagatcacctttgagaatatgatcgtggacaacaccaccatgcagctggtgtcgaggccacagcagtttgatgtcatggtgatgcctaatctctacggtaacattgtcaacaatgtctgcgcgggactgggggggggccctggccttgtggccggggccaactatggccacgtgtacgctgtgtttgagacg

SEQ ID NO: 4204 - DNA, 383 bp, Canis familiaris
gcacgagctcgagtttttttttttttttttttaaccatatgctttatttgatgtcaacatcaaaggaatatttaaaaagttgaattcaaacccataaattagtaacatttcaagttaattgcataaaaaagttgctttgtgtcttcccacaccatatatatctgtacataagcctctgcatttcaaagcacttgtcacttataaagtgaaagctttcaaaatgccaggtaaacatttgctcattatttttttttaaaacaatactcctttggaaaatttctccttgtgcttaaagttcatctttgcatgtccatttctggaaaattctctggaaaaaaataatctagaaactgttctggaaacaaaaatcatagcaggcaagg

SEQ ID NO: 4205 - DNA, 419 bp, Canis familiaris
gcacgaggcccaggccatgcctttattttatgagctcccattttctgggtttagtcagaaacaattcaattctaaacattgaatttaggaagcgtatgttattacattaaaaagtcatatacttaaaaaaaaagaaaaaactatccagggaaatatgttggaaatcatgctactgaggctccattttctctgatgttttggttcggtatttttatcataaaacaataaagcttaaaataataaacttacgcttaaaaatttcctgataggggatccctgggtggctcagcggtttggcgcctgccttcggcccagggcgtggtcctggagacccgggatcgagttccacatcgggctccctgcatggagcctgctttcttatagctttgcctgtgtctctgcctcggtctctgtgtttc

SEQ ID NO: 4206 - DNA, 175 bp, Canis familiaris
gcacgagggaagtcggggccggcggggctgagacgagcttcgggtcctcggagcgtccggaccgcgcagcctaacgctcgtccttggtgcctgcggcatcctctgctttttccccgggcagcgctatcggcggccagaaagtcaccatgtctattctcaagatccacgccaggga

SEQ ID NO: 4207 - DNA, 421 bp, Canis familiaris
gcacgagctttgagggtgtcacggccatcatcttctgtgtagccttgagcgcctatgacctggtgctagctgaggatgaggagatgaaccgcatgcatgagagcatgaagctgtttgacagtatctgcaacaacaagtggttcacagacacgtccatcatcctcttcctcaacaagaaggacctgtttgaggagaagatcacacacagccccctgaccatctgcttccctgagtacacaggggccaacaagtatgaggaggcagccagctacatccagagtaagtttgaggacctgaacaagcgcaaggataccaaggagatctacacgcacttcacgtgcgccactgacaccaagaacgtgcagtttgtgtttgatgccgtcactgacgtcatcatcaagaacaacctgaaggactgcgg

SEQ ID NO: 4208 - DNA, 422 bp, Canis familiaris
gcacgagggtccgaagaagatcaatctgaaccacttgttgaatttcacttttgaaccgcgtggccaggcgggtcactttgaaggcagtggacatggcagctggggaaaaaggaacaagtggggacataagccttttaacaaggaactctttttacaggccaactgccaatttgtagtgtctgaagaccaagactacacagttcattttgctgatcctgatactttagtcaattgggactttgtggaacaagtgcgcatttgtagccatgaagtgccatcttgcccaatatgcctatatccacctactgcagccaaaataacccgttgtggacacatcttctgctgggcatgcattctgcactacctttcactgagtgagaagacctggagtaaatgtcccatctgttatagttcagtacata

SEQ ID NO: 4209 - DNA, 420 bp, Canis familiaris
gcacgaggcagaacatcagagggccatgcagagacgtgctattcgtgatgccaaaactcctgacaagatgaaaaagtcacaatttgtgaaggaagacagcaacctcacccttcaggagaagaaggataaaatccagtcaggcttgaagaagctaacagagttggggacagtggacccaaagaacagataccaggagctgatcaatgacattgccaaggacattcggaatcagcggagataccgacagagaaggccaccttctacggagagcaagtggattactataaaagctacatcaaaacctgcttggataacttggccagcaagggcaaggtctccaagaagcctagggaaatgaaaggaaagaaaagcaaaaagatttctttgaaatacacagcagcaagactacatgaaaaagga

SEQ ID NO: 4210 - DNA, 183 bp, Canis familiaris
gcacgaggagatgactccttcaacaccttcttcagtgagacgggcgctggcaagcatgtgcccagggcagtgtttgtagacctggagcccacagtcattgatgaagttcgcactggcacctaccgccagctcttccaccctgagcagctcatcacaggcaaggaagatgctgccaataactat

SEQ ID NO: 4211 - DNA, 415 bp, Canis familiaris
gcacgagccggctcgcgatgggttgcgacggaggaacaatccccaagagacacgaactggtcaaggggccgaagaaggttgagaaggttgacaaagatgctgaactagtggcccagtggaactattgtactctaagtcaagaaatactaaggcgaccaatagttgcctgtgaacttggcagactttataacaaagatgctgtcattgagtttctattggacaaatcttctgaaaaggctcttgggaaggccgcatcccacattaaaagcattaagaatgtgacagaactaagactttctgataatcctgcctgggaaggagacagaggaaacacaaaaggtgacaaacatgatgacctccagcgggcacgtttcatctgccccgtcgtgggcttagagatgaatggccggcacag

SEQ ID NO: 4212 - DNA, 417 bp, Canis familiaris
gcacgaggaaggctgaaaacggggtgattcggccggcgtcgagcgtgcgagggtctcgcgggaggaggctgttgccatggacaggagtggctttggagagatgtcatcccctgtgatccgggaggcagaggtgactcggaccgcacggaaacagagtgctcaaaagagagttttaattcggccatcccaagatgaaatttttgctaatactacaccaagaaaccaggttatccctcggacccccagttcatctcgaccaccttttactccacccagccgaagcttactaaggcatccagatgtttcctgcattctgggaacaggagggaggtctccccggcttacacagtcttcagggttcttgggaaatctgtctatggtaactaatctggatgacagtcattgggccactgcatt

SEQ ID NO: 4213 - DNA, 417 bp, Canis familiaris
gcacgagcagcaatggcggcctccgtgttctacagccggcgattggccgccgccgccctccgcagccgcgggtcccggccggcgctgcgggccgccgcccaggttctgggaagttctggattttttaacaaccatggactccaagtacagcagcagcaacaaaggaatctctcactacatgaatacatgagtatggaattgttgcaagaagctggtgtctccattcccaaaggacatgtggcaaaatcaccagatgaagcttatgcagttgccaaaaaattaggttcaaaagatgttgtgataaaggcacaggttttagctggtggtagaggaaaaggaacatttgagagtggcctcaaaggaggagtgaagatagttttctctccagaagaagcaaaagctgtttcctcacaaatg

SEQ ID NO: 4214 - DNA, 334 bp, Canis familiaris
gcacgagcgagttttttttttttttttttttttcacaagtattttactgatgctggcccagagggttctggaagccagcctgcagggcatcaggggagccccgcccgctcgaagtactggtggcaggcggccgtgagcgtggccacaaacacgatgaactcgctgaagtccacttcggcatccccgttggcatccaggtccttgagcagtttgtccacggagtccctgtcccttttagtctgcaagaagcctgggagctccttctccatgagcaccttcagctcccccttggtcaggctctgcttgctgccctccacccctgcgtaccgggcga

SEQ ID NO: 4215 - DNA, 246 bp, Canis familiaris
ttcggcacgaggaaatatcaaaactaaaaaaaaaaaatactatttttttgtttcctggggttgtatcacgagatagagtaaacggattatcagtaaagacccagagatgaggaggaagatggtacagcaggcctaggggagggatgggccccaattcaaggagtgtaaacacttcccatgtcagactgtgggaaggtatggaaaaacaagtctttaaggggctaactgctaacaaggagaccagta

SEQ ID NO: 4216 - DNA, 418 bp, Canis familiaris
gcacgagattaagcatgcctcatttggaagaaatgtatttgcaatttcatatataccaggtttgctcttcgcggtgaatgggaagccttactttggggaccaagaacccgtccagggatttgtgatgaacttttccagtggggaaatcatagatgtcttcaagccagtgcgcaagcactttgacatgcctcacgacatcgctgcatctgaagatgggactgtgtatgtcggggatgctcacaccaacaccgtatggaagtttgccttgaccgaaaaaatagaacatcgatcagttaaaaaggctggcatcgaggtccaggaaatcaaagaatccgaggcagttgttgaaaccaaaatggagaacaaacccgcctccacagagttgcagaagatgcaagagaaacagaaactgatcaaa

SEQ ID NO: 4217 - DNA, 216 bp, Canis familiaris
gcacgaggaaaagcaaaatggatcgacatggaaatgataaatccacacccaagaagacttgcaaaaagaggcagtcttcagagtccgacattgagagtgtcatgtacaccattgaagtcgttgcaaagggagactggggcattgagaaacttggagaaacccctcgcacgaaggtccgcccatcctcaagtggcaagggaagcattttggatgcca

SEQ ID NO: 4218 - DNA, 422 bp, Canis familiaris
gcacgaggcagaactgaaaagcgagggcctagccctttctctggaagagcagctcagtgccatgacattgtccgaagtctgtgatatggagccgtctcccatcatttcccttaatggtgaacgtttcaaggcagagctttttgacaacacaagagcaagcagcaagatttcatctctgttggtggaattggaggcaatccgaggaaattcagggtcccaaaagagtgtcattgtctcccagtggaccagcatgctgcagattgtagcgtggcacctcaagaagcgtggcctgacttatgccaccatcaatggctctgtccgccccaaacagagaatggacttagtggaggcatttaacagctccaggagtccccaggttatgctaatctctctctcggctggaggtgttggtctgaacctga

SEQ ID NO: 4219 - DNA, 413 bp, Canis familiaris
gcacgaggtcgcccgggtggctgtgcggcgcggcgcggcggcccgagcatcatgacgtccgccctggagaactacatcaaccgaaccgtggcagtgatcacttccgatggaaggatgatcgtgggaacactgaaagggtttgaccagaccattaatttgattttggatgaaagccatgaacgagtgttcatgctcttcacagggagtagaacaagtggtgctagggttatacatcgtaagaggtgacaatgttgcagtcattggagaaattgatgaagagacagattctgcgcttgatttggggaatattcgagcagaacctgtaaactctgtagcacactgaggaagaattacatacattggacatctgtaaatctttgtatagaaactgattattctgaggatgatgtatg

SEQ ID NO: 4220 - DNA, 412 bp, Canis familiaris
gcacgaggctccgtggttcctgcccggccgccgccgccgccgccgccatggccgaggccgacgtcgcgctgatcgggctggcggtcatgggccagaacttgatcttgaacatgaacgaccacggcttcgtggtctgcgccttcaataggaccgtctccaaagtggatgatttcttggccaacgaggcaaagggaaccaaagtggttggtgctcactccttggaggagatggtctccaagctgaagaagccgcggcggatcatactgctggtgaaggctgggcaggccgtcgacgacttcattggcaaactggtaccactgttgaacactggtgacatcatcatcgatggaggaaattctgaatacagggacaccacaagacggtgtcgagacctcaaggccaagggaatctt

SEQ ID NO: 4221 - DNA, 195 bp, Canis familiaris
gcacgagcatgatcctgtggataagattgtgttgcagaaatatcataccatcaatggtcataacgcagaagtaagaaaggctttgtctagacaagaaatgcaggaagtccaaagttctagaagtggaagaggaggcaactttggttttggagattctcgtggtggtggtggaaattttggaccaggaccaggaag

SEQ ID NO: 4222 - DNA, 421 bp, Canis familiaris
cggcacgagcagcaactacggcgtgtcggtgctcagcaacgcctcgggcaactggaactgggacttcacctccgcgctcttcttcgccagcaccgtgctgtccaccacaggttatggccacaccgtgcccttgtcagatggaggtaaggccttctgcatcatctactcggtcatcgggattccattcaccctcctattcctgacagcagtggtccagcgtgtcaccatccacgtcacccgcaggcctgtcctctacttccacgtgcgctggggcttctccaaacagatggtggccatcgtccatgccgttctccttgggtttgtcactgtgtcctgcttcttcttcatcccagccgctgtgttctccatcctggaggatgactggaacttcctcgagtcattttatttttgttttatttcc

SEQ ID NO: 4223 - DNA, 228 bp, Canis familiaris
gcacgagtgcgcacggtcgccggcgccgctgaccgaggcctgctgggattccagaattggagaaggaggcatgatgaatactctcctgctgctggtggggctgctgctgacctgggacaatggacgggttctgggagaccaggctgtctcagacaccgagctccaggaaatgtccaccgaaggttgtaagtccattaataaggaaataaaaaatgctctcaagggggt

SEQ ID NO: 4224 - DNA, 317 bp, Canis familiaris
  misc_feature (216)..(216): n comprises a, c, g, or t, or includes no nucleotide
  misc_feature (221)..(222): n comprises a, c, g, or t, or includes no nucleotide
gcacgagtggatatcatcacagctctttaagcttcaaagacaaacagttagttgaggttctttttaggaaaggatttattagggtggtgacagctaccgggacactggctttaggaatcaatatgccctgtaaatccgtggtttttgctcagaactctatctacctggatgccctcaattacagacagatgtctggacgagccgggagacgaggtncaagnnaccctgatgggagatgtatatttcttcggtattccgttgcccaagatagaaaaactcattaaatccaacgttcctgaactgagaggacagttccc

SEQ ID NO: 4225 - DNA, 416 bp, Canis familiaris
gcacgagagctggtgctttgtggccgaaaccagaaggccctagaagagctcaccaaagaacttacagcttctccagccaccaaggtgcagacacacaagccttacatggtgacctttgacctcgcagaccctggggccatcatagcagcaacagctgagatcctgcagtgctttggctatgtggatgtgctcatcaacaatgccggcatcagctaccgaggcgccattgtggacaccaccacggatgtggataagaaagtcatggagacaaactactttggcccagttgctctaacaaaagcactcctaccctctatgatcaaaaggcgacaaggccacattgttgtgatcagcagcatccagggcaagatcagcattccttttcgatctgcatatgcagcctccaaacatgcaac

SEQ ID NO: 4226 - DNA, 271 bp, Canis familiaris
  misc_feature (217)..(218): n comprises a, c, g, or t, or includes no nucleotide
  misc_feature (223)..(224): n comprises a, c, g, or t, or includes no nucleotide
  misc_feature (229)..(229): n comprises a, c, g, or t, or includes no nucleotide
  misc_feature (235)..(235): n comprises a, c, g, or t, or includes no nucleotide
  misc_feature (241)..(241): n comprises a, c, g, or t, or includes no nucleotide
gcacgaggtcatccggaggctctgggctgacaacggtgtgcaggcctgctttggccgctcccgggagtaccagctcaacgactccgctgcctactacctgaatgacctggagcgcattgcacagagtgactacatccccacacagcaggacgtgctacggacccgtgtgaagaccacgggcatcgtggagacgcacttcaccttcaagggatctgcnnacttnncaagnaatgtntttggnattgtgggttgggttccaggccgggttctt

SEQ ID NO: 4227 - DNA, 268 bp, Canis familiaris
gcacgaggggctgcagcggcgccccgaagccgccgccgccgccgccgctgctgctgctgctgctgctggcgctcgcctcgcagctctgcagccccggcgtcggggccgactcggagaagccctgcagcatccccgcagataaattattagtcataactgtagcaacaaaagaaagtgatggattccatcgatttatgcagtcggctagatacttcaattataccgtgaaggtcctgggtcaaggagaagagtggagaggtggtgatgg

SEQ ID NO: 4228 - DNA, 157 bp, Canis familiaris
gcacgaggcggcttcctagtcagttctccgctgagttggagggaggctcagcctacggggaggatcctggcttctcccaaccctgctccatccagccacttaggggccatggaggtggcggagcccaacagccccaccgaggaagaggaggaggagg

SEQ ID NO: 4229 - DNA, 342 bp, Canis familiaris
gcacgagcgaaggcggccgaatggaggaggtgcctcagggctgtcccgggaccggcagcgcccaggcgggccgaggggcctcatgtcagggctgccccaaccagcggctctgcgcttccggagccggcgcggctcccgacccagccatagaagaaatcaaagaaaaaatgaagaccgtgaaacacaagatcttggtgttatctgggaaaggtggtgttggaaaaagcacattcagtgcccaccttgcccacggcctagcagaggatgaaaacacgcaggttgctcttctggacattgatatatgtgggccatcgattcccaagataatgggcttggaaggag

SEQ ID NO: 4230 - DNA, 388 bp, Canis familiaris
gcacgaggcgcggtgaagagctcttccctactgtcgcagccatgccgtccagggtcctctgcagtccgtgcaggtcttcggacgtaagaagacggccaccgccgtggcgcactgcaagcggggcaacggcctcatcaaggtgaacgggcggcccctggagatgatcgagccacgcacgctgcagtacaagctactggaacctgttctgcttctgggcaaggagcgatttgccggggtggacatccgtgtccgagtgaagggtggtggtcacgtggcccagatttacgccatccgccagtccatctccaaggcgctggtggcctattaccagaaatatgtggacgaggcctccaagaaggagatcaaagacatccttatccagtacgac

SEQ ID NO: 4231 - DNA, 211 bp, Canis familiaris
gcacgaggaaggaatgggcttcatttttatttacattttttaattggttgttgctagtgtatagccatctattgattttgtaaattgaccttgtatttaacaaacttgtaaaaggctctaaatggttttattcctttacccatagattaggtgtctctaaataaactattaatcatctataaatgacaagggttttttgccttcctctcta

SEQ ID NO: 4232 - DNA, 415 bp, Canis familiaris
gcacgagtggaactggtggcccaggacccaactttgtccaggctccctgtctactgcctcagaaatgtgagtgaatgccaggcccctccggagcccactgtaccagccaggccctaagtccctggtcccgagagagaaggggctacccaggcagatccttggaaagtcctcctgtcctcttccagcacccccttagacagtcatggtcttagtctcctgtccagtcccagagctaccactctaagcccaagccaccttcttcctgcacctacgtgagctcgataacctgcttccacaggttcctgtcatcaaccctccatctatcctgccctcacagagatgtctttctatcttctatcctataaagctgttttcctgagagagagagagagagagagagaacaacagcttgctg

SEQ ID NO: 4233 - DNA, 340 bp, Canis familiaris
gcacgagaaaaaaaaaaccacacacacacacagagcgagagagagagaacttgagaacttgacaagttgcaagagagagcgagagagacaagaagtgtccaaggactaaagccaagggtatccaagttggactgggcggcgtcctgacggcgcccccagtgtgcacgagtgggaaggacttggcgcgccctcccctggcacggggccagggagcggctgcccgcgggctgccccgctttgcggacgggctgtccccgcgcgaacagaacgttagacttttctttaacattgaccaagaactgcatggacctaacattcgatctcattcagtattaaaggg

SEQ ID NO: 4234 - DNA, 425 bp, Canis familiaris
gcacgaggcccggcgcagagcggtttccttcccgctggccgcggcgcccccgccgagtcccggagcccccagccccgcgggcgccatgcgggaggcgctgctgctgttctgcaactggagcacgctgggcgtgtgcgccgcgctcaagctgccgcagatctccgcggtgctggcggcgcgcagctcgcggggcatcagcctcccgagtttacttctggagctggcgggcttcctggtgtttctccggtacctgtgctactatgagtacccgctgctcacctacctggagtaccccattctcatcgcacaagacgtcctccttctgctctgtgtcttccacttcaacgggaacgtgaaaggggcagcgccctacctcgccctgtatatgtgtggcctcgtggttcgtcctttccctgcagaagtgg

SEQ ID NO: 4235 - DNA, 418 bp, Canis familiaris
gcacgagatttagtgctttcatagctgtttcctagggaaagacatgaaggatcacagaagaaagtacctgtttaattttttggaagcttaaataagcctagagaggttgttaactctataaaagagaaagtccctgtacccacctaaatcatcagtttaaaatttttgagactttatgggtggctcagtcagttgagtatctgcctttggcacaggctatatcttggggtccaggttgtgatctcggggccttgggatggagccgggagactgcttcttctctccctctgtccctccccctcgctccttgctttcctctctttctcactctctcagataaatgaataaaatctttaaaaatatataaaatttttgagagtttaaaaataagctcaaatcacttttttcagtattatat

SEQ ID NO: 4236 - DNA, 400 bp, Canis familiaris
gcacgaggccatcatgcgttctcctcagatggtgtctgctattgtacgcaccatgcagaatacaaatgatgtggaaacagctcgctgtactgctgggaccttgcacaatctttctcatcatcgtgagggcttgctggccatctttaagtctgggggcattcctgccctggtgaagatgcttggttcaccagtggattctgtattattttatgccattacaactctccacaaccttttattacatcaagaaggagctaaaatggcagtgcgtttagctggtggactgcagaaaatggttgccttgctcaacaaaacaaatgttaaattcttggctcttacaacagactgccttcagattttagcttacgggaatcaagaaagcaagctgatcattctggct

SEQ ID NO: 4237 - DNA, 420 bp, Canis familiaris
gcacgaggagagagcgaactagtctcgagtttttttttttttttttttaaaacttcatcatatgaacaggtttaatgtaacatggaatgcaaaagattagaaccattaataaaatatccaattcttcaacttaaaaaaataattaaaataaataaaatcaaaataagatagtgaccagaataatagtaccatgacactcacagtaaatagaaaagcttccatcagcattttaaggagtaacaaatgcagtgatacatatttaaatattccactcaattttgttatttatttttcataaaaacattactcagaaggcttcagaaattgatgaaaagatgagaaatcaggttagaaatacataatatgccaagatttgttaattcactgttaaaaagtaccttatatttgctcattttaaac

SEQ ID NO: 4238 - DNA, 413 bp, Canis familiaris
gcacgagatttggatttggggagctcattgcgcttgcatgagtcctggggttctgttggctggccttccctcacatgagaattaattgagaactgcagtggctcagcagttcctcctgcctttcactcctcctccatgtgcagacttgaccttggcccaattgtgagcccctgcagcctggctgcttgaccctggaggctcagatcttgtgtccaagcacccactttgggggcaactgtggatttcttttcttttttttctttccttcagaaaggagaggggctgtttatttttcacttatttgaagcaaagtggggaaaagtaatccaaaacagagcaatctcttctgccttattagctttttatcagaaaaaccagcaatatttggcaataatgccctctcagacaaagtt

SEQ ID NO: 4239 - DNA, 419 bp, Canis familiaris
gcacgagtggaaccgaatgtgatgtggagtgcttttgaagatggatttctgtcctgataatttcttttgcggttcccgttggcttttgaagttcgacatgtattgatctcccattattccatagttaaacagtgtattttaaacttttcacaaacatgtaatttttaaaaatttgccttcagagggttgaagatgtatgaagtgtctactgtatttcttcaacatttacacaaccgcttagaaatagaagtgcttttgtgttcagttatctgcaaaagcaaatacatgcaaatatattgctaatcttggggctgaaaaagtgttctgtggcttgttgtccccatgttttagatgttgtgaatatataacaacatgtgatagacattcctcaacttgtttatggtaatactcctagaata

SEQ ID NO: 4240 - DNA, 414 bp, Canis familiaris
gcacgagcttgtacatatatggccaggttactgaaaaccccaacggctgctctgaagctacccgaacgctactgcggactcactgcaagcatagagaagaacattgctgatacaccctgagaccgttcctacagccatgctctggcgtccaaaatagaccggtttacccgtaaagtgacatgtaccatgagcacaaagaacatggccaagacgttaaagatcaactctttatgaaaagaatatacctacaatcacctcatgcccacaaggtactcttggtgtatctgttagtacaaaactgtggcaaacactgatgcctttagagaccctgttcttaaacgcaagggccgacgagaggccaaggtcaagttcgaggagaggtacaagactggcaagaataagtggttcttccag

SEQ ID NO: 4241 - DNA, 418 bp, Canis familiaris
cacgaggcggcgcgagcacggacacttctgcgggagctggtgctgcggcccccgctgctggcggcccggtggcaggcagttcagttaaccccccgaagatggctgaacctgcaggaataccagagcaagaaactgatgtctgacaatggagtcaaagttcaaagattctttgtagcagatactgcaaatgaagctctggaggctgctaagaaactaaatgcaaaagaatttgttttaaaagcccagatcttagctggaggaagaggaaaaggtgtcttcagtagcggtttgaaaggaggcgttcatttaacaaaagaccctcaagttgtaggacagctggctaaacagatgattggatataatctagcaacaaaacaaactccaaaagaaggtgtgaaagttaacaaggtgatggttg

SEQ ID NO: 4242 - DNA, 422 bp, Canis familiaris
gcacgaggcagcaagcagcagcaagcagaagtagcagcagcatcagcagcaacaaaaaaaaaaaatcctcatcaaatcctcacctaggctttcagtgtatccagatccacatcttcactcaagccgggagagggaaagaggaaagggggggaggaaaaaaaaaacccaacaacttagcggaaacttctcagagaatgctccaaaacttcagcagtgcttctggtgctggtgatcagtgcttctgcaacccatgaggcggagcagaatgattctgtgagccccaggaaatcccgggtggcagctcagaactcagctgaagtggttcgctgcctcaacagtgctctgcaggttggctgcggggcttttgcatgcctggagaactccacctgtgacacagatgggatgtacgacatctgtaaatc

SEQ ID NO: 4243 - DNA, 417 bp, Canis familiaris
gcacgagcacaccacacctcaacagcaaccttaatcgcctagtgcaacgaacttctgtcctatttggattggtcactgggacagagaatcatttcactcccaggagctgcacattcaactcccaagaaccccataatatactgcccctggcgtcgagtcagatcaggtttggacttcttccactgagcatgacaagtacccgaaaggccaaatcaaccagcagaagtatggaaacaaaagcccaggttgtccccccggcactctcccgagcaggtgacccaacgcatcctggctccttgttcagacagctggtcagtgaggaagaagacgcatctacgccttcattattcaagctaggttggctctctagtatgactaaataacatgggaacatatccgtctctctctaaataaata

SEQ ID NO: 4244 - DNA, 424 bp, Canis familiaris
gcacgaggcggtgcgggccggagtgcgggcgggagtgcgggccggcggcggcgcggcagctggtgtcctcccgggccgggctggcctccctgcctgccccttccttccttcgcacatggcgctgctccgacgcccgacggtgtccactgatttggagaatgttgacactggagttaattctaaagctaaaagtcatgtgacaatcagacgggcagttttagaagaaattggaaatagagttacaaccagagccacacaagtagctaagaaagctcagaacaccaaaatacctgttcaactcaccaaaacaaatgtcaacaaacaactgaaacctactgcttctgtgaaaccagtacagatggaaatgttggctccaaagggtcctccgccggccctggaggagatctccatgaaggaagagaac

SEQ ID NO: 4245 - DNA, 422 bp, Canis familiaris
gcacgaggcagaacctagtgcttttatattagaaatacaagtttcagaatggtgttgccgcctgccagcaggttctctggaacacttatttttattactgttcttactggtacatggttgtggtcagaaggcttttccccacaagaggatctagatgcacaacagccaggtccccggccgccttctgtggtgctgcacggtcttgctcctcgagtgctgttgatgtgggctctccccatccaggggccctgccacgtcagggccggtcactgcgctagcccccgggtgtgcctggaagcagcccatggctgcacgaccctctcgtggctgattcccacaaggtgggcttcaccggaatagacccgcagaggtagttagtgtgccagcgacacggccatctgtccctttgttttggatgagcc

SEQ ID NO: 4246 - DNA, 404 bp, Canis familiaris
gcacgaggccgtcttcccggccgccgcagccatgaaggtcgagctgtgcagtttcagtgggtacaagatttaccccggacatggcaggcgctacgccaggaccgacgggaaggtcttccagtttcttaacgcaaaatgcgagtcggccttcctttccaagaggaaccctcggcagatcaactggactgtcctctacagaagaaagcacaaaaagggacagtcggaagaaattcagaagaaaagaacccgccgtgcagtcaaattccagagggccatcactggggcatctcttgctgatataatggctaagaggaatcagaaacctgaagttaggaaggctcaacgagaacaggccatcagggctgccaaggaagcaaaaaaggctaagcaagcatctaaaaaga

SEQ ID NO: 4247 - DNA, 414 bp, Canis familiaris
gcacgagctggggcggtacacctgtcaaacggtaacgcaggtgtcctaaggcgagctcagggaggacagaaacctcccgtggagcagaagggcaaaagctcgcttgatcttgattttcagtacgaatacagaccgtgaaagcggggcctcacgatccttctgaccttttgggttttaagcaggaggtgtcagaaaagttaccacagggataactggcttgtggcggccaagcgttcatagcgacgtcgctttttgatccttcgatgtcggctcttcctatcattgtgaagcagaattcaccaagcgttggattgttcacccactaatagggaacgtgagctaataaggaaaaacttgaagccaccataaatgaattaatctaattacattttctgaaaacataaccagcccatg

SEQ ID NO: 4248 - DNA, 410 bp, Canis familiaris
gcacgagcagacatacctgagtccagttcccagttcagccactcattagctgtgtgactctggaaagtccctcagcccctctgaacccagctcttcatctgtcgaaagggggtgacagtgcctgcacgcagaccattgtcatccaggtccagcggcagtctccctgcaggcgctgaagtgtagctgtggtcactgtggcttcccattcagcaccgtgtctggctggagagctttggatttggtgccgagtccaggggggctccgtgtgaggtcaccctggcccaggtctggctggaagggtgaaggggatgccccagagtcgcattgccattgattcagtctgccagaagcaccccctcacagagagaaggtcagacgaaacacttggcttgtctcctgagtaaggcccg

SEQ ID NO: 4249 - DNA, 142 bp, Canis familiaris
  misc_feature (47)..(47): n comprises a, c, g, or t, or includes no nucleotide
  misc_feature (56)..(56): n comprises a, c, g, or t, or includes no nucleotide
  misc_feature (62)..(62): n comprises a, c, g, or t, or includes no nucleotide
  misc_feature (69)..(69): n comprises a, c, g, or t, or includes no nucleotide
gcacgagggcggacgcgcgagcggcatgagcgcgcggccgggccggngagcgccgngccganggaccgnccgccgggccgccggcggctccggcccttcctgtcctcggccggctggccgtgagcgccgcgtgggggtccgg

SEQ ID NO: 4250 - DNA, 404 bp, Canis familiaris
gcacgaggtttttgctcgatgcttatcatctctgaaggatgagaggattcaggctagcaaaaagctgaagggtccccagaagatgcagtttgaaggtgataagaaagcattcctggaagatattcggaaggccctctatgcttccaagatcatctcgtacgcgcaaggctttatgctgctgagacaggcagctacagaatttggctggaccctcaactatggtgccatcgccctgatgtggagagggggctgcatcatcaggagtgtgttcctgggaaagataaaggatgcgtttgatcggaacccacaacttcagaatctactacttgatgactttttcaagtcagcggttgaaaactgccaggactcgtggcggcgggcagtgagcaccggagtccaggcgg

SEQ ID NO: 4251 - DNA, 406 bp, Canis familiaris
gcacgagcagaatctggagtccaggactataattcggggcaagaggactcgcaagattaataacttgaatgtggacgagaacagcaatggggatcagaggcgggccccactggctacagggacgtggaggtctgcacctgttccagttaccactcagaacccacctggcgcaccccccaatgtgctctggcagaccccattggcctggcagaacccatcaggctggcaaaaccagccagccaggcagaccccaccagcacgtcagagtcccccagctaggcagaccccaccagcctggcaaaacccggttgcttggcagaacccagtgatctggccgaacccagtgatctggcaaaatccagtgatctggccaaaccccattgtctggcccggtccagttgtctgg

SEQ ID NO: 4252 - DNA, 358 bp, Canis familiaris
ttcggcacgaggggatccatgcacctatgtaaggaagtcctgcaatacctggattggtcacctgggccctgacattgttagtcttctctggtctcatggcctgtggaagaccaaagcttaccaagatagcttttccctttgaatccaattgggtgtttcctaggaacacagtggtagggcagcccgggtggctcagcggtttagcgctgccttcagcccagggcgtgatcctggagacccaggatcaagtcccacatcaggctccctgcatggagcctgcttctccctctgcctgtgtctctgcctctctctctctctctcatgaataaataaaatcttaaaaaaaaaaaaaaaaaaa

SEQ ID NO: 4253 - DNA, 411 bp, Canis familiaris
tttcgggcggaaacggtattggtaggtccgaggctcccgctagtgcgggacagacgcctcggtcagttagagcccctggtggagagcggggacgtcgagctgcttgcgtgggtgttcccggctcctccgcgccccacagccggggagtccgctgcccggccttggccttcccgcggggctcgtaatggcgtcccagccgaattcctccgcgaagaagaaagaggagaagggaaagaacatccaggatctgaaactggatatcccaacaggtatgacaccacaaaggaaaaattacttatacccatcaacactggtgagaaccgaaccacgtgaacagcttctggaccagttgaaaaggaaacagcctgaactgttaatgatgttaaagtgttcagaaaataacaaagaaga

SEQ ID NO: 4254 - DNA, 284 bp, Canis familiaris
gcacgagcggaggcaggccgaggtggctgcgagcgagcaggatggtggtgacccggtcggggcggcatccgcccgcgagggaggccacgttggccgaagactccccacagaagacttctgctgctaaaagaattcacacacattcaaaaggcaggaaggaatgtttacctgtcgacccaactactgctgaatcacaaaccactaggaaacaaagtccagcttctagaactcctaaaaccagaaagaggaagagtggaactacagtctcattacctgaaataaac

SEQ ID NO: 4255 - DNA, 110 bp, Canis familiaris
  misc_feature (90)..(90): n comprises a, c, g, or t, or includes no nucleotide
gcacgaggctgacccccctcgcgggggggatgcgtgcatttatcagatcaaaaccaacccggtcagcctccctccggccccggccggggnggctgggcgccggcggcttt

SEQ ID NO: 4256 - DNA, 396 bp, Canis familiaris
gcacgagcgcgggctctgcgtccaggctgcacccgtcctgcattacacgacacagctaaagaaaactcgcttgtagggcctggtaagactgcatttggactcgctgatggtacacaacgtgttctgacgcgtagcaagctcctctacagaatccattatctgcaaatagtggccagccccaggctctcttgtgttcttcaaatttttcccagcgagttcctacacaaacccaaaagatagtctccagacataaaccgtctcataatttgaagcagaatcaattgcaggcaactgatgtccctcgtcctgcctctaggtcactgaataatacccaaaagagtgagcaaccctcgtcatcagccctctggaaataattctgaaaaggaactggcaaca

SEQ ID NO: 4257 - DNA, 408 bp, Canis familiaris
  misc_feature (408)..(408): n comprises a, c, g, or t, or includes no nucleotide
gcacgagccgtacccagcgcagcggcccccagggccccgctaccccccgtacaccactcccccgcgcatgaggcgccagcgctcggcccctgacctcaaggagagcggggcggctgtgtgagcccgagcccgccgggagtcgggggcgctgagtcgggggcagagcagctgccgggcaccgctgccccaggagcccgggtcgggaaggccacaggtgggcgagaaggtccgagtaggtgctggacggcgtgggagaagctgggccggaggctgcaggaaggaagcgcgcacggagttgccaggagcaaaccaaagtgaaggaagaggatgggagctgccttgggggcgccccttgtgggggtggggggccccacaatgctgtaggggtgggtggggggggcttcttan

SEQ ID NO: 4258 - DNA, 390 bp, Canis familiaris
gcacgagccgccgcggagccgctcgtccgtcccgagccgccgccggagccctgccgaggaggctgctgccggagcccgccgcccgccgcccgcgccccgcgccccgcgcccgcgcccgccgtccgccgagggcgccccaggccgcgccatggtgaaggtgacgttcaactcggctctggcccagaaggaggccaagaaggacgagcccaagtgcggcgaggaggcgctcatcatcccccccgacgccgtcgcggtggactgcaaggaccctgatgaagtggtaccagttggccaaagaagagcctggtgttggtgcatgtgctttggactagcatttatgcttgcgggtgtcattctaggaggagcatacctttacaaatattttgcact

SEQ ID NO: 4259 - DNA, 409 bp, Canis familiaris
gcacgaggaaatgtccccagaagaatcatgggagcacaaagaagaaataagtgaagcagagttagggggttgttccatgggagatggaagagctgctgaggagagtgcccaagaaatgatggaggaggaagaggaaataccaaaacccaaatctgtggtcgcgcccccgggggctccaaaaaaagaacatgtaaatgtggtattcattgggcatgtagatgctggcaagtcaaccattggaggacaaataatgtatttgaccggaatggttgacaaaaggacactcgagaaatacgaaagagaagctaaagagaaaaacagagaaacttggtatttgtcttgggccttagacacaaatcaggaagaacgagacaagggtaaaacagtagaagtgggccgtgcctatttt

SEQ ID NO: 4260 - DNA, 311 bp, Canis familiaris
ttacggtctactttcagtagtcgaagccgttcaccaattcagagacaaagtggcaccactgtttatcgtaattcacagagggaaagtagacctttacagcaaaacattagaaggtctgttaggcggagaggtataacgcgtgtctttttagagcaagatagggaacgtagaggtactgcctatgctccattctctaactcaagacttgtgtcaagaataacagtagaagaaggagaagaatccagcagatcctcaactgctgcacgacgacatccaacaatcacactggacctccaagtgagaaggattcg

SEQ ID NO: 4261 - DNA, 409 bp, Canis familiaris
gcacgaggttttcaacaagcagactccaatctgaattttctttaatgaagaaaaagtcgtttttagctccattagaactcggaagagatttccacgtgaaaaaaaaaaaatgttacaaatcattaatttctagagaaaaaattccaaagagccttttaagtgacaatgtacctaaagtagggtaataactgtactatttaaaacgtaatcagtgattattaatggatttttatttcctccgggaagatgcctttggtcatctgaccgcaggcgtaaggcatacacctctctgctcggttcggtgtttctcttgaggcggattcttcctggggaagggcagagggatgccagggttctggaggaatgtgttcctctctccgctttcaggcaagagaagaccttttgtgag

SEQ ID NO: 4262 - DNA, 414 bp, Canis familiaris
  misc_feature (298)..(298): n comprises a, c, g, or t, or includes no nucleotide
  misc_feature (380)..(380): n comprises a, c, g, or t, or includes no nucleotide
gcacgagtccagacgctaagatggcagagcaactttctccgggaaagaccacacaccaggtgtgcaccttcctctttaaaaagcctggtggacgaaaaggggctgcaggccgcagaaagcgcccggtctgcgaccaggagcctggagacagcagcagcagcagcgacgaaggtagcactgtggttcgccccgaaaagaagcgggcgatccacaatccaatgatacagaagactcgtggcagtggtaaacagaaggcggcttacggcgactggccaagcgaggaggaggaggagagganggaaggaaaaaccagtccgagagtcttggcgtggtatacaagtccacccgctcggcaaaacccgtgggaccggaggatatgnggggcgactgctgtctacgagctagacacggaga

SEQ ID NO: 4263 - DNA, 407 bp, Canis familiaris
gcacgagaagagggaggaggtcgtgatggcggctccggggccggaagtgctgtgcccggccgcagtaccagatttggaatggtatgagaagtcagaggagacccacgccccccagatagaactactcgagactacctctactcaagaacctcccaacccttcggagcccttttaccccagaactgcatggtgccggtggtgtttcccgggcctgtgagccaagaaggctgctgtcgttttacttgtgaacttctaaagcatatcatgtaccagcgccaacaactgcctctgccctatgaacagcttaagcacttctaccgaaaaccttctccccaggcagaggatgcaatgaagaagagctcgggctgctgctgagatgagcagcaggaaatgccaacaagccctgg

SEQ ID NO: 4264 - DNA, 228 bp, Canis familiaris
gcacgaggggaatggtgaaaatttaagtcatttcttttgagagagacttgttttggatgctccccgcagccccccttctcccctgcactgtaaaatgttgggaattgtgggtcaacaagaaagaaagtgggttttttaagttgaattttttttttttaacattcctcaatgaatgtaaaatttgtactaatttaactgactattcttggtgtaaaatcttgtcatgtg

SEQ ID NO: 4265 - DNA, 405 bp, Canis familiaris
gcacgaggaaatgctgcacaatgccactttctgtctggttcctcgtggtcgcaggcttgggtccttcaggtttctggaggctctgcaggccgcctgtgtccctgtgatgctcagcaacggatgggagttgccattctctgaagtgattaattggaaccaagctgccgtcataggcgatgagagattgttattacagattccttctacaatcaggtctattcatcaggataaaatcctagcacttagacagcagacacaattcttgtgggaggcttatttttcttcagttgagaagattgtattaactacactagagattattcaggacagaatattcaagcacatatcacgtaacagtttaatatggaacaaacatcctggaggattgttcgtactaccacagta

SEQ ID NO: 4266 - DNA, 279 bp, Canis familiaris
gcacgagctatcaactacagtaaggaccttcctctggctcaaggaatcaagtttcaataaaggtgacggtaaatcagcattacttcaagtcttctaggcattcttgcagttctttgttctgaagaagaagaagaaaattaagatttgccctgaataaatgcatcattttgattatgacaatgactagtctcttaaccctgaggccccagctaaatcaagagacttactttttagaaataaaactgaattgtcacaaatagcaaaaaaaaaaaaaaaaaa

SEQ ID NO: 4267 - DNA, 413 bp, Canis familiaris
  misc_feature (337)..(337): n comprises a, c, g, or t, or includes no nucleotide
  misc_feature (351)..(351): n comprises a, c, g, or t, or includes no nucleotide
gcacgagaaaatcttaaatatatatatatatgtgtgtgtgtatggcaaaaaataaaatgtagggatgaacgaagatattctacacacatacaaattgaaataaagcaggatacaaattatttcaaagtatatgttacacttattaggacagtcattcttaattttaaaaagctataatcttcaataaagatataactattatatatgcaattgattcttgaacaatggggttaggggcatggacctcctgtgcagtggaaaatccacatagaaacttttttttaaagattatttgagatgttgagagtgagcacatggttgcatgaatatggggggngcaaagggagagangagagaatttcaagcctattccttgctctgcatggagcaagaggcaggactcaatctcagaa

SEQ ID NO: 4268 - DNA, 406 bp, Canis familiaris
gcacgaggggacctggctggcggcgacatggccaaacgcaccaagaaggtcgggatcgtgggtaaatacgggacgcgctacggggcctcgctcaggaagatggtgaagaagatcgagatcagccagcacgccaagtacacctgctccttctgcggcaagaccaagatgaaaaggcgagcggtgggcatctggcactgcggctcctgcatgaagaccgtggccggcggcgcctggacctacaacaccacttctgctgtcacagtaaagtctgccatcagaagactgaaggagttgaaagaccagtagaagctccaccatgtgaaacatagctagcctacaataaatgggttaatttatatgataaaattaaaaaaaaaaaaaaaaaaactcgagggggggcccggta

SEQ ID NO: 4269 - DNA, 183 bp, Canis familiaris
gcacgaggcggggcggtgcgtgtccggctgctgaatcccccgccatcgctcgccgccctgactccggcggcctcgatgtccagcccccgggaggaaggctcctgcggctactgattcccggccgaaggggatgtccctcttggcggggggacgtgtcggagccgaaggccgcgatgggcgaga

SEQ ID NO: 4270 - DNA, 423 bp, Canis familiaris
gcacgaggcgggctcctggggccggaccccggggcgctgagccccgcgcagcaggagcagctgcgggacttcaagattcagactcggattgctaacgaaaaatacctgaggacccacaaagaagtggacctgctcataagcggtttcttcaggtaggtgggtgttcccagtcggccttgaccaccagtggaagatgctacgaaaacttgctgcggagatgagcgcctgctgccctcagggtcagaggtggccgaccataaggtggagaggtgaagtaccttccccaggatgctgaaccaggatccagacccctgagaaatgtttctgaaaagaccagacaacatccaagaatttgctgcagactatttcacagatccaagacttcccaacaagattcacatgcagctaattaaggagaagaaa

SEQ ID NO: 4271 - DNA, 419 bp, Canis familiaris
ttcggcacgaggccggcgcggctctgccgtgcgtcgcggcagccgggggacgctgggcatggtgggcttccgggcctcgaggagggcgcttctgccgccgctgtgccgcgcctttgctcgccccggctgtccgctcggccccgagcgcggcgcggagcgcagggaggcggcggcgagccgggtctcaggattctgccctccgagaaaatcttgccgtgactggataggacccccagataaacattcaaaccttcgacccattcacttttacatcccggaaagcgagtcaccgttggaacaaaagctaagacaattaagacaagaaacacaagaatggaaccaacagttctgggcaaaccagaatttgacatttcgaaaggaaaaagaagaatttattcactcaagactaaaagctaaag

SEQ ID NO: 4272 - DNA, 410 bp, Canis familiaris
gcacgagcaaggagaagtacattgaccaggaagagctgaacaaaaccaagcctatttggaccaggaaccctgacgacatcaccaacgaagaatatggggaattttacaagagcttgaccaatgactgggaagatcacttggcagtgaagcatttttcagttgaaggacagctggagttcagagcccttctctttgtgccaagacgtgctccctttgacctattcgagaacagaaagaaaaagaacaatattaagctgtacgttcgcagagttttcattatggataactgcgaagagctgatccctgagtatctgaatttcattagaggtggtggtggactctgaagatcttcctctaaatatttcccgtgagatgttgcagcaaagcaaaattttgaaagttatcagaaa

SEQ ID NO: 4273 - DNA, 403 bp, Canis familiaris
gcacgagaagataaagaacaagaagaagaaaaacaagaaaaaatcaccggcacctgtagaaacccttcaagatgctaagaaagagttaacgtttcagaactcagatggaagtgaggtgaaggaaggagagcatgcagctctcagtgacacaaaaccagttgtaaaaacacaaaatgaggtacctgaaagtccaaaggagaaaaacatatcaggaagcagtgaaaagattgattgtccagaaaatctgaaaattgagttggctgagaaacttgaccaagaagataatgatgtaaacactaagaagggggggaaaacagctgatggcgacacattaggtttgaggggtgacacaacccagtcatcagacatgagtgcagcgataggagctgatgaagcgtaggaa

SEQ ID NO: 4274 - DNA, 412 bp, Canis familiaris
gcacgagcttacctcgagctactgcgcagaccgcgtcgccgggagcccagccggtcaggatgatcacagacgtgcagctcgccatcttcgccaacatgctgggcgtgtcgctcttcctgcttgtcgttctctatcactacgtggccgtcaacaatcccaagaagcaggaatgaaagtggcgctttctccgccccagggttccaggacatagtctgaggcaagatggagggtatgaggggccttcccacttcacttcatccctctacccatcacaacatacaaagcaactacacctggatttttccaaacaacttttatttcctcaaagtcttccttaaccctatggaacaagaagctgccactgagtagggcccagtataggagctttcttttctactccctacccccaata

SEQ ID NO: 4275 - DNA, 405 bp, Canis familiaris
  misc_feature (181)..(182): n comprises a, c, g, or t, or includes no nucleotide
gcacgaggtgcagagtcagcacctgatatgtaggtcctacccatgatagatgggagaacccagttgcccgccccccccaagcccctccatgcctctgcaggacagatgggaaggaggccagaggagagaccagacctgttctgggacctgggtgttcccatgggccctgctggattgtttnngcctagccccctactcgccccccccccatacccccaccactctggacccagggccattccttaagccccctcccaaccctgtgccaccgccactggttagagggcccagctttacagtacagcctttgtgctggaaaaaactgtcctggggaggggggtacataccacacagggcctttgtctcctctcctgaagggaccgcctgccccagctcatcctagag

SEQ ID NO: 4276 - DNA, 377 bp, Canis familiaris
gcacgagccgcaacaagaaaaaggagaagacagagtgcctgcagaaagagtcggagaagctggagagtgtgaacgccgaactgaaggcccaaatcgaggagctcaagaacgagaagcagcatttgatatacatgctcaaccttcatcggcccacgtgtattgtccgggctcagaatgggcggactccagaagatgagagacacctttttatccaacagataaaagaaggaacattgcaaagctaagcagttgtggtatgggggcaactggggagtcctcatcgaaacctactacatcccaaaccctgaagccattggagatctgacttcctgtgcacctctcgcatcctggcagtgaaggaccatcgaggcgggaga

SEQ ID NO: 4277 - DNA, 417 bp, Canis familiaris
gcacgaggatcagcctgctgctgccgcaggtggaggagtgcgtgctcaacttgggcaagttccacaacatcgttcgcctcgtggccttttgtcccttcgcctcgtcccaggttgccttggaaaatgccaacgctgtgtccgaaggtgtcgttcatgaggacctccgcctgctcttggagactcacctgccatccaaaaagaagaaagtactcctgggggttggagaccccaagatcggtgctgctatacaagaagagttagggtacaactgccagactggaggcgtgatagctgagatcctgcgaggggttcgtctgcacttccacaacctggtgaaaggtctgacagatctgtctgcttgtaaagcccagttggggctgggacacagctattctcgtgccaaagttaagtttaatg

SEQ ID NO: 4278 - DNA, 400 bp, Canis familiaris
gcacgagtaaatttgcacgtctcaacattgacccctccaccatcacgtggcaaagagtattggatacaaatgaccgatttctacgaaaaatgacgattgggcaggcacccacagagaaggggtattcccgtcaggcccagtttgacatcgcggtggccagtgagatcatggcagtgctcgccttgactgatagcctcgcagacatgaaggagcgattggggagaatggtagtggccagtgacaaagatggacagcccgtgacagcagaagatttgggggtcacaggtgccttgacagttttgatgaaagatgcaataaaaccaaatctgatgcagaccctagaagggacacctgtatttgtgcatgctggcccctttgctaacattgcccatggcaactc

SEQ ID NO: 4279 - DNA, 402 bp, Canis familiaris
gcacgagggctcctgcagcggtcgcaggcggtggggaggggagctgctcggcggcccgcggacccgaccctttcagcgctctgctcccgcgcctgcctacctcgctcctcggcaccatgaccaccaccaccaccttcaagggagtcgatcccaacagcaggaatagctctcgggttttgcggcctccgggcggtggatccaatttttcattaggctttgatgaaccatcagaacaacctgtgaggaggaacaaaatggcatccagcatctttgggacacctgaggaaaatcctccttcatgggccaagtcggcaggtgccaagtctagtggtggcatagaggattctgagtcatctggaccccagagaaggaactcttctgaagggaactctggagacttct

SEQ ID NO: 4280 - DNA, 336 bp, Canis familiaris
  misc_feature (8)..(8): n comprises a, c, g, or t, or includes no nucleotide
ttgcaggnaaattcggcaccgagagcttcatccccaaatagaataacttatgtcaaagaattaacagaaaaataacataattattattccaacactaatggctatcaccgctctacttaacttatatttctacctgcgactcacatatagcaccgcacttaccatatttccatccacaaacaacataaaaataaaatgacagttcgaatacacaaaaaaggcaaccctattaccccccttaattattacctcaactatactactcccactaacacctatactatcagtcttggactaaaaaaaaaaaaaaaaaaaactcgagggggggcccggtac

SEQ ID NO: 4281 - DNA, 383 bp, Canis familiaris
  misc_feature (361)..(361): n comprises a, c, g, or t, or includes no nucleotide
ctcgtgccgcacggcctgaggcccgccgctttccgaaatggccgagcagtcggaccagaccgtcaagtactacaccctggaagagatccagaagcacaaccacagcaagagcacctggttgatcctgcaccacaaggtgtacgatttgaccaagtttttggaggagcatcctggtggggaagaagtattaagggaacaagctggaggggatgctactgaaaatttcgaggacgtggggcactctacagatgccagagaattgtccaaaacattcattattggggaacttcatccggatgacagagcaaagataaacaagccttcggaaactctcattactactgttgattctaattccagnctggtggaccaactggggtgat

SEQ ID NO: 4282 - DNA, 385 bp, Canis familiaris
gcacgagcggtcaccaagaacatccgcgagacctgcatgagccacacaggctggaaccgtgtcatcgtggagaagcccttcgggagggacctgcagagctccgacaggctgtccaaccacatctcgtctttgttccgcgaggaccagatctaccgcatcgaccactacctgggcaaggagatggtccagaacctcatggtgctgaggtttgccaacaggatcttcggccccatctggaaccgagacaacatcgcctgcgtcatcctcactttcaaggagccctttggcaccgagggccgtgggggctacttcgatgaatttgggatcatccgggacgtgatgcagaaccacctcctgcagatgctgtgtctggtggccatggaga

SEQ ID NO: 4283 - DNA, 403 bp, Canis familiaris
  misc_feature (297)..(297): n comprises a, c, g, or t, or includes no nucleotide
gcacgagcacattttgaaccttcaatctcctttgagggcctttgcaatgaagttcgagatatgtgttcttttgacaacgaacagcttttcaccatgaaatggatagatgaggaaggagacccgtgtacagtatcatctcagttggagttagaagaagcctttaggctttatgagctgaataaggattctgaactcttaattcatgtcttcccttgtgtaccagaacgtcctggaatgccctgtccaggagaagacaaatccatctaccgcagaggtgcacgccgatggagaaagctntattgtgcaaatggccacacttttcaagccaagcgtttcaacaggcgtgcccactgtgccatctgtaccgaccgaatatggggacttggacgtcagggatataaat

SEQ ID NO: 4284 - DNA, 354 bp, Canis familiaris
gcacgaggaaatgtccaccgaaggtagtaagtacattaataaggaaataaaaaatgctctcaagggggtgaaacagataaagaccctaatagaacagacaaacgaagagcgcaaatcactgctcagcaacctggaggaagccaagaagaagaaagaggatgcactaaatgataccaaggatacttaccactactcacccttcagcttattccagaggaggcctttcttcaatcccaaatttcgcatcgcccggaacataatacctttccctagattccagcccttaaacttccatgacatgtttcagcccttctttgacatgatacaccaggctcaacaggccatggatgttaa

SEQ ID NO: 4285 - DNA, 199 bp, Canis familiaris
gcacgagcggtggcacagtagcgacttaggtgtgaggattgcaggggcggcggccatggaggccgtactgaacgagctggtgtctgtggacgacctgctgaagtttgaaaagaaatttcaatctgagaaggcagcaggctccgtgtccaagagcacgcagtttgagtatgcctggtgcctggtgcgcagcaagtacaac

SEQ ID NO: 4286 - DNA, 403 bp, Canis familiaris
gcacgagtagacgtctgactgttgtcgcggcggaggaagtcaggacgtctggggccacccgggccagcgttggacccctgaagcccgtgaagatggtgttgcttacgatgatcgcccgtgtggcggacgggctcccgctggccgcctcgatgcaggaggacgaacagtctggccgggatcttcaacagtaccagagtcaggccaagcaactcttccgcaagttgaatgagcagtcccctaccagatgtaccttggaagctggcgccatgactttccactacattattgagcagggagtttgttatttggttttgtgtgaagctgccttccctaagaaattggcttttgcctacctggaagatttgcactcagagtttgatgaacagcatgggaagaaggtgcc

SEQ ID NO: 4287 - DNA, 271 bp, Canis familiaris
gcacgagctcgagttttttttttttttttttgacattctatgaggtatttattttgcaataattaggttcgattgcccagtgtcaagtcaccaaagacaaattttcaggctcccaatgaattcaaaccaaagtccatacattttggccactgtaggatggcaagcatttggagagaagaggaccatcctagaggaacatctgtacacaattcaaaagaaagtcctcccaagttaggatggatccactcacacagtaagtagggcgcctaac

SEQ ID NO: 4288 - DNA, 375 bp, Canis familiaris
gcacgaggagagagaactagtctcgcgtttttttttttttttttttcaactttatttatatgtatttaattaaaatggaatagacataaaccaaaaagaaaaaaatcaggataaagtgtcattgccattttgtttgtagggaggggtcaggaaatggaacagattacctgggaaacatcctaagacgatctcaaagagggtaggttacagaatttaagagtaaatgacaaaattaggtattattccacttaacctacaagtgaataaaggaagtcaaaatagttatcctatttggtacaagaatttttacatttaatacatagtgattcatttctcagaaactaaaataccggtaacttttagaagaaagaaatt

SEQ ID NO: 4289 - DNA, 253 bp, Canis familiaris
  misc_feature (196)..(196): n comprises a, c, g, or t, or includes no nucleotide
gcacgagcggtgccgcgctgtccgcgttctctctcctccgtgcgaggccgccgcagtgtccactgccggagagagcccccggcctcgagcggaggagggcgggcgggggatccgcgagcgggctgcggccgggctgggccgctgcactgcgggctggcggctttgcgtgtccgcctgctgctggtggttgggagcncggcggacagcgaccccctgccccggctcccctggccgccctgccggggagggcgga

SEQ ID NO: 4290 - DNA, 396 bp, Canis familiaris
gcacgaggcgctggtcccctaagagggctacctctgtggcgggtgtcgtgggctttcgccccagctcctcgctctcttgtccggggagcccggcgggcccgggactcccatccgtgccggtgcgggcgccggcatgtggctgtgggaggaacagggaggcctcctgggccccttctccttcctgctgctgctgctgctgctggtgacgcgtagtcccttcaatgcctgcctcttcaccggcagcctctacctcttgctgcgcctcttcagctttgagcccgtgccctcccgcagggcccctgcaggtgctcaagccgcgggacccgggtttccgccatcgcccaccgcggcggcagccacgacgcgcccgagaacacgctggcggccattcggcag

SEQ ID NO: 4291 - DNA, 428 bp, Canis familiaris
  misc_feature (393)..(393): n comprises a, c, g, or t, or includes no nucleotide
gcacgagggtcactgattttcccactgacattccagcaacccaattattcactccagctgtccccacaagaggttcatatgatggccgaggtgatagtgtggcttatggactgaggtccaaatctaagaagtcccacaaatatgaagtccagtatcctgattctacagaggaggacttcacatcacttgtgaaaagtgcgagtatggaagatgacttcaatgccgtcctactttcccggacagtgagaggcacctctgacagggacagccatgcaaaagacagtcaggaaacaagtcagcttgatgaccacagtatggaaaccaagggccgcaagcactcccaagagtataagctgagagcaagtgatgagagcaatatgcattcccatgagnattggtagccaggaaaattctgaagtcagcagtga

SEQ ID NO: 4292 - DNA, 385 bp, Canis familiaris
  misc_feature (64)..(64): n comprises a, c, g, or t, or includes no nucleotide
  misc_feature (278)..(278): n comprises a, c, g, or t, or includes no nucleotide
cttttttcaagacccagttcaagagcatttttcttttccctaagagaaaagatttgtgatgggnagtgtggaacccccccccccttttggggttaatttggccagaatttgaaatggggggcaaatttattcttgtctgattcctttttacattgcccttcctgttggagattctgtcccaccttcgttttttaaaaatatgtgttcgtagagcactttatacctttctcctagcccataatttaccccttcaacctacaattagaatgacctatatnctgttttactaccttattagaccataagctcctagaggaaaaggttaggggggttatccctgtatttcaccagaaggtacagtgacttccataaaaagaatccttaa

SEQ ID NO: 4293 - DNA, 340 bp, Canis familiaris
gcacgagccccggtggcgggcttggctggagatcgatagcagcatccccagcgtctcgcctgtcaccggcagaactgatagaaatgcggaatgacctctttaataaagagaaaaccaggcagttatcgttaactcctcggactgagaagatcgaagtcaagcacgttgggaaaacggaccctggcaccgtctttgtgatgaacaaaaacgtttccacgccttacagttgtgctatgcatttaagtgagtggtactgcaggaagtccatcctggctcttgtggacggacagccttgggacatgtataagcctttgaccaaatcctgtgaaattgaatttct

SEQ ID NO: 4294 - DNA, 427 bp, Canis familiaris
gcacgagctcgtgttaaccaaacccctaggaacccaagttgctgttaatgcccaccaatggctagataaccctgagagatggaataaaataaatatggtggtctccagggaagaggtagagctggcttatcaggaagccatgttcaatatggctaccctgaacagaactgctgctggattaatgcacacgtttaatgcacatgcagccacagatatcaccggttttggcattctgggacactctcagaaccttgcaaaacaacaaagaaacgaggtgtcctttgttattcataatctgccaatcatcgccaagatggctgccatcagcaaggccagtgggcgctttgggctccttcaaggaacctcagcggaaacttctggtggattgctgatttgtctgccaagagaacaggcagctcgcttttgt

SEQ ID NO: 4295 - DNA, 319 bp, Canis familiaris
gcacgagcactaacctttttaaaattatacatatcctaccacaataagtggcagattgtctttttctgttgaatttcatcctgactatattctccatatgttttattgataagcattttgggagaataggaaggaatgtttacttcctagaatacaaaatattgaggcctcagggaatgctacaggaaaatacctttcacatataattttaccgtctccaagtgcagcaggaataacattgttggcgggctttaatgtttgtggacacttaccactcactgatttcatgagaaagaaattacatatttccaagccaaac

SEQ ID NO: 4296 - DNA, 393 bp, Canis familiaris
gcacgagggcaccttctgtgcataagtgaaatataaacagcttgaacttgagtcagctaaagaagagaataacgaattgtagggaacaagaaaatgtgttcagaatgagtctggcttgactctattgtccatcagttcctggtaacctatcttcatttgacagttcttgggaggccttcacttccagactaaaccagagtatgctggaacggagccatcctagcttcgtcttaaagtggtgcatttgtctctgtatatgactccttcctctggcagaagaagccccagtgtagctttggagctgggctatgaaggctggcagtacaattgtcacgcaagccgccttgtgtatcactgaggagggaacatgggctgctgtgccaccatttccta

SEQ ID NO: 4297 - DNA, 415 bp, Canis familiaris
  misc_feature (382)..(382): n comprises a, c, g, or t, or includes no nucleotide
ttcggcacgagatcgctgaggcgctcgcagccaacatgaagttcaatccgtttgtgacttctgaccggagcaagaatcgtaagcggcatttcaatgcgccttcccacattcgcaggaagatcatgtcttccccgctttccaaagagttgaggcagaagtacaacgtgcggtccatgcccatccggaaggatgacgaagtgcaagttgtgcggggacactacaaaggtcagcaaatcggcaaagtagtccaggtttacaggaagaagtatgtcatctacattgaacgagtacagcgagagaaggcaaatggcacaactgtccacgtgggcattcaccctagcaaggtggttatcactagactaaaactggacaaagaccgcanaaagatccttgagcgtaaagccaaatctcgcca

SEQ ID NO: 4298 - DNA, 150 bp, Canis familiaris
gcacgagggagccgtggttgtgacgctctacaagatgggctttcctgaagctgccagaactcatcagattgaggctgttccaaccagctctgcagttgatggatttaaggcaaatttggtctttaaggagattgagaagaagcttgaaga

SEQ ID NO: 4299 - DNA, 239 bp, Canis familiaris
gcacgagaggaagccggacagagggctggtttttgccggtggctgctgttacctcagtctttcttggcgcagaggtttccgcgctgatatacacggcttgtggaaggagacacaccatgaaggacagagacatttcaagaagagggtgcggagagaatttacaggatttgggcttatgttaagtaacttctaggagtgttcaaggaagcaggccttctctctagactggatgctgttag

SEQ ID NO: 4300 - DNA, 419 bp, Canis familiaris
gcacgaggagaggcggtcccggggagtgcctggaggcgcggtgaccaaagccacagaatgtcaatcgttcgttcatccgtccacgccaaatggatcgtggggaaggtcattggaacagcaatgcaaaaaacagctaaagtgagagtgaccaggcttgtcctggatccctatttattaaagtattttaataagcgaaaaacctactttgctcatgatgcccttcagcagtgcacagttggggatattgtgcttctcaaagctctacctgttccacgaacaaagcacgtgaaacatgaactggctgaaatcattttcaaggttggacaggtcatagatcctgtgaccagaaaaccctgtgcaggaactacctacctggaaaacccagtcagcttggaaaccacctgcctaacaaaaaatct

SEQ ID NO: 4301 - DNA, 413 bp, Canis familiaris
gcacgaggcgccgcggaggtgggagcgtctgcgtgtcggcggcccgggagggtgactgcgcggtcgaggtgaccgggacccgagcatttcagatctgcttggtagacctgctgcaccaccatgctggccgcaagacttgtgtgtctccggacactaccttccagggttttccaaccagctttcaccaagacctcccctgttgggaagaagtccatcacgaaaaatcagtggctcttcacacccagccgggactatgccaccaagacaagagttgggatccggcgtgggaaaattggccaagaacttaaggagagagcaatggaaccatcaatggaaaaaatatttaaaattgaccaatgggaagatgggtttattgcttgaggagcagcttgttggtcttggagcactgtgct

SEQ ID NO: 4302 - DNA, 415 bp, Canis familiaris
gcacgagggtggttgctgcaaattccagttcttccaaaatccacttatttagggtttatccacagattgtattccgtttgttaaagcttttgtttccgaaatgtttacagaccaccttatgccctatgtcttgcaaataatcttcctttaagatttccttgaatttttacaaatgtaaaaaagaaaataaatgtattaatgtaatttgttcaggaaaagctatatactgaagggcttctgtatataaattctgagaaagaaaagcctatttgtaacctatacactgcagttccatctgggttttaagtttagatttcaagtgtgtcttaggggcttcagtctattgatttactggaacatgtaaaggagcagtgatgtatgaaaatgcaagtattcattaatgttttataccttc

SEQ ID NO: 4303 - DNA, 417 bp, Canis familiaris
gcacgagatttttccaaggttctttctgggaggatggaaacagtgcagaccaggtcctaaaggggtggctccagctcagagcattcctgataatttcactgtaatttctactctgaaatgagctgtaaagaattttccttggttcagttgccccaggcttttgaacagaagagtaaatacaaaatagaaaagttaaaactcaaccaaatgatttgaaaatggattctgtaccacctgtaaaaaggaccagccccatagcgttcttgagctgggaaaaggagagtggggaaagaagggagccaatcaatccgacagacacactatgtataccccctctctatttgtcttcacatacacactcatgacttcccaaatgaaaccctgttgtacagtccatattttctatatttttgtgaa

SEQ ID NO: 4304 - DNA, 390 bp, Canis familiaris
gcacgagccatcgcgtcccgggtgcggggtgctgtggcatctgtcacctttgatgacttccataagaactccgcccgcatcattcgcatggctgtctttggctttgagactccagaaatcaagatactcgacagcaaggccctgccccagccccgggaccgggccatcttcccccaaaatggactagtggtcagcagtgtggacgtgcagtcagtggagcctgtggaccagaggacccgggatgccctacagcgcagtgtccagctggccattgagatcaccaccaactcccaggaggctgcagccaagcacgaggctcagagacttgagcaagaagcccgcggccggcttgagaggcagaagatcttggaccaatctgaagctgaaaaa

SEQ ID NO: 4305 - DNA, 409 bp, Canis familiaris
gcacgaggtcctggaggacttcaagaacaagtacgaggatgagattaaccgtcgcacagccgctgagaatgaattcgtggtgctcaaaaaggatgtcgatgccgcctacatgagcaaggtggagttagaggcgaaggtggaggccctgaacgatgagatcaacttcttcaagaccttatatgagacggagttggcggagctgcagtcccagatctcggacacgtccgtggtgctgtccatggacaacagccgctccctggacctggacggcatcatcgccgaggtcaaggcccagtacgaggagatggccaaccgcagccgggccgagactgagaccatgtaccagagcaagtttgagaccctccaggcccaggctgggaagcacggggacgacctccgtaacacccgg

SEQ ID NO: 4306 - DNA, 323 bp, Canis familiaris
gcacgagggtgcatatggggccctggtcttctctctctttgtccccctgcctctgttcctggcctggtgcaacggtaacgacggagaatggcagctggcggtgggcttcctggccatggcgtctgcgctgctggccagtggcctgggcctcttcctcgcctatacgtggaagtgggtcaggctctccctcctggggcctgggttcctggctctgggtgctgcccaggccttgctcgtcctcctgctgatggccacgggttgtgttccctcggagggcagaggacaagagcaagcttgacagctgctagttctgtcaaaaacat

SEQ ID NO: 4307 - DNA, 396 bp, Canis familiaris
gcacgaggcagggagcccgacgtgggattcgatcccgggtctccaggatcgtgccctgggccaaaggcaggcgccaaaccgctgcgccacccagggatcccaatcatgttccatcttgaagtgttatgtaattatgggtataaatcaaattcttacctttagcaaaacagtctcttttattccaaatgcactctctacacaaatctaattgggctctactgtcaaaggctctccagactctggccacttctcaccactctgaccattgtggttccaaccacgatcattcaccagtcattgcagtcacctcctgattgggtttcctgcttcactcttacctacttcccattctcttctcacatggcgatcagggggtttgctttaaatatcaggtca

SEQ ID NO: 4308 - DNA, 419 bp, Canis familiaris
gcacgagcaagttggaagtacatgaaaaatctgaggcagacaagataaaagaagggtcagattcttcttctgtatcttctggaaaagaaggcaggcttcctactccaaagctgagagaacttggtggaatccaaaggactcatcatgatctcaccactccagctgttggtggtgctgttttagtatctccctctaaagtgaggccttccgtccccgaaccgaggaaaagaatgtcttctcaggatgtcatagaatctgcaaagaatgattttaggaagaaagaaagtcgcgccatatccctcctgacttctccagctgctggtataaaaacaattgatcccctgcctttgaggggaagattctgaagccaatcatatccccaaacttgctgagtgggaaaagcaaagatgaacaatttc

SEQ ID NO: 4309 - DNA, 139 bp, Canis familiaris
gcacgaggcgagctgactggttgtgtggccgcttctcggagaccggtagcgcttgcagcatggctgaccaactgactgaggagcagattgcagaattcaaagaagccttttcactatttgacaaggatggcgatggaac

SEQ ID NO: 4310 - DNA, 408 bp, Canis familiaris
  misc_feature (269)..(272): n comprises a, c, g, or t, or includes no nucleotide
  misc_feature (275)..(275): n comprises a, c, g, or t, or includes no nucleotide
gcacgagggcgagaggcttggcggccatggctcccaacgtccccgcggccgaaccggccccagagagtcctaaaggcatccgggctgtgctgctggggcctcccggggcgggcaagggtacccaggcacccaaattggctgaaaacttctgtgtctgccatttggctacgggggacatgctgagggccatggtggcttctggctcagaactggggaaaaagctgaaggccactatggatgctgggaaattggtgagtgatgaagggtannnnggnagctcattgaggaggattttggagacccctcaatgcaagaaatggttttctcctagatggcttccctcggactgtgaggcaggcagaaatgcttgatgacctcatggagaagaggaaagagaagcttgactct

SEQ ID NO: 4311 - DNA, 407 bp, Canis familiaris
gcacgagatcggggcgccgccgtgcacgctcgctcgggctccctcggacacgtccgcgccgcgcgcctccccgggtctccctgcgcgcgccccgcacctgcccgcggccgcggagcccggctccggctgtggcgcgcggcgggggcggcggcggagcgcggccgtcatggggctgcagcctctggagttcagcgactgctacctcgacagcccgtggttcagggagaggatccgcgcccacgaagcggagctggagaggaccaacaagttcataaaagagctcatcaaggacgggaagaacctcatcgccgcgaccaaaagtctttcagcagcccatgaggaagtttgcacattcactcagagattttaaatttgagtttatcggtgatgcagagacagatgacgaa

SEQ ID NO: 4312 - DNA, 299 bp, Canis familiaris
gcacgaggctttgcagttcgatctaggagggtgtagggcagacgccaggcgaggaattgcgacctctccgttcgctgaccctgtaagatttggatatgtccttcatatttgactggatttacagtggtttcagcagtgttctacagtttttaggattatataagaaaactggtaaattggtatttcttggattggataatgcaggaaaaacaacattgctacacatgctaaaagatgacagacttggacaacatgtccccacgttacatcccacttcagaagagttaaccattgctggc

SEQ ID NO: 4313 - DNA, 418 bp, Canis familiaris
gcacgagcagcagcgaccagtcgctggctggggttccgctgcaggctttgcctgaagctgaggggtcagcgggcaagtccgtgtggacagattccctgctgcagattttattctggaagtgcaaccctcccaaaggttgaaggaactaatataacagggattgaagaagtggtcattccaagaaagaaaacttgggataaagtggctgttcttcaagcacttgcatccacacgtttgtttttactggcaaagaagtctggagagaacgcagcaaagtttattattaatttacatcccaaatattttcagaaggacatagctgaacctcatataccgtgtttaatgcccgagtactttgaaccctagattgaagatataagcgaagcagccttgaaggaaagaatcaagctcaaaaaag

SEQ ID NO: 4314 - DNA, 212 bp, Canis familiaris
gcacgagtcttacactgctaaaatatcaccagtatcctttgcttaatattaagtatattagttaccaagaggataatatttttattgactacagtatccaattggtagacagagttgaaaaacgcagtgttccatatttaattctatcctatattagcaaaaaaaaaaaaaaaaaaaaaaaaaaaaaaaaaaaaaaaaaaaaaaaaaaaaaa

SEQ ID NO: 4315 - DNA, 385 bp, Canis familiaris
tccgatggtgaaaatagcagatgccatggaaaataaaaccaccgtgtataagattggagatcttactgggtattgcaccaatccaaaccgacatcagatggggtgggctaaacgcaatgtggaccactgccccaggaacaatagcgtggtggacgtctgccctgtggaccgccgcccagtgctgcagaagatcatggagacagaccccctgcagcagggccaggctcttgcatctgccctgaagaataagaagaagatgcagaagcgtactgataaactcgccagcaagttatctgattccatgatgtctgtcctcgacctctctggcaacactgatgacagtgctagtgactgatccgacttatctcacccttccttgtccctc

SEQ ID NO: 4316 - DNA, 158 bp, Canis familiaris
gcacgagcgggagcgggggagggccgcgcggacgccggcctgcgctgagcctctcgccgggcctcgccgggcctcgccgcttcccgcatgctgccggctgctcgctgagcggcggcgggggcgcgtgaggggcgcacggcggcggcggctccggcgcc

SEQ ID NO: 4317 - DNA, 420 bp, Canis familiaris
gcacgagagaagcaaaatggatcgacatggaaatgataaatccacacccaagaagacttgcaaaaagaggcagtcttcagagtccgacattgagagtgtcatgtacaccattgaagccggtgcaaagggagactggggcattgagaaacttggagaaacccctcgcaagaaggtccgcacatcctcaagtggcaagggaagcattttggatgccaagccaccaaagaaaaaagtgaaatcaagagagaagaaaatgtccaaggagaaatcctcagacaccaccaaagagtcaagacctccagatttcattaatatttctgccagcaagaacatttctggtgaggtgccagagggtataaaagcagaaccattgacgcccacagaggaggcattaccacccagcctatcaggacaggccaa

SEQ ID NO: 4318 - DNA, 299 bp, Canis familiaris
  misc_feature (268)..(268): n comprises a, c, g, or t, or includes no nucleotide
gcacgagctggcatcactgagaaggttgttttcgagcaaaccaaggtcatcgcagataacgtgaaggactggagcaaggttgtcctggcctatgagcctgtatgggccattgggactggcaagactgcaacaccccaagggctgagagaaaagccctgtcctcccctcagaggccaggggtgctgctctctcccatggtgccaacgcctgtgtgtgttgtgtatgtgagcaatcccacatgtggggggaaataaacacctggcactgnaaaaaaaaaaaaaaaaaaaaaaaaaaaaaaa

SEQ ID NO: 4319 - DNA, 396 bp, Canis familiaris
gcacgagatagtgatgttcaccattgatattggggaggcccccaaaggacaagacatggaaacagaagctcaccagaacaagctagaagaaatgattaatgagctagcagtggcgatgacagctgtaaagcacgaacaggagtacatggaagttcgggagagaatacacagagcgatcaacgacaacacaaacagcagagtggtcctttggtccttctttgaagctcttgttctagttgccatgacattgggacagatctactacctgaagagattttttgaagtccggagggttgtttaaaaagccttttcctgatctcaaaatcataattcactgtttaccaaacatcttggtgataataatgtcattagtttctacatttttatttttggaac

SEQ ID NO: 4320 - DNA, 396 bp, Canis familiaris
gcacgaggtcccacctcacctcacctcagcccagcccagcccaggacagccctgcccctggaagagcccagtctgttgactttgtgaaattggattaagtctagctcaaaggaagtattttgtgtccagtggaaactttttgctcttttttttttttcccccttccttgagttagccctttgtcttcttgtgtcctgaaaagccccctctttcctaggggctttgtttgtatgtggctggagaaatgccacagccccgcagggatgggccaaagcagacctcctccctggcccgggagttggcactcctgttgtgtctgccatgttccctttctcttcctctctctctcctgtccttccacatgaacacctctagcacaaacagaagctcttactc

SEQ ID NO: 4321 - DNA, 149 bp, Canis familiaris
gcacgagcccggagagtgattcaccctagttacgtccagcggccgctgagacacccgggcggggggtcctgcccccactgccgcccgtcctcctctcctcccgcccccggagaccccccctacccttcctccctctacctcggggtggg

SEQ ID NO: 4322 - DNA, 392 bp, Canis familiaris
gcacgagtaacgaacgagactctggcatgctaactagttacgcgacccccgagcggtcggcgtcccccaacttcttagagggacaagtggcgttcagccacccgagattgagcaataacaggtctgtgatgcccttagatgtccggggctgcacgcgcgctacactgactggctcagcgtgtgcctaccctacgccggcaggcgcgggtaacccgttgaaccccattcgtgatggggatcggggattgcaattattccccatgaacgaggaattcccaggttggagattacttcatagaccacaacaccaaaaccacccagatcgaggacccgcgggtccaatggcggcgggagcaggagcacatgctgaaggattacctggtggtggccca

SEQ ID NO: 4323 - DNA, 434 bp, Canis familiaris
tgcaagaagagaacgtgaaacttgctgaggagctggggagaaccagggacgaagtcacgggtcatcagaagctagaagaagagagatctgtgctcaataatcagttgttagaaatgaaaaagagagaatccaagttaataaaggacgcagatgaagaaaaagcttccttgcagaaatccatcagtattactagtgccttactcaccgaaaaggatgcagagctggaaaaactgagaaatgaggtcacagtgctccggggagagagcgcctccgccaagtccttgcactcgatcgttcagtctctagagtctgataaggcaaagcttgaactccaggtgaagaacttggaacttcaactcaaagaaaacagaaggcagctcggcagctcctcaggtaatactgatactcaggcagaggaggatgaaagagcccag

SEQ ID NO: 4324 - DNA, 422 bp, Canis familiaris
gcacgaggcgccccttccgcaagctcaacgccttcggcaacgccttcctcaacaggttcatgtgtgcccagctgcccaacccggtcctggacagcataagcatcatcgacactcctgggatcctgtccggagagaaacagcgcatcagcagaggttacgacttcgcagctgtcctggagtggtttgctgagcgggtcgaccgcatcatcctgctctttgacgcccacaagctggacatctctgacgagttctccgaggtcatcaaggccctcaagaaccatgaggacaagatccgtgtggtgctgaacaaagccgaccagattgagacccagcagctgatgcgggtctacggggctctcatgtggtccctggggaagatcatcaacacccccgaggttgtcagagtatacatcggctccttc

SEQ ID NO: 4325 - DNA, 194 bp, Canis familiaris
gcacgagcaaaatagcaatctgtacgtctgcaattttctagggctctaaagaaattggacctcaaagattacaggtgagatttcccttcaaaagccctttgttataggagatggaatccatttacttacttaattttgcagcagctaattctagtggttcattatctcaccactttaaaaaaaaaaaaaaaaaa

SEQ ID NO: 4326 - DNA, 428 bp, Canis familiaris
gcacgaggccgccgccgcgatgctgtcgaccgccgcgcggggctggggacccggccgagacttggcgatggagcccgacggcgccgcgggcccccagcagctgcgcttctcgccctacgccttcaacggaggtactgtattggcaatcgctggagaagatttttcaattgttgcttctgacactcgattgagtgaagggttttcaattcacacccgggatagccccaagtgttataaattaacagacaaaacagttattggatgcagcggttttcatggagactgtctcaccctgacaaagattattgaagcaagactaaagatgtataagcattctaacaacaaaaccatgactacaggggcgattgctgcgatgctgtctacaatcctctactcaaggcgcttctttccctactacgtttacaaca

SEQ ID NO: 4327 - DNA, 392 bp, Canis familiaris
gcacgagcaagaataagagcaggaatcaatcctttcaatgtccctgaacaacagctgctggatattgaagattgcgacctcaacgtggtgagattatgttttcaagttttcctccctgagtgaacatggtaatttgacaacggctctacctcctgttgtctctaacccgatttatgacaaccgtgctcctaatactgcagaattaaggatttgtcgtgtaaacaagaactgtggaagtgtccgaggtggtgatgaaatatttctactatgtgataaagttcagaaagatgacatagaagttcggttcgtgttgaatgattgggaagcaaaaggtatattttcgcaagctgatgtacaccgtcaagtagccattgtttttaagactccaccat

SEQ ID NO: 4328 - DNA, 108 bp, Canis familiaris
gcacgaggcgcggcgggctgtggctccgcccctcggcagagtcggcgccaccatggaggagtaccacaggcactgcgacgaggttggcttcaatgctgatgaagctca

SEQ ID NO: 4329 - DNA, 419 bp, Canis familiaris
gcacgagtctaggccggcctcactccggtgtcggcgcctgccgtgctgcagcatgacccccagtgtggccagatggcctcctccaagtgctcatggagaatgaaaggccctccatcggctttcctggggtcccgttgccactcagaacttaacaggcttagcacctgactccttttgaaataatttcaacctttataatggtcttatgcccaccacacagtaggcactctgtaattgtgtacagtcttgttagctgtagtttgtacctgtatcccagcaatgccacttgtccccacacttcacagacacatctgctctctataaccttcccagcccacctggagctctggctcttctggggccctaaacactttatatggtgcctccggaaatctgttattaaatacatagtttgaaac

SEQ ID NO: 4330 - DNA, 252 bp, Canis familiaris
gcacgagatgctgcccaactcgaccgagcgggccatcaccatcgcgggcgtgccgcagtcggtcaccgagtgtgtcaagcagatctgcctggtcatgctcgagacgctctcccagtcccgggaggggagagtcatgaccatcccgtaccagcccatgccggccagctcgccggtcatctgcgcgggcggccaagaccgctgcggcgacgcggccggctacccgcacgccacccacgacctggaggggccgcc

SEQ ID NO: 4331 - DNA, 336 bp, Canis familiaris
ggacaaagctggagctccaccgtgtgcggcgctcggcgctgtggatcccccgggctgaggtttgaaatgtctaaaatgatgctgtgcttgaaacattagtgaaaaagaaaaaaaaaatgtgtgtcactgtgatgtcagtcctccctgtgtggacacaagtagaaagtaaaagaactctggcaaggcacctttctggacaatttgaggcagtggttataggcaacaaattgacctttgttagaacccttccctcccccaaattctcggtgaggaaaccacaactatcaaaaaattgaaaatcagaacttaacaatttctgtgaatcaccctggaaca

SEQ ID NO: 4332 - DNA, 412 bp, Canis familiaris
gcacgagcttttctttgccatttttttcaggttggaggcatcggccactcctcggaccttgacctggggcctgggaggaggcaaaccacagtggccaggctctgaccacccgaccaccttcctgggtgctggagtctgggcgtccacgccaggactctccctttctggaagcagtctctcacattcctgagggcagggctggcgggctcgcagcctccctgggttggaattcctgctctgcctctcccagtgtgacctggggcaagtggcgtgaccatgtggcatcctggtcccttgctaagccaggtagaagatgcaaggagaggagccagcccactgtggcacccgtcccgcccctgctgccacccccaggcaaccccacacggagccccagccgcccccaccggggcca

SEQ ID NO: 4333 - DNA, 235 bp, Canis familiaris
gcacgagccttccctgcctcctgtcagctcaatatacgaaggaagccttcttgtttatcttcctgaaaataagggcctacatgaaaagaaaaagtcgacactatcatgctctttatttactttcttggaaaacttcagcttctgaaaactccctttagctccctcaggtgcttgctggaatcaggcagagcacagagccggcggggggcgggtgccaccagctgccatgggtacg

SEQ ID NO: 4334 - DNA, 425 bp, Canis familiaris
gcacgaggtgtgaagggagctgagaggggaactggccgggcccacggtgtttgacccatcagtcggtccgtgagaagaaaggaaaggagaaggtacagagtagcggttgcagaaatggtgcggtgtggaagtctggcagcaggtgctttcaagcagaagctggcgcccttggtgcggacagtgtgcgtccgaggcccgaggcagcggaaccggctcccaggcaacttgttccagcgatggcatgttcctctagaactccagatggcaagacaaatggctagctctggtgcatcagggggcaaaatcgataattctgtgttagtccttattgtgggcttatcaacaataggagctggtgcatatgcctacaagactataaaggatgatcaaaaaagatatgatgaaagaatgtcagggttagggct

SEQ ID NO: 4335 - DNA, 420 bp, Canis familiaris
gcacgagccgcggcggcgggcgccgggagtgttcgcgccgctcgcggatctggttgccttcgtgtcagtggtggaagcgagggattgtgttgggagagctccaggtcgtgtgtgtttgtggcaaggacgtagctagtccttccccggaacgggagagcggcgcggtcctagcgccggctcgatccccggggctgtcccgcggccgaggctggggccgccgctgagcctgacctcgccccgcggagccgcgcgggggccgctgatggccgaacgcttcctgggcaagactttggccgcagcgtctctctctgtggccttggcctctgtggcggtcaggccctcgggctgtggcagcgctccggcgtgcagaaacacattttcattctgtgggtttcatcttaactcgaacatcatgtctaa

SEQ ID NO: 4336 - DNA, 371 bp, Canis familiaris
  misc_feature (312)..(312): n comprises a, c, g, or t, or includes no nucleotide
agatataaggggaaggggcattgtgtggacatggggttagaggtaattggaaaaagcgtatatagggggaaattctatattctctcagcaggaggcttggctctttgaatcaagggggggggtgccctggtgccaacagggggtcaatacacaccgggtcctttctcttccttctactcatcagcactttatcacatttctaaggaagggtgactaggaggtccttggttggtgggctggaaatggcaccatctagggctctggtaccaaatggccagcactggtcatcaccaccatgggaccaaggggggngggaggagacccacatctccaaataaggggcaactaggctaaatatatcaacacaaact

SEQ ID NO: 4337 - DNA, 298 bp, Canis familiaris
  misc_feature (116)..(116): n comprises a, c, g, or t, or includes no nucleotide
  misc_feature (119)..(119): n comprises a, c, g, or t, or includes no nucleotide
  misc_feature (122)..(122): n comprises a, c, g, or t, or includes no nucleotide
  misc_feature (126)..(126): n comprises a, c, g, or t, or includes no nucleotide
  misc_feature (136)..(136): n comprises a, c, g, or t, or includes no nucleotide
agtatctcatgggcaaggaggggggaataggaaaatttaaggggcggggaataatttccatgcgctggctttaaggggattcctggattctgggcacaaaattctcacgggggggnggngtngcanggcgacttangggagaggatttacgaaggcgcttcgatttttaatttttaaaggggctctcccatctttatgggaaaggagggggaaggtttccatatccttttatggaacacaattctggaggttaggggtttaatccttggggaaaacatacctggcttcaggcttaatt

SEQ ID NO: 4338 - DNA, 205 bp, Canis familiaris
  misc_feature (21)..(21): n comprises a, c, g, or t, or includes no nucleotide
  misc_feature (24)..(24): n comprises a, c, g, or t, or includes no nucleotide
  misc_feature (28)..(28): n comprises a, c, g, or t, or includes no nucleotide
  misc_feature (41)..(41): n comprises a, c, g, or t, or includes no nucleotide
  misc_feature (53)..(53): n comprises a, c, g, or t, or includes no nucleotide
  misc_feature (59)..(59): n comprises a, c, g, or t, or includes no nucleotide
  misc_feature (72)..(72): n comprises a, c, g, or t, or includes no nucleotide
  misc_feature (78)..(78): n comprises a, c, g, or t, or includes no nucleotide
  misc_feature (80)..(80): n comprises a, c, g, or t, or includes no nucleotide
  misc_feature (94)..(94): n comprises a, c, g, or t, or includes no nucleotide
  misc_feature (96)..(96): n comprises a, c, g, or t, or includes no nucleotide
  misc_feature (98)..(99): n comprises a, c, g, or t, or includes no nucleotide
  misc_feature (107)..(107): n comprises a, c, g, or t, or includes no nucleotide
  misc_feature (128)..(128): n comprises a, c, g, or t, or includes no nucleotide
  misc_feature (132)..(132): n comprises a, c, g, or t, or includes no nucleotide
ctttctcttcacctaaaccangantcancccatcccccaanccaacctcaaanaagganccatctttacttnaactananggcagggggtgganantnnaaaatcangaaaatataaacaacctcctnattnatgacacagagctgaagcaggtggcttacatatacaaatgtgtcaacacaacattgcaaatcaagggcaaaat

SEQ ID NO: 4339 - DNA, 343 bp, Canis familiaris
  misc_feature (1)..(1): n comprises a, c, g, or t, or includes no nucleotide
  misc_feature (37)..(39): n comprises a, c, g, or t, or includes no nucleotide
  misc_feature (42)..(42): n comprises a, c, g, or t, or includes no nucleotide
ntttttttttttttttaaaaatttttttttttctttnnnaanaaaaacaaaaaaaaacaccccccccccccccccccccccccccccttccttaaaaaaaaaggggggccccccccccccccccccccctccctttcctccaaaaaaaaaaaaataaaaccccctcttttctccctctccccccccccccctctctttttttttttttttttttttttttctcccccccccccaccccccacccccccccccttatgggaagtggagcgctcctctttttttttttttccttctccctccccccgccgcgagggggggggttttttttttttttttttttctt

SEQ ID NO: 4340 - DNA, 230 bp, Canis familiaris
  misc_feature (90)..(90): n comprises a, c, g, or t, or includes no nucleotide
  misc_feature (181)..(181): n comprises a, c, g, or t, or includes no nucleotide
  misc_feature (189)..(189): n comprises a, c, g, or t, or includes no nucleotide
gcttcctcaaaaatggaaaagggcaatatatatctccatttcatggtggtccaatttatggaggtaagggcggtttccacatgggaggtngaggaccacggtgggctaatggaaaaaggggggatggtacaaaaggccctctaaacccaattaaacaaggtggggaggaagggaaactccngtatggtngaaatttggtcccttataaagggtatatctgggactatggg

SEQ ID NO: 4341 - DNA, 384 bp, Canis familiaris
  misc_feature (42)..(42): n comprises a, c, g, or t, or includes no nucleotide
  misc_feature (60)..(60): n comprises a, c, g, or t, or includes no nucleotide
  misc_feature (76)..(76): n comprises a, c, g, or t, or includes no nucleotide
  misc_feature (90)..(90): n comprises a, c, g, or t, or includes no nucleotide
  misc_feature (104)..(104): n comprises a, c, g, or t, or includes no nucleotide
  misc_feature (120)..(120): n comprises a, c, g, or t, or includes no nucleotide
  misc_feature (123)..(123): n comprises a, c, g, or t, or includes no nucleotide
  misc_feature (147)..(147): n comprises a, c, g, or t, or includes no nucleotide
  misc_feature (217)..(217): n comprises a, c, g, or t, or includes no nucleotide
  misc_feature (227)..(227): n comprises a, c, g, or t, or includes no nucleotide
  misc_feature (330)..(330): n comprises a, c, g, or t, or includes no nucleotide
gtcactaatcacaagggatggggactttatacttactatgtngagcgtgagccggtatangaggcgctggcttggngctcctcatcctgncctgactagggcangcgggggggggactanggngcggtcaaatttatgagggaatcngaaccagccatgctttcggaataatcttcttcataggcatggccatcataagggggggctttggaaactngctaggggcngtaataattgggggtccggacatgggattcccccggataaataacatggggttctggctccttcctccatcctttcttctactattaggatcttctatgggangaggaggtgcaggaacgggatggaccggataccccccactggctggcaatctgg

SEQ ID NO: 4342 - DNA, 390 bp, Canis familiaris
  misc_feature (28)..(28): n comprises a, c, g, or t, or includes no nucleotide
  misc_feature (47)..(47): n comprises a, c, g, or t, or includes no nucleotide
  misc_feature (62)..(62): n comprises a, c, g, or t, or includes no nucleotide
  misc_feature (65)..(65): n comprises a, c, g, or t, or includes no nucleotide
  misc_feature (75)..(75): n comprises a, c, g, or t, or includes no nucleotide
  misc_feature (89)..(89): n comprises a, c, g, or t, or includes no nucleotide
  misc_feature (100)..(100): n comprises a, c, g, or t, or includes no nucleotide
  misc_feature (121)..(121): n comprises a, c, g, or t, or includes no nucleotide
  misc_feature (124)..(124): n comprises a, c, g, or t, or includes no nucleotide
  misc_feature (127)..(127): n comprises a, c, g, or t, or includes no nucleotide
  misc_feature (148)..(148): n comprises a, c, g, or t, or includes no nucleotide
  misc_feature (154)..(154): n comprises a, c, g, or t, or includes no nucleotide
  misc_feature (166)..(166): n comprises a, c, g, or t, or includes no nucleotide
  misc_feature (228)..(228): n comprises a, c, g, or t, or includes no nucleotide
  misc_feature (332)..(332): n comprises a, c, g, or t, or includes no nucleotide
accgggtctccactatcacaagggttgngactttatacttacttttnggcatgggctgttangangcctggcttnaggctcctcatccnagcctaactangtcaggggggggctttactanggngcngtcaaattgataagaggatcngaaccngccatgctttcngaataatcttcttcataggcatgcccatcataatggggggctttggaaactggctaggggcngtaataatggggggtccggacatgggattcccccggaatgaataacatgagcttctggctccttcctccatcctttcttctactattagcatcttctatggganaagcaggtgcaggaacgggatggaccggataccccccactggctggcaatctggccca

SEQ ID NO: 4343 - DNA, 389 bp, Canis familiaris
  misc_feature (82)..(82): n comprises a, c, g, or t, or includes no nucleotide
  misc_feature (116)..(116): n comprises a, c, g, or t, or includes no nucleotide
  misc_feature (242)..(242): n comprises a, c, g, or t, or includes no nucleotide
  misc_feature (378)..(378): n comprises a, c, g, or t, or includes no nucleotide
  misc_feature (386)..(386): n comprises a, c, g, or t, or includes no nucleotide
ggttacagggacccgacctcccctattatagggggcgtcttcattttcatggccatacactaataaggggattcttaatcangtctttaggtctctatatcattggggggggaggngctacaaaattaacccatacaaggcaatacactcacaaggagggggaacaggatggaccattctacccggcattatcctaatcctaatcggtctaccttccctccggatcctttatataaggggcngaattaataacccctctttaacggggggaacaatagggcaccaatggtactggaggtatgaatatactggctatggaggcttaaactttggctcctacataatcccaacacaaggattaaaggcaggagaactccngctattanaag

SEQ ID NO: 4344 - DNA, 293 bp, Canis familiaris
  misc_feature (15)..(15): n comprises a, c, g, or t, or includes no nucleotide
  misc_feature (20)..(20): n comprises a, c, g, or t, or includes no nucleotide
  misc_feature (24)..(24): n comprises a, c, g, or t, or includes no nucleotide
  misc_feature (44)..(44): n comprises a, c, g, or t, or includes no nucleotide
  misc_feature (52)..(52): n comprises a, c, g, or t, or includes no nucleotide
  misc_feature (57)..(57): n comprises a, c, g, or t, or includes no nucleotide
  misc_feature (61)..(61): n comprises a, c, g, or t, or includes no nucleotide
  misc_feature (63)..(63): n comprises a, c, g, or t, or includes no nucleotide
  misc_feature (66)..(66): n comprises a, c, g, or t, or includes no nucleotide
  misc_feature (68)..(69): n comprises a, c, g, or t, or includes no nucleotide
  misc_feature (79)..(80): n comprises a, c, g, or t, or includes no nucleotide
  misc_feature (97)..(97): n comprises a, c, g, or t, or includes no nucleotide
  misc_feature (99)..(99): n comprises a, c, g, or t, or includes no nucleotide
  misc_feature (114)..(114): n comprises a, c, g, or t, or includes no nucleotide
  misc_feature (171)..(171): n comprises a, c, g, or t, or includes no nucleotide
acaaactccttaatncccanatantggcctcttccaggggcctngctccctnctctnaatnanctntnncacaaatggnncaggaggggggggtgtngnacccactggaagggnttcgggggattactggtcccaccactctgcgagaccggtacttggcttcatggcggnggttcggggggtggtgggggacctggctttctaacatggacccccacccccaaagggggagtggggggccaattaatctaaggggggggtcataaacctctttttgggaggaacttttttat

SEQ ID NO: 4345 - DNA, 187 bp, Canis familiaris
  misc_feature (55)..(55): n comprises a, c, g, or t, or includes no nucleotide
  misc_feature (64)..(64): n comprises a, c, g, or t, or includes no nucleotide
  misc_feature (66)..(66): n comprises a, c, g, or t, or includes no nucleotide
  misc_feature (97)..(97): n comprises a, c, g, or t, or includes no nucleotide
  misc_feature (99)..(99): n comprises a, c, g, or t, or includes no nucleotide
catggcaaccccaccggttctttacatcggcggggacgggaggctttgggccggngctctttcngngtggttgcgggcggaggtccaaaggcaggananaactttcgggctctgagtgactggagaggagggattcgggtacaaagggtcctggtttcacaggattatcccgggatttatgtgccag

SEQ ID NO: 4346 - DNA, 383 bp, Canis familiaris
  misc_feature (3)..(4): n comprises a, c, g, or t, or includes no nucleotide
  misc_feature (13)..(13): n comprises a, c, g, or t, or includes no nucleotide
  misc_feature (20)..(21): n comprises a, c, g, or t, or includes no nucleotide
  misc_feature (28)..(28): n comprises a, c, g, or t, or includes no nucleotide
  misc_feature (37)..(37): n comprises a, c, g, or t, or includes no nucleotide
  misc_feature (43)..(43): n comprises a, c, g, or t, or includes no nucleotide
  misc_feature (62)..(62): n comprises a, c, g, or t, or includes no nucleotide
  misc_feature (133)..(134): n comprises a, c, g, or t, or includes no nucleotide
  misc_feature (155)..(155): n comprises a, c, g, or t, or includes no nucleotide
  misc_feature (160)..(160): n comprises a, c, g, or t, or includes no nucleotide
  misc_feature (202)..(202): n comprises a, c, g, or t, or includes no nucleotide
  misc_feature (296)..(296): n comprises a, c, g, or t, or includes no nucleotide
  misc_feature (317)..(317): n comprises a, c, g, or t, or includes no nucleotide
  misc_feature (319)..(319): n comprises a, c, g, or t, or includes no nucleotide
  misc_feature (327)..(327): n comprises a, c, g, or t, or includes no nucleotide
  misc_feature (332)..(332): n comprises a, c, g, or t, or includes no nucleotide
  misc_feature (341)..(341): n comprises a, c, g, or t, or includes no nucleotide
  misc_feature (354)..(354): n comprises a, c, g, or t, or includes no nucleotide
aannatccccccngcctcannaattccngaccagagnaaccanaagggccctggggtccttnacccgatgatgaagaaactggacctcaactctgatggcagcgtgatttccaagaatttcttaatcttattnngtggcatgggggggggcgttnccatngagctcctttacagagggaaacccatttccagaaggaaatgngaggggggtcctgggcctggcctccaaaccacctctttccttcaaaacaggttcccaatcatcacatccttctcacatcctacacagacctggncccacaggggccaccaccctngncaggccangcctngtggtaggnaataaaggaatancatttttttaaaggaaaaaaaaaaaaaaa

SEQ ID NO: 4347 - DNA, 392 bp, Canis familiaris
  misc_feature (25)..(25): n comprises a, c, g, or t, or includes no nucleotide
  misc_feature (71)..(71): n comprises a, c, g, or t, or includes no nucleotide
  misc_feature (129)..(129): n comprises a, c, g, or t, or includes no nucleotide
  misc_feature (132)..(132): n comprises a, c, g, or t, or includes no nucleotide
attttgttccaaataaacatcctanccatcatccctattctcataaaaaaggacaatccaccagggcatanaggggctctacaaaatattttcttacacaaggtacaggggggggggtactaataatanggngcactataggggaactttactccaggcaagggggaatctcaaaaatctcaaaccccatcggatccatcatggtaaccacgggcctaacaataaaacgagggctatctccattccacttctggggtcccggaggaacgcgaggggattacggtcatatcagggataatcctggtaacatggcaaaaaatcggacctatatccatcctatatcaaatctctccatcaattaacactaaccttcttatactaataggccttac

SEQ ID NO: 4348 - DNA, 505 bp, Canis familiaris
  misc_feature (36)..(36): n comprises a, c, g, or t, or includes no nucleotide
  misc_feature (38)..(39): n comprises a, c, g, or t, or includes no nucleotide
  misc_feature (68)..(69): n comprises a, c, g, or t, or includes no nucleotide
  misc_feature (72)..(72): n comprises a, c, g, or t, or includes no nucleotide
  misc_feature (75)..(76): n comprises a, c, g, or t, or includes no nucleotide
  misc_feature (82)..(83): n comprises a, c, g, or t, or includes no nucleotide
  misc_feature (100)..(100): n comprises a, c, g, or t, or includes no nucleotide
  misc_feature (223)..(223): n comprises a, c, g, or t, or includes no nucleotide
  misc_feature (427)..(427): n comprises a, c, g, or t, or includes no nucleotide
aaccctcctaaggggacaaactggactccaccccgntnncgggcggggggggctaaagaaaccccccnnctncannaattcnngacgagtgaccacatantcaacccaagcccatgaccgcgtgacaggggccctttctggcctccttataacatggggtcttatcatatgatttcactataactcaatagccctactggggtgaggattcacaaccaacctngtaaccatataccagggatgacgaggtgggatcctgggaggcacattccaagggcatcatacccctatgggacaaaaagggctacgatacggaataggtctttttatcggatcagaaggatttttctttggaggcttcttctggggcttttaccactccaggctagcccctactcctggcttggggggtggtggcctcctaccngcattattcctcttaacccattagaaggggctctactcaacacctcaggcctcctaggctccggaggatctattactt

SEQ ID NO: 4349 - DNA, 381 bp, Canis familiaris
  misc_feature (6)..(6): n comprises a, c, g, or t, or includes no nucleotide
  misc_feature (16)..(16): n comprises a, c, g, or t, or includes no nucleotide
  misc_feature (28)..(28): n comprises a, c, g, or t, or includes no nucleotide
  misc_feature (42)..(42): n comprises a, c, g, or t, or includes no nucleotide
  misc_feature (63)..(63): n comprises a, c, g, or t, or includes no nucleotide
  misc_feature (295)..(295): n comprises a, c, g, or t, or includes no nucleotide
gggganggaacaaaanactctaaatatnggcaagatcataangctggatattggtgagctaancaatactggatttctaaacaagcatttggagaaaacaattcctcacagggggggtgaaaaggaatattttagggaagataatatattttctaatgcttcttcaatggtggatgcatttatatagcaaattccctgggagctaggaatttctagataataaaagaaatttttttctttcttaattatattctttctgggggatatattcctggggatggacatgtacatggtngtattaagggattttaaggtaatgagtatttagaagaggagggtacaaacataataagggaaatagaaaaaaaatactttaagaaa

SEQ ID NO: 4350 - DNA, 403 bp, Canis familiaris
  misc_feature (72)..(72): n comprises a, c, g, or t, or includes no nucleotide
  misc_feature (107)..(107): n comprises a, c, g, or t, or includes no nucleotide
  misc_feature (226)..(226): n comprises a, c, g, or t, or includes no nucleotide
  misc_feature (326)..(326): n comprises a, c, g, or t, or includes no nucleotide
  misc_feature (342)..(342): n comprises a, c, g, or t, or includes no nucleotide
aacaataccggttaattcaggagggtatttggtcagagggggggttggtaagataggtggtgggctaggtgngtaggacatatttgcgtggggggaaggggtttaangaacaggggtttggcttcttcggtacaggtaccaggggcgtcttaataaatacgggttaacacaggggggtctctttatcaagagctcaaaaggctggcctctcaggggtcaggggggnggaaacaaggttggaaggaaaacaggatttctctaaggcaactttaattcttaaaaggcacttaaatttatgggggaggaaaatctagggggggtttttntgaaggactggatcangtctggatatggtggaataaaaggttcttatcctaggaggttatgggaaggggttaaggca

SEQ ID NO: 4351 - DNA, 341 bp, Canis familiaris
  misc_feature (7)..(7): n comprises a, c, g, or t, or includes no nucleotide
  misc_feature (15)..(15): n comprises a, c, g, or t, or includes no nucleotide
  misc_feature (18)..(18): n comprises a, c, g, or t, or includes no nucleotide
  misc_feature (22)..(22): n comprises a, c, g, or t, or includes no nucleotide
  misc_feature (29)..(30): n comprises a, c, g, or t, or includes no nucleotide
  misc_feature (37)..(37): n comprises a, c, g, or t, or includes no nucleotide
  misc_feature (39)..(41): n comprises a, c, g, or t, or includes no nucleotide
  misc_feature (74)..(75): n comprises a, c, g, or t, or includes no nucleotide
  misc_feature (77)..(77): n comprises a, c, g, or t, or includes no nucleotide
  misc_feature (79)..(79): n comprises a, c, g, or t, or includes no nucleotide
  misc_feature (85)..(85): n comprises a, c, g, or t, or includes no nucleotide
  misc_feature (88)..(88): n comprises a, c, g, or t, or includes no nucleotide
  misc_feature (114)..(114): n comprises a, c, g, or t, or includes no nucleotide
  misc_feature (139)..(139): n comprises a, c, g, or t, or includes no nucleotide
ggcaaanccattaanaanttcnttattcnnaacatcntnnnaggcctgccccttcatgggacaggggggggagnnangntcttcngcngctacggggggaccaaggtcgacagnaaggtccattactgggggaggtggngcattcacaggaagggaggccggaatcggtctcggggagggggggagggcctgacacccccggccctgtttatacccgggggaggcggcccacggcctccaccggaggccatggaaggaggtggggccttaacggctggaggaaaaggggtctccgggaaaaaaataaaggggggttatactttaaaaaaaaaaaaaaaaaa

SEQ ID NO: 4352 - DNA, 252 bp, Canis familiaris
  misc_feature (1)..(2): n comprises a, c, g, or t, or includes no nucleotide
  misc_feature (20)..(20): n comprises a, c, g, or t, or includes no nucleotide
  misc_feature (29)..(29): n comprises a, c, g, or t, or includes no nucleotide
  misc_feature (38)..(38): n comprises a, c, g, or t, or includes no nucleotide
  misc_feature (45)..(45): n comprises a, c, g, or t, or includes no nucleotide
  misc_feature (47)..(47): n comprises a, c, g, or t, or includes no nucleotide
  misc_feature (56)..(56): n comprises a, c, g, or t, or includes no nucleotide
  misc_feature (71)..(71): n comprises a, c, g, or t, or includes no nucleotide
  misc_feature (73)..(73): n comprises a, c, g, or t, or includes no nucleotide
  misc_feature (89)..(89): n comprises a, c, g, or t, or includes no nucleotide
  misc_feature (91)..(91): n comprises a, c, g, or t, or includes no nucleotide
  misc_feature (93)..(93): n comprises a, c, g, or t, or includes no nucleotide
  misc_feature (95)..(95): n comprises a, c, g, or t, or includes no nucleotide
  misc_feature (99)..(99): n comprises a, c, g, or t, or includes no nucleotide
  misc_feature (101)..(101): n comprises a, c, g, or t, or includes no nucleotide
  misc_feature (104)..(105): n comprises a, c, g, or t, or includes no nucleotide
nnacctataaatatacaaanaaagggttngttaatcantcactcnanctatgggtngttggtaaggcttangnactacggggggggggngnangncctngngtnncttcagggggacaccatcctacggcccccccacccccatggctggggtggttggttccatgggggccaaggacagggttggccaatatggtgggttcaaggcaatcaggctcttctcccaaaccctcctacatgggtggggataaac

SEQ ID NO: 4353 - DNA, 392 bp, Canis familiaris
  misc_feature (18)..(18): n comprises a, c, g, or t, or includes no nucleotide
  misc_feature (37)..(37): n comprises a, c, g, or t, or includes no nucleotide
  misc_feature (55)..(55): n comprises a, c, g, or t, or includes no nucleotide
  misc_feature (68)..(68): n comprises a, c, g, or t, or includes no nucleotide
  misc_feature (102)..(102): n comprises a, c, g, or t, or includes no nucleotide
  misc_feature (133)..(133): n comprises a, c, g, or t, or includes no nucleotide
  misc_feature (147)..(147): n comprises a, c, g, or t, or includes no nucleotide
  misc_feature (172)..(172): n comprises a, c, g, or t, or includes no nucleotide
  misc_feature (193)..(193): n comprises a, c, g, or t, or includes no nucleotide
  misc_feature (209)..(209): n comprises a, c, g, or t, or includes no nucleotide
  misc_feature (266)..(266): n comprises a, c, g, or t, or includes no nucleotide
  misc_feature (299)..(299): n comprises a, c, g, or t, or includes no nucleotide
  misc_feature (374)..(374): n comprises a, c, g, or t, or includes no nucleotide
  misc_feature (380)..(380): n comprises a, c, g, or t, or includes no nucleotide
acctcccctattatagangagctacttcattttcatnaccatacactaataattntattcttaatcanttctttagttctctatatcaggggactaatattnactacaaaattaacccatacaagcacaatanactcacaagaaggngaaacagtatgaaccattctacccnccattatcctaatcctaatcnctctaccttccctccnaatcctttatataatggacgaaattaataacccctctttaacccttgaaaacaatangccaccaatgatactgaagctatgaatatactnactatgaagacttaaactttgactcctacataatcccaacacaagaattaaagccaggaaaactcctactattanaagtanacaaccgagttg

SEQ ID NO: 4354 - DNA, 388 bp, Canis familiaris
  misc_feature (4)..(4): n comprises a, c, g, or t, or includes no nucleotide
  misc_feature (13)..(14): n comprises a, c, g, or t, or includes no nucleotide
  misc_feature (24)..(24): n comprises a, c, g, or t, or includes no nucleotide
  misc_feature (302)..(302): n comprises a, c, g, or t, or includes no nucleotide
  misc_feature (371)..(371): n comprises a, c, g, or t, or includes no nucleotide
ccangaaaatttnnaatgactaangctgaaaataaaaactggtaagagaaggcaggggaataatcaggaaacaatttaacaaaagaaagatcaaaggggggggtatgcaacaataatcatttgggaaggataaaacaacaaataatccatcccaggagcaaaaaatggatcatataacttggaaaaataaactaataaatttaggggaatttccatggaaattccatctctttttggacttggaaaattttataaaggtttctgggaggttctttctctttttattcttctatataccgganggcatatttatttttggcccttggagaatcattttcatttaggtgggctttatggtaggccttcaggtngaactgggagatcttct

SEQ ID NO: 4355 - DNA, 333 bp, Canis familiaris
  misc_feature (19)..(19): n comprises a, c, g, or t, or includes no nucleotide
  misc_feature (42)..(42): n comprises a, c, g, or t, or includes no nucleotide
  misc_feature (62)..(62): n comprises a, c, g, or t, or includes no nucleotide
  misc_feature (136)..(136): n comprises a, c, g, or t, or includes no nucleotide
  misc_feature (147)..(147): n comprises a, c, g, or t, or includes no nucleotide
  misc_feature (184)..(184): n comprises a, c, g, or t, or includes no nucleotide
  misc_feature (207)..(207): n comprises a, c, g, or t, or includes no nucleotide
  misc_feature (227)..(227): n comprises a, c, g, or t, or includes no nucleotide
  misc_feature (283)..(283): n comprises a, c, g, or t, or includes no nucleotide
  misc_feature (285)..(285): n comprises a, c, g, or t, or includes no nucleotide
gattctggtcataaccctnggttattaatatcaggaggtatngcccaggataaaaaaagggngcaagggggtacaggttgaatgggtaacaatggtgaggaaggcaatttctggcatggagggttcctggatgttnagtctgtgggnggaggatctcctggttccacttccttttctccttggnagcaggttattggtgcgcatgtngaggggaaggcatctaaggngtaacatggaggcttaaaatataaaatatttttacttctctataaaggctacatgngncatcttttggaacactggctcggcatggtaaacactggaataggatgg

SEQ ID NO: 4356 - DNA, 406 bp, Canis familiaris
  misc_feature (30)..(30): n comprises a, c, g, or t, or includes no nucleotide
  misc_feature (48)..(49): n comprises a, c, g, or t, or includes no nucleotide
  misc_feature (69)..(69): n comprises a, c, g, or t, or includes no nucleotide
  misc_feature (82)..(83): n comprises a, c, g, or t, or includes no nucleotide
  misc_feature (91)..(91): n comprises a, c, g, or t, or includes no nucleotide
  misc_feature (112)..(112): n comprises a, c, g, or t, or includes no nucleotide
  misc_feature (119)..(119): n comprises a, c, g, or t, or includes no nucleotide
  misc_feature (162)..(162): n comprises a, c, g, or t, or includes no nucleotide
  misc_feature (176)..(176): n comprises a, c, g, or t, or includes no nucleotide
  misc_feature (212)..(212): n comprises a, c, g, or t, or includes no nucleotide
  misc_feature (299)..(299): n comprises a, c, g, or t, or includes no nucleotide
  misc_feature (394)..(394): n comprises a, c, g, or t, or includes no nucleotide
acccaaccctccctcctattatagggggancctaccttcattttcatnnaccataccacctaataattntattcttaatcannttctttanggtctctatatcagggggggngatattngctacataaattaaccccggagaaggacaatcagacggacaangagagggggaacantgatgagaccattctaccccgcgcattatcctaatncctaatgcggtctacccttcccctcggaatcctttatataatggggctagaattaataaccccctcttgagggcggggaaacaatgngggcaccaatggtactgagaggtatggatatactggctatggagacttaaactttggctcctacataatcccaacacaaggattaaaggcagganaactcctgctat

SEQ ID NO: 4357 - DNA, 214 bp, Canis familiaris
  misc_feature (7)..(7): n comprises a, c, g, or t, or includes no nucleotide
  misc_feature (17)..(17): n comprises a, c, g, or t, or includes no nucleotide
  misc_feature (89)..(89): n comprises a, c, g, or t, or includes no nucleotide
  misc_feature (141)..(141): n comprises a, c, g, or t, or includes no nucleotide
  misc_feature (143)..(143): n comprises a, c, g, or t, or includes no nucleotide
  misc_feature (154)..(154): n comprises a, c, g, or t, or includes no nucleotide
  misc_feature (191)..(191): n comprises a, c, g, or t, or includes no nucleotide
aattccncaccgggggngctttctcctggatctccggtcctgctcttctccccagggggggctggtatcagtggcacccgttggcaganatggtgtctgttttcttttatccaaggaatgctaactgggggggcccgtctntnctaaggcgttncgtgaaaaaatagaaacacctagtctccatttatttngggattttaagctcatccgatca

SEQ ID NO: 4358 - DNA, 211 bp, Canis familiaris
  misc_feature (74)..(74): n comprises a, c, g, or t, or includes no nucleotide
  misc_feature (110)..(110): n comprises a, c, g, or t, or includes no nucleotide
  misc_feature (131)..(131): n comprises a, c, g, or t, or includes no nucleotide
aaaatattttcttacacaagctacagcctcaatattactaataataggagtcactatcaacctcctttactccngccaatgggtaatctcaaaaatctcaaaccccatcncatccatcatggtaaccactnccctaacaataaaactaggcctatctccattccacttctgggttccccgagtaacacagggaattacgctcatatcagga

SEQ ID NO: 4359 - DNA, 290 bp, Canis familiaris
  misc_feature (19)..(19): n comprises a, c, g, or t, or includes no nucleotide
  misc_feature (43)..(43): n comprises a, c, g, or t, or includes no nucleotide
  misc_feature (58)..(58): n comprises a, c, g, or t, or includes no nucleotide
  misc_feature (100)..(100): n comprises a, c, g, or t, or includes no nucleotide
  misc_feature (110)..(110): n comprises a, c, g, or t, or includes no nucleotide
  misc_feature (181)..(181): n comprises a, c, g, or t, or includes no nucleotide
  misc_feature (185)..(185): n comprises a, c, g, or t, or includes no nucleotide
  misc_feature (223)..(223): n comprises a, c, g, or t, or includes no nucleotide
  misc_feature (238)..(238): n comprises a, c, g, or t, or includes no nucleotide
  misc_feature (270)..(270): n comprises a, c, g, or t, or includes no nucleotide
ttttttgcctcccgtattncgggctccatcaatatatgcgtangtgggggggggtgcncaaaatagcctcggggaagaagccacccagtacgggcattanggcaatggcngctgtaggggccctgtcccaattcccctatatgagggcgattacaattactggcccgcgtttacacggcgnactnggaaacctggcgtacccaacttaattgcttcgagcatnccctttcgcagtgcngatagcaagagcccgaccgtcgccttcaacangtcgcacgctaatgcaatgc

SEQ ID NO: 4360 - DNA, 309 bp, Canis familiaris
gcacgagaggctatttcttgactatggaatcatccgttttctgcctcatgacaacttttgtaggaagcccggacaaatctatacggaaacagattgagaatcacatcatgtgagggtaaaaaggctttagaaacccggcaaagggtggcaggtaggttgtatcttgggctcctgtcccatgtgcctggtgctggctccatgtggctccggtatgtaaaggggtccctcgggcagccaagtgggacggaagcaaaggatgacagactactgatgtccaccgtggacgagacacaggagccaggcatgccc

SEQ ID NO: 4361 - DNA, 421 bp, Canis familiaris
  misc_feature (401)..(401): n comprises a, c, g, or t, or includes no nucleotide
gcacgagcaatgatctccggttggcccagcacatcacctacgtgcaccagcacagccggcagcccccagcccagtttgagccgttggacatgaaactgatgagacgttatatctccatgtgccgggagaagcagcccacggtgcctgagtccctggccgactacataacagcagcatatgtggagatgaggcgagaggcttgggccagcaaggatgccacctacacatcagcccggacgctgctggccatcctgcggctgtccaccgccctggcgcgtctgcggatggtggacacagtggagaaggaagatgtgaatgaagccataaggcttaatggagatgtcaaaggactcccttctgggcgacaaggggcagacggcgaggacccagagacccgcagnatgtgatctttgccactgtc

SEQ ID NO: 4362 - DNA, 422 bp, Canis familiaris
gcacgagcgcaggtgtcctaaggcgagctcagggaggacagaaacctcccgtggagcagaagggcaaaagctcgcttgatcttgattttcagtacgaatacagaccgtgaaagcggggcctcacgatccttctgaccttttgggttttaagcaggaggtgtcagaaaagttaccacagggataactggcttgtggcggccaagcgttcatagcgacgtcgctttttgatccttcgatgtcggctcttcctatcattgtgaagcagatgtggatcagcaagcaggagtacgacgagtcgggcccctccatcgtccaccgcaaatgcttctaaatggactgcgagcagatgcgtagcatttgctgcatgagtgaattccgaagtataaatttgccctggcaaatgtatacacctcatgctagcc

SEQ ID NO: 4363 - DNA, 411 bp, Canis familiaris
  misc_feature (363)..(363): n comprises a, c, g, or t, or includes no nucleotide
  misc_feature (399)..(399): n comprises a, c, g, or t, or includes no nucleotide
gcacgagaaaagtactacattagcaacatattgaagctttggtatattcaagtggtgtcaattccaggcatctttaaggagatatcctaaagtgtatccaaggagtttagaggaaatttttgaaagtgaaagagaaaaggaagttgcatctggtggaacagaaagagcaaatctagaaatctgggaatgttcttccttaactccttacttgtttcactcagtgtcaaggaagagaatcttcaaataatcttcttgaatcaattgaatccttattaaatgtttattatcagtcacattctctagtagagaaacatagagccagtattttgagtggacagcttccgactcctcattgccattgtngtcgtggtcaagagcactgggtcctggaactagatnggcctgtgtcaa

SEQ ID NO: 4364 - DNA, 363 bp, Canis familiaris
gcacgagggtgcaactgtcttcggtcgtcccgaatccgggttcatccgacaccagctgcctccgccatgccgcctaagttcgaccccaacgagatcaaagtcgtgtacctgaggtgcaccggtggcgaggtcggtgccacgtctgccctggccccgaagatcggcccgctgggtctgattgaagtggtaccttctgcctctgccctgattatcaaagccctcaaggaaccaccaagagacagaaagaagcagaaaaacattaagcacagtggaaatatcacttttgatgagattgtcaatattgcccgacagatgcgacaccgatctttagccagagaactttctggaaccattaaagagatc

SEQ ID NO: 4365 - DNA, 344 bp, Canis familiaris
gcacgaggcaagttcctggtcgtgtcctcggagacaaagacggagctgcgcatcagcaacctggacttggagaccgatcctggcaagtacgtgtgcaacggcacgaactcagagggcaccagccaggccgtcatcgtgctgcgcgtgcgaaaccgcttcgccgccctctggcccttcctgggcatcgtggccgaagtcctggtgctggtcaccgtcatcttcatctatgagaagcggcggaagccggatgaggtcctggatgacgaggacacgggctctgctcctctgaagagcagtgggcacgtcaacgacaaaggcaagaacgttcgccagcggaacgccaa

SEQ ID NO: 4366 - DNA, 413 bp, Canis familiaris
ttcggcacgagagagagaatggcagtgacaaccttccctccccgaccgggagtggcgacaagcccctgcccgaccacacgcctttctaagcccatcgcagctttgcctggccacggaacaagtgcaagcacaccctcatcgccactgcagccctgccccggagcagcagcccgccaggccgcaggcggacgcacacagctggttttgaggagagtcgtgccgttcacatgtagacgtggccgctgtgttcgcatgagttagagaacacagtcttgtacgcagatgcttacattgaagttggtagatgcagaccactgtgccgtccttcctggggcgcagggagtggacgggaccgtgggcccttgggaatcttgctcgttggtgagaacgtggaaagagcaggagagcgataa

SEQ ID NO: 4367 - DNA, 407 bp, Canis familiaris
  misc_feature (191)..(191): n comprises a, c, g, or t, or includes no nucleotide
  misc_feature (273)..(273): n comprises a, c, g, or t, or includes no nucleotide
  misc_feature (275)..(275): n comprises a, c, g, or t, or includes no nucleotide
  misc_feature (277)..(278): n comprises a, c, g, or t, or includes no nucleotide
  misc_feature (280)..(281): n comprises a, c, g, or t, or includes no nucleotide
  misc_feature (370)..(370): n comprises a, c, g, or t, or includes no nucleotide
gcacgagccaagaagaggaggccgaaggcttgggagttgacctctctttcatcggttctcacgcttttgctcgaatggaaggagatattgacaagcaaagaagactgatccttcagggacagttatcagaggcggccttgcagaagcagcatcaaagaaattataatcgcgtggttatgtcaagcaagatnctgaggatctatctgatattgcttctctaaaagccttataccaaacaggtgttgataactgtggtcgacaggaggtggtagntntnnannaagaactattcctgtcacgttaatagacatggacaaggctctcttatattttatccatgtaatggatcacattgctgtgaaggaatatngtattagtatattttcacacactgaccagcgaataca

SEQ ID NO: 4368 - DNA, 417 bp, Canis familiaris
gcacgagcacggatgcaaagcccaagcccacacgaaggaggttggaaggactgcagcaaataaaatcaaagaacaatgtcccctggaagcaggactgcatagtagcagcaaagtgacaatacacgagtgtgacgaaggatccgagccgctgggattctgggatgctttaggaaggagagatagaaaagcgtacgactgtatgcttcaagatcctggaaattttaacttcacacctcgcctattcatcctcagcagttcctccggtgacttcttagccacagagttcatatatcccgcccgagacccctctgtggtcaactccatgcctttcctgcaggaagatctttacagcgcgccacagccagcacttttccttgttgacaatcaccacgaggtatacctctggcaaggctggtg

SEQ ID NO: 4369 - DNA, 409 bp, Canis familiaris
gcacgaggggaagggtccatacggcgttgttttgcgttcccatcgtaacttaaagggaaactttaacaatgtccggagcccttgatgttctgcaaatgaaggaggaggatgtcctcaaattccttgcagcaggaacccacttaggtggcaccaaccttgacttccaaatggaacagtacatctacaaaaggaaaagtgatggtatctacatcataaatctgaagagaacctgggagaagcttctgttggcagctcgtgccattgttgccattgaaaacccagctgatgtcagtgttatatcatctaggaatactggccagcgagctgtgctgaaatttgctgccgctactggagccactcctattgctggccgcttcactcctggaaccttcactaaccagatccaggc

SEQ ID NO: 4370 - DNA, 317 bp, Canis familiaris
  misc_feature (214)..(215): n comprises a, c, g, or t, or includes no nucleotide
gcacgagccgggggaggcattgttccgccggcgggctttctggcctgcggtttggagctcagcgcgtggagcggcgttggccggacccctattgccgcccaggtcagctcggctccaggcgccatggcttctcgcgggaggaagcggaaggccgaggcggcgggggtcgcggcggcggagaaacgggagaagccggcgagcggcaggaaggccnngtggaggagggcgacggtcgtgatcgagcattgcacgagctgacgcgtctacgggcgcaacgccgcggccctgagccaggcgctgcgcctggagaccccgga

SEQ ID NO: 4371 - DNA, 405 bp, Canis familiaris
  misc_feature (388)..(389): n comprises a, c, g, or t, or includes no nucleotide
gcacgagctagggcgatgcgggcgcccccggcgcgcggcccccgcgggcaccatgggccccctgctccgcagcctgctgctcgccgcgctcctgcagctggcccccgcccagggccctgtgtcccagcctgatgccctcagccaccagaagaaagtggtgtcatggatagatgtatatgcccgtgccacctgccagccacgggagggtggtagtgcctctgactgtggagctcatgggcacggtggccaagcaactggtgcccagctgcgtgacagtgcaacgctgcggtggctgctgccctgacgatggcctggaagtgtgtgcccactgggcagcaccaagtccgaatgcagatcctcatgattcgttacccaagcagtcagctgnngcgagatgtcccctgg

SEQ ID NO: 4372 - DNA, 423 bp, Canis familiaris
  misc_feature (277)..(277): n comprises a, c, g, or t, or includes no nucleotide
gcacgagggcccgcgtcgaggtggagcgcgacaacctggccgaggacatcatgcggcttcgggagaagttgcaagaggagatgcttcagagagaggaagccgagagcaccctgcagtctttccgacaggatgttgacaatgcttctttggcacgtcttgaccttgagcggaaagtggaatccttgcaagaagagattgcctttttgaagaaactacatgatgaggaaatccaggagctgcaggcccagattcaggaccagcatgtccaaatcgtatngggatgtttccaagcctgacctcacggctgccctgcgtgatgtacgccagcaatatgaaagcgtggctgccaagaaccttcaggaggccgaggaatggtacaagtccaagtttgccgacctctctgaggctgctaaccggaacaat

SEQ ID NO: 4373 - DNA, 399 bp, Canis familiaris
gcacgaggcgatggcggctaccgtggagtcctccgtggaggacccgctgcggaactttgttcgagttttggaaaagcgagatggcacggtgttacgactgcagcaatatggctccggcggcgtgggctgcgttgtttgggacgctgccatcgtcctttctaagtacctggaaacgcccgggttttccggcgatgggccccacgctctgagccggcggtcggtgctggagctgggctcgggcaccggggccgtggggctcatggctgctactctcggggccgatgtggtggtcacagatctggaggaattgcaagacttgctgaagatgaatattaatatgaacaagcatcttgtcactggttctgttcaagccaaggtactgaaatggggggaagcaat

SEQ ID NO: 4374 - DNA, 195 bp, Canis familiaris
gcacgaggcagccgcggcggaggacggcgagcagcccgggccggagccggaagccaagaagagcaagactgcagccaagaaaagcgaaaaagaggcagccggggaggggccggccctgtgcgaggaccccccggatcagaagacggcgcccagcggcaagtcggccaccctcaagatctgctcttggaacgtgga

SEQ ID NO: 4375 - DNA, 357 bp, Canis familiaris
gcacgaggagagagagagaaccagttaaatattacttatgtactatgttattacacaatggcagcagctaaaatgtctgggtttgcttaaatctataggtgtcaagcatacattgaaactttaattctagaggaaccaagcattaaggcagtacttaactatgttttggcaatgaccttaaatatattttcagtttttcctaattttctgaccaaaaatgtcttcgttttagtccttttactactcatagcagttttgtctccttcagtaagtactttggtgaactctaatgggaaatgagattctgcagcagggtcagcatgggatgactctgccaacgtaagtaaaattgttcca

SEQ ID NO: 4376 - DNA, 412 bp, Canis familiaris
gcacgaggcggtgaggagatgggggccgccgcggctcgcgcgctccgcaatttcaacctggagaaccgggcggaacgggaaatcagcaggatgaagccgtcgcccgcccccaggcacccgtccaccaggagcttcctgcgggagcagatgagccagcatccggaaatcaaggaggaaatcgacaggaaagatgacaaactgctgtcgttactaagagatgtgtatgttgattccagagatcctgtatcttctctgcaggtaaaagatgctgcaacacgtcaagagccaaaggagttgagattggtaaaaggccatgactttagcatgatgaatattaagaacattcccaaaggcaaaatttctgttgtggaggcactgacacttctcaataatcataaactttatccagaaa

SEQ ID NO: 4377 - DNA, 408 bp, Canis familiaris
gcacgaggagaactagtctcgagtttttttttttttttttttggtgaccttggctctgctttattgaccttagagcacccttcggatgcagttaaaaaaacaaacatacacagtaggagccagaagtggacccaggctggtgccacctgactgcagaagaatttccccaacccaaccaaggcggatttatacaaaatgccagaggaaaaaaatgaggcaatccggtgctgagtccagggctagccgattggcagaggagcagacagtgaaggagtgggcaggtcatgcctctttctcgtaagtacgagtgcaaactgcactgccatgggtaagtgtcaggatgagtttcccatcaactagctcccgcacaagtgttgtctcttgcccgttccacttctgcacatggac

SEQ ID NO: 4378 - DNA, 410 bp, Canis familiaris
gcacgagggcgagccagcgcggtggggcggctggagggagcggcgccggcccgggccctggagatggtccccggcgccgcgggctggtggtgtctcgtgctctggctccccgcgtgcggcgcggcccacgggacatgaggaaggcgcggcccgaagactctgagtcctcggctcctcacgtcgaagcaagactcctctccacgcccccggtagcgccgacccagacggctgaaggggtgactagaaggaaccagggacagctagagagataacaagctggaaataggcttacgcatccatgattatttgtacttccaagtgctgagtcctggagacattcgatacatcttcacagccacacctgccaaggactttggtggtatctttcacacaaggtatgagcagattca

SEQ ID NO: 4379 - DNA, 415 bp, Canis familiaris
  misc_feature (413)..(413): n comprises a, c, g, or t, or includes no nucleotide
gcacgaggttttcacccaccatggggcgtcatcgttcgaatcaactcttcaatggccatgggggacacatcatgcctcccacacaatcgcagtttggggagatgggaggcaagttcatgaaaagccaggggctaagccagctctaccataaccagagtcagggactcttatcccagctgcaaggacagtcgaaggatatgccacctcggttttctaagaaaggacagcttaatgcagatgagattagcctgaggcctgctcagtcatttctaatgaataaaaatcaagtgccaaagcttcagccccagataactatgattcctcctagtgcacaaccaccgcgcactcaaacaccacctctgggacagacacctcagcttggtctcaaaactaatccaccacttatccagganaa

SEQ ID NO: 4380 - DNA, 427 bp, Canis familiaris
gcacgaggccggcggagacgcgcgctgctaacctggtctccttcgcgcgacccttacagccgctggtctcggggcacaatggcaactcttaaggaaaaactgattgcaccagttgcagaagaagaggctgcaatcccaaacaataagatcactgtagtgggtgttggacaagttggtatggcatgtgccatcagcattctgggaaagtctctggctaatgaacttgcccttgtggatgttttagaagataaactcaaaggagaaatgatggatctacagcatgggagcttatttctacagacacctaaaattgtggcagataaagattactctgtgactgccaattctaagattgtggtggtgactgcaggagtccgccagcaggagggagagagccgcctcaatctggtgcaaaggaatgttaatg

SEQ ID NO: 4381 - DNA, 379 bp, Canis familiaris
gcacgagagctggcggacgtgtcgggctgctccgtaaccccgatcggtgcccaggaagcggagcggctgccttattagtattcgtacccacgaggcggcgcagcgggccctttgggagcgccagcatcgcggccatggcttatcactcgggctatggagcccacggctccaagcacagggcccgggcagctccagatccccctcccctcttcgatgacacaagcggtgcttactccagccagccaggaggatacccagccccaggagccgacgtggccttcaatgtcaaccacttgcttggggacccaatggccaatgtggctatggcctatggcagctccatcgcatcccatgggaaggacatggtgcacaaggagct

SEQ ID NO: 4382 - DNA, 368 bp, Canis familiaris
gcacgagatccactgaggattccagactgtttgaacaagcctcccggagtgccatgggattgccaggtccagagtaggcacgagcttctcccagacaagggttgaacattcagcattccacatctaagggggcaggagcccctggagcgtcttggggggggatggggtgcatgtggcttcggagcaaacctgtgactgctgatcaatgacctgagggtggggccctgggaggggagacagtaaagggaatccagactgtcctgccctagatgggtgacctgaacacaccggagcaaatgtgcagtcaggggaacctccctgcctgggaagccctggtcaggtcctctagggtgggaagctcatgcggt

SEQ ID NO: 4383 - DNA, 176 bp, Canis familiaris
ggcacgagggagaatctcatagtgctttggaagaaggagtgaaaaaaaggatacttctttaaaaatggcaatggtatcagaattcctcaaacaggcctggtttattgaaaatgaagagcaggaatacatcgaaactgtgaaaggatccaaaggaggtcctgggtcagcagtgagcc

SEQ ID NO: 4384 - DNA, 386 bp, Canis familiaris
ctaaaaaacacttcccatataatgaatattatgtatgattaagtattgctgcttggtttttttttttcccctccttttagatgggcattgttttttaaataaaaccatgtttgaattgaagctatattaagatagaaatttgaagtgttttgctttttctggcactcacaatcaggactaagtttgaggtcaaacctgtattcataattggcaattttttaaggagcaagtaagaaatagaaggcaggtgaagatataaaaccctagaatgcttaaatgtgctgtaaaactattgtagatgtcactggattttaccaagtaatatcctttcttcattttttccatctactgtggcttttcagttaaaattttgtttataaaaggaa

SEQ ID NO: 4385 - DNA, 466 bp, Canis familiaris
  misc_feature (11)..(12): n comprises a, c, g, or t, or includes no nucleotide
  misc_feature (14)..(14): n comprises a, c, g, or t, or includes no nucleotide
  misc_feature (17)..(17): n comprises a, c, g, or t, or includes no nucleotide
  misc_feature (38)..(38): n comprises a, c, g, or t, or includes no nucleotide
  misc_feature (47)..(48): n comprises a, c, g, or t, or includes no nucleotide
  misc_feature (53)..(53): n comprises a, c, g, or t, or includes no nucleotide
  misc_feature (61)..(61): n comprises a, c, g, or t, or includes no nucleotide
  misc_feature (72)..(72): n comprises a, c, g, or t, or includes no nucleotide
  misc_feature (78)..(78): n comprises a, c, g, or t, or includes no nucleotide
  misc_feature (80)..(80): n comprises a, c, g, or t, or includes no nucleotide
  misc_feature (88)..(88): n comprises a, c, g, or t, or includes no nucleotide
  misc_feature (91)..(91): n comprises a, c, g, or t, or includes no nucleotide
  misc_feature (104)..(104): n comprises a, c, g, or t, or includes no nucleotide
  misc_feature (116)..(117): n comprises a, c, g, or t, or includes no nucleotide
  misc_feature (120)..(121): n comprises a, c, g, or t, or includes no nucleotide
  misc_feature (124)..(124): n comprises a, c, g, or t, or includes no nucleotide
  misc_feature (132)..(132): n comprises a, c, g, or t, or includes no nucleotide
  misc_feature (135)..(135): n comprises a, c, g, or t, or includes no nucleotide
  misc_feature (146)..(146): n comprises a, c, g, or t, or includes no nucleotide
  misc_feature (149)..(149): n comprises a, c, g, or t, or includes no nucleotide
  misc_feature (152)..(152): n comprises a, c, g, or t, or includes no nucleotide
aagtggggtcnngnaanccacgtgggtccgcctctccnctaagagtnnaactncacccccnggaacaaaagntggagntnaccgtggnggntggggtatacgantagtcactaaannggnntgnaggaattnggnacgaggacggnggncgngcctgcgagagagggcgggtcggggtcagctgctgcaggcgggcgggcgcggcgagctgtgggcggctgccgtgtctcctcctgccgttgtcctccctggggggcgatgccgggaatcgacaagctggccatcgaggagccgctggaggacagcccgcagacaaggtctttactgggtgtatttgaagaagatgctacagctatttccaactatatgaaccagttgtatcaagctatgcgtcggatttatgatgcacagaatgaattaagtgcagcaacacatctgacttcaaaacttttaaaagaatatgaaa

SEQ ID NO: 4386 - DNA, 382 bp, Canis familiaris
gcacgagattcactccctcaagatggcgcccgctatgcccagggacctcgggcaggacgggcccatcacggtgcactgcagtgccggcgtgggccgcaccggggtgttcatcactctgagcatcgtcctggagcggatgcgctacgagggcgtggtcgacatgttccagaccgtgaagaccctgcgcacacagcgcccagccatggtgcagacggaggaccagtaccagctgtgctatcgtgcggccctggagtaccttggcagctttgaccactatgcacggatgctgttgctggcagagcacagcccactggggtcacagcgtttcaggaacattgccacaccaaatggagagcccagaacaccactgggcaagtgggtg

SEQ ID NO: 4387 - DNA, 409 bp, Canis familiaris
gcacgagcctaggttctgtggggaggagtccgtgccggatcgacgcctgagcccgaaggtcgagctgggcggcggcatgcggcgccgttgagggcgctgccgcgcgcgctcccaggccggcctgagtcctgggctctttgaaggagggtcagcgccgggggccgaggagtggggcacacgggggagctgccggagctcccgccgacgccgtgtctccaggcgtagcttggcgcctggggtcaggggccgaggcttgggcgctgcctgcccgagcggagatccgggtttgcctcccgcccccgctcaggaccctgaggcgggtgaggcagcccagagagcatgagcgggcagcgcgtggacgtcaaggtggtgatgctgggcaaggagtacgtgggcaagacaagcttgg

SEQ ID NO: 4388 - DNA, 227 bp, Canis familiaris
gcacgagggcgggtgtcggcatgtctgcggtcctgcagcgcatcgagcggctgtccggccgggtggtgcgcgtcctgggctgtaacccggggcccatgaccctgcagggcaccaacacctacttggtaggggtcggcaccaggagaatcctcattgacactggagaaccagcaattacagaatatatcagctgtttaaagcaggccctgactgaatttaacacaaca

SEQ ID NO: 4389 - DNA, 420 bp, Canis familiaris
gcacgagcggctgcctgcacgggccatggcgcttcacgtccccaaggccccgggctttgcccagatgctcaaggagggggcgaagcatttttccggattagaagaggctgtgtataggaacatacaggcttgcaaggagcttgcccaaacaactcgtacagcatatggaccaaatggaatgaacaaaatggttatcaaccacctagagaagttgtttgtgacaaacgatgcagccactattttaagagaactagaagtacagcatcctgctgcaaaaatgattgtaatggcctctcacatgcaagagcaagaggttggagatggcaccaactttgtcctggtatttgctggagcccttctggaactagccgaagagcttttgagaattggcctgtccgtttcagaggtcatagaaggtta

SEQ ID NO: 4390 - DNA, 399 bp, Canis familiaris
gcacgaggcaaacagaaaattgtggaggttttgttggattgtgatctcaaggccagatgacttcctgggagaggtgtgcaacagaggaacatggctcaagaaactaatcacagccaagtgcctatgctttgttccactggctgcggattttatggaaaccctcgtacaaatggcatgtgttcagtatgctataaagaacatcttcaaagacagaatagtagtaatggtagaataagcccacctgcagcttctgtcagtactctgtctgaatctttacccgtccagtgcacagacggcagtgtcgcggatgctcagttaccactagactccacgtctgcatctgtgcagccaagccctgtatcaaatcagtcacttttatcagaatctgtagcatcttcc

SEQ ID NO: 4391 - DNA, 431 bp, Canis familiaris
cggcggactccaccatctgccacatcctcaacctgtaccggcggaacacgtggctgtaccaggcgctgcgggagggcacgcgggtgcagagcgtcgagcagatccgggaggtcgcctcgggagccgcccgcatccgcggggagacgctgggcctcatcggcttcggtcgcacggggcaggcggttgctgttcgagccaaggcctttggattcagcgtcatattttatgacccctacttgcaggatgggatagagcggtccctgggcgtgcagagggtctacaccctgcaggacttactgtatcagagcgactgcgtctccttgcactgtaatctcaacgaacataaccaccacctcatcaatgactttactataaagcagatgaggcaaggagccttcctggtgaacgcggcccgcggcgggctggtggat

SEQ ID NO: 4392 - DNA, 428 bp, Canis familiaris
gcacgagaatgggtttagtatctaggggatgggtggctccaaatcattcatttagtggggatcaaggagccggggcaatacggtattccactcagggtctggagaacatctacccaggctgggctactggagcaggcgaggacccaaggaccctggaagaactggtccaggggactgaattcctggagtgttcctagagcaaagcatgaccacactcctaccattgctgctgggcctcagtctgggctctaccggagaaggtggctttatagctcacgtggaaagctcctgtctgttggatgatgatgggactccaaaggatttcacatattgtgtctccttcaataaggatttgctgacctgctgggatccagatgaggccaaaatggtcccttatgaatttgggacactgaatgtcttggccaatt

SEQ ID NO: 4393 - DNA, 371 bp, Canis familiaris
gcacgagccatgatgatgcatgaggagaactttgttgctgaccatccattcattttctttatccggcacaatccctcatctaacatcctgttccttggtagactttgctccccttagagggtggaagtaccaaggtcaagcttagagctttgttacctgtactcccaatagtggcaatttcgtacatcttggccagtacaaccactatccaaaaacatctttaattcccctcctaagtgtagctctgtttatatacgtctatgaactttggcgcgggtatctattttccttttcgttatagtatatgtgctgccgaagcaagcacatttcctttttgttatattgacaaaatccagcgattgctttgaatg

SEQ ID NO: 4394 - DNA, 350 bp, Canis familiaris
gcacgagcgtgtgcgtgtggaagcctctgtcagtcatgggaaatctcatgagagacgtctttagttaggtcctcgtgaagcctagagtccatgtgaacggtaagacttgacgtctcccacagaaaatgtgggcaaggaagttccatgaggcttgtcctgactgtcctgtcacctcccagaacgtttctggttggatttgccatctgggtacggggaccggggaggccctccagccccgctctgctctgcggagcccccgctcgaagcggctccagattctgcttctaagtcattgagaggctgactaggctgctctccaccgtggggagagcgcgattaaattggcctca

SEQ ID NO: 4395 - DNA, 399 bp, Canis familiaris
gcacgagttcggcaagaagcagatgcgcattttgatggttggattggatgctgctggcaagacgaccattctgtataaactgaagttaggggagatagtcaccaccattcctaccattggttttaatgtggaaacagtagaatataagaacatttgtttcacagtatgggatgttggtggtcaagataaaattaggcctctctggaggcattacttccaaaatacccagggtcttatttttgtggtagatagtaatgatcgtgaaagaattcaggagggagctgaagaactgcagaaaatgcttcaggaagatgagttgagagatgcagtgttgctgctttttgcgaacaaacaggatttgccaaatgctatggccatcagtgaaatgacagataaatt

SEQ ID NO: 4396 - DNA, 425 bp, Canis familiaris
cacgagcttaaacatttttgttgttaatatttataggctagattaaggacacatttgcatcaaccaatcactgttagagctagcaaaagcgacatgaatgtgaatggatatggtcgctgggctttcttgtactttataaaggctatttcttaagtttagtgaccagtcttcgttagcaatatgaaaattgtcctcatgtgtatcccactgaatcaacaatgctgtgatttacaataggttatcaacatttaaaagtacttttgtgcctgtttgtatgcgtgtgtgtatctgttcttctgaagcaaggatccacgacttctattgtcaaagcaatctgggaactttccctcaaagttaagaattatcacttaaaaaaatacacacacacacacacacacatacatacactaagcagtctgaagcag

SEQ ID NO: 4397 - DNA, 398 bp, Canis familiaris
gcacgaggcttgtcggggacggtaaccgggacccggtgtctgctcctgtcgcctgcgcctgctaccccgcagccaccatgccgtaagatgaatgtggaggagaacagctccttgtcagtgtgctgcgttacgtcagggtatcgggacaattagctcccagcagcttctagagaccatctgtccttaactcgcgtgagtgtatctcgatccacgttggccaggcaggtgtccagatcggcaatgcctgctgggagctctattgcctggaacacggcattcagcccgatggccagatgccaagtgacaagaccattgggggaggagatgactccttcaacaccttcttcagtgagacgggcgctggcaagcatgtgcccagggcagtgtttgtagacctg

SEQ ID NO: 4398 - DNA, 427 bp, Canis familiaris
gcacgagggagcctcctccgctgggggacgcgaagcccaccgactttgaggagctggaggacggagaggacctgttcaccagcactgtgtccaccttagagtcaagtccatcatctccggaaccagctagtcttcctgcagaagatgttagtacaaactccaatggtcccaaacctgcagaggtggtgctagatgatgacagagaagatctttttgcagaagccacagaagaagtttctctggatagtccagaaagggaacctatcctgtcttcagaaccttctcctgcagtcacacctgtgacccctactacactcattgctcccagaattgaatcaaagagtatgtctgctcctgtgatcttcgatagatccagggaggagattgaagaagaagcaaatggagatgtttttgatatagaaattgg

SEQ ID NO: 4399 - DNA, 415 bp, Canis familiaris
gcacgagggcgtgtgcgttggctgtggggagctcggaaacaagctcgcatcccactgttggaaaccttctagcaacagcatgagtctgcagtggactgcagtcgccaccttcctctatgcagaggtttttgctgtgctgcttctctgcattcccttcatttctcccaaaagatggcagaagattttcaagtcccgcctggtggagttggtagtaacttatggcaacaccttctttgtagtcctcattgtcatccttgtgctgctggtcattgatgctgtacgtgagattcggaagtacgacgacgtgacagagaaggtgaacctgcagaataatcctggggctgtggaacacttccacatgaagcttttccgtgcccagaggaatctctatattgctggcttttccttgctgctg

SEQ ID NO: 4400 - DNA, 429 bp, Canis familiaris
gcacgaggccagacccagctgaggagaccagacaccatgcagattcaaaccctcgcgagcaccagccacagtccaagcaggcagtgtaagcaagggaggacccccggctccacctatgtccacgctgttggtggaaacacagtggcagaggtcgtggggaaggtgaacgagctgatcgccacaggccagtatggcaggctgtttgctgtggtgcacttcgccagccaccagtggaaggtgacctctgaggacctgattttaatcaacaacgaattagacattgcatgtggagagaggatacggctggagaaggtcctattggttggagctgacaacttcacgttacttggcaagccactccttggaaaggatctcgttcgagtagaagccacggtcatcgaaaagacagaatcatggccaaaaattaat

SEQ ID NO: 4401 - DNA, 409 bp, Canis familiaris
gcagggaccttctggatgacctgaaatcagaactgactggaaaatttgaaaaattaattgtggctctgatgaaaccctctaggctttatgatgcctatgaactgaagcatgctcttaagggagctgggacaaatgaaaaagtgctgacagaaattattgcctcaaggacacctgaagaattgagagccataaaacaagtttatgaagaagaatatggctcaagcctggaagatgatgtggtgggggatacctcaggctactaccagaggatgttggtggttctccttcaggctaatagagaccctgatgctggaattgatgaagcacaagttgaacaagatgctcaggctttgtttcaggctggagaactgaaatgggggacggatgaagaaaagtttatcaccatctt

SEQ ID NO: 4402 - DNA, 421 bp, Canis familiaris
ctcgctcgcacgcacgcacgttcatcctccgtcctcgcgccccgattcctacactttcctcttctccgagaccggaggagccgctctctccgcgcagtgcattctggggacccgggtcgagcccgccgtcgcctgagggaagcgaggagaggccgcgaccgggaagaaagcgccgagtcgccaccggaggagagtcgactgcccggcagctgccgccggagaggcccgcccacccgctcgcccggccccccgccccgttcacgatgcagcctgcttctgcaaagtggtacgatcgaagggactacgtcttcattgaattttgtgttgaagacagtaaagatgttaatgtaaattttgaaaaatccaaacttacattcagttgtcttggaggaagtgataattttaaacatttaaatgaaat

SEQ ID NO: 4403 - DNA, 425 bp, Canis familiaris
gcacgagcggggcttagggcgccatgaggggtgaccgaggacgagggcgcggcgggcgcttcgggtcccgaggaggcccaggaggcgggttccggccgtttgtgccacatattccatttgatttctatctgtgtgagatggctttcccccgggtcaagccagcgcctgacgaaacttcgttcagtgaggccttgctgaagaggaatcaggaccttgctcctaattctgctgaacaggcatctatcctttctctggtgacaaaaatcaacaatgtgattgacaatttgattgtggctccagggacattcgaagtgcaaattgaagaagtgcgacaggtgggatcctataaaaaaggaacaatgactacaggacataatgtggctgacctggtggtaatcctaaagattctgccaacattggaagct

SEQ ID NO: 4404 - DNA, 421 bp, Canis familiaris
gcacgaggagatccttgggagacttctcccagaacaaaggagccatcaggcaccatttccaacccctgccccccagcatgaacacatggtcacctgcagtaaacagtaccctgctgacactgactacctgacttgctaacactgttgccctgctcccgtgtgctgtgctgcagtggatctgcactctccagacaggtttgcctcaatcctggcagagcaggaaccctcttgcagaggactggtgctgtgcaaaccttgctaacaccgtcatacatggctcccacttctcaccattgtagctctgtctcccagtgcactcttggccagagcccatctagagtggtgctacaggcctggcagtgtgagagcaccgcaacagggaccagcaccactttaaagtgactcttaccctggagagagg

SEQ ID NO: 4405 - DNA, 335 bp, Canis familiaris
gcacgagggctgagacgggagggtcctcggctaaagcccaaagcggatcaaagtggtgggactcgcgccgcggccgcggagacgtgaaggccgtccgcacgcctcctcgcgatccgggtcggtgctcgccctcgctctcctctccgcgtccccatggagaagacggagctgatccagaaggcgaagctggccgagcaggccgagcgctacgacgacatggccacctgcatgaaggccgtgacggagcagggcgccgagctgtccaacgaggagcgcaacctgctctcggtggcctacaagaacgtggtcgggggccgcaggtccgcctggcgggt

SEQ ID NO: 4406 - DNA, 319 bp, Canis familiaris
  misc_feature (4)..(4): n comprises a, c, g, or t, or includes no nucleotide
  misc_feature (10)..(10): n comprises a, c, g, or t, or includes no nucleotide
  misc_feature (19)..(19): n comprises a, c, g, or t, or includes no nucleotide
  misc_feature (21)..(22): n comprises a, c, g, or t, or includes no nucleotide
  misc_feature (24)..(24): n comprises a, c, g, or t, or includes no nucleotide
  misc_feature (27)..(27): n comprises a, c, g, or t, or includes no nucleotide
  misc_feature (30)..(30): n comprises a, c, g, or t, or includes no nucleotide
  misc_feature (33)..(34): n comprises a, c, g, or t, or includes no nucleotide
  misc_feature (44)..(44): n comprises a, c, g, or t, or includes no nucleotide
  misc_feature (53)..(57): n comprises a, c, g, or t, or includes no nucleotide
  misc_feature (61)..(61): n comprises a, c, g, or t, or includes no nucleotide
  misc_feature (64)..(64): n comprises a, c, g, or t, or includes no nucleotide
  misc_feature (72)..(72): n comprises a, c, g, or t, or includes no nucleotide
  misc_feature (75)..(75): n comprises a, c, g, or t, or includes no nucleotide
  misc_feature (77)..(77): n comprises a, c, g, or t, or includes no nucleotide
  misc_feature (84)..(84): n comprises a, c, g, or t, or includes no nucleotide
  misc_feature (112)..(112): n comprises a, c, g, or t, or includes no nucleotide
  misc_feature (125)..(125): n comprises a, c, g, or t, or includes no nucleotide
  misc_feature (135)..(135): n comprises a, c, g, or t, or includes no nucleotide
  misc_feature (139)..(140): n comprises a, c, g, or t, or includes no nucleotide
  misc_feature (144)..(144): n comprises a, c, g, or t, or includes no nucleotide
  misc_feature (146)..(146): n comprises a, c, g, or t, or includes no nucleotide
  misc_feature (182)..(182): n comprises a, c, g, or t, or includes no nucleotide
  misc_feature (222)..(222): n comprises a, c, g, or t, or includes no nucleotide
  misc_feature (231)..(231): n comprises a, c, g, or t, or includes no nucleotide
  misc_feature (236)..(237): n comprises a, c, g, or t, or includes no nucleotide
  misc_feature (260)..(260): n comprises a, c, g, or t, or includes no nucleotide
  misc_feature (262)..(262): n comprises a, c, g, or t, or includes no nucleotide
  misc_feature (276)..(277): n comprises a, c, g, or t, or includes no nucleotide
  misc_feature (287)..(287): n comprises a, c, g, or t, or includes no nucleotide
gganaaaagntggattttnanngnggnggnggnngatctccaantagtggatnnnnngggntgnaggaattnggnangagggtntgagtttttgttttgttttgtttgggtntgagttttatgantttgtttttntttnngagnanagaaagtgtgattttatgatatgtagtaattgattngtttgtatttgttggttttaatgtgtttttttaattgtanattgggaanatatnntagaaattggtatgaattaaatntnttgattgagatttnnttataatatngattaatttgggtgatagaaaataatggaaat

SEQ ID NO: 4407 - DNA, 450 bp, Canis familiaris
  misc_feature (3)..(3): n comprises a, c, g, or t, or includes no nucleotide
  misc_feature (9)..(9): n comprises a, c, g, or t, or includes no nucleotide
  misc_feature (49)..(49): n comprises a, c, g, or t, or includes no nucleotide
  misc_feature (51)..(51): n comprises a, c, g, or t, or includes no nucleotide
  misc_feature (54)..(54): n comprises a, c, g, or t, or includes no nucleotide
  misc_feature (82)..(82): n comprises a, c, g, or t, or includes no nucleotide
  misc_feature (98)..(99): n comprises a, c, g, or t, or includes no nucleotide
  misc_feature (132)..(132): n comprises a, c, g, or t, or includes no nucleotide
  misc_feature (134)..(134): n comprises a, c, g, or t, or includes no nucleotide
  misc_feature (141)..(141): n comprises a, c, g, or t, or includes no nucleotide
  misc_feature (152)..(153): n comprises a, c, g, or t, or includes no nucleotide
  misc_feature (156)..(156): n comprises a, c, g, or t, or includes no nucleotide
  misc_feature (159)..(159): n comprises a, c, g, or t, or includes no nucleotide
  misc_feature (161)..(161): n comprises a, c, g, or t, or includes no nucleotide
  misc_feature (164)..(164): n comprises a, c, g, or t, or includes no nucleotide
  misc_feature (171)..(171): n comprises a, c, g, or t, or includes no nucleotide
  misc_feature (173)..(173): n comprises a, c, g, or t, or includes no nucleotide
  misc_feature (198)..(198): n comprises a, c, g, or t, or includes no nucleotide
  misc_feature (203)..(203): n comprises a, c, g, or t, or includes no nucleotide
  misc_feature (209)..(210): n comprises a, c, g, or t, or includes no nucleotide
  misc_feature (231)..(231): n comprises a, c, g, or t, or includes no nucleotide
  misc_feature (246)..(247): n comprises a, c, g, or t, or includes no nucleotide
  misc_feature (261)..(261): n comprises a, c, g, or t, or includes no nucleotide
  misc_feature (302)..(302): n comprises a, c, g, or t, or includes no nucleotide
  misc_feature (306)..(306): n comprises a, c, g, or t, or includes no nucleotide
  misc_feature (316)..(316): n comprises a, c, g, or t, or includes no nucleotide
  misc_feature (327)..(327): n comprises a, c, g, or t, or includes no nucleotide
  misc_feature (361)..(361): n comprises a, c, g, or t, or includes no nucleotide
  misc_feature (370)..(370): n comprises a, c, g, or t, or includes no nucleotide
  misc_feature (431)..(431): n comprises a, c, g, or t, or includes no nucleotide
  misc_feature (445)..(445): n comprises a, c, g, or t, or includes no nucleotide
ggnatgagnaattatggtatttggaagtagggtaagagttgaaaattgnanagnggataaaaaaaaaaaaagataattgtanttgattttttattttnnttgaatataattattgtgtaaagttgtaaaagngntgtgttnttagaattttnnggnttnanagntagtttnantataggtgagtgaattaaattattnagttngattgnnattatttatgtaaggattttnggttttgatttgtgnnagttttttgtttanaatatagtaattttgtgtttttaatgtttagaagtattttnttangatgattttntttaaatttanttaggtgatggttgtaaaaagttagtgtaataanataagattngtttttaagatgaaaattggttttataatttttggataagggtgtgtgaagaattatgggnagaagttatattantttta

SEQ ID NO: 4408 - DNA, 389 bp, Canis familiaris
  misc_feature (1)..(1): n comprises a, c, g, or t, or includes no nucleotide
  misc_feature (5)..(6): n comprises a, c, g, or t, or includes no nucleotide
  misc_feature (10)..(12): n comprises a, c, g, or t, or includes no nucleotide
  misc_feature (14)..(14): n comprises a, c, g, or t, or includes no nucleotide
  misc_feature (17)..(19): n comprises a, c, g, or t, or includes no nucleotide
  misc_feature (37)..(37): n comprises a, c, g, or t, or includes no nucleotide
  misc_feature (45)..(45): n comprises a, c, g, or t, or includes no nucleotide
  misc_feature (49)..(49): n comprises a, c, g, or t, or includes no nucleotide
  misc_feature (57)..(58): n comprises a, c, g, or t, or includes no nucleotide
  misc_feature (60)..(61): n comprises a, c, g, or t, or includes no nucleotide
  misc_feature (63)..(63): n comprises a, c, g, or t, or includes no nucleotide
  misc_feature (67)..(68): n comprises a, c, g, or t, or includes no nucleotide
  misc_feature (71)..(72): n comprises a, c, g, or t, or includes no nucleotide
  misc_feature (91)..(95): n comprises a, c, g, or t, or includes no nucleotide
  misc_feature (99)..(99): n comprises a, c, g, or t, or includes no nucleotide
  misc_feature (102)..(102): n comprises a, c, g, or t, or includes no nucleotide
  misc_feature (110)..(110): n comprises a, c, g, or t, or includes no nucleotide
  misc_feature (113)..(113): n comprises a, c, g, or t, or includes no nucleotide
  misc_feature (115)..(115): n comprises a, c, g, or t, or includes no nucleotide
  misc_feature (122)..(122): n comprises a, c, g, or t, or includes no nucleotide
  misc_feature (125)..(125): n comprises a, c, g, or t, or includes no nucleotide
  misc_feature (129)..(129): n comprises a, c, g, or t, or includes no nucleotide
  misc_feature (136)..(138): n comprises a, c, g, or t, or includes no nucleotide
  misc_feature (142)..(142): n comprises a, c, g, or t, or includes no nucleotide
  misc_feature (145)..(145): n comprises a, c, g, or t, or includes no nucleotide
  misc_feature (148)..(148): n comprises a, c, g, or t, or includes no nucleotide
  misc_feature (150)..(151): n comprises a, c, g, or t, or includes no nucleotide
  misc_feature (159)..(160): n comprises a, c, g, or t, or includes no nucleotide
  misc_feature (163)..(163): n comprises a, c, g, or t, or includes no nucleotide
  misc_feature (169)..(170): n comprises a, c, g, or t, or includes no nucleotide
  misc_feature (172)..(172): n comprises a, c, g, or t, or includes no nucleotide
  misc_feature (178)..(178): n comprises a, c, g, or t, or includes no nucleotide
  misc_feature (180)..(182): n comprises a, c, g, or t, or includes no nucleotide
  misc_feature (184)..(185): n comprises a, c, g, or t, or includes no nucleotide
  misc_feature (190)..(190): n comprises a, c, g, or t, or includes no nucleotide
  misc_feature (195)..(197): n comprises a, c, g, or t, or includes no nucleotide
  misc_feature (211)..(211): n comprises a, c, g, or t, or includes no nucleotide
  misc_feature (213)..(215): n comprises a, c, g, or t, or includes no nucleotide
  misc_feature (217)..(218): n comprises a, c, g, or t, or includes no nucleotide
  misc_feature (241)..(241): n comprises a, c, g, or t, or includes no nucleotide
  misc_feature (246)..(246): n comprises a, c, g, or t, or includes no nucleotide
  misc_feature (250)..(251): n comprises a, c, g, or t, or includes no nucleotide
  misc_feature (264)..(264): n comprises a, c, g, or t, or includes no nucleotide
  misc_feature (284)..(284): n comprises a, c, g, or t, or includes no nucleotide
  misc_feature (286)..(287): n comprises a, c, g, or t, or includes no nucleotide
  misc_feature (292)..(292): n comprises a, c, g, or t, or includes no nucleotide
  misc_feature (294)..(294): n comprises a, c, g, or t, or includes no nucleotide
  misc_feature (303)..(303): n comprises a, c, g, or t, or includes no nucleotide
  misc_feature (320)..(320): n comprises a, c, g, or t, or includes no nucleotide
  misc_feature (332)..(332): n comprises a, c, g, or t, or includes no nucleotide
ncctnngagnnngnaannnagggcttactaatggtgnaaaaaagntggngttggganngnngntggnnggnnggattcctaatagtggatnnnnngggntgnaggaattnggnangaggttnggngttngggttannnttgnagngangnnttttggtnnaantggtanngntgttgntnnngnnttttngtttnnnggttttttttgggnannngnngagatgagtaggagtattttttnaaagntgtnnttattggagattntggtgttggaaagagtaatntnnttgtntngatttattngaaatgagtttaatttngaaagtaagagnattattggagtagagtttgtataaagaagtatttaggttgatgggaaaataataaag

SEQ ID NO: 4409 - DNA, 511 bp, Canis familiaris
  misc_feature (3)..(5): n comprises a, c, g, or t, or includes no nucleotide
  misc_feature (7)..(10): n comprises a, c, g, or t, or includes no nucleotide
  misc_feature (33)..(34): n comprises a, c, g, or t, or includes no nucleotide
  misc_feature (36)..(36): n comprises a, c, g, or t, or includes no nucleotide
  misc_feature (47)..(47): n comprises a, c, g, or t, or includes no nucleotide
  misc_feature (50)..(50): n comprises a, c, g, or t, or includes no nucleotide
  misc_feature (53)..(53): n comprises a, c, g, or t, or includes no nucleotide
  misc_feature (56)..(56): n comprises a, c, g, or t, or includes no nucleotide
  misc_feature (76)..(76): n comprises a, c, g, or t, or includes no nucleotide
  misc_feature (92)..(92): n comprises a, c, g, or t, or includes no nucleotide
  misc_feature (100)..(100): n comprises a, c, g, or t, or includes no nucleotide
  misc_feature (103)..(103): n comprises a, c, g, or t, or includes no nucleotide
  misc_feature (105)..(105): n comprises a, c, g, or t, or includes no nucleotide
  misc_feature (109)..(110): n comprises a, c, g, or t, or includes no nucleotide
  misc_feature (117)..(117): n comprises a, c, g, or t, or includes no nucleotide
  misc_feature (121)..(121): n comprises a, c, g, or t, or includes no nucleotide
  misc_feature (125)..(125): n comprises a, c, g, or t, or includes no nucleotide
  misc_feature (128)..(128): n comprises a, c, g, or t, or includes no nucleotide
  misc_feature (131)..(131): n comprises a, c, g, or t, or includes no nucleotide
  misc_feature (136)..(136): n comprises a, c, g, or t, or includes no nucleotide
  misc_feature (140)..(140): n comprises a, c, g, or t, or includes no nucleotide
  misc_feature (142)..(142): n comprises a, c, g, or t, or includes no nucleotide
  misc_feature (144)..(144): n comprises a, c, g, or t, or includes no nucleotide
  misc_feature (147)..(147): n comprises a, c, g, or t, or includes no nucleotide
  misc_feature (155)..(155): n comprises a, c, g, or t, or includes no nucleotide
  misc_feature (199)..(199): n comprises a, c, g, or t, or includes no nucleotide
  misc_feature (201)..(201): n comprises a, c, g, or t, or includes no nucleotide
  misc_feature (207)..(207): n comprises a, c, g, or t, or includes no nucleotide
  misc_feature (209)..(209): n comprises a, c, g, or t, or includes no nucleotide
  misc_feature (211)..(211): n comprises a, c, g, or t, or includes no nucleotide
  misc_feature (213)..(213): n comprises a, c, g, or t, or includes no nucleotide
  misc_feature (266)..(266): n comprises a, c, g, or t, or includes no nucleotide
  misc_feature (279)..(279): n comprises a, c, g, or t, or includes no nucleotide
  misc_feature (287)..(287): n comprises a, c, g, or t, or includes no nucleotide
  misc_feature (295)..(297): n comprises a, c, g, or t, or includes no nucleotide
  misc_feature (311)..(311): n comprises a, c, g, or t, or includes no nucleotide
  misc_feature (313)..(313): n comprises a, c, g, or t, or includes no nucleotide
  misc_feature (319)..(320): n comprises a, c, g, or t, or includes no nucleotide
  misc_feature (323)..(323): n comprises a, c, g, or t, or includes no nucleotide
  misc_feature (355)..(355): n comprises a, c, g, or t, or includes no nucleotide
  misc_feature (360)..(360): n comprises a, c, g, or t, or includes no nucleotide
  misc_feature (378)..(379): n comprises a, c, g, or t, or includes no nucleotide
  misc_feature (409)..(409): n comprises a, c, g, or t, or includes no nucleotide
  misc_feature (412)..(412): n comprises a, c, g, or t, or includes no nucleotide
  misc_feature (418)..(418): n comprises a, c, g, or t, or includes no nucleotide
  misc_feature (460)..(460): n comprises a, c, g, or t, or includes no nucleotide
  misc_feature (495)..(496): n comprises a, c, g, or t, or includes no nucleotide
  misc_feature (507)..(507): n comprises a, c, g, or t, or includes no nucleotide
ttnnngnnnngagggcctcctcaataagaaaanngntggtggtgganttnggnggnggtgagttcctgtatttttnggaaaaaatgggttgnaggaattnggnangagnnggtttgngagngggnttnttngtttngggngngnganagaaaggngattgaaaaatgggtgatgttgagaagggaaattttttttttgntnagaagngngngntttgtggtggtgtggaaaagggaggtatggaaaagaatgggttaaattttaangaattatttgggnggaagaanggttaggnnnttggatttttttananggatgnnaanaagaaaaaagggattatttggggagaggagantttgntggagtatttggagaatnnaagaagtatatttttggaataaaaatgatnttngttggnattaagaagaaaggggaaagagtagatttaatagtttatttnaaaaaagttattaaggagtaatagttggttattgnnttatttattanaaaa

SEQ ID NO: 4410 - DNA, 390 bp, Canis familiaris
gcacgaggtgaaagccatgcttatcttcaataattgcagggaggctttctggctgggcaacctcaaaaatcgggacttgcagggtgaagagattatatcccagaactcccaggaaagtgcagccgaggagagtgaggatgataccgcatctcaggtctccaagagcaaaacaacagaggatgctgaaaatgatgaagtaagtgatggagaaaaggagcaagatagtgatgagagtgaagactctgattagaccacagagagactgatgtcccctccccatctctgctagcctcttcccattttgtgttcaggatttgaaatctgctatctgccttccttactggaagcatcttgctttgtcattaggagggtgggctttactgaaccaac

SEQ ID NO: 4411 - DNA, 443 bp, Canis familiaris
  misc_feature (8)..(8): n comprises a, c, g, or t, or includes no nucleotide
  misc_feature (40)..(41): n comprises a, c, g, or t, or includes no nucleotide
  misc_feature (43)..(43): n comprises a, c, g, or t, or includes no nucleotide
  misc_feature (50)..(50): n comprises a, c, g, or t, or includes no nucleotide
  misc_feature (70)..(70): n comprises a, c, g, or t, or includes no nucleotide
  misc_feature (76)..(76): n comprises a, c, g, or t, or includes no nucleotide
  misc_feature (85)..(85): n comprises a, c, g, or t, or includes no nucleotide
  misc_feature (88)..(88): n comprises a, c, g, or t, or includes no nucleotide
  misc_feature (102)..(106): n comprises a, c, g, or t, or includes no nucleotide
  misc_feature (117)..(118): n comprises a, c, g, or t, or includes no nucleotide
  misc_feature (124)..(125): n comprises a, c, g, or t, or includes no nucleotide
  misc_feature (132)..(135): n comprises a, c, g, or t, or includes no nucleotide
  misc_feature (153)..(154): n comprises a, c, g, or t, or includes no nucleotide
  misc_feature (160)..(160): n comprises a, c, g, or t, or includes no nucleotide
  misc_feature (162)..(162): n comprises a, c, g, or t, or includes no nucleotide
  misc_feature (177)..(177): n comprises a, c, g, or t, or includes no nucleotide
  misc_feature (180)..(180): n comprises a, c, g, or t, or includes no nucleotide
  misc_feature (183)..(185): n comprises a, c, g, or t, or includes no nucleotide
  misc_feature (212)..(212): n comprises a, c, g, or t, or includes no nucleotide
  misc_feature (219)..(222): n comprises a, c, g, or t, or includes no nucleotide
  misc_feature (237)..(237): n comprises a, c, g, or t, or includes no nucleotide
  misc_feature (242)..(243): n comprises a, c, g, or t, or includes no nucleotide
  misc_feature (248)..(248): n comprises a, c, g, or t, or includes no nucleotide
  misc_feature (265)..(265): n comprises a, c, g, or t, or includes no nucleotide
  misc_feature (270)..(270): n comprises a, c, g, or t, or includes no nucleotide
  misc_feature (273)..(273): n comprises a, c, g, or t, or includes no nucleotide
  misc_feature (276)..(277): n comprises a, c, g, or t, or includes no nucleotide
  misc_feature (281)..(281): n comprises a, c, g, or t, or includes no nucleotide
  misc_feature (298)..(300): n comprises a, c, g, or t, or includes no nucleotide
  misc_feature (312)..(314): n comprises a, c, g, or t, or includes no nucleotide
tcgggggngaaaaaaccttataagggaaaaaggtggtttnnangggtggngggggtccggagtgtggatnttgggntgaggaatnggnagagttggtaagtnnnnntttttgtggtnntatttnnagggtgnnnnaggtttggtggttggagnntagagntnattttgttgtgtttnagnagnnntggtttgtggggggttatagataggtnttatatnnnnatatatgggatttantcaannagganatgaaaatagtgggttntgttnttnatnnaagnatttatataggatgtgnnnaagttgggactnnntgaggactctggatgcccatttattctctggcaggcaggctagtggtattatgtatatgagcgggatgtgtgtgtcattgttatttgaattgtgctgctgtttagggggggaataacagtaaataatac

SEQ ID NO: 4412 - DNA, 423 bp, Canis familiaris
gcacgaggttttgttttacatttgtagtgtgagtcactgtgtcagacatctccagcactaatgtttccatcctagtattcgtgtacgctgctataacttccccactacaaacattccagttttggcattatgaagatgtagtttgtgaacctgaagtaattatgataagaaaaagaaaacatctctgctctagcctacagcccagttgaaagaactctgaaacgtgatatatcttcacctcagtctgagaagaatctatagtcagcactgaaatcctggcatcataaacacgcaagatactcaccacctcaagacaaaggactgttgtcagaagtcagctgcttccattcaaatgctgccttaaactagagtgcctaaatctgttgattgccaacactaccactacagtatcccacaaagggc

SEQ ID NO: 4413 - DNA, 303 bp, Canis familiaris
gcacgagcaaatgacgaagtcacgaaaaatgaactaagaaagagactaactgacagattcacaaaggaaaatattcaactaaaggaggagatccaaaggctcgaagctgagttacaggaggccactagaaactcccagattaaagaggatattcctgaaacaaaggtgaagttcacatctttagagaaccctgagactgacagccagtttttaaacatctcctgttcatttcaagtgagctcgccaattttttatgagctacagaaagggcacgctcttatcacctttgaaagagaagaagtt

SEQ ID NO: 4414 - DNA, 380 bp, Canis familiaris
gcacgagcctcttcaagctcatctacaacgagtactgtgggcctggggccaagcccctcttcaggagtaaggaggatcccagtgtctgagcgcaccaacggtcccgctttcagccccgtctgcacaagacacccagcactgaaagtcctgctgcacgaacaagggatcctttgaaagcacccacccttttgtgccttgtcggggacaccagtgacgcagagcgcgtgtggatgtttaggagtcggcatcggggagcgggaggggagggccagtggactttttgtaaagctttcgactcaataaaatgaacctagatggaaaatacttgaaattgaactcactccttctgcttcccttcccttctttcttctgtcccagga

SEQ ID NO: 4415 - DNA, 343 bp, Canis familiaris
  misc_feature (3)..(3): n comprises a, c, g, or t, or includes no nucleotide
  misc_feature (20)..(20): n comprises a, c, g, or t, or includes no nucleotide
  misc_feature (24)..(24): n comprises a, c, g, or t, or includes no nucleotide
  misc_feature (34)..(34): n comprises a, c, g, or t, or includes no nucleotide
  misc_feature (50)..(52): n comprises a, c, g, or t, or includes no nucleotide
  misc_feature (54)..(54): n comprises a, c, g, or t, or includes no nucleotide
  misc_feature (76)..(76): n comprises a, c, g, or t, or includes no nucleotide
  misc_feature (84)..(84): n comprises a, c, g, or t, or includes no nucleotide
  misc_feature (91)..(93): n comprises a, c, g, or t, or includes no nucleotide
  misc_feature (111)..(111): n comprises a, c, g, or t, or includes no nucleotide
  misc_feature (140)..(140): n comprises a, c, g, or t, or includes no nucleotide
  misc_feature (144)..(144): n comprises a, c, g, or t, or includes no nucleotide
  misc_feature (152)..(153): n comprises a, c, g, or t, or includes no nucleotide
  misc_feature (157)..(157): n comprises a, c, g, or t, or includes no nucleotide
  misc_feature (163)..(163): n comprises a, c, g, or t, or includes no nucleotide
  misc_feature (173)..(173): n comprises a, c, g, or t, or includes no nucleotide
  misc_feature (186)..(186): n comprises a, c, g, or t, or includes no nucleotide
  misc_feature (199)..(199): n comprises a, c, g, or t, or includes no nucleotide
  misc_feature (213)..(213): n comprises a, c, g, or t, or includes no nucleotide
  misc_feature (216)..(217): n comprises a, c, g, or t, or includes no nucleotide
  misc_feature (219)..(220): n comprises a, c, g, or t, or includes no nucleotide
  misc_feature (228)..(228): n comprises a, c, g, or t, or includes no nucleotide
  misc_feature (231)..(232): n comprises a, c, g, or t, or includes no nucleotide
  misc_feature (237)..(237): n comprises a, c, g, or t, or includes no nucleotide
  misc_feature (240)..(241): n comprises a, c, g, or t, or includes no nucleotide
  misc_feature (252)..(252): n comprises a, c, g, or t, or includes no nucleotide
  misc_feature (295)..(295): n comprises a, c, g, or t, or includes no nucleotide
ttnaaaataagaagagggtnttanttggagaaantggtatggagaagttnnngnggtattataaaaaggatgggtntgggtttnaagatgnnnaaggagggtattgagggnatttatattgacaagaaatggccttttantggnaatgtgtnnattngactgnggattttgtntggtgtggtgatnaaaatgaagatgnagaggattattgtnatnngnngagattanttnnattanatnngaaagtacaanggttttgagaaacgccacaagaacatgtgggtgcacttgtctncttgcttcagggatgtccagatcggggacattgtcacagtgggtgagt

SEQ ID NO: 4416 - DNA, 263 bp, Canis familiaris
gcacgaggcaaaaaacgataagagtagtggtatttcaccggcggcccgcaaggccggcggaccccgccccgccccctcgcggggacggaggggcgccgggggcctcccacttattctacacctctcatgtctcttcacctcgtgccgaattcggcacgagctcagtccttcatgatgagttcatcgctcacagacttggactaatccccctgactagtgatgacattgtggacaagctgcagtattcccgggactgcacatgt

SEQ ID NO: 4417 - DNA, 345 bp, Canis familiaris
gcacgagaaagaaagaaagaaagaaagaagaaaagattccagcaactcccaaaagttaagaacagctgcttaagaacaaccaaccaacaataaataaaggaaagaggaaatagagggagagaaaaaagggaaaaagaggagctgaaggaagattgattttctgcttccaaacaggttacttctctgagttgaaactgactgaggtaccagcggattctacaagcacactaaaataccaatttacagcttagttcttagtctcacctcagatattttgggggtttccctccctatcttgaggtgtacaatcaccacactatagtaatacatgttaaaggaaatctt

SEQ ID NO: 4418 - DNA, 368 bp, Canis familiaris
  misc_feature (4)..(4): n comprises a, c, g, or t, or includes no nucleotide
  misc_feature (7)..(7): n comprises a, c, g, or t, or includes no nucleotide
  misc_feature (9)..(9): n comprises a, c, g, or t, or includes no nucleotide
  misc_feature (18)..(18): n comprises a, c, g, or t, or includes no nucleotide
  misc_feature (34)..(34): n comprises a, c, g, or t, or includes no nucleotide
  misc_feature (36)..(37): n comprises a, c, g, or t, or includes no nucleotide
  misc_feature (51)..(51): n comprises a, c, g, or t, or includes no nucleotide
  misc_feature (73)..(73): n comprises a, c, g, or t, or includes no nucleotide
  misc_feature (75)..(75): n comprises a, c, g, or t, or includes no nucleotide
  misc_feature (78)..(78): n comprises a, c, g, or t, or includes no nucleotide
  misc_feature (81)..(81): n comprises a, c, g, or t, or includes no nucleotide
  misc_feature (84)..(84): n comprises a, c, g, or t, or includes no nucleotide
  misc_feature (87)..(87): n comprises a, c, g, or t, or includes no nucleotide
  misc_feature (90)..(90): n comprises a, c, g, or t, or includes no nucleotide
  misc_feature (107)..(107): n comprises a, c, g, or t, or includes no nucleotide
  misc_feature (111)..(111): n comprises a, c, g, or t, or includes no nucleotide
  misc_feature (133)..(133): n comprises a, c, g, or t, or includes no nucleotide
  misc_feature (138)..(138): n comprises a, c, g, or t, or includes no nucleotide
  misc_feature (156)..(156): n comprises a, c, g, or t, or includes no nucleotide
attnggnangaggaaaanaggtgttgtgaaaatnanngttaaatttaaatnaaaatgggaaaggagaagattnanatnaanatngtngtnattggtcacgtagattngggnaagtttactagtactgggcatntgatntacaaatgtggtgggatngacaaaagaactatcgaaaaatttgagaaggaggctgctgagatgggaaaaggctccttcaagtatgcctgggtcttggataaactgaaagctgaacgtgaacgtggtatcaccattgatatctccctgtggaaattcgagaccagcaagtattacgtgaccatcattgatgccccaggacacagagactttatcaaaaacatgattacagg

SEQ ID NO: 4419 - DNA, 200 bp, Canis familiaris
  misc_feature (4)..(4): n comprises a, c, g, or t, or includes no nucleotide
  misc_feature (17)..(17): n comprises a, c, g, or t, or includes no nucleotide
  misc_feature (26)..(26): n comprises a, c, g, or t, or includes no nucleotide
  misc_feature (31)..(31): n comprises a, c, g, or t, or includes no nucleotide
  misc_feature (40)..(40): n comprises a, c, g, or t, or includes no nucleotide
  misc_feature (42)..(43): n comprises a, c, g, or t, or includes no nucleotide
  misc_feature (45)..(45): n comprises a, c, g, or t, or includes no nucleotide
  misc_feature (51)..(52): n comprises a, c, g, or t, or includes no nucleotide
  misc_feature (74)..(75): n comprises a, c, g, or t, or includes no nucleotide
  misc_feature (93)..(93): n comprises a, c, g, or t, or includes no nucleotide
  misc_feature (96)..(96): n comprises a, c, g, or t, or includes no nucleotide
  misc_feature (98)..(98): n comprises a, c, g, or t, or includes no nucleotide
  misc_feature (138)..(138): n comprises a, c, g, or t, or includes no nucleotide
  misc_feature (143)..(143): n comprises a, c, g, or t, or includes no nucleotide
  misc_feature (184)..(184): n comprises a, c, g, or t, or includes no nucleotide
gggngaaaaaaagctantaagggaanaaagntggattttnanngnggtggnngggggtgtacctttagtggatnntttgggttggaggaattnggnangaggtgtgtaagaatgttgtgttaagttaattagagtagnaatanatttgtatataatttaaataaaggttgtgagtattgtatgnatttatttttgttttt

SEQ ID NO: 4420 - DNA, 404 bp, Canis familiaris
  misc_feature (15)..(15): n comprises a, c, g, or t, or includes no nucleotide
  misc_feature (18)..(18): n comprises a, c, g, or t, or includes no nucleotide
  misc_feature (20)..(20): n comprises a, c, g, or t, or includes no nucleotide
  misc_feature (24)..(24): n comprises a, c, g, or t, or includes no nucleotide
  misc_feature (34)..(34): n comprises a, c, g, or t, or includes no nucleotide
  misc_feature (38)..(38): n comprises a, c, g, or t, or includes no nucleotide
  misc_feature (41)..(41): n comprises a, c, g, or t, or includes no nucleotide
  misc_feature (57)..(57): n comprises a, c, g, or t, or includes no nucleotide
  misc_feature (66)..(66): n comprises a, c, g, or t, or includes no nucleotide
  misc_feature (71)..(71): n comprises a, c, g, or t, or includes no nucleotide
  misc_feature (75)..(75): n comprises a, c, g, or t, or includes no nucleotide
  misc_feature (79)..(79): n comprises a, c, g, or t, or includes no nucleotide
  misc_feature (114)..(114): n comprises a, c, g, or t, or includes no nucleotide
  misc_feature (122)..(122): n comprises a, c, g, or t, or includes no nucleotide
  misc_feature (141)..(141): n comprises a, c, g, or t, or includes no nucleotide
  misc_feature (144)..(146): n comprises a, c, g, or t, or includes no nucleotide
  misc_feature (159)..(159): n comprises a, c, g, or t, or includes no nucleotide
  misc_feature (170)..(170): n comprises a, c, g, or t, or includes no nucleotide
  misc_feature (173)..(174): n comprises a, c, g, or t, or includes no nucleotide
  misc_feature (182)..(182): n comprises a, c, g, or t, or includes no nucleotide
  misc_feature (186)..(187): n comprises a, c, g, or t, or includes no nucleotide
  misc_feature (191)..(191): n comprises a, c, g, or t, or includes no nucleotide
  misc_feature (195)..(197): n comprises a, c, g, or t, or includes no nucleotide
  misc_feature (228)..(228): n comprises a, c, g, or t, or includes no nucleotide
  misc_feature (283)..(283): n comprises a, c, g, or t, or includes no nucleotide
  misc_feature (299)..(300): n comprises a, c, g, or t, or includes no nucleotide
  misc_feature (351)..(351): n comprises a, c, g, or t, or includes no nucleotide
  misc_feature (361)..(361): n comprises a, c, g, or t, or includes no nucleotide
gggttggaggaattnggnangagngggagtgatnatangtnggttggtggaaagaantggattttngtttnaggngaanattagaaaaggtaagtttggtgtataatatggatnagaagatntgattttgattggggaggnatnnntgattacagaatntgagttgtgtnttnnattttatntttnnagantatnnnaggagatttgggaggtgttatttgggaaaanattaggagtacttggaagggaaagaaggaagaggattattggttggaataaaaanagggttgaatgagttnnagaaaggagggtttttaaatttgtggagaataatttggagaagaagagaantttaaaaaanaaattagaagtaatatggagagaagtaagatgagagggggctt

SEQ ID NO: 4421 - DNA, 375 bp, Canis familiaris
gcacgaggcccctcgttgccccggcaggactgtcttggtgcggaagttgtgcagcgttgcagtcggggggcctcccgtggggtcacatttgcagaagtccacgtgggatcgatgaaaggaggagtgggcagcgcctgatgagggcttgggcggcctgcggacacaccgactccacaagccagtatctgtgtgtcgtttcagacatgcagggagcccgtgctgccccgagcacagctgtgatgagcagcatttgcaaggccctttggcatctccgtacgtgaatgtgacagggcccctgccacccgggttcccggggagctccgtgagctcgaggctgggcctgggcgcttggcgctagctggggaactgggcagg

SEQ ID NO: 4422 - DNA, 301 bp, Canis familiaris
gcacgagatgaccagtatccagagctagcaggtgagtgtcacagttgagccccagggggaaggtgcaccttctccctagcacccataggtaaggcttcctgggccttccagaggagcttcactgcctgtcaggcctacaccccacgagtgatggtcggaggaggcgcacgagcacacggcgtggccatcaggagcaaggccccctttcaagatcacgcaggatgggctccctgccatccaggacacgctagtgggggccaggagccagccaggtaaggaggagacataggcacctgggggg

SEQ ID NO: 4423 - DNA, 395 bp, Canis familiaris
gcacgagggaacagtttgcagtgttccttgtaagatatcttgcatgcatctgtctggtcacacccacacgtagattgtccatttctgagaacttaacccagagatgtaagggaggagaaactgctttactgtagttcttagaacacgcactgcttgccctgggagcccctctgtttcaggttcaccacaaattttttttttttttttgtaaagagccagagagtaaatatttgaggctttctgggccatgtggtctctgtcgtagttaatacataaacagatgagcatgggtgtgttctaataaaactttttgtggatactgaaatttgataattttcacatatcatggatttttttcccccctatttaaaaatgtgctaactattcttagctgg

SEQ ID NO: 4424 - DNA, 264 bp, Canis familiaris
gcacgaggggcagaggaggcggcgcgccggtcctgtcctcgccatgaggccgcagcaggcgccggtgtccgggaaggtgttcattcagcgagactacagcagcggcacacggtgccagttccagaccaagttccccgcggagctggagaaccggattgataggcagcagtttgaagaaacagttcgaactctaaataacctttatgcagaagcagagaagcttggaggccagtcgtatcttgaaggctgtttggcttgtttaac

SEQ ID NO: 4425 - DNA, 395 bp, Canis familiaris
  misc_feature (15)..(15): n comprises a, c, g, or t, or includes no nucleotide
  misc_feature (17)..(17): n comprises a, c, g, or t, or includes no nucleotide
  misc_feature (23)..(23): n comprises a, c, g, or t, or includes no nucleotide
  misc_feature (27)..(27): n comprises a, c, g, or t, or includes no nucleotide
  misc_feature (37)..(37): n comprises a, c, g, or t, or includes no nucleotide
  misc_feature (42)..(42): n comprises a, c, g, or t, or includes no nucleotide
  misc_feature (53)..(54): n comprises a, c, g, or t, or includes no nucleotide
  misc_feature (56)..(56): n comprises a, c, g, or t, or includes no nucleotide
  misc_feature (62)..(62): n comprises a, c, g, or t, or includes no nucleotide
  misc_feature (85)..(86): n comprises a, c, g, or t, or includes no nucleotide
  misc_feature (104)..(104): n comprises a, c, g, or t, or includes no nucleotide
  misc_feature (107)..(107): n comprises a, c, g, or t, or includes no nucleotide
  misc_feature (135)..(136): n comprises a, c, g, or t, or includes no nucleotide
  misc_feature (169)..(169): n comprises a, c, g, or t, or includes no nucleotide
  misc_feature (172)..(173): n comprises a, c, g, or t, or includes no nucleotide
  misc_feature (187)..(187): n comprises a, c, g, or t, or includes no nucleotide
  misc_feature (194)..(194): n comprises a, c, g, or t, or includes no nucleotide
  misc_feature (213)..(213): n comprises a, c, g, or t, or includes no nucleotide
  misc_feature (242)..(242): n comprises a, c, g, or t, or includes no nucleotide
  misc_feature (244)..(244): n comprises a, c, g, or t, or includes no nucleotide
  misc_feature (262)..(263): n comprises a, c, g, or t, or includes no nucleotide
  misc_feature (267)..(267): n comprises a, c, g, or t, or includes no nucleotide
  misc_feature (273)..(273): n comprises a, c, g, or t, or includes no nucleotide
  misc_feature (339)..(339): n comprises a, c, g, or t, or includes no nucleotide
  misc_feature (367)..(367): n comprises a, c, g, or t, or includes no nucleotide
  misc_feature (370)..(370): n comprises a, c, g, or t, or includes no nucleotide
aagctacctgggggngnaaaaanactnataagggaanaaagntggttttttanngnggtggnggggggtgtaccagtagtggatnntttgggttggaggaattnggnatgaggagtaatggtgacaattagaagnnaaatatgaattagttagatgtttgtgggttganatnnattatgggtatgantggtatnattttcataggatgaattnattacaatgttgaagtgtttagattggtntnattagaagaatttaattnntgtntgttgnatagtaggtagttgaataggatatttaaatttattttttaaattagttgtttatgtttagtgatantttatgttttggttggtttggttttttntgnttttaaataatttttaagtgtgggt

SEQ ID NO: 4426 - DNA, 397 bp, Canis familiaris
tttttaaatatttgatcattttctattgtccaaccatttcagcacctccaaaggtccctaggacactttgcctctctttgctcccctgccccccaccggtcccccccccagctccaggggggcccccctcgggccaggggcggataagcctgcattaatgaaaccttttctccattcacttcctatttacaaattaggaaagcaacctttttggtttatatattttttttaatacctcagtgctgcaagtatcaccagagaggctatggaagaatttttttttaatttattgtagatgtaaacagaattttaaaaataaaaaagtataaacatcgctgcactgtgactggtgggaaaaacacagtttcctgtttgcacatgtttaacatttggctgt

SEQ ID NO: 4427 - DNA, 366 bp, Canis familiaris
  misc_feature (3)..(4): n comprises a, c, g, or t, or includes no nucleotide
  misc_feature (10)..(10): n comprises a, c, g, or t, or includes no nucleotide
  misc_feature (24)..(24): n comprises a, c, g, or t, or includes no nucleotide
  misc_feature (27)..(27): n comprises a, c, g, or t, or includes no nucleotide
  misc_feature (49)..(49): n comprises a, c, g, or t, or includes no nucleotide
  misc_feature (58)..(58): n comprises a, c, g, or t, or includes no nucleotide
  misc_feature (76)..(76): n comprises a, c, g, or t, or includes no nucleotide
  misc_feature (108)..(108): n comprises a, c, g, or t, or includes no nucleotide
  misc_feature (113)..(113): n comprises a, c, g, or t, or includes no nucleotide
  misc_feature (124)..(126): n comprises a, c, g, or t, or includes no nucleotide
  misc_feature (136)..(136): n comprises a, c, g, or t, or includes no nucleotide
  misc_feature (145)..(145): n comprises a, c, g, or t, or includes no nucleotide
  misc_feature (149)..(149): n comprises a, c, g, or t, or includes no nucleotide
  misc_feature (157)..(157): n comprises a, c, g, or t, or includes no nucleotide
  misc_feature (160)..(160): n comprises a, c, g, or t, or includes no nucleotide
  misc_feature (163)..(164): n comprises a, c, g, or t, or includes no nucleotide
  misc_feature (172)..(172): n comprises a, c, g, or t, or includes no nucleotide
  misc_feature (175)..(175): n comprises a, c, g, or t, or includes no nucleotide
  misc_feature (187)..(187): n comprises a, c, g, or t, or includes no nucleotide
  misc_feature (196)..(197): n comprises a, c, g, or t, or includes no nucleotide
  misc_feature (202)..(203): n comprises a, c, g, or t, or includes no nucleotide
  misc_feature (207)..(208): n comprises a, c, g, or t, or includes no nucleotide
  misc_feature (217)..(217): n comprises a, c, g, or t, or includes no nucleotide
  misc_feature (221)..(221): n comprises a, c, g, or t, or includes no nucleotide
  misc_feature (228)..(229): n comprises a, c, g, or t, or includes no nucleotide
  misc_feature (244)..(244): n comprises a, c, g, or t, or includes no nucleotide
  misc_feature (258)..(258): n comprises a, c, g, or t, or includes no nucleotide
  misc_feature (270)..(270): n comprises a, c, g, or t, or includes no nucleotide
  misc_feature (284)..(284): n comprises a, c, g, or t, or includes no nucleotide
  misc_feature (292)..(292): n comprises a, c, g, or t, or includes no nucleotide
  misc_feature (294)..(294): n comprises a, c, g, or t, or includes no nucleotide
ggnngggggngggtttgaagatgngtngtttggttttggagattggggnggagttatntgggttggttttttgggnggaaagggtttgttaggggggggtgttagaangaagnttgtgggattnnngatggtgtgnatgattttnaagnggagccgnagngannggttttanagnatttggtgttgnggttgttgnnatgtnngganngggacgatnattntgggganntggtacatggtggtnaacctgttgatggnaattttgttganggtggaagtaattnatccaaantnaatggcagcctgtcaacattcaatatgaagtcattggcaattactattcatctgagagaatggctgataatg

SEQ ID NO: 4428 - DNA, 356 bp, Canis familiaris
  misc_feature (4)..(4): n comprises a, c, g, or t, or includes no nucleotide
  misc_feature (9)..(11): n comprises a, c, g, or t, or includes no nucleotide
  misc_feature (13)..(13): n comprises a, c, g, or t, or includes no nucleotide
  misc_feature (34)..(34): n comprises a, c, g, or t, or includes no nucleotide
  misc_feature (37)..(37): n comprises a, c, g, or t, or includes no nucleotide
  misc_feature (43)..(43): n comprises a, c, g, or t, or includes no nucleotide
  misc_feature (50)..(50): n comprises a, c, g, or t, or includes no nucleotide
  misc_feature (52)..(53): n comprises a, c, g, or t, or includes no nucleotide
  misc_feature (58)..(58): n comprises a, c, g, or t, or includes no nucleotide
  misc_feature (64)..(64): n comprises a, c, g, or t, or includes no nucleotide
  misc_feature (87)..(88): n comprises a, c, g, or t, or includes no nucleotide
  misc_feature (106)..(106): n comprises a, c, g, or t, or includes no nucleotide
  misc_feature (109)..(109): n comprises a, c, g, or t, or includes no nucleotide
ctcnggggnnngnaaaaaacccctcctatagggnaanaaaagntgttttntnnaccgnggtggngggcggtccagtactagtggatnncttgggttggaggaattnggnacgagggggggtggtcatggagggtcagcgctggctgccgctggaggccaatcccgaggtcaccaaccagtttctcaaacaattaggtcttcatcctaactggcagtttgtcggtggtgtggaatggatcctgaactccttagcatggtaccaagaccagtgtgtgcagtgttacttctcttccctattacagaaaagtatgaagtattcagaacagaggaggaggaaaaaataaaatctcagggac

SEQ ID NO: 4429 - DNA, 104 bp, Canis familiaris
gcacgaggagggccagagaggaaaccgaaccgagtagggacgggcagagagatggatccaagaatatgtgtgtgtgtgtgtgtgtgtgtgtgtgtgtgtgtgtg

SEQ ID NO: 4430 - DNA, 341 bp, Canis familiaris
gcacgaggacctggaagaactggaggcgaagcgggcggcgctgaacgcccgggtggaggaggtgggaccttggagaggggtgggcgggcgtgcgagggtaaaccgagtctcaccaccctctcttaccccagggctggctctcgctctccaaagctcgctatgccatgggcgccaagtctgtaggtcctctgcagtatgcctcccacatggagccacaggtctgcgtctacaccagcgaggcccaggacggactccagaagttctgggtgatgagagccagcgcccagactccagaggagctgggaccccgtgaggcagctttgcgcaggcgcaagggtctc

SEQ ID NO: 4431 - DNA, 424 bp, Canis familiaris
gcacgaggtcattgtaagaaataaaaacacaagaattaaattactgcccagagtataatctctagagatatttttaaagctcatgagaactctatttgtatcagaactacattattacaaaggaaaatgaacacttgacaaaaagttacattaatttaaatggagcctttcattatttttagatagcagtctttcttcatttatatagcgtgatgtaactgccaggttacttttgtgtttgccgggtactcccagtaagaattgcgactcaagggagtaatgattcaaaaggtctcttgtgaccagcgacaccaggatagacatagtctttgatgagaaggaagccccatgtgcttgccttagaggattgtagagacaatcacatgtatgaaaacctgcaaaggtaggattaatttgtttttct

SEQ ID NO: 4432 - DNA, 246 bp, Canis familiaris
gcacgaggcctgcgaaggtgtcatggctgctgccgttgagcttagtctctcgagcagtggtgacaggagtccggaacggagctgcagccccaatctctcccaagagcttaacctcagagatgatgtggtgaaaattacaatcgattggaacaagctccagagcctctcagcattccagcccgcattgctctttagtgcacttgagcaacatgttttatatttacagccttttttagcaaaacttca

SEQ ID NO: 4433 - DNA, 303 bp, Canis familiaris
  misc_feature (35)..(35): n comprises a, c, g, or t, or includes no nucleotide
tccaccgcggcggcggccggtcccgaactagtggntcccccgggctgccggacttcggcacgagcccattcagggcagggggtggtgtttatctctagatgactgtccccgaggagatgccattttgccctgcctcgttagcgggaggttgagaagagcccactcactcttatcggcccagcgttcagctgatcctcctccttagatctgttcctcacgagcttgtgacgccggtggggagagcgagaccatgggggtatgtttgggatccacagcactggggggtgggcctcaggactttca

SEQ ID NO: 4434 - DNA, 414 bp, Canis familiaris
gcacgaggcacagtctgcctccaccgagcccctgtctataacctggagtgtgttaccttcagaccttttcacttgtactttatgcaaaatggttcatgtgagggctacaagctggagggtggtgtgggccttgggccacagggaggtgcctgtggagtacggggagttcatgcaccccttttttccccagaggggctggactcaggttagtttggggtgggggctcctgcactttgccacaggcatggggagggttctctccccaccccctctgccctcccaacttgggttgtactctctaagaaggtgatttcccctacccttgtccccgtccccagaacaaaacatgttgatcatgtgcaatatttcttactgtgccgagaagccccaatgaccgaaattaaagctgcttaa

SEQ ID NO: 4435 - DNA, 372 bp, Canis familiaris
gcacgaggcgaggcggaggcggcgccggctcccgcgccatggggcggctgctggccgtgggcttgctggggctagcgctggcgctcctgggcgagaggctcctggcgctcaggaatgggcttaaagcctccagagaagtagaatctgtagaccttccaaactgccacctcattaaaggaatcgaagccggtgcggctgatattgatatacttcccaatggcctggctttctttagtgtgggtttaaaatgtccaggactccacagcttttccccagataagcctggagggatatcaatgacggatctaaaaaaggaaaacccgagggcactggaattaagaatcagccgtgggttcaatttggcttcgttca

SEQ ID NO: 4436 - DNA, 262 bp, Canis familiaris
gcacgagccgccgccgccgccgctggcggccctggggtgcccctgtccccggacgaattgcttccgaaaggcgatgccgagaagaccgaataggagctggaggaggaagacgactaggagctagatgacaccctgccggagagactgtggggtctgacggagatgttcccagagagggtccggtccgcggctggagccacttttgatctctctctctttgcggctcaaaaaaatgtacaggctttccagggcagccttgtgg

SEQ ID NO: 4437 - DNA, 415 bp, Canis familiaris
gcacgagcgcacctgcgcccggtccgcacctgcgccgcgcccgccatggctggcaaagcgcacaggctaagtgctgaggagagggaccagctgctgccaaacctgagggctgtggggtggaacgaggtggagggccgagacgccatcttcaagcagctccatttcaaagactccaatcgggcttttggcttcatgacgagggtggccctgcaggctgagaaactggaccaccatcctgaatggtttaacgcgtacaacaaggtccacatcaccctgagcacccacgagtgtgccggcctttcggaacgggacataaacctggccagcttcatcgaacaagtagcggtgtccatgacctaggcccctgccttcctctctgaacgcttcaggggaagggggtgactgaactgggaac

SEQ ID NO: 4438 - DNA, 367 bp, Canis familiaris
gcccgaggttctccactaatcacaaggatattggtgctttatacttactattcggagcatgagccggtctagtaggcactgccttgagcctcctcatccgagccgaactaggtcagcccggtgctttactaggcgacgatcaaatttataatgccatcgtaaccgcccatgctttcgcactactcctcttcatagccatgcccatcataattgcgggctttggaaactgactactgccgctaataattggtgctccggacatggcattcccccgcctaaataacatgagcttctgactccttcctccatcctttcttctactattagcatcttctatggtagaagccggtgcaggaacgggatgaac

SEQ ID NO: 4439 - DNA, 419 bp, Canis familiaris
  misc_feature (334)..(334): n comprises a, c, g, or t, or includes no nucleotide
gcacgaggcggactgcagcaccccaggttagtgtgatcttaactcaagcaaaggtgggatatcatggcttccatctggggtggacaccgagggacaatgcacgattacccgggcttcagcccatcagtggatgctgaagccattcgcaaagcaatcagaggaattggcaccgaacagaaaacgctcatcagcattctgactgaaaggacgaatgcacagcgccagctgattgttcgggaatatcaagcagcatatgggaaggaactgaaagatgatttgaagggtgatctctctggccactttaagcaacttatggtggcccttgtgactcctncagctgtgtttgatgcaaaacagctgaacaaatccatgaagggagttggaaccagtgaacaggcactgattgaagtcttaaccac

SEQ ID NO: 4440 - DNA, 245 bp, Canis familiaris
gcacgaggccaactcccggagggacggcaggccgcgagagcggcgcccgggtctggcccgagcctgagcccgccggacgggaggcggcccatccgcgggctcggcctcggccctagtggcggcagcatggccggccggaccgtgcgggccgcgacccggagccgggccaaagatgacatcacgaaggtgatggcgaccatcgcgacggtccggagatggcacaagcgctgcgtgactgtgggcga

SEQ ID NO: 4441 - DNA, 391 bp, Canis familiaris
gcacgagctccagcgatgatgtgattgaactaaccccatcaaatttcaaccgggaagttattcaaagtgataatttgtggctggtagaattctatgctccatggtgtggccactgccagaggctgacaccagaatggaagaaggtagcaactgcattaaaagatgttgtcaaagttggtgcagtggacgcagataaacatcagtctctgggaggtcaatatggtgttcagggatttcctaccattaagatttttggatccaacaaaaacagaccagaagattatcaggggagcagaactggcgaagccattgtggatgctgctcttggtgctctgcgccagcttgtgaaggaccgccttgggggaaggggtggcggatacagttctggaaa

SEQ ID NO: 4442 - DNA, 176 bp, Canis familiaris
ctgcaggaattcggcacgaggttttttttttttttttttgccccttttaaatacagttttatttaagacattgcattttccacttaacaatacagtgcttataaattgcaatgtttatttcctttccctgtgcgcatattccatattcaagtctcaagactgcccagtttttttac

SEQ ID NO: 4443 - DNA, 373 bp, Canis familiaris
taaaaataaaaacaaaacgatgaacaagtgggtcttaaaaaacataaacagaatcttatacccaactattagaaaataaacattctcctcaagcataaatgagacatacagaaaactaatacatattaggacataatgaaaatatcaccaaatttcaaagagtatgtatcatgttgttcccaggcactgactatatataattaacttaaaaaaaaaaaaaaaaaaactactactatggggtgcctgggtggctcatctggtcaagcatctgcctatccactcaggtcatgatcccggggtcctgagatggatccttgaattgggttccctgctcatcagagagtctgcttctctgtttccctctgtcccttcc

SEQ ID NO: 4444 - DNA, 299 bp, Canis familiaris
gcacgaggccccccggagaagatggccgccccagcggtgtccgggctgtcccggcaggtgcggtgctttagcacatctgtggtcaggccgttttccaagctcgtgaggccacctgttcagatatatggtatcgaaggtcgctatgccactgccctttattctgctgcatcgaaacatactatactggaacaagttgaaaaggaattgttgagagtggcacaactcttgcaggaacctaaaatggctgcttccattatgaatccctacataacgcgttccgtgaaagtcaaaagcctaaa

SEQ ID NO: 4445 - DNA, 245 bp, Canis familiaris
gcacgaggctgccttgaggaggatgaggggagccgtgcgagcgaaactgcggccctcgccgggcctccaggcgtccggggtgctggcgcggccgctggtcctggcgctcctgctcgcgtgcgccaccacgtccagggctcttccacaaaccaatttgtcgagccacactgtactccagccagatgtttctgctccaagtacgagtgctgtaacacatgaaaaccaaaccaaactttctgtcttcc

SEQ ID NO: 4446 - DNA, 428 bp, Canis familiaris
ttcggcacgaggaactagtctcgagtttttttttttttttttttaacctaaaagatacatgaatacttgcacatgtagcatgaggttcatctgcattttaggaaaaaaaataggtttatatttaggtatccttaacaaagatcagcttccttaattatttgaacatagcaacaagggcagggactctgaatagggcaaattgagagcttcagaaggagtgggagagattgtttagagactgaggatgttaaaggatatatatatatatagcaacagagtaaagggacattttcccagaatgttggcactgttttcttttcctgtctcaccacccaacctgctacccgagctcttctgcctttcactggtactagacttaagtaggaaatagcatctgtgttggtggttaaatgattcagctagcagga

SEQ ID NO: 4447 - DNA, 236 bp, Canis familiaris
gcacgagtgcaccctgtcctttctgttatccagcatggtgtgtctgcgttttcttggcggctcctggatgacagctctgctgctgatactgttggtgctgaaccctcccttcgcttgggcgcagggacaccccaccacatttcttggaggtggcaaagtccgagtgctatttcaccaacgggacggagcgggcgcggttcgtgccaagatacatccataaccgggaggagaacgtg

SEQ ID NO: 4448 - DNA, 368 bp, Canis familiaris
gcacgagctcaaactcctctcaaacacaaagcattcgcataaggcccagtcattgtcattggaagctgtggaacccttttaggatggttgccccagtagagttagctgacgagaagcatcttaatttaaatgcatgtcttcaatgctcataaaagtgttaaatggaattcgtgtgatgaatctgtgctggccatggacgaatatgaatgtcgtgtttgaattcttgatctctcacgagctagtgtcttacggtcttgatccctccggtgtgtaattccctttccaacacatttaccaaattgctcaagcctggctcttccaccgggctttgggcctgcatcttcttgcatctaatgaaaaacaaaaag

SEQ ID NO: 4449 - DNA, 420 bp, Canis familiaris
gcacgagggagtctaacacgtgcgcgagtcaggggctcgcacgaaagccgccgtggcgcaatgaaggtgaaggccggcgggcgcgcgcgcgcgccgctcgccggccgaggtgggatcccgaggcctctccagtccgccgagggcgcaccaccggcccgtctcgcccgccgcgccggggaggtggagcatgagcgcacgtgttaggacccgaaagatggtgaactatgcctgggcagggcgaagccagaggaaactctggtggaggtccgtagcggtcctgacgtgcaaatcggtcgtccgacctgggtataggggcgaaagactaatcgaaccatctagtagctggttccctccgaagtttccctcaggatagctggcgctctcgcacgcgaacccacgcagttttattcggtaaagcga

SEQ ID NO: 4450 - DNA, 420 bp, Canis familiaris
gcacgaggaaaccttgaggagatgactggagaagatgcaagaaaatgaagaagcaggctgccatgggaccaaccaactaaagagcccagagacagtttttgtggaactgagaactttgctgggatgcaagaccttcagtgccaaaagcaggaaaatcccagggaaaacaggagtagccaactcctccacttgtaccctaggttccatttttttctgactttcataaggatttgtaacccctgcggttattccagctttctgtggcagctttgacctctttctacgtcctcatcattcctcagcactcaaatctacgatttcctagctgaagaaaatcctctattggccctacctcaattttcatttttcttctttagagttaacacgctcccaaagagctgtactcattttgctgccttt

SEQ ID NO: 4451 - DNA, 416 bp, Canis familiaris
gcaccagatctttggtatctgcctggcccagaatcttgtgagtgacatcaaggcagtgaaggccaactggatcaaacatgatgatggctacaaactactcaaataaacaaaaccttgaaaaccactggcttacgcccaccatctcagaggttctatcagctgcggggcctcagcattgctgtccatctgaggccccagcctggacccaccctgccaacatgttttcttggcctggatagtgtatacatttgagccaacctttaaaacttggtatatttcacgtagaagtccagatccagatccccagcatcttgtgaagaatggccatgtggccacaggggctgttcagtgtcatcatctcctgggacatgtgcttcccgttctctgagaacctggcccgttctgctcacctaagt

SEQ ID NO: 4452 - DNA, 180 bp, Canis familiaris
gcacgagcttaatcccaaccatactacatcaactcctaattataccccctgggtcattctatttaagtatagaagcaataatgctagtatgagtaacaagaaccattttctccccgcgtaagctcatatcaggaacggatagaccactgatagttaacacttctgataatatcaacccaa

SEQ ID NO: 4453 - DNA, 400 bp, Canis familiaris
gcacgagctgacccagacatcctgaaaacctgtgtaccagacctgactgacaaacggctggaagtagttgggctggagggtgcaattgagatgggccagatatataccaagctcaagaatgctggacgtcggctggccaagtgctctgaaatcaccttccacaccaccacccgagactccttaaccgaaatcaacctatcagactgcaataaggttactgaccagtgcctgtccttcttcaaacgctgtggaaatatctgtcatattgatctgaggtaatgcaagcaagttaccaaggaaggctgtgagcagttcatagctgaaatgtctgtgagcgtccagtttgggcaagtggaagaaaaactcctgcagaagctgagttagtccaaggacaagtatg

SEQ ID NO: 4454 - DNA, 385 bp, Canis familiaris
gcacgagccgccgccgccgccgccgcctcgtccgcctcgctcgccgggccgcggccgcccgaggcccgaggggtcgcagtgctgcgcccatttcacagatgagaccgaaaccgtccggacgggagatgagtgcctagcccaaaccccggcagccagggcagccaggaagcggctctgagggactttgaacatgtcggggatcgctctcagcagactcgcccaggagaggaaagcctggagaaaggaccacccgtttggctttgtggctgtcccgacaaagaatcccgacggcacgatgaacctcatgaactgggagtgtgccattccagggaagaaagggactccctgggaaggaggcttgtttaaactacggatgcttttcaaa

SEQ ID NO: 4455 - DNA, 421 bp, Canis familiaris
gcacgagctgacacatgtcaaaaccggggggaagatttctctgcggaaagcacggtaccacaccttaaccaaaatctgtgcggtgcaggagatcatcgaagactgtgtgaaaaagcaggcttctctgccactttccgaggacgcgcacccttcagtggccaagatcaactcggtgacgtgtgaggtgaacaaggccagaggcactctgatcgcacttctgatgggggtgaacaataatgagacttgcaggcacttatcttgtgtgctgtcggggctgattgcagatctggatgctctagacgtgtgcgggcgaacggaaatcagaaattatcggcgcgaggtagtggaagatatcaaccaattactgaaatatttggatttggaagaggaagcagatactacacatgcatttgacctggga

SEQ ID NO: 4456 - DNA, 235 bp, Canis familiaris
ttcagcccttctttgccctgatacaccaggctcaacaggccatggctgttaacctgcatagaattccttaccacttcccaattgaattcccagaagatgtaaccgcaccgcgtgcaaggttttcgcggcacaactccacagggtgcctgaaaatgaaggacccgtgtgaaaagtgccaggagatcttgccagtggattgttcttccaacaaccctgcgcaggtccagctgcgaca

SEQ ID NO: 4457 - DNA, 413 bp, Canis familiaris
caagggcgcgtggtccaatgtcctaaggggcatggggggcgccttcgtgctggttctgtacgacgagctgaagaaagtcatctagacgttcctcctccagacacgggggccaagggaatcacgtagaatccttttaactgttacggaccattgatcttcgagaaattccagtgtccttgtcccggccagatcacgtagacagggctggggaaggttccaaagggggctcattgtgatcgatcatcggcaccaggttccatgttttgattccggggggagggcaatcatgacgtcttcgtgggtccacgggctggcagctccgccgctcagaccatagagtccaggtgcttgtgggacccgggttgtgtttaagtatttatttaaaaaaaaaaaaaaaaaactcgagctcgtgc

SEQ ID NO: 4458 - DNA, 305 bp, Canis familiaris
  misc_feature (14)..(14): n comprises a, c, g, or t, or includes no nucleotide
  misc_feature (18)..(18): n comprises a, c, g, or t, or includes no nucleotide
  misc_feature (32)..(32): n comprises a, c, g, or t, or includes no nucleotide
  misc_feature (44)..(44): n comprises a, c, g, or t, or includes no nucleotide
  misc_feature (58)..(58): n comprises a, c, g, or t, or includes no nucleotide
  misc_feature (95)..(96): n comprises a, c, g, or t, or includes no nucleotide
  misc_feature (119)..(119): n comprises a, c, g, or t, or includes no nucleotide
  misc_feature (124)..(124): n comprises a, c, g, or t, or includes no nucleotide
  misc_feature (155)..(155): n comprises a, c, g, or t, or includes no nucleotide
  misc_feature (162)..(162): n comprises a, c, g, or t, or includes no nucleotide
aatttaagtattanaganatataaaataaaanatttagttaaanaataaaagtatagngagatagaaattttaattggagtgttattgatagtanngtaagggattgtgtggaggaatnttaanagtattaaagaggaaagatttatttttttangttttgnataatgaactagccagaaacaacttaacacagagaactcaagctaagcctccccgcaaccagacgagctacccatgaaccctgtaaaaggatcaactcatctatgtcgcacaatactgcgaacatttgtgggtcgaggtgaaa

SEQ ID NO: 4459 - DNA, 153 bp, Canis familiaris
ggctgcaggacttcggcacgagccgcagcgagcgaacgagcgccgcggcgtggggaaactggcagacagtttttcacttaatgatgctttatctgggtctgtttttttttttccctcaaggatggcctgttgcgtggggaaaccagcctgctg

SEQ ID NO: 4460 - DNA, 335 bp, Canis familiaris
gcacgagctcacgcttaccacatagtcaacccaagcccatgaccgttcgcaggggccctttctgccctccttataacatcgggtcttattttttgatttcactataactcaatagccgtacttacattaggattcacaaccaacctgttaaccatataccagcgatgacgagacgcgccccgcgaaggcacattccaaggacatcatacccctattgtacaaaacggactacgatacggaatagttctttttatcgcatcagaagcatttttctttgcaggcttcttctgagccttttaccactccagcctagcccctacttctgaacttggggg

SEQ ID NO: 4461 - DNA, 382 bp, Canis familiaris
gcacgagctgccacccctgaagtgctgaggtatatggaggtgtttactttgtgctgacagatggccacactctttagagaactgctttctcacattattctagaactggtagctcagtcatttcacatactagtgatgtattcagatttcattacaggcagcagcaggcgtccagatctttaattttgaggatttcccctcatgtatgtggcagtaactgctataagagccactatatgtattgtgtctccattgtctttgttccaaaattcacctcccttttatgtgaatgtactctccataaaattccagtatttaaaaagcagtttactgctctgtactttctattgtatcacaatcaggtaaaagtcactttaaactg

SEQ ID NO: 4462 - DNA, 375 bp, Canis familiaris
  misc_feature (2)..(2): n comprises a, c, g, or t, or includes no nucleotide
gnacgagacctgatttattataatcttttcaatatttctcaccctcttcatcctatttcaactaaaaatttcaaatcactactacccagttttcccgataaccaaatctgctcaaattgcgggtcaacataatccttgagaaaacaaatgaacgaaaatctattcgcttctttcgctgccccctcaataataggcctccctattgtggtactgctcgtcatattccctcccattctattcccaacacccagccgcctaatcaataatcggctcatctccattcagcactgactaattcaactaacatcaaaacaaatactagcaattcatccccaaaagggacgaacctgagctctcatacttatatcactaatt

SEQ ID NO: 4463 - DNA, 202 bp, Canis familiaris
  misc_feature (168)..(168): n comprises a, c, g, or t, or includes no nucleotide
  misc_feature (172)..(172): n comprises a, c, g, or t, or includes no nucleotide
  misc_feature (174)..(174): n comprises a, c, g, or t, or includes no nucleotide
  misc_feature (177)..(177): n comprises a, c, g, or t, or includes no nucleotide
gcacgagccgcaggatgccttatgcgtcatctagcccccacctgggtccccacttttatcttagttaggatgtgttttttaagatactgttagctgtgtgccccttcctcctgcgtccctcccctcctttcgccacttatgtaaagctttcagtccccgtccctgtgnaggngnatncccagcccacgggcgtcccccgcag

SEQ ID NO: 4464 - DNA, 239 bp, Canis familiaris
  misc_feature (2)..(3): n comprises a, c, g, or t, or includes no nucleotide
  misc_feature (5)..(5): n comprises a, c, g, or t, or includes no nucleotide
  misc_feature (8)..(8): n comprises a, c, g, or t, or includes no nucleotide
  misc_feature (11)..(11): n comprises a, c, g, or t, or includes no nucleotide
  misc_feature (29)..(29): n comprises a, c, g, or t, or includes no nucleotide
  misc_feature (31)..(31): n comprises a, c, g, or t, or includes no nucleotide
  misc_feature (42)..(42): n comprises a, c, g, or t, or includes no nucleotide
  misc_feature (45)..(45): n comprises a, c, g, or t, or includes no nucleotide
  misc_feature (49)..(49): n comprises a, c, g, or t, or includes no nucleotide
  misc_feature (53)..(55): n comprises a, c, g, or t, or includes no nucleotide
  misc_feature (81)..(81): n comprises a, c, g, or t, or includes no nucleotide
  misc_feature (92)..(92): n comprises a, c, g, or t, or includes no nucleotide
  misc_feature (102)..(102): n comprises a, c, g, or t, or includes no nucleotide
  misc_feature (113)..(113): n comprises a, c, g, or t, or includes no nucleotide
  misc_feature (162)..(162): n comprises a, c, g, or t, or includes no nucleotide
anngnggnggngggggatgcgtgggtggngnataaaaagggntgnaggngagnnnttttttttttttttttttggattttntttttttattnatttgtgttntggaaattganacagaggggaaaagaagcatgtcctggcaactttttttttgaggagctntttcactttatgggggtttgtgcccttcgctcactcgcatgtcagtgaaaaattgccaactattatgaactccaaca

SEQ ID NO: 4465 - DNA, 347 bp, Canis familiaris
  misc_feature (4)..(4): n comprises a, c, g, or t, or includes no nucleotide
  misc_feature (10)..(10): n comprises a, c, g, or t, or includes no nucleotide
  misc_feature (41)..(42): n comprises a, c, g, or t, or includes no nucleotide
  misc_feature (44)..(44): n comprises a, c, g, or t, or includes no nucleotide
  misc_feature (59)..(59): n comprises a, c, g, or t, or includes no nucleotide
  misc_feature (62)..(62): n comprises a, c, g, or t, or includes no nucleotide
  misc_feature (64)..(64): n comprises a, c, g, or t, or includes no nucleotide
  misc_feature (72)..(74): n comprises a, c, g, or t, or includes no nucleotide
  misc_feature (77)..(77): n comprises a, c, g, or t, or includes no nucleotide
  misc_feature (85)..(85): n comprises a, c, g, or t, or includes no nucleotide
  misc_feature (87)..(88): n comprises a, c, g, or t, or includes no nucleotide
  misc_feature (95)..(95): n comprises a, c, g, or t, or includes no nucleotide
  misc_feature (101)..(101): n comprises a, c, g, or t, or includes no nucleotide
  misc_feature (104)..(104): n comprises a, c, g, or t, or includes no nucleotide
  misc_feature (106)..(106): n comprises a, c, g, or t, or includes no nucleotide
  misc_feature (109)..(109): n comprises a, c, g, or t, or includes no nucleotide
  misc_feature (115)..(116): n comprises a, c, g, or t, or includes no nucleotide
  misc_feature (118)..(118): n comprises a, c, g, or t, or includes no nucleotide
  misc_feature (123)..(125): n comprises a, c, g, or t, or includes no nucleotide
  misc_feature (128)..(130): n comprises a, c, g, or t, or includes no nucleotide
  misc_feature (132)..(132): n comprises a, c, g, or t, or includes no nucleotide
  misc_feature (142)..(143): n comprises a, c, g, or t, or includes no nucleotide
  misc_feature (147)..(148): n comprises a, c, g, or t, or includes no nucleotide
  misc_feature (165)..(165): n comprises a, c, g, or t, or includes no nucleotide
  misc_feature (207)..(208): n comprises a, c, g, or t, or includes no nucleotide
  misc_feature (236)..(237): n comprises a, c, g, or t, or includes no nucleotide
gttncaccgnggtgggggggggggccgtgggtagtggatanntngggttggaggaattnggnangaggtggnnnggnaggggaantnngtgattngggatnatngngtnagggtnntnatttnnnaannnangtgggaaatnntttnnttttgtttggggggggnggggggttttttttttttgtttattttgaggggggggggggnnggttagttttgggttcaaccccctaggnntctcttccgcgtcccggggcgcgggcggcgcgccgcccttctttttccacctttcccgccaatcttcctcgcgcccgcccccccgccgccctcccccaacgggccttttt

SEQ ID NO: 4466 - DNA, 421 bp, Canis familiaris
gcacgaggtttaaagttttggcaccaactctgaagggcacagaacctatttggttaataaaacaacggacactaggttctagataaaaaatatgaatgctagactattctgtaatgaaattttattcatctgggcttttactacccaaatacattatttcttcagctgttataattttcccttaagaaaagtattattacggcttttataggtacccacttaacataaattgggtttttccaacttctgagacttcttaaagattggtgacttaaaaataacaggaaataattttcatcagaaaatttcaaagtaatgtagacaggatggtgttttatagccctctaatatcaaggagctcctgcccactgatggcatgctcagctaaggctgtgaactatcttggaagtcctctctctat

SEQ ID NO: 4467 - DNA, 418 bp, Canis familiaris
  misc_feature (414)..(414): n comprises a, c, g, or t, or includes no nucleotide
gcacgagctttgatgccgtcacaggctttgattctgagaactcttccggggaattttcagaggcagatccgagagttgctggagtgatgctcgtggacaccggtagaagtaacgggattggaaaggtcggggagaggcccccccgagagaatgggattcataaacacaggacgtcattgcccgccccgatgtttaccagaagtgatttcagtgtgcggagtatattaaagaaatgcatcggcttggagctttccaagatcaccatgcccatcgccttcaacgaacctctgagtttcctccagcggatcacagagtacatggagcacgtgtacctcattcacagagcctcgtgccagccccaggccctggagaggatgcagtgaccagaggggctcctgtagtcctagacccctncatg

SEQ ID NO: 4468 - DNA, 204 bp, Canis familiaris
  misc_feature (111)..(111): n comprises a, c, g, or t, or includes no nucleotide
ttcggcacgagagtgatgaccgtactgtgcgtatctggcgccagtgtctaccagacaacgagcaaggggtggcatgccgcggctctgacccacgctggaaatgtatctgcnctttgtcgggcttccactccaggaccatttacgacgttgcttggtgtcagctgccaggggccctgcctaccgcttgtggggatgctgccatcc

SEQ ID NO: 4469 - DNA, 262 bp, Canis familiaris
cttcaccggaggccgccagccccacgaggcccggagccaaggcctgcctctcagacacctcggacggacctcctctcacacctttgcgaggacccgatgcccccagcccggtcctcctgggacggggtggacttgcctatttaatttgacaacgttccagctgctctgttggctgctccaagagtggggccgtctgtgactcagagagatgcaccgccaagcaaagggaacctgtcgcctcctgtcgttcccaatacctcag

SEQ ID NO: 4470 - DNA, 407 bp, Canis familiaris
  misc_feature (154)..(154): n comprises a, c, g, or t, or includes no nucleotide
gcacgagaaacacatttgtccactgactcattacctgcggcagcaggatgttcagagcgcttttaaagagaaacacggtgcccagtacagtagaactgttgtgggccaggcctcaggggctcaggctgaaggtggcgtctgtcctgcatgcggnccagagccacgctcacctctcggcctgtctgcacggccctgcatgctgcattgctcactgcactggggcagattctagccagtaccaagtcatcgctcttgtcttgtcttctcttgcagagtctccctccctttagagaatgtcaaccagagagggccctccttccctctcagccttctctttagctagcctctcccaccccatctcatcgcaacgcatgtctgtgacctttggtagtcatttacagtgccac

SEQ ID NO: 4471 - DNA, 250 bp, Canis familiaris
gcacgagggaagaccacctttgtacagaggcttactggacatctgcatagccgaggctctccaccttatgtggttaatctggacccggctgtacatgaagtaccctttcctgccaatattggtacgggcttgggccaaacggcggtatagtgacctcactcaatctctttgctaccagatttgatcaggtgatgaaatttattgagaaggcccagaacatgtctaaatatgtcttgattgacacacctgg

SEQ ID NO: 4472 - DNA, 175 bp, Canis familiaris
  misc_feature (2)..(2): n comprises a, c, g, or t, or includes no nucleotide
gnacgagaatcacacaacccaagtgtccaacctctctgtggtgccttgttttctgcattaactcctcagctagcaccctaaggtgcatatcctctcagcagcagaagaacccaccatggtgggagactctgcttgggatccacagggctggtagaccctggccagaaccaggact

SEQ ID NO: 4473 - DNA, 249 bp, Canis familiaris
gcacgagctcagtactagttaatttgagtaattgtgtatcgtcagaaaagtgattactactagtttttgttctgtcgtttcaaaaaaaaattttttttttgtttaaaagcaaggcatgcttgtgatgactctgtaacagactaatttgggttgttgaacctgctcccgggctccatccactctggagaatgatctgcgacatttagttttcgcttttgcttttgtctttttcttgcttttttttttgcg

SEQ ID NO: 4474 - DNA, 441 bp, Canis familiaris
ggacaaagctgggtctcaccggggcggccgtctcactatggtccccggctgcaggaattcggccgagcagcactattctggcccggcattctggaatgggcccagtggagcatcctgcgcaggactcccctccttggcgctcatggcccactcaaatgctactactttgattacaaggagcaacttaagggcgagtggaaccgtaaaagccccaatcttacaagtgcggtgaagagctgggccgtctaagctggttctgctggaactcaacttcttgccaacctcctcttcctgctatcccagaaccgggtagctgagttccacacagagttggagcggctgcctgccaaggacatccagaccaatgtatacatcaagcatcccgtgtccctggagcaatacctgatggagggcagctataacaaggtgttcctggccaaa

SEQ ID NO: 4475 - DNA, 423 bp, Canis familiaris
  misc_feature (15)..(15): n comprises a, c, g, or t, or includes no nucleotide
  misc_feature (18)..(18): n comprises a, c, g, or t, or includes no nucleotide
  misc_feature (20)..(20): n comprises a, c, g, or t, or includes no nucleotide
  misc_feature (26)..(26): n comprises a, c, g, or t, or includes no nucleotide
  misc_feature (31)..(32): n comprises a, c, g, or t, or includes no nucleotide
  misc_feature (39)..(40): n comprises a, c, g, or t, or includes no nucleotide
  misc_feature (60)..(60): n comprises a, c, g, or t, or includes no nucleotide
  misc_feature (65)..(65): n comprises a, c, g, or t, or includes no nucleotide
  misc_feature (68)..(68): n comprises a, c, g, or t, or includes no nucleotide
  misc_feature (72)..(72): n comprises a, c, g, or t, or includes no nucleotide
  misc_feature (76)..(76): n comprises a, c, g, or t, or includes no nucleotide
  misc_feature (79)..(79): n comprises a, c, g, or t, or includes no nucleotide
  misc_feature (81)..(81): n comprises a, c, g, or t, or includes no nucleotide
  misc_feature (98)..(98): n comprises a, c, g, or t, or includes no nucleotide
  misc_feature (116)..(116): n comprises a, c, g, or t, or includes no nucleotide
  misc_feature (125)..(125): n comprises a, c, g, or t, or includes no nucleotide
gggatggaggaattnggnangagaanaaatnnggtaaanntggagataatgtaagggaangtatnatnaagngggnagntnttgaatttgaggacggnatgtatgttaatttgggnatagggatnccgtttgtaggcaggaactatatcagcccaaatatcacagttcatctgcaaagtgaaaatggaatcctgggcttgggtccgtatccactacaaaatgaagttgatgcagatctaatcaatgcaggcaaggaaacagttactgttcttccaggagcctcttacttctccagcgatgaatcatttgcgatgattagaggggggcatgtcaatctaacaatgctcggagcaatgcaagtttccagatatggtgacctcgctaactggatgatacctgggaagatggtgaaaggaatgggag

SEQ ID NO: 4476 - DNA, 360 bp, Canis familiaris
gcacgagggttggctttgtgttttttaataatgccagtagcatctacacgtagagagagcattgtgggaagccgagatcaggacaaagtcaagtgccagcctcagtttcgagggagtctggcaagaagggaagagtaggcctctgcagggtcacagcagcgccacttggagcctggctactgccagctggccatccgcccagaggccaggctcccttaggctcgccaggtgctgcgggggtccgacagggccgaggtgcagtgtaaggcctctgtctcttataccaagaccctgctttcaaggagggccagctgttggcccccatgtggattctgagtgtcacgggtccctcagtaagtt

SEQ ID NO: 4477 - DNA, 888 bp, Canis familiaris
atgatttcgccaaaagattttctgagaaaaaatctgaagatgattcacggctatcccataatctatacttttgcaaacaactgggaaaatattgaacaattccacagcagaccagatgatatcataatagccacttaccccaaatcaggtaccacctgggttagtgaaattgtagacatggttctgaataatggagatgttgaaaaatgtaagcgggattttataacagttaaagttccaatgttggaaatggctgtccctggactaagaacttcaggaatagaacagttagagaagaatccatcaccacggcttgtgaagacacatctaccaattgctcttcttcctaagtctttctgggagaacaactgcaagatgatttatttggctcgaaatgccaaggatgttgcagtctcatattatcattttgacttaatgaataatttggaacctgcccctggtccctgggaggagtatttggagagattcatgactggaaatgtggcctatggttcctggtttaatcatgttaagagctggtggaagaaaaaggaagaacatccaatacttttcttgtactatgaagatatgaaagagaatccaaagcgggaagtccagaagattgctagatttctagagaagaatttgaatgatgaagtcttggataagataattcatcacacctcatttgaaatgatgaaggacaatcctctggtgaattatacacatctaccaagtacagtgatggatcatagcaaatcatcttttatgcgtaaagggattgcaggtgactggaagaattacttcacagtggcccaaaatgagaaatttgatgtcatttacaagaaggaaatgtctggaaccacccttcagtttcgcacagagatt

SEQ ID NO: 4478 - DNA, 891 bp, Canis familiaris
atgtctgacgtggaggaagaggtggaagagtacgaggaggagcaggaagaagaagctgtggaagaagaggaggactggagagagcacgacgacgagcaggaagaggaggccgcagaggaggcaggaggtgaggctgcgacggaggagaccaacgcggaaggagatggccaggaaggcgaggctaaagaggccgaagatggcccggtggaggagtccaaaccaaagcccaggccattcatgcccaacctggtgccacccaagatcccagatggagagagagtagactttgacgacatccaccggaagcgcatggagaaggacctgaacgaactgcagacgctgatcgaggctcactttgagaacaggaagaaagaggaggaggagctgatttcactcaaagacaggattgagaagcggcgggccgagcgggccgagcagcagcgcatccggaacgagcgggagaaggagcgtcagactcgcctggctgaggagagagcccgacgagaggaggaggagaacaggaggaaggccgaggacgaggcccggaagaagaaggcgttgtccaacatgatgcactttgggggctacatccagaaggcccagaccgagcggaaaagtgggaagaggcagacggagcgggaaaagaagaagaagattctggctgagaggaggaaggtgctggccatcgaccacctgaacgaggaccagctgagggagaaggccaaggaactgtggcagagcatctacaacctggaggccgagaagttcgacctgcaggagaagttcaagcagcagaaatacgaaatcaatgttctccggaacagaatcaatgataaccagaaagtctccaagacccgcgggaaggccaaggtcaccgggcgctggaaatag

SEQ ID NO: 4479 - DNA, 640 bp, Canis familiaris
aaaacccaacttacaagttcttcgagcagatgcagaactagaccaccgccacagcagcctccggagttggacagcaaaaccattgcttcactacccatcggtgttcatttatagaataatgtggaaagaaacaaacccttctgttttattatttactcattatcgcctttcgacagctgtgctgtaacacaagtagatgcctgaacttgaattaatatacaaatcagtaatgtattctctctctttacattttggtctctacattattaatgggttttgtgtactgtaaagaatttagctgtatcaaactagtgcatgaatagattctctcctgattatttatcacgtagcccctagccagttgtatattattcttgtggcttgtgacccaattaaactcctacttgaaatatgctttaagaatcgatgggggatgcttcgtgtgaacatgggagtgtagctgcttctcttgcctaagtattcttttcctgatcactatgcattttaaagttaaagagcatttttaagtattccaaatgatctagagaatttttttccatgattgcattttactgtacagaatgctgcttctgctatatttgtgatagaggaattacaaggatacacatttatttctttg

SEQ ID NO: 4480 - DNA, 675 bp, Canis familiaris
attggttatcaacctcatcttataacaatagaggaaataaaaaagcagattgaagctgtgggctttccagccttcatcaaaaaacagcccaagtacctgaaattgggagctattgatatagaacgcctaaagaatacaccagtcaaatcctcagaaggatctcagcaaaggagtccatcttataccagtgattcaacagtcactttcattatagatggcatgcattgtaaatcatgtgtgttaaatattgaaagtgctttatctacactccaatatgtaagcagcatagtagtttctttagagaatagatctgccatagtaaagtacaatgcaagcttagtcactccagaaaccctgagaaaagcaatagaggccatatcaccaggacaatacagagttagtattgctagtgaagttgagagtacctcaaactctccctccagctcacctcttcaaaagattcctttgaacatagttagccatcctctgactcaagaaactgtaataaacattgatggcatgacttgtaattcttgtgtgcagtctattgagggtgtcatatcaaaaaaggaaggtgtaaaatccatacgagtatctcttgcaaatggcaatgggactgttgagtatgatcctctactaacctctccagaaaccttgagagaagcaatagaagac

SEQ ID NO: 4481 - DNA, 558 bp, Canis familiaris
tacttcggttgcatgaaggctgcccccatgaaagaagcgagcgtccgaggacaaggcagcttggcctacccaggtgtgcggacccatgggactctggagagcgtgagtgggcccaaggcgggttccagaggcctgacgtcgttggccgacacttttgaacacgtgatagaagagctgttggacgaggaccagaaggttcggcccaatgaagagaacaataaggacgcggacttgtatacctcccgggtgatgctcagcagtcaagtgcctttggagcctcctcttctctttctgcttgaggaatacaaaaattacctggatgctgcaaacatgtcgatgagggtccggcgccactccgaccccgcccgccgcggggagctgagcgtgtgcgacagcattagcgagtgggtgacagcggcagacaaaaagactgcagtggacatgtcgggcgggacggtcaccgtcctcgaaaaagtccctgtgtcgaaaggccaactgaagcagtacttctacgagaccaagtgcaatcccatgggttacacgaaggagggctgcagg

SEQ ID NO: 4482 - DNA, 311 bp, Canis familiaris
tacattacattctccttgattgttcttgttattatgctgttttgtgaacctgtagaaaacaagtgctttttatcttgaaattcaacaaacagaaagaatatgcatagaatactgcattctatgtagccatgtcactgtgaataatgacttcttgcatatttagccattttgattcctgtttgatttttacttatctgttgctacacaaaaccgatcaaaggaaagtaaacttcagttttacaatctgtatgcctaaaagcgggtactaccgtttattttactgacttgtttaaatgattcgcttttgtaag

SEQ ID NO: 4483 - DNA, 990 bp, Canis familiaris
tttaggggaagtcccttccaagaaaagatgactgcaggagacaatgcccagttagtcccagcagaccaggtgaacattaccgaattttacaacaagtccctttcatcctacaaggagaatgaggagaacatccagtgtggggagaacttcatggacatggagtgcttcatgattctgaaccccagccagcagctggccatcgccgtgctatccctcacactgggcaccttcacagttctggagaacctgctggtgctgtgtgtcatcctccactcccgcagcctccgctgccggccctcttaccacttcatcggcagcctggcagtggccgacctcctggggagcgtcatatttgtctacagctttgttgacttccacgtgttccaccgcaaagacagccccaatgtgtttcttttcaaactgggtggggtcaccgcctccttcacggcctctgtaggcagcctgttcctcacggccattgacaggtacatatctattcacaggcccctggcttataagaggattgtcaccaggcccaaggctgtggtggcattttgcctgatgtggaccatagcaattgtgattgctgtgctgcctctcctgggctggaactgcaagaaactgcagtccgtttgctcagacattttcccactcattgatgaaacctacctgatgttctggatcggggtcaccagcgtgctgctgctatttatcgtgtatgcatacatgtatatcctctggaaggctcacagccacgcggtccgcatgattcagcgcggcacccagaaaagtatcatcatccacacatcagaggatggcaaggtgcaggtgacgcggcccgaccaagcccgcatggacattaggctggccaagaccctggttctgatccttgtggttttaatcatctgctggggccctctgcttgcgattatggtgtatgatgtctttgggaagatgaacaagctcattaagacggtatttgcgttctgc

SEQ ID NO: 4484 - DNA, 760 bp, Canis familiaris
tggtgttcattctcatctgttgctttatcatcctagagaacatcttcgtcttgctgaccatttggaaaaccaagaagttccaccgacctatgtactatttcatcggcaacctggccctgtctgacctgttggcgggggtggcctacacggccaacctgctcttgtctggcgccaccacctacaagctcacccccgctcagtggttcctgcgggaggggagcatgttcgtggccttgtcggcctccgtgttcagcctcctggccatcgccatcgagcgctacatcacgatgctgaagatgaaactccacaacgggagcaacagcttccgctccttcctgctcatcagcgcctgctgggtcatctccctggtcctgggcggcctgcccatcatgggctggaactgcatcggcgcgctggccagctgctccaccgtgctgccgctctaccacaagcactatatcctcttctgcaccaccgtcttcacgctgctcctgctcgccatcgtcatcctgtactgcaggatctactccctggtcaggacgcggagccgccgcctgaccttccgcaagaacatctccaaggccagccgcagctccgagaagtcgctggccctgctcaagaccgtcattatcgtcctgagcgttttcatcgcctgctgggcgcccctctttatcctgctgctgctggacgtgggctgcaaggtgaagacttgccacatcctcttcagagccgagtacttcctggtgctggccgtgctcaa

SEQ ID NO: 4485 - DNA, 319 bp, Canis familiaris
ggaccgcagaccagcaacagtagtgtgaaactccaaaatgcaaactgaagcagcaaaaccacacagcatcataagatcacccccaaccatcccaacacagatttcatgcaagacagctgttgtcttttgggtttcctttatatatagacaagatgttacccaaaaccacagagatttacatacttttatttaacattttgagtattgaatttctttggccaaccaaaagtagctttaactccaccaaaattactatcccagtaaggcagagtttaaccattgaatattacaacttaaacatgtttgctaaaaaatacca

SEQ ID NO: 4486 - DNA, 282 bp, Canis familiaris
ttcagcagccctctctggactccatgcaccaaggtcatggccaggagctcctggcagctcagccctgctgccccagagcacgtggcaactgtccttcaccagccaagtacctctgagatgcagctgaagcgcatgcctcgcatcaggagcctaatccaagcccaggaagggaccgagccaggcatggatgaggctggagagatagagcagaagcagctgcagaagagatttggaggcttcactggggcccggaagtcagcccggaagttggccaaccaaaag

SEQ ID NO: 4487 - DNA, 204 bp, Canis familiaris
  misc_feature (198)..(198): n comprises a, c, g, or t, or includes no nucleotide
ttgactgtctatccttgcatgatttgtggaaaaaaatttaagtcgagaggttttttgaaaaggcacatgaaaaaccatcctgaacacctttccaagaagaagtaccgctgtactgactgtgattacactacaaataagaagataagtttacacaaccacctggagagccacaagctaacaagcaaggcagaaaaggcnatcgaa

SEQ ID NO: 4488 - DNA, 663 bp, Canis familiaris
gacctcaccacggaaagtaacctgctggcgtgcatccgggcctgcaagcccgacctctccgccgagacgcccgtgctccccggcaacggcgacgagcagccgctggctgagaacccccggaagtacgtcatgggccacttccgctgggaccggtttggccgccgcaatggcagcgcgggccagaagcgcgaggaagaagaggtggcggcgggcggaggccgcgccccgctgcccgcgggcggcccggggccccgcggcgacggtggcgagctcggcctgcaagagggcaagcgctcctactccatggagcacttccgctggggcaagccggtgggcaagaagcggcgcccggtgaaggtgtaccccaacggcgctgaggacgagtcggccgaggccttccccgtcgagttcaagagggagctggccgggcagcggctggagccggcgctcggccccgagggcccggccgcgggcgtggcggcgctggccgacctggagtacggcctggtggcggaggccggggcggccgagaagaaggacgacgggccctacaagatggagcacttccgctggggcagcccgcccaaggacaagcgctacgtcggcttcatgagctcggagaggagccagacgcccctggtgacgctgttcaaaaacgccatc

SEQ ID NO: 4489 - DNA, 711 bp, Canis familiaris
cagggactggtcagcaaagcaggctggttaataggctacatccagattacagaatttgtcgggcggagctatcggagaactgtgggcatcgtttaccaagtggccttcaccgttgggctcctgctgctggctggggtggcgtatgtgcttcctcactggaggtggctgcaggtcactgttactctgcccaacatctgcttcttgctctattactggtgcattcctgagtctccgaggtggctgatctcccagagtaaaaatgctaaagccatgaggatccttaagtacattgcaaagaaaaatggaaaatctctgcctgcctcccttcagagcctcagacctgatgaagaagttgatgagaagttgaatccgtcatttcttgacttgatcagaacccctcaaataagaaaacacactttgatcttgatgtacaactggttcacaagctctgttctctaccaaggcctcatcatgcacatgggccttgcagggagcaatatctacttggatttcttctactctgccctggtggaattcccagctgccatcatcatcatcctcactattgaccgtataggtcgtcggtatccatgggctacatcaaatatagtggcaggagcagcctgccttgcatcagttttcatccctgaagatctacagtggctaagagttacggtctcgtgcttgggtagaatgggcatcaccatggcc

SEQ ID NO: 4490 - DNA, 300 bp, Canis familiaris
tgtcaataacatccccttcctgcgaaatacaattatgaaatatgtgttgacatcccggtcacatttgattgagagtccaccaacttataatgtgaactacggctataaaagctgggaagccttttctaacctctcctattataccagagctcttccccctgtacctgatgactgtccaacacccatgggtgtgaaaggcaagaaagagcttcctgattcaaaagagattgtggaaaagtttcttctgcgaagaaagttcattcctgatccccaaggcaccaatatgatgtttgcattctt

SEQ ID NO: 4491 - DNA, 996 bp, Canis familiaris
cgcgggcggcggccgccgcatcatgtcagccaaggacgagagggccagggagatcctgaagggcttcaaactaaattggatgaacctccgggatgctgagacaggaaagatactgtggcaaggaacagaagacttgtctgtccctggagtggagcatgaagcccgtgttcccaagaaaatcctcaagtgcaaggcagtgtctcgagaattgaacttctcttcagcagagcaaatggaaaaattccgcctggaacaaaaagtttacttcaaagggcaatgcctagaagaatggttcttcgagtttggctttgtgatccctaactccacaaacacctggcaatccctgatagaggcagcgcctgagtcccagatgatgcccgccagtgtgctaactgggaatgttatcatagagacaaaattttttgacgacgatcttctcgtaagcacatccagagtgagacttttctacgtttgagagaagaatgtgtgtgcatttcaagaatttgggttttgggggggaaaggaggaaactgtttacttttttcctccacacatttgattattgacacttcgacccctaattccctatacaaaacccacttgcggccaccaggggaccagttctgtatagataaccagatggctgtttccttccaagccgccatcttccactgaccagactaaactcccaaccccagaccaggccagagggtgagctttgactccttcccagggtgacacagggacaaacgcttaccacgagagccaatgctgttcctgcccccttcatgcctcctccttgggccctacaggcaacacatcttcctttggcccctggttttggaaaaaatcatattcctgacttctgtttagtttttttcctgcaatttctatttcatacattctcatacatttaccttgtaaaatagactgatattattattacataatgaattaaaacatatgaattaaaataaaaaaaaaaaaaaaaaaaaa

SEQ ID NO: 4492 - DNA, 1175 bp, Canis familiaris
tgtgggacttgccgtccaggatggagaggagctgcctgtgatcagaaggttctcacagtcaggagaaacctcctggccttgaatacagaagagaagaaccactttgtccaggccttggatatggcaaagcgcacaattcaccctcagtttgtcattgcaaccaggagatcagaagaaatatttgggccagatggcaacacaccacagtttgagaacatttccatttataactactttgtttggacacactattactcagtcaaaaagactttccttgggccaggacaggaaagctttggtgaggtggatttctctcatgaaggaccagcttttctcacatggcacagataccacctactgcagttggagagagacatgcaggaaatgttgcaggatccttcattctccctcccctactggaattttgcaactgggaagaatgtctgtgacatttgcactgatgacctgatgggatcaagaagcaactttgattccactcttataagcctgaactctgtcttttctcaatggcgagtggtctgcgaatccttggaggattatgataccctgggaaccctttgcaatagtactgagggtgggccaattaggagaaatccagctggaaatgtggctagaccaatggtgcaacgtcttcctgaaccacaggatgtcgctcagtgcttggaagttggtttatttgacacacctcctttttactccaattctactaacagtttccgaaacacagtggaaggttacagtgatcccacaggaaagtatgaccctgctattcgaagccttcacaatttggctcatctatttctgaatggaacagggggacaaacccatttatccccaaatgatcctatttttgttctcctacatactttcactgatgcagtttttgatgaatggctgaggagatataaggctgatgtatccacatttccattggaaaatgcccctattgggcataatagacaatacaatatggtaccattctggcctccagttaccaatgtagaaatgtttgttaccgctccagacaatctgggatatacttacgaagttcaatggycaagtcggaatcttagtattcctgagattgttaccatagcggtagttgctgctttagtactggttgcagtcatttttgcgggtgcttcttgcctgat

SEQ ID NO: 4493 - DNA, 287 bp, Canis familiaris
ctctttattgactctctgctgaatgaagaaaatccaagtaaggcctaccggtgcaactcaaaggaagcctttgagaaagggctttgcctgagttgcagaaagaaccgttgcaacaacatgggctatgagatcaataaggtcagagccaaaagaggcagcaaaatgtacctgaagactcgctctcagatgccttacaaagtcttccattaccaagtaaagatacatttttctgggactgagagtgatgcacagaccaaccaggccttcgagatttctctgtatggcac

SEQ ID NO: 4494 - DNA, 450 bp, Canis familiaris
cggggatccggggtcctgggttggagctctctgcgcagtatgatgactttttaaaacttggtctttaaataaataaataaataaataaataaataaataaataaataaataaatacttggtctttttttccagcaatttaaataaagaaaagtcagctttactacagatgaagaatcaaatggcattagatttagaacaacttctaaatcatcatgaggtactttttcctttttgtcacagtggggagcctgcttctccctctctctctctgcctactgctcactcccttctctttctctccgtcaaacaaataaataaaatcttcaaaaatcaaaaaacttataaaatgaaatcttgccatttgtgacatggatggagctagagagtattaagctgaacaaaataagccaaccagagacataccatatgattgctctcatatgtgggat

SEQ ID NO: 4495 - DNA, 503 bp, Canis familiaris
ctcccccctcgagttttttttttttttttttctctttatgggctactttctcttcgtgagacactgcttgctggtgtgaatcttggaggacaccactcttcaggtagctcatgggaaacacaacggagaggtcggtagggaagcaaatggagatgatgtttcttcctcgacttcaccctctgaccattctaagctgctaagtggatcctgtgataatacagtgattctgcgggcgaccaaggcctctgctgggaacggatgccccccttcttggtgtatttttttccagggccgatgtcctacggtctgctgagaatggtctgaagtacatctaagattggccaacagtgtgactttgtacaacaacaagactgttctgacacgataaaagtcattgtcaataatgtgcagattcaaagcagcggctccaggtttgagcgctagactcatatttcatgcaccagggcagggaaccaacacatccccttcttcatgttattttt

SEQ ID NO: 4496 - DNA, 183 bp, Canis familiaris
gggcccccccctcgagtttttttttttttttttttttttttaacaattaaaatgctttattaaacatctaggtgataaacttttactatgtatctttcatatcatatactttttattcaaaatctctacatattctcgtcatgcttgcagtactagatcttgatttacatttgattcatcagt

SEQ ID NO: 4497 - DNA, 448 bp, Canis familiaris
gagcccccccctcgagttttttttttttttttttttcagttgctgtgaaaagcctattgaagaaaaatcagcaaaatgaaaactttcctattttaaaagtctgcgtcaggaaagactgaagatacatgttcttgaattgctaaccaaaagcataagaagagtgcgttatcagtgcttaataccttaaatgctcactttctttaattgattaagatttttgcttggtgggcaagcttcttagatgttaaaactagctgtctagaatcgttgctcaattctgtgtggcatctgttttgctgcttttaaatcaggaactcatctggttcttctttaaataacttaaagacacccatttcagttgtaaaggcatcttcctcatgacttagggtatctggatcaggggtagtttctgaaagtggctcgctgtccttagttacaaattctattg

SEQ ID NO: 4498 - DNA, 103 bp, Canis familiaris
cccccccctcgagtttttttttttttttttttttttttttttttttttttctttgaggggaaaattagttgcttttatttattggtaaaacaactttttgaaa

SEQ ID NO: 4499 - DNA, 503 bp, Canis familiaris
cgcccccctcgagttttttttttttttttttttttttcatttgaagtatcccctttattttcacaaattaattaccatgataaaaagagtatttatctttttgaataggtattcagaatggtatcagctactgacagagtatcctgaccatacggaattgttttcattttcatattttcagtaagaaaaatgtcttctacagaaaattgtacaataatgcataagggtttcactatagtttaatgaattagttaaaattatctctgatggtattttactaatacgaagagcatttgctaaaaacacatatatccacacaagaaactttaaagtctctgagcttaagaaaaaagattaaaatagttaacatttgcttaatattacatggctaggctctttccatgaatgatctcatttgcttcacaatgaccttattaagcagatattattattatgctcactttattaatgaaaggctgaagctcagagatgttaagtgcttt

SEQ ID NO: 4500 - DNA, 504 bp, Canis familiaris
ccccctcgagtttttttttttttttttttgcaaggttttgttctttactagctttaaatagtgactttgttgatatttgagaatgagctagagaaatcagaatgggttggaaatatctatcaataagacagtacaaattgcacttcaccttcccccagggaagaaggaaacactgtagtatctcggcccgggggtgtctgaggagaattgtgggcactggcccccttggagctgcctccggacgagatctcgttcacagcagtggttgctgtgaagtatatatctgacctggaggccacaagctgcagctgtggcacgaccgctgtgtggaccaggttcccgttcaccaccaggcggatctccatggagtcagtggtgaaggccagcaggtacgggaatgcgcacacaattgcataaggagcctggttccaacagaactggaaatctgacgcagagggttgaaccaaaaaagagcccccgttaaatgggcaaacctttttatag

SEQ ID NO: 4501 - DNA, 499 bp, Canis familiaris
ccctcgagtttttttttttttcttatacttttaaaagcacaatatcccaccttaaatttataaagcaagttggcctttgcaaggcattttggccattacttcaattgagccatatgaacatcctgtatcagaattttatccttaaagaaaccaaaccaaaacctccccaaagacaaaaaaaaaaaaaaaaaaaaaaaaattgggtagagagggacttcgcactgaaggtagggattgctatgccagccattgctccaaatctctctcttaaattgctgtgttcccttaggggccacaaaattttactcctaatcctcaatcttaccacaaaattgagttcagaagatactgtttggtccttctcttgatgtttatttacatgcctgcccctgggtaaaatcaatgacaaatggcaggacaccagggtggctcaatggttgagtgtctgcctttggctcagagcatgatcctggggtcctgggattgagtccctcatcag

SEQ ID NO: 4502 - DNA, 503 bp, Canis familiaris
cccccccctcgagttttttttttttttttttcagggaatacaactgatttttatgatgttttcaaagagcatactttatatggattttgaagaatcttgtttgctgataagaacttcaagaagcctaagtttggctttaattttcttgtactccctatactcttcaagcactggaacacgatcctctttctgggcattccttccattctgttgataaaatgcttcttcaaattcccgtaatgttttacgtagtttctttttttcagctctggctttccaaagttgttccagtaattcaggcatagaagctgctcgagtacttgacaatcggagatccagagccagtttttctggattttcttcaacatcagattcagagttttccaatgaagattgtgcctgtacagcagttttcaagatatcagttagctcagaggacagggtaacaccatcttcttcttcttccttgatttcttcaaaaaaatgggcagtttctccttcta

SEQ ID NO: 4503 - DNA, 504 bp, Canis familiaris
ccccccctcgagttttttttttttttttttcagatatattccagggataaacgttctataattctcacggagttctgccttaagtttgagcaccatcaagcagaattagcagagcatttaaaagaaaccaagactgtatttatacattccagatactgaactgaacagtaactgaaatcacagaacaatgttcataggggtagaaacatcaggacactggtcaaccaccagttccaaggggggcctatgcacgtaataataattattattatttactgtgggacagctgattattattattattattattactattattattattaaaatgaagcatctcctctaaaaccacacgctcctatattttcatttaatttcctggaaaaccaccaattatagtgaaaggagaagcagtagaaactcttctctgatctcaaaatttttattttcatggagtcgccatctagcatttgtttcaaaaactaaaattcagacagccttgca

SEQ ID NO: 4504 - DNA, 121 bp, Canis familiaris
attgggtaccgggaccccccctcggctttttttttttttttttttagattgtaaaatttactttgatatggtcaaaaagcaaacagccagacacttgattatctttgctattacaatgtga

SEQ ID NO: 4505 - DNA, 517 bp, Canis familiaris
ttgggtacccgggccccccctcgagttttttttttttttttttttttgaccttaagacaatgatttttattacctttactctaccaagtttgacactataaatatactcactgaaaaaattaacactatatttaaataagaaacaagttcatgaaaatttacaaaatataaccaatgtattctgacttatgatcatattttaaatatttcaactttactcttctagcctggtcaggccatttaaaaatatttccacactattttaacttcaggatataaaacagtaggaatttactaagttttccattataaaaattaatttagcaatttctcaaaatactgaaataactgttttatgaaagcagtacccatatcaaaacaacttattttctttaagaacccatcttcaaaaggcacattttaattactagtatttatctaaagatagtagttgagttttgaacttccagtcaatttcccatgatctcagcaggaagatcacggaaggtcagggaag

SEQ ID NO: 4506 - DNA, 492 bp, Canis familiaris
ttttttttttttttttttgttgaaacactcactttattgttgactgattgaaatttatcatacttaaggtgctgaaatactgaggtgctagtcagaaaccttgttagtagatgtcagaccctactggctaattcacacaaagaatttattcgatcttttgccatttttcccaagtcagtgatgatagctttagttgataggtagcaggcatgtgagtatagcaggagatccagctccttggtctgttgtgttcatatataaaaaagtttggaaagctgataaaggtatttcattcattaagccttaaaaccactgaaaccaaatccatgtcaaggtttctgtttgacacacattcctcaaaagatattatctctttcaaaatatacaaagccaaaaggcatattaagggaaggaatgtcacctacacagtttatcagctttgcgacatgacagaaaaaaggcgcaattccttcatttggaaattgggtctcc

SEQ ID NO: 4507 - DNA, 152 bp, Canis familiaris
tgggtaccgggaccccccctcgagtttttttttttttttttttttgcactaatgctggttttaatggcggcgcaataatagaagtacaaggtttcactagcttgagctgcgagaagttttaaaagatgcccatttacgttattagtagcctc

SEQ ID NO: 4508 - DNA, 517 bp, Canis familiaris
  misc_feature (7)..(7): n comprises a, c, g, or t, or includes no nucleotide
gattggngtacccgggcccccccttcgatttttttttttttttttttgcgagaagagagatttaatatagcccacttgctactctcaagtgtcttcacccaccagttctgagggcaatagaaaggcacaccagcccaacatggtaatttagtgggaagccgaagcttccttttgcttcctgctgcttagcaatgagtctcttcactgatttaagttctgcaggcagatgtgggagatgtaaaggttttagttctggtttgtatcaaattattctcccatttactgctgaagagaagcagagccttctgagacttccactgttgtctgttcaactgtaatgcttccttggaggtgggggccgattcttaatggtcttacacttgggaatgtggcgctcagccaccttgggagcaaagtggcggctgcagtgtggacactgaatataatctggattttctgcaggtagaatgggtggcaagtctgaggggtttccacctttggcaattacctgctggac

SEQ ID NO: 4509 - DNA, 510 bp, Canis familiaris
gggtacccgggccccccctcgagtttttttttttttttttttttttttcactctcaggatttatttttttgtttgtgaaattgaaagctttaagccataacaaaaggagagaatagcagatttttttcattataaattcagatcacttaatggtgaatgtcttggttaatagtctttctccaacctatggcttttgatgttgcttagtcactttaacttgatgactggtggctgttacttttgctgtcttctgatacagattcttcactttctgatccctctctgttccaaaatcttcttttattccatttaagggcaacaatggcaattaaaataaggacaggtataaaaatgttgaaactgatcaagaggccattttttttaggagcagcatgtcgctttctgaataaggtgttgcttttcttttgtggatgccaaaatccatcattataacttcctcctggtgatgatggtgatgggagacaaattggaggagaatatccaacatca

SEQ ID NO: 4510 - DNA, 508 bp, Canis familiaris
  misc_feature (7)..(7): n comprises a, c, g, or t, or includes no nucleotide
gattggngtacccgggccccccctcgagttttttttttttttttttgtacttaacagatatattaataacattccatcctaaaacagaatacacattattttcaaatgcccacagaacattctccagaagagatcacatattaggccacaaaacaaacctcaataaattaaaaaagattgaagtaattctatgtatcttttctgaccacaatgatataaaactagaaatcaaccacaagaaaaaaatctggaaaaagcacaaatacatggagattaaataacaatctactaagtaattaatggatcaacctaggaatcaaagaggatataaaaacatacatagagacaaatgaaaatgaaaacacaatagtccaaaacctttgggatgcagcaaaagcagttctaagaggaaagtttatagcagtacaggtctacctcaagaagcaagaacaatctcaaacaagctaatattacacctaaaggagctagaaaaagaacaacaaacaaa

SEQ ID NO: 4511 - DNA, 519 bp, Canis familiaris
  misc_feature (12)..(12): n comprises a, c, g, or t, or includes no nucleotide
ttgggtaccggngccccccctcgagttttttttttttttttttgatagaaaaatcctttaatcaaaacaagtttacaatgttgacacttatggcttaactagaataaatctgtccaaatttaaattgtattaaggacctgatataatagcaatagttccctcaaaacagtgggtcctagttacatttgtaagacctctcaaaaagcaaaaactccaattattgaaataattcacaacttttcatctatagatgaaaccattatctgagaggtcaaaacatacagtgcatgtcacatgcaaacactggtattaagccttttctccatattcatagtttcaaaacatgagaaatgtcttttagctactgaaaaccaccaactgacctaataatcaaaatatcttagaaatgctatctgttaagttacccttaacttttattaaccttggttttaccctgatttagtctatatatgaatacagactatcaaagtactttactttttctaactgcctcggagc

SEQ ID NO: 4512 - DNA, 521 bp, Canis familiaris
gaattgggtcacccgggccccccctcgagtttttttttttttttttttttttattttataattttaatatttattattttaagtataaatatgtcaaagtctaatagaccaatgttactttaatatttttaaagtctaacatcatttttctttttacttatttgtgtaatatttactttgcttaccacagttcataaagatattctcatgtattttctttaaaactttatagttgaggggtgtatgatttagtctatgatccaactcaaattagctttcatgtatattgtgaagtagggattttcactatgttgatatctagttgctccaatactatttgttgaaatgatattcctttctccgttgaactgctttagtgtctctttttagaaaataatctgactagagaaggtgggtctattttaggtgtaggtgcctcatttcagttctatttatatatacatatctcctcctgccacactgtcttgtttatagtaataaacagcttaatagtaagtctt

SEQ ID NO: 4513 - DNA, 229 bp, Canis familiaris
  misc_feature (98)..(98): n comprises a, c, g, or t, or includes no nucleotide
ccccctcgagtttttttttttttttttgtttttgtctgcttttttattccatttaaaaaaagacatgattctttgggaggtgatacaagattgctttncagtcagatcataattggcacaattgctgtgataactataaatttgaaagggtgccactgctgcccaccccaattcactttgggcacctgtgtgtgaaatgtcacttgcaaaaaatgggggaaaatatgct

SEQ ID NO: 4514 - DNA, 414 bp, Canis familiaris
ctccccctcgagttttttttttttttttttattgtaaaatcactttgattccttactgtacccaacatcttagtgacccatatatgactgacttgggagaaaaaaagtggttttaggactcctctggtcttctgtagagaggaatcacagaacagagaagaaagctgaatcataagatcatatggtaaacattgtctcaggaggtgttctgaagcttaaagggaatagtttgcagacaaatgaaaatatgtacttctttatggaaagggaggataaacattggaactctatcctaagggcctgtaagattaaaaaatcagtatgtcaaattcacagatgattactttatagtggattatgaagaggaattcaaaaatgttcggagcccttaacctatgaggccaatttaatgga

SEQ ID NO: 4515 - DNA, 508 bp, Canis familiaris
  misc_feature (11)..(11): n comprises a, c, g, or t, or includes no nucleotide
gggcccccccnctcggtttttttttttttttttttgtatttactttgtatttggcgaagatactgaaataagtggccacattctgttttcttttaactgctattaatatggttgatctgattggctcttcgatgaatttcatccaagaagttctccagttgttctattagcattcgttttttaaaccttgatgcttctttaatgacattttgtaaaaatattagtcttgtttgtaaactgccttgcacatgcttcagtaacgtgaagatcctttcatattttcttcctggctttcggatctctttcattatttgtgcttttagttcagtgttgacctcctcatggcttctgcaatgcatcaatttctttcctttgttcagtgaagatgctggtagactctcttcaggacactgttctttatctcttggttcctcatgattttctaaaaatccaccaacagtgaggtcattagctcctaaatggtcatgacccagagcctctgtatgat

SEQ ID NO: 4516 - DNA, 491 bp, Canis familiaris
cccccctcgagtttttttttttttttttttaaagaactttgctgtaccatgtatttgataatttttgaagcatcacatatcttttaataatattaaagctaatccactatagtctttaaaaaactgtcttcatgaatgtaacaggctatatttgatgaacaagatgacaatcctgatcacaaatcgactcatatgatatctggcagtggttcttgaactatccagacattataatcacctggacagcttttgaaatacagtgatgccagaacccacatggtattttagtttattggatgttttgtaaaaaaaaattcaaaggaattctaataagcagccacaatcacatccattttggtacaatttatatatagacctcagatgtcaagtctcttcttgaacacatactggatcagccacttttctgaaaataaaagttcaaaatattttaagaataactggggcacagtaatgtggcctgagtgatgagt

SEQ ID NO: 4517 - DNA, 501 bp, Canis familiaris
  misc_feature (8)..(8): n comprises a, c, g, or t, or includes no nucleotide
cccccccnctcggtttttttttttttttttaagcaggctccacaccccaacaaggcagtcttaatagacctcttgaagaattctttgacatataccattattctagtctgtaaagatactgctgtattaaagtatactgttattatccctatctcacagatgagaaaaccaaggaagaggggttacataacactggtagtatatataggtagtaagaggcagagccagaatttgattctttttacgctgattccaaaatctttgcccttaactattatattatatacttcctttccacagaggaaaaaaaattctgaatatagtgttccaataataatagtaggaaaactggacacttaatactgtaaaatttactagtaaaatctctacaggggcttagtagaaaaatctcgggctttagagtcagccagagttggctttgaatcttggcttcgattctcaactaccctatgcaaccttgggaaaattactctgtgagcc

SEQ ID NO: 4518 - DNA, 104 bp, Canis familiaris
cccccctcgagtttttttttttttttttttttttttttttttgtttgtccggtttttttttttttttttttttttttttttttttttctttttttttttttttt

SEQ ID NO: 4519 - DNA, 449 bp, Canis familiaris
cccccctcgagttttttttttttttttttcaaattctcgatcattttaatccataaaatagatgacatgctttgtgagtagaaccaaaggtaaaatcttcagtagcttatattttgttcatgacaaggccagtgtgtaaacactacttaataacatagtaagttttcccaagagcagtaataaatattaaactaaaaagaggtaacatgcactcaacaactctcaaacagatattcatcaaaatgaggtaagtctgtgtcatttgctaaagaatttaatgctgaagtggaaaaaaaactcatcaaaaatatcagtcttcatggaactttccaagttcaatgccctaatgcagacattagttgtcagtgagtctggctgaacttcacactgatttttcttggtggggctacagtaattatggtcctgtttcagatgtgtgttttggggaa

SEQ ID NO: 4520 - DNA, 231 bp, Canis familiaris
ccctcgagttttttttttttttttttttttttttttttttggaaatccgagattttactcaacttgagaaaagggaaaacaggaaaaaggtgtcataagcaaagttaatgcttttttggtgacaaaggggcttcctctggaaccagaatggcagtaactaggccaaattttgcatgactactaccaatctctccaatgccagaattatacaggaatgattagtttcaccca

SEQ ID NO: 4521 - DNA, 359 bp, Canis familiaris
  misc_feature (10)..(10): n comprises a, c, g, or t, or includes no nucleotide
  misc_feature (36)..(36): n comprises a, c, g, or t, or includes no nucleotide
cccccctcgngttttttttttttttttttttttgtnctttaaaaagtcccttattgaatattaaacagttacaagtactgttagacatttagccaaagcacaattacaggttaaatataatcataaagatgtcttaaatagaaacccaccatgcaggcaggtgaagttccttgatgccctcttttagaaagcagagggcgagggaaaaaaggtcttccattccacgtgaaagacagtgaagactacaaggatttacatgctgtgagcgatttcccatgaccaaactgacagggttgccagatttaggaaaacaaaacaaagcaaaaggccaggatgctcagttaaatttgaattttaga

SEQ ID NO: 4522 - DNA, 500 bp, Canis familiaris
ccccctcgagtttttttttttttttttctctgagaaaaaagaaccctttcaaaggcaacgacagaaggcagcttatattgacacagttcactgttaacattgcttgtttttcaaggcatccaggagcttctgattcttggtcttgaacatcatgataaagctgtttggcttgattttgcctcgcccatcttcacccacttggcccataataatgtagttcagacctcttctgaggagcgggcactgcttgcagaccacgatgaccttggcactcatgttcttgccagcctgctgaattgccaaatttccctctttatagatgttgatgatagagactgtggcatgcaaactcccacctcgggtgacagttgtgatcacagtgccagccaacacaaagttacttgaacaataattgctctacagagtacccgtacgtctacacttttgttgacacagggaaacggtgggttttaaacctgtagttacagggaacgtggtgg

SEQ ID NO: 4523 - DNA, 312 bp, Canis familiaris
  misc_feature (5)..(5): n comprises a, c, g, or t, or includes no nucleotide
ccccnctcggttttttttttttttttttttttttttagattggaagccttttatcactggggttcttttgaagtcttataatcactcctgcaaagactaccatctctattcgctccagcggagtgaggggtgttggggctcaacggggcagcccccgagccgcccgctgatgctggagccgtggggcggctctgagcctcggccgccgtgaagacacagggctgggtgtgtttctggagacgctctgacggttcatgacccccccaccccccgatgctacggtttcattcaagtcagggacaggccccgtgg

SEQ ID NO: 4524 - DNA, 502 bp, Canis familiaris
cccccccctcgagttttcttttttttttttttttttttatttttataactcggttaatgaatttatcagcaatttcaaagactctcagttgatgtccagtggggatctgtggtaattcttctccatgtcatgttccaccctcacacccaagctttaagttagcagcttcgatcagtctagttttagccaccagtgattttatgggtctgacttttggtcttgttcttggatgcactgtgtctctttcagaatagtcacttttatgtatccagcttcagaattctgtgaaccctaaagagacttgggggacttcaaggtttgcgattgcttcttctgacttacgttcctcaagctcttgaaggtttctgactgactgtaccaaacctcttcctgaaaaactggagcttgataagggcaagattttactccatacttcaagttcagggacgtcattaattgtctccttttcttcataaatctgcatgctctttatgattcgctt

SEQ ID NO: 4525 - DNA, 334 bp, Canis familiaris
cccccctcgagttttttttttttttttttttttggagctgggggggtccgggggcacgatttatttgacaatcatcacaagaaactctgaaacgcagtgctatcttcggcgatcaggccctagctctgcttctgtactgcatatgctaaaaactggggccagcacattctaaaagtgacagttataaatcagtctctgggcggggagagcccaatgaaaagcttacaggaagataaaagtctttcaaggagaatatggcacatgaattggtgttataactggggacacactatgtttagccattatttaatctgaaatttcatgaaacatcctt

SEQ ID NO: 4526 - DNA, 238 bp, Canis familiaris
ggcccccccctcgagttttttttttttttttttctttctttctgtttttggtacctttgtgggtatacaatccaaagtcttgaattcgttcatatattcatctaaaaacactttaaaagtgttgacccaaactctgactggagattcactccaatcacgctgctcaagcctcatggtcttttccagaatctgttcaaatagtgcgtagaggtctttataccttatgcttttcccatca

SEQ ID NO: 4527 - DNA, 504 bp, Canis familiaris
gcccccctcgagttttttttttttttttttatttttaaactacaggttactcatttttaaagacacacaaattagaaaaaaacatttatatgtaagttaaaaacatctttaaaacccagcaataagccagcagtgcagcgctgaggaggacagagactggaaaaaaatgagcagtaatgaaatcatcacatcacagtgtaactgacacgggggtagtttaaacttagaaccatacaacaagaactaatttatggatctgttgaaaaataacacctctttaaaaaaatattttggaataataaaaacaaaaagcacaggacgccacgttctagtctcacccagggaaggcagacgagcactgtaaatactggctgcagagctggggccctccctgtttgggcgacactgtccaactactcccaggcagggatcaggatacagctcttaaaggaaggcaggaatgaactcacacaatctcactcttcatgtggaagggttctcttg

SEQ ID NO: 4528 - DNA, 438 bp, Canis familiaris
ccccctcgagttttttttttttttttttgaatgtagtaggggggggcctgggtttaaataatgatctttctttttccttccggaggtgaagatgacttaatagaatttaccacagttactttagaatctctgaaagcgttgctggcggaggcctggccggggggtagatggtgcatcttactttccggcgtctcctcgagctgtggaggggcagccgtgcaggcctggtcgtgtttgaagacgtagcccgacccaaagagttcctccattagacttcttttcttatccctgaacgtgtctttggcctttgttcgggaagacttgccaaaggagggctcgtacccgctcaccgcgtgctctggcccggggcccgcgctcccgtgcggcttgcccgcgctgagactgcctcgcggcccgcctgtgcccgccggcccgccc

SEQ ID NO: 4529 - DNA, 504 bp, Canis familiaris
  misc_feature (11)..(11): n comprises a, c, g, or t, or includes no nucleotide
ggccccccccnctcggttttttttttttttttttactgttaacagatgtcctttatttgtacaaagcattataattttcctcaacattcttcatttatttgtcaacaaactcttgactatattcattaaacaaattaacagtgtcaaactacatacatttgactatctgtcaacctccaagcgctcaacttagagacaaacaaaaaagtgcttggagcaccaaatatcaagagaaaacaacaacaacaacaaaaaaacaactctgagaaaggtcaacagaattactttagaagcagttaaaggggatggatttttttgcagtggggattagattcctgagcaccatcagatttctgcactttgggacattaagcaggttatcaaagatcctgggttgggagatgtgacaaaaggaggaagaaagtgggaatggggaacagaggagaggcagaagggagacagggaagggagacgcaagagggagaaagttgtgcctaaaagaaa

SEQ ID NO: 4530 - DNA, 406 bp, Canis familiaris
cccccccctcgagtttttttttttttttttttatgttgtttgttatgtatctttaccagtacagtattttgattataaaaatagagtataatttatataacaggttttctgtttataggtagtttggttgaagacctcttctgattatggattttgttctgtagttttgtttgtgccttttgaattcacagcagttataggcttgaagttattttgttagtttttttacattcacccactgggggatggacttttttgatacgaatgtgtttcttctttttaaggaggtccactttcaattcctgttccataagagaacgcagctcttcaagattcccttgtagccaaatgctgatacgttcaatattttcatctctttcgtttagcttctctgttaggtttttta

SEQ ID NO: 4531 - DNA, 510 bp, Canis familiaris
ggtaccgccccccccctcgagtttttttttttttttttcgggtgctgcttgtacttgccaccttttgtatgattatatgtttctatgttggcctgtcttgctaagatatggtgaataaagcctggtgtgagctgtctatttgcaaagtcactagaatgcatgtttcatttgttctttcgtaatgccaatttgaactttctccctctctatctattcataacccagttgtgaaggtaaaatatagtttccttgaatgataatgcaatccttaaatcaatgtcataatctttgttaccactgaaataacatcacagaggccacatggttgcttgtcttctcacagctctttagtatgtactactgcgtgggtaaaatgagttgtgttttttctcctcacttcttttctatctgaagaggaatagttattcttttatacgttcataaatacaaaatttcacaatcttggttactttgtttacttccaaacagacctgatttcttaacatggat

SEQ ID NO: 4532 - DNA, 400 bp, Canis familiaris
cccccctcgagtttttttttttttttttttttttgttcagcaatttgtaccatggcttcacgtcttagtttctgcttttgtttgatcaacaaaagcataacctcctccttgttgatttcttgaattctgtgccattgccatgtccaggtgaggagatctagctggagtcaggtgatccagtccatgcctgtcaaagcctccagcagccagaaagcaagcaccatcagtttgctatggctggggggccttctggaagaagagaagcaaagaaagtcttgaagacaagccaggctgtgctcataaatgaagggctggtctgctcgtcatccagtacatccctgtctggagggaggtggttggggtcttcgatttcaggatcaaggccttcctgtaagttatt

SEQ ID NO: 4533 - DNA, 270 bp, Canis familiaris
tcccccctcgagtttttttttttgtgtttttttttttttttttttgtgtacagaagagctgtatttaatttaaaaaaagggggaggggggtaccccacaaatgatacagtaatgaggatacacaattaaatcccataagcatgactgaaggctttcactgtgtttgacgtcattacattggaaggcataaaaagtggagtaaatgaatgttgatacagtccaatctagtccattaggcaagatggggcaagaagtcatttaaattaaaag

SEQ ID NO: 4534 - DNA, 319 bp, Canis familiaris
  misc_feature (15)..(15): n comprises a, c, g, or t, or includes no nucleotide
atttttgcgattggngtaccggccccccccctcgagtttttttttttttttttttttttttttttttttttttcttccatgaagctactgagttttattgcaaagttccaataagaccttttcagggttacaaaggggtatcgggctgcctgcacacatcagccagtaccaagcatcatttattatcgcagccaaaagagctgaaccagaaaaacctatcggttgggcttctgtccatctgttcgtattgcaaggacatggcgcagcaaggaaggcaggtgagtaagggcttcgtgaactaggagtggggtcaggagca

SEQ ID NO: 4535 - DNA, 502 bp, Canis familiaris
tccccctcgagttttttttttttttttttaaaagagaacatgaaagtcagccagtgctgagggcctaattgagattaattatttatgatgtacctgtctgtagaactgtatgactttctgctgctatgctcagctccctatccatagcaaggcatcgacaaaatagtttcatccttggttggaatttactaggctaagatgaaggatataggtaatgacttaagggtactagcaagaaaagggttggaggaatgggttatggaaactaagatggacaggaaaagaaagataggaggaagactgaaaaactgaaaaaagtaggtacatggaaaaactggagagtctggggatttaatatatatatatatatatatcaggaaagtttaaaggataagttaatggctaaagagtatactgatgtgttaaataggtgacagggattaaagggggcacctgtgatgaggactaggtgttatatgtaagtgatgatcaccaaatccta

SEQ ID NO: 4536 - DNA, 438 bp, Canis familiaris
tttgatgtaacaaaacaatacagtttgtgttagatccaaccacaaaaagcaaaaggaatgaaaaatttgtacaatgcacattagaaaaacaagatgtttactgtgacaactatatatttctaaaataatgcttctaaaattacttaattattgaaatctacatgattacagaaggatgttaatagcgacaaagtgcataaaaaccaaacatcaaattttgagcaaattaacatactaggcaattttgctaacaaagcatgatttttttttttcttgttcacaatctgctcaaaatatctttataccaacagggtgggcagaacatttaggtttaatatcaattacacaatattagcataaacttccacaactacagatagggtattgttttcttttgagctggcaaagtgactacagaaacatcagatcatttctctg

SEQ ID NO: 4537 - DNA, 506 bp, Canis familiaris
agcccccccctcgagttttttttttttttttttttgagaaaagttattctttcatttatgttaaataaaaacatgagaaaatccttttttaaaaagggtcagaatattccttatgtctccaaaccacggatgcaaagaactgctgagtgctttcttcacccatggggtcacaacacacttccatgtggtgatcacctagagacaacatagatgcgtgctctccagttgccactccaggaaagtcacatgcagtatttgggcaagcaatgaacagaacacaggcacagtatattctggaaacacttcctgtgctggcaatgaacctcagtaccaagtatcattacctggttttgtttttgtggtactgcgacatttgtaagccatacataccaccacacttcaatggtacaatttttcacaattccagaattctatcaactggcagtacagtttaagtagcttctgtggcagcaccttagaaatttaaatattacatatgagaacta

SEQ ID NO: 4538 - DNA, 137 bp, Canis familiaris
  misc_feature (10)..(10): n comprises a, c, g, or t, or includes no nucleotide
cccccctcgngtttttttttttttttttttttttttttttttttgttttccctaacagcaactggtttattttcatggggtggggaagcaagaaaaaacaaaacaaaactgtaaatccacccccaaaagcatgctga

SEQ ID NO: 4539 - DNA, 301 bp, Canis familiaris
ccccccaaacagtgacttgctttttggatacatcgagttcaaactccccaaaaaagaacaaatggcgaagctgtgcacattgaggaagacgggtacatcaaacagaaggaaattggctcagatgatatgtgctctatttgtcaagagttacttttagagaaaaagcttcctgtttcattttgcaggtttggctgtggcaatagcatccatataaaatgcatgaagatcctggctaactatcaggatccgatttcagatacttgcatgttgaaatgtgctctgtgtaggaaagagtttgcac

SEQ ID NO: 4540 - DNA, 491 bp, Canis familiaris
ccctcgagttttttttttttttttttttgaagacaagttttatttgcgaagagtttctaattgttaaagctgcaagcaagttctttttacaattatagttctagagacctagtagtttcagagaccccagtgttcaaaaatatttcaaaatgaataaaaacccacaccaaaaggaaagaccttttaggtctggaatgtacaggcactgaaatcagctgttctcagaaacagaccatttccttggaaatcagatgggatgaagtcaatgccactaaaggaaatgcctttttaaataagttagctacttgaacaagattattcactccttagaaaatacagtaagataacaagtcccaggtggtgggatacatggtacagcaccagtttcacagggagtgtatgggatcctagggtcagcagttgttggcatatggcacacaacatagaagcagtcaccggaagtggagagagtgctgaagggcaggcagtct

SEQ ID NO: 4541 - DNA, 501 bp, Canis familiaris
gccccccccctcgagttttttttttttttttttaagattttttatttatgttccttcatgagagacacatagaggcagagatataggcagagggagaagtagcctccatgcagggagccaaaaatgggactcaatcccgggactctgggatcacaccctgagccaaaggcagatgctcaaccactgagccatccaggcgttcctgaggtgagagctttttaatcagtttattgagatttttatttggctatcaaatctttatcttgtaatttttctagatatttctttttcatggataaaacagcctgctgaattgctctaaaaagatcacttaaacttatcttcaaggcttcttcacagtctatactactagctgttaatattaattcttaatttgtttgtcctgtttgtctcatggtattattttcaaatatttctttgcttttttattttttatttttttggcagttaatccagtgctctttgtagctgcaaattgcc

SEQ ID NO: 4542 - DNA, 502 bp, Canis familiaris
cccccctcgagttttttttttttttttttctgctgcagggtttattacgtttagtctacaaatttgatcttttaagaaaaattcataaaatattcagttgaaaccacatttctggttcatcaaatttcaaatatatttcactgtgctgaacaatatattctaatgctgtctaaaacacagccaaatgatttttctttattcatttatacacattctgtaattttttgaaaaccaagattaagataaaaaatattaacaaaactaccccgttacaactactcttgtcccatatactaaaatattttccgtgggtctatcttcttcccttcctcattttcagttctgtacggtgtgttggtttgtaaagacactcagggagttctcacctcacagttcccataaattcaaacaacaccttgtggaaagattaattcccttggcaatgcagaagcttcggtctcttcaaagcactcgctgaaaattatcttttaatttatagatc

SEQ ID NO: 4543 - DNA, 382 bp, Canis familiaris
ccctcggattttttttttttttttttttgcttattagatgtttacccggtagaaaagtaaaattacagaactctgctcagttccagctagagacaaactttacagattgctttaaagaaattcagctcttacaaaacagctttgtaatacagttgcttttggattttacattcattttaagtttacttaaaaaattgcataaagagattaggcactgatctcgtaacttttactagttggagctaaccccaaaactaaaatgtgggaaataatatagtatcaaaatattaaattctcaaatatactccccaaaaatgttttataaactgaccagtagtatcaaaattatcttacatagattcaaaatcaaagcattaattaa

SEQ ID NO: 4544 - DNA, 343 bp, Canis familiaris
ggcccccccctcgagttttttttttttttttttcatggtaaagactggtttattggtggcagttagtattaagtcaataaatattgaatttatcgattactggtccatagagagctgaatgaaacaaccaactgcctgctgagatgaattgaagttaatcctgcttcttgggaaaagaagccacagctagctgatacatggcatatgctgttccaccaactgtaagcctagtctcgagttttttttttttttttttttttttttttctgattgaaaaagacataatggttatgacattggcttgaaaccaattttagggggttcgattccttcctttcttatt

SEQ ID NO: 4545 - DNA, 510 bp, Canis familiaris
ggtacacgccccccccctcgagttttttttttttttttttgccaaattattgttagttcctgtcattctgcaactttcaggagtgaaaagcttccatactacaagtttctgttcccccaaacttaagaaaggatatttatactagaaaagttctccataccctccccccaacctaaagactcactttagatattttgctttacaattgatcagagaaacacaattaaaagaatctagaatttttgactatatcttttcacttgccagttgtttcaacaagcaattatcttttagtatttaaaccagccgatgcaaattctttaacagaggatataaactagatttcactgattaaaacagagcaaatcaaaccaaaaaaaaaaaaaatccagtgatttactctgactgtaaacaatatataaaatttaaatctcaaatttcaaaataagttaaagaaaaattctactttcagggcctataatactataatgatctgacaattggtaaggg

SEQ ID NO: 4546 - DNA, 511 bp, Canis familiaris
  misc_feature (15)..(15): n comprises a, c, g, or t, or includes no nucleotide
gtaccggcccccccnctcggttttttttttttttttttttcatgcaaggttgtttttattaagctttatatatagattacagctaggtattacaggcattactacatttgacaagcagacatgatagtctaagtaacatttcaacaaactccactgatttcacaactattaggaacagagcacatctccccagttcaaaggtatgttaaggactttaagaggatgttagagaaataagctacatgacaactggtcctcttctataacatgattatcctggaaaagtagttacaagaagaagcacataactattacagagtttggagaagtcttacattagatccatcctttttttacagatatgacttggggacacatactagaagataaaggattctttcagaataagctacatgtcaagttttctatctgtagttttaatgctaatgtgattcgcttatgtttaaaaaaatcaagaaaagcacaattttgtatctaaaacccactgcaa

SEQ ID NO: 4547 - DNA, 111 bp, Canis familiaris
  misc_feature (19)..(20): n comprises a, c, g, or t, or includes no nucleotide
ttttttttttttttagtannatgggaccgaggatcccttttagggttaagggataggaggagtatgggcagtaggtgcaaggtcattagggcattttctcgtgtgaatgat

SEQ ID NO: 4548 - DNA, 135 bp, Canis familiaris
  misc_feature (39)..(39): n comprises a, c, g, or t, or includes no nucleotide
taccgcgccccccctcggttttttttttttttttttaanattttatttatggatccatgagagacagagagagagaggcaagagacacaggcagagagagaagcaggctccatgcagggaacctgacgtgggact

SEQ ID NO: 4549 - DNA, 506 bp, Canis familiaris
gccccccccctcgagttttttttttttttttttagaccacttgatttcattaactttttttaagcacttgggcgtcagcaagtttggaaaaaggcagggtctgtgagcttaaaaatgttattccaggttattgttgaaataaactacaaaccaggttgttaattcatttaggaagagaatatagtttttcttttataaaaatcggccccaaaactcacaaacacttaaaccgacataaaaaattggtctatctttgtaggaattaacaaaaaggaaggaacaaagcacaaacggcccctgggaagtacatcacgtcaggcgtgacccctcacagtactctctgcttccagtttggccctcaggagttttaagaaaagaaagctgttcagtcatctaaacctatgtttctgaagaggtaggacatggactccccattgtgaatccgacggatggcttctgaaaggatcatgctaatatccacggttttaattttggggcactggagc

SEQ ID NO: 4550 - DNA, 313 bp, Canis familiaris
gggtatgacattggcttgaaaccaattttagggggttcgattccttcctttcttatttttggattacatatgtaggttcttcgaatgtgtggtatggagggggacatccatgtagtcactcattgttagttgtagtaagttctactataggaacttctcgtttggatgcaatggcttctcagatcataaaaattataagcatcaccgctgtaagcgagataaacgatcctatataggagacggtatttcaggtagcatatgcatctgggtagtcatagtatccactaggtatttcagataaacctaggaaatg

SEQ ID NO: 4551 - DNA, 304 bp, Canis familiaris
ccctcgagtttttttttttttttttttagtaaaaataaaagggattgcggtgggaaaaataaattaacatcatagattagcaaattagatttaatctaatgtgttaacaaaagcataatatactctagtaaacaaggatttccaacttactgtgtaactacataggaagtcaaacatttggtttagctaggggcaaacatgagtcactgccacctaatcccataaatccatgctgtttcacatttaagggaaaaatcagtatagaggtctcccctggtcttccctttagaaatgcattgaaaag

SEQ ID NO: 4552 - DNA, 504 bp, Canis familiaris
cctcgagttttttttttttttttttgaacttaaaggtcattttatctggcactaccccagcaactaaacaaagtaactggaactgcaggtcccttagggctgctggcctctcaagtgctgtgggactactcccaggactcccaggactcccacggactagaggattgactcccagagaaaagctagttttatcttctggtcactagcttaaatgtttataatgaccgtaactataaatgctgcaagtataagtcaacttcgaggttcgttgactcctgagcatccaccttgtcaatgggtcttacccactgggaccaactggcaaaacaaagattttctatcaggaactaagaagtcagagatccttcccagaaaaatgaatgaaagaatgaattttggcacaaaattcatctttgttgtaagaatggaattgaagtgagcacaactcggggcagccccagctccggcatttgcccggatcttctggcacacacagaatgggaa

SEQ ID NO: 4553 - DNA, 150 bp, Canis familiaris
ttttttttttttttttttttcagtatatgatctcctttatttaaaaaaatattctgaattgtttttatacaagtaatcaagtgttattttttcaaatgaaactcctttataggctaaaagaggatgtgtggtgttgccccattaaaagcc

SEQ ID NO: 4554 - DNA, 406 bp, Canis familiaris
agctatgtgtccttccacagttactttcctgtgcttcagctttatcatctgtaaaatagggctaatgctacccaccccataggtttatcatgaagcttaagtaaaataatagacataaactgcttaaatagtggctgacacatggtaagcacttggtgtttatattcgtattacttattaaacctaagtaaagcctaaagtaccacaaatgcaatagtttgcttaggacactcacttgtctaagaattcagctttcatttttttaaattaaaatgtgcaaccaatacctttacattttaaaacattttagcttaatagttaaatgcattgcgttgcagcttctagactgaatggatctacttgccggttataatacatggtctacatggtgaggtgaaaagaaggg

SEQ ID NO: 4555 - DNA, 504 bp, Canis familiaris
ccccccctcgagttttttttttttttttttatgtaaaagtaatgatttactgactataagcaagacaaagcaatagaattgtgcttcttttgcagactgggaacaatgaagtgtttagctacagttttcccatacaaacatgaaacgatattcatatagaataaacaccctcacaaataactgatgggtgatgaacacacaccaagttcgaccaaagcaaaacacaaactgaaaacgattatggtttttcgtattttaaattcaacatgttcactcgatttaaaaatacctggagaagctaaaaataaattgcttttatttcaagacattagagagagggtatatgtcattgtttataactgtaaaagcaattcataaatttgaagtaactgctaaaccacatgttaaaataattttagataaaatgccttcttccagcaattttctggtttacttaaaaatttgttttagaactatagtgatcaatacgcattttaaaaacac

SEQ ID NO: 4556 - DNA, 217 bp, Canis familiaris
ttttctgttttttttttttttttttggaaacccgaacaaaaatcatgcaagggtgtttttattaagctttatatatagattacaggtaggtattacaggcattactacatttgacaagcagtacatgatagtgtaagtaacattggaacaaactgcattgttttgacaactattaggaacagaggacatgtcgccagttcaaaggtatgttaaggac

SEQ ID NO: 4557 - DNA, 500 bp, Canis familiaris
ccccctcgagtttttttttttttttttctacgtgaaatacttctctagtatactttccaaactgcttttggaaggtacaaggtggaaattctaatgatttattgctgtgtctcttcaggtagtattctccatcagaatctcggggaaggttctcttgcttcttctagttttgtgaggatccacctagcgtcctctggggtcttgaagttaattatttttccaaactctttggcatgaaacacagacttcacccgtccctttgcttcaatgcgtaatcttctcccatgaacaatgaatggctctttggtaaattcatcaaaactatactgccactcacatgtaagctgtccaaatgttccttttgttacaaacaatacaccacttttagttatcattaacatatctgttttattgatcatgacatgggtaaaatacttgtattttgcaaatcttccattttccatgacctgtaacatctggtttccagtcccatccctcaa

SEQ ID NO: 4558 - DNA, 511 bp, Canis familiaris
ggtaccggcccccccctcgagtttttttttttttttttttttttttgatgaccttgatcggttggaggagtactgttcaagtattttgtaggttgctcctgtactggaatttgatgtcttctttaagattagactgaggtcatagttttaggaagataattttcctaacaggacttaaatacctacagattaaaaacacatctagacttcatcaaaccattgccatggacgtaattcatatatcatttttagtattgtccctattccatatgactagagacagaaaaatagtattgagtaaagaaaatgatgattttaaaaagctagcttaaaaaaaagaaagggtaactaagaggtagataacattataaagacagcaaacagtagtcattttaatttgctttccaaagtaagcatgttctttacaaattaagattactaggacagaaagtcagacaaaaacgcataaataatatagttatttcaattatgtatcttcagaggtaaatct

SEQ ID NO: 4559 - DNA, 200 bp, Canis familiaris
gcacgaggccgaggctgtgaccaccaccctgcaccaggtgaccagggagaggatggaggaccgctgccggggcgagtatgagcgctccttcctgcgtgagttccacaagtggatcgagagggtggtcggctggctgggcaaggtattcctgcaggatggcccagccaggcctgcatcccctgaggctggcaacacactcc

SEQ ID NO: 4560 - DNA, 358 bp, Canis familiaris
gcacgagcaagagcagccgggccttcagcaactcttcctatagcctggatcacaagacaggggagctggtcttcgatcctgtgtcagcttttgatactggagaatacatttgtcaggcacagaatgggtatgggacacccatgaggtcagaggcggtgcgcatggaagctgcggagttgaatgtggggggcatcgtggcagctgtccttgtcacactcattctccttggattcttgattttgggcatctggttcgcctatagacgaggctactttgacagagcaaagaaagggacctccagtaagaaggtgatttacagccagcccgccgctcgcagcgagggggagttcaggcagac

SEQ ID NO: 4561 - DNA, 338 bp, Canis familiaris
  misc_feature (52)..(52): n comprises a, c, g, or t, or includes no nucleotide
  misc_feature (250)..(250): n comprises a, c, g, or t, or includes no nucleotide
ggacgagatacatgctcattttagaccagattccatcctcttcctcggtcanatagcaaatctttcttattaatacatgttgatttgtcattttagcatttttaacaggtatactttgttcttaccctaatccaattgaggacaagtgcccaggaaactataccaacccactgaaagttcagacagtcataatccttgggaaggttatcttgtggatcctgcatttcttcttgagcgctacatccagtanaccacacaaagtgagaaaccggggctacaccatgatctacctgtcgaccaggcacctgaaaggactcacgctgctgatccactccact

SEQ ID NO: 4562 - DNA, 363 bp, Canis familiaris
ttcggcacgaggccccaggggtgcgggccgggtgatccctcccacacccctccctgggtctctggggagggctcggccacgaggttgtcccgcagcctgcaatgcttcccctccctgctggccctctgccccgcccgggacagctcagactggctcccaaggcacttcctggcacgggcagcaggcttgctgagctggcgggagcccccctggttctgcactagaaccacctggtccgggcctgagagtctgcatttctaaccagctcccggtgacacccaagctcctggacagccgcctcactcgggggaggaaggattgagtccaagctctagaccttatgtgactcttccttcctagccc

SEQ ID NO: 4563 - DNA, 346 bp, Canis familiaris
gcacgagaacccctgccgccaccaacatggagaccttgtaccgcgtcccgttcttagtgctcgaatgccccaacctgaagctgaagaagccgccctgggtgcacatgccgtcggccatgacggtgtacgctctggtggtggtgtcttacttcctcatcaccggaggaataatttatgatgttattgttgaacctccaagtgttggttctatgactgatgaacatggacatcagagaccagtagctttcttggcctacagagtaaatggacaatatattatggaaggacttgcatccagcttcctgtttacaatggggggtctaggtttcataatcctggaccgatc

SEQ ID NO: 4564 - DNA, 158 bp, Canis familiaris
cccaccttctgactaagacaccataccttgaccaccccaccttagctctcctttccccagatttcgagtacctttctgaaccacgacagagtaacatttctacaacacatccattccacatacactgggcacctgtgaagcaggatcttatcttccca

SEQ ID NO: 4565 - DNA, 342 bp, Canis familiaris
gcacgaggaaaggaccaagggggccaagggactggggacctactgtagtctccagaagtcctttctgtatcctccccaagggcctgagccctgtgctcctagcccctcttcctctgccagttcagacagcctcctgcaggtggccatgccccagaagctcctgctgactgaagaggaagcgaaccatctggctgaggagctggtggctgaagaggagcgcatgaaacagaaagcagagaagaaacgactcaaaaagaagcgtcaaaaggatcgcaagcgacaggagcgcttggagcaggatggcggggagcccaaggttgaggccaccccaaatggggatgg

SEQ ID NO: 4566 - DNA, 406 bp, Canis familiaris
gcacgagtaggaggagtcggaagcgcgggcgacctgagtgtgcgtctgcctgccggcgggccccttccccgtgccctcgttggctcagctacgaattgagtcgtgggcgagccgctctcagcgtccagtctggagaacaaggtcgttcgggcaccgcccgtgggagacgagggcagaggaacaatcctgggttctgaacttgtcatccaagaaactcaggagttgacagtctctgcgtccctcactgccctgggacaggacccagcatgtctcaggccaccaagaggaagcatgtggtgaaggaggtgctgggggagcacatggtgccctctgaccagcagcagattgtgagggtactcaggaccccagggaacaatctgcatgaagtggagacagcccaggggca

SEQ ID NO: 4567 - DNA, 341 bp, Canis familiaris
ttcggcacgagctcagatttgacagtgcaataggacagatgtgtggactgttacaagaaccagccacccagcattactcattcctgggacaggaaggtaggagctctgtgtgcttagggcaagctatgaagacccttgttttatttaagagaggaggaaggaaggtgggtcctggtttattttcctcattcctacgagaacttgacagaggctctgctggagtacactgctgctgtgactcacctggagatgctgcctccacttcccctttcctggctaccagtgggtctgaagaccgagtacatgcaaagcccatgtaactggcttgacggacccagaac

SEQ ID NO: 4568 - DNA, 394 bp, Canis familiaris
gcacgagggaacaccctccagaggcttcgatgagaaggcgtacctggcagccaagcagctgaaggccggagaggacccttacaggcagcatgccttcaaccagctggagagtgacttgctgagcccagaccgagccatccgggacacccgccattacagttgcccatctgtgtcctactctgctgacctgccagccaccagtgtcatcatcaccttccacaacgaggcccgctcaaccctcctgcgcacggtgaagagtgtcctgaaccgaactccagccagcctgatccaggagatcattttagtggatgacttcagttcagaccctgaagactgtctgcttctgaccaggatccccaaggtcaagtgcctgcgcaatgatcggcgggaaggg

SEQ ID NO: 4569 - DNA, 371 bp, Canis familiaris
gcacgaggtcgccgccgctgccgcctccgccgcggaggaagacaggacctcccgcgctcctctagcgacccttcgcagagtcccaccgccacaggcctcgggccagcggcgaggagctgtctcccccagcccccgtcccgcggcccccagccgcccccaaccccgccccacgggcccggcgccatgagtgagctggagcaactgagacaggaggctgagcagctccggaaccagatccgggatgcccgaaaagcatgtggggattcaacactgacccagatcacagctgggctggacccagtggggaggatccagatgaggacaaggaggaccctccgtgggcacctggcaaaaatctatgccatgcactg

SEQ ID NO: 4570 - DNA, 377 bp, Canis familiaris
gcacgaggcgaccaggactatattctcaaggaaggtgacttggtaaaaattgaccttggggtccatgtggatggcttcatcgctaatgtggctcacacttttgtggttgatgtagctcaggggacccaagtaacagggcggaaagcagatgtcattaaggcagctcacctttgtgctgaagctgctctacgcctggtcaaacctggaaaccagaacacacaagtgacagaagcctggaacaaagttgcccactcgtttaattgcacaccaatagaaggtatgttgtcacatcaattgaagcagcatgtcatcgatggagagaaaaccattatccagaatcccacagaccagcagaagaaggaccatgaaaaagctga

SEQ ID NO: 4571 - DNA, 365 bp, Canis familiaris
gcacgagctcgagcagctgccgcggaaccgcgggacggacccggacttgcccgcccgccatggccgagagcgactgggacacggtgacggtgctgcgcaagaagggccccactgccgcccaggcgaagtccaagcaggccatcttagcagctcagagacgaggagaagatgtggagacttccaagaaatgggctgctggccagaacaaacagcattcaatcaccaagaacacggccaagctggaccgggagactgaggagctgcatcatgaccgtgtgactctggaggtgggcaaggtgatccagcagggtcggcagagcaaggggctgacccagaaggatttggcaacgaaaatcaacgaaaag

SEQ ID NO: 4572 - DNA, 421 bp, Canis familiaris
gcacgaggtgttgacattctcgagctgctgctgtttctgcggccgggggaaccgtcggggaaggatggtgtgcgaaaaatgtgaaaagaaacttggtactgttatcactccagacacatggaaagacggtgcaaggaataccacagtggtggaagaaagttgaatgaaaataaagctttgacttcaaaaaaagcaagatttgatccatatggaaagaataagttctccacttgcagaatttgtaaaagttccgtgcaccaaccgggttctcattactgccagggctgtgcctacaaaaagggcatctgtgcaatgtgtggaaaaaaggttttggacaccaaaaactacaagcaaacatctgtgtagatatattgatgacgtttctggctttctacatgattctacattttgctttgaattt

SEQ ID NO: 4573 - DNA, 380 bp, Canis familiaris
gcacgagaaagaaatacatcacttttcaacttcaaccttgtgtaaagaagacatctctagaaactaagaacttggctttcaagatctttaaatcaccaaatattgtgatgacatctttgccataagttgggagataaactttaatgtggccatgtggaagtgccagggcccaaacactccacaagaagtgagaatgaatgttcctgaatagctgttttgccatttcattaattctggtcttaaccagaccatcattctaatttgtggatagagcaagaaaagtgacacaggtttgttatctctccagctactatctcttcaggctttctgaactggcttgaatcctagaggttccatctgagaacttaacctcattcaat

SEQ ID NO: 4574 - DNA, 406 bp, Canis familiaris
gcacgagccgatgccgggacgagaagtgtgtgtatgagacgtgggtgtgcgatgggcagccagactgtgctgacggcagtgatgaatgggactgctcctatgccctgccccgcaaggtcattacggctgctgtcatcggcagcctggtgtgcggcctactgctggtcatcgccctgggctgcacctgcaagctctatgccattcgtacccaggagtacagcatcttcgcccccctctcccggatggaggctgagatcgtgcagcagcaggcgccaccctcctatgggcagctcattgcccaaggcgccatcccgcctgtcgaggacttccctacagagaatcctaatgataactcagtgctaggcaacctgcgttctctgctacagatcttgcgccaggacatgac

SEQ ID NO: 4575 - DNA, 395 bp, Canis familiaris
gcacgaggattggggcgactttggagtagaagtggctgccgaagggaccgattctggcatctctgctcaggctgctggaattgactggggcatctccctggaatcagactcaattgtagctggaggtgatgggattgactggggagacgacgccgctttgcagatcacagtgctggaagccggaacccaggctccagaaggtgttgctaggggcccagacgccctgacacttctcgaataccccgagacccggaatcagttcatcgatgagctcatggagctcgagatcttcttgtcccagagagccgtggagatgagtgaggaggcagacattttgtctgtgagccagttccaactagctccagccatcctgcagggccagactaaggagaaga

SEQ ID NO: 4576 - DNA, 302 bp, Canis familiaris
ttcggcacgagcctgtatcaaagtcaccaagtactttctcttcctcttcaacttgctcttctttatcctgggcgcggtgatcctgggtttcggagtgtggatcctggccgacaggagcagtttcatctctgtgctacagacctcctccaactccctcaaggtgggggcctgtgtcttcatcggtgtgggtgccgtcaccatgttcatgggcttcctgggctgcatcggtgccatcaaggaggtccgctgcctgctggggctgcactttgccttcctcctcctcatgctcatcgcccaggtgg

SEQ ID NO: 4577 - DNA, 329 bp, Canis familiaris
  misc_feature (294)..(294): n comprises a, c, g, or t, or includes no nucleotide
gcacgagctggagtcgccgggggcggcagcggccagcggggctcaggggtcgcccagtccccgcaacagcagcagccgccgcagcagccgacgcctcagcagccgacgccccccaagctggcccaggccacctcgtcgtcgtcctcgtccacctcggcggcggccgcctcctcctcgtcctcgtccacctccacctccatggccgtcgcggtggcctccggctccgcgcctcccggcggcccggggccaggccgcacccccgccccagtgcagatgaacctgtacgccacctgngaggtggatcggagctcgtccagctgcgtgcccag

SEQ ID NO: 4578 - DNA, 391 bp, Canis familiaris
gcacgagccagcgccctcccggagcggagccctggccatggccggcaagggcctgcaggacctgaagcagcacgtgcagggggcggcccaggaggcggtgactgcggcaggagcgtcggcccagcaagtggtggatcaggccacagaagcaggacagaaagccatggaccaggtggccaagtccacccaggaaaccatcgacaagactgctaaccaggcctctgagactttctcaggttttgggaaaaaattaggcttcaagtaatgccagagggagacatggatgactggcctccaggccctgagctgcggcgagcctttggcctgctgccctattaaagccctggttcctaaaaaaaaaaaaaaaaaactcgagggggggcccggtacc

SEQ ID NO: 4579 - DNA, 420 bp, Canis familiaris
gcacgagcagatttcttataaccaagttttttgctaaccaccccataggagggtggtttacagggcatatgtaaattgatcacttgccccataacagacctttcgtgcaggaaaccagatttcggattagaagtttggtgagagaaaagttagaacaaaagatgtaatgataaacatttcacttggtctccatgaggtgttgaaggagctggtctctattctagggatgtctgattctagggtccagtaattcagaaaccaattaaggtctatgctctcctctcccttgtcattgctgaaatgatttaggtagagttctttttatgtactttcttttgttcgatctttccagaagcctctcagatcataactcattctgcaccttcccaacacttcttttattaacattgtagttgagca

SEQ ID NO: 4580 - DNA, 430 bp, Canis familiaris
  misc_feature (398)..(398): n comprises a, c, g, or t, or includes no nucleotide
ttcggcacgagcaagaacgggcacctggctgtggtggccccacggctgaactcacggtgatgaaggcgcccactggaccccttcccaactcccaatgctttgcttctcccccttcccttcccacttaccaaagactcgagcttctagacagggacccagggataccttgaagcccaccgacaaattcctgccttttgctcacccctctcgtgagggagcagcgggggccagggagctgccccagatgtgggccaggccgggccacagcaataggaaagccggggccaaaggcagctatgccagccccactgccgatgccaaatatttgagagaagggaacttttgctgaggttttctctgagattttttgatgctttataagaaactattttttaaanaaagccatcttcccgccccaagacacactgga

SEQ ID NO: 4581 - DNA, 386 bp, Canis familiaris
gcacgaggcgtgacgttacgcgtgatgggtgggagggcaggagcaggggcgacgcgcctagaggaaggcgggtctcggagctgcagaaaccggacgcccaggagctcgggaaagcaaaatgggtgagttgcccttagatatcaatatccaggaacctcgctgggaccaaagcactttcctgggcagagcccggcacttcttcactgttaccgacccccgaaatctgctgctgtctggagcacagctggaagcttcacggaacatcgtgcagaactacagggctggcgtggtgacacccgggctcactgaggaccagctgtggagagccaagtatgtgtacgactctgccttccatcccgacacaggggagaaggtggtcctgattg

SEQ ID NO: 4582 - DNA, 344 bp, Canis familiaris
gcacgagctcgtggtggcggcagcaggtgcgccctcgacatgcagaacgacgccggcgagttcgtggacctgtacgtgccgcggaaatgctccgccagcaaccgcatcatcggcgccaaggaccacgcgtccatccagatgaacgtggccgaggttgacaaggtgaccggcaggttcaacgggcagttcaagacctacgctatctgcggggccattcgcaggatgggcgagtctgatgactccatcctccggctggccaaggccgacggcatcgtttcaaagaacttctgacgggagaagaccacggatgggggacatttgtcgtaaatctcgtgccgaattcg

SEQ ID NO: 4583 - DNA, 385 bp, Canis familiaris
gcacgagaagataaaggatgcgtttgatcggaacccacaacttcagaatctactacttgatgactttttcaagtcagcggttgaaaactgccaggactcgtggcggcgggcagtgagcaccggagtccaggcgggtgtccccatgccctgcttcaccaccgccctttccttctatgatggatacagacacgagatgctaccggccaacctcatccaggctcagcgggattactttggggctcacacttacgaactcttagccaaacccggacagtttatccacaccaattggacaggccacggtggcagcgtgtcgtcctcttcatacaatgcctgaccagactggttacccgccacaattccctagactgggacattccacttg

SEQ ID NO: 4584 - DNA, 321 bp, Canis familiaris
gcacgagcccacctgccacctgggctgtgcccgctgctgcctgcagcccggcctccccggtacctcagttcgccccctctgcttcctgtccccttgcacagcttgcagttccacgctctcccggcataccccaggggacccagtttctgcctgcgcaggatgaatttgctgccatcccagccggccaggcatgaggcaggcattgcttcccactgggttgtgcctcttttgtgttgcgtgttgcttggggttccagggccccttgcctctggtcctgcaggagggtagacggtgcaggcagagtacagttttcctggggca

SEQ ID NO: 4585 - DNA, 365 bp, Canis familiaris
gcacgagctggctgctcgcggctgagcagcctcgccctctccctgcagccccaggtctcccgcccagggcactttggggacctccagcctccaggacggcgcggacactgcccgactgccttttgtgtgagtagggtcgcccagagcgccggaggggaccgcccggccttcgcggatcgctctttggaccgccggtcctcgagcggagcctcttcctccagctgagaccctcgccccgccggaaggatcgatttattttctccgggtgacaaaaagatttgggaccaccgacccaaaccttctctttgggtgacttaagactccgccgcaagttgtctttccgtggggccgccccccaaatttgc

SEQ ID NO: 4586 - DNA, 406 bp, Canis familiaris
gcacgagggcgcctccaccaccagtgcctcaatttccccacctttcctatttccccggcaaagattttcttcaagacactgctccgctgggaaatctaagacaaagtcaagtgccccttcttttgccttaaatttccatatctgaaactaagaaggatctgacccccaccttgtgtccaggtggtcctggttggtggcatttgaggatctttgtatccctgcaagtgccataagcagacctcgccaaggcctgatgagtcagacatttccagagctcagctttacttctgtgtcagcagtcatcaaaggccctacctgtggtcttaaaaacaagcaggcacacatttgggaggacgggattaaggctagtgggaaagtcacccatttcctactttttagtaatagg

SEQ ID NO: 4587 - DNA, 219 bp, Canis familiaris
ccgggctgcaggaattcggcacgagcagcggtttagcgcctgcctttggcccagggctcgatcctggagacccgggatcgaatcccacgttgggctcctggtgcatggagcctgcttctccctctgcctatgtctctgcctctctctctctgtgtgtgactatcataaataaataaaaatttaaaaaaaaagagtctctttaaaaaaaaaaaaaaaaaa

SEQ ID NO: 4588 - DNA, 439 bp, Canis familiaris
ccgggctgcaggaattcggcacgagatctcctctggctcttccgcctccagtgtcacagtcacccgcagctaccgcagtgtggggggcagtgggggtggcagcttcggggacagcctggtcacccgctcctacctcctgggcagctccagcccccgaacccagagcccccagaactgcagcatcatgtgatctgggacctgccaggccgggtgagggtggaggctgcctgcctcctttctgcctcacgcccaccctgcccacaccggaccagcacctcatgggaggggcttgaagccaaagaaaatacccctttggtttttttcttccatgttttgttttttttctaagagaagttattttctacagtggttttatactgaaggaaaaacacaagcaaaaaaaaaaaaaaaaaaaaaaaaaactcgagggggggcccgg

SEQ ID NO: 4589 - DNA, 423 bp, Canis familiaris
gcacgagccagcttggggtggcttgctagaataggtgtgaaggtttcaggtcgcagcctgtgggactactgctgggtgtgcaggggtgctccagctgcacccctggtttccttttttaagtcttaaatgatgccctcccccctccaagccatcatcctttctcttcccatgaccaccctcggccgaagcatagattgtaaccccctctgctcccctctgaaattggcctttggtgaggaattcagggctttccccatatcttctcccccaccttaatcgaggggtgctgctttttccttcctcctcaagtccctttttgcaccatcacaacccaatacttccttgctttggccagaagccatcaggtaaggttggaaagagtctctgacttccctcgtttagtttggaaccacatttactcac

SEQ ID NO: 4590 - DNA, 425 bp, Canis familiaris
gcacgagcaccgagcagcggaatcggcggcggagaatggagagtagcgaggaggcagcagtcgagaagtgccgcgtccacttgcgccccggcacgctgcgcgacgccgctcgcgccacgctgcatcttctgccttgcgaggttctagttaaccggcccgcccccgtggaccgcttcttcaccccagccattcgacagggtcccgacggactcgaagtgtcgtttcggggccgcaaactacgaggcgaggaggtggtggtgcctcctggcctcgtgggatacgtgatggcgatggaggagcagggagaggtgtcgatggagaaggacttctcggagggtgacgagcgagaggagcaggagcgggcagaaccccgcgaggcgctggagcgggacttcgaccagtttatcggagccatcgccagtttc

SEQ ID NO: 4591 - DNA, 368 bp, Canis familiaris
ccgggctgcaggaattcggcacgagcgctgccgtaaggaaaggagcagccgccatgtccgctcacctgcagtggatggtcgtgcggaactgctccagcttcctgatcaagaggaacaagcagacgtacagcacggagcccaacaacctgaaagctcgcaactccttccgctacaacggtctgattcaccgcaagactgtgggcgtggagccggcggccgacggcaagggtgtggtggtggtcctgaagcggagatcaggccagcggaaacccgctacctcctatgtgcgaactaccatcaacaagaatgcccgggccaccctcagtagcatcaggcacatgatccgcaagaataagtaccgtccggat

SEQ ID NO: 4592 - DNA, 416 bp, Canis familiaris
ccgggctgcaggaattcggcacgagggtttgggagggctttgtgggcgagcctctggtcccccacccgctgacaacatggatgaggacgggcttcctctcatggggtcaggcatagacctgaccaaggtgccagctattcaacagaaaagaacggtggcatttctaaaccagtttgtggtgcacactgtacagttcctcaaccgcttttctacagtttgtgaggagaaactagcagacctttctcttcgtatccagcaaattgaaacaactctcaatattttagatgcaaagttgtcatccattccaggcctagatgatgtcacatttgaagtatctcctgtaagcgtcactggtatcacaaatgaatcacattctgaaactacttcagagaaatcacagcagaacagtttacaag

SEQ ID NO: 4593 - DNA, 449 bp, Canis familiaris
ccgggctgcaggattcggcacgaggaacaacctcaggttgaactgttcgtgaaggccggcagtgatggggccaagattgggaactgccccttctcccagagactgttcatggtactctggctcaaaggagtaaccttcaacgtaaccactgttgacaccaagaggcggaccgagacagtacagaagctgtgcccaggagggcagctcccattccttctgtatggcactgaagtacacacagacaccaacaagattgaggagtttctggaggcagtgctgtgccctcccaggtaccccaagctggcagctctgaaccctgaatccaacacggctgggctggacatatttgccaaattttctgcttacatcaagaattcaaacccggcactcaatgataatctggagaaggggctcctgaaagccctgaaagttttagacaattacttgac

SEQ ID NO: 4594 - DNA, 445 bp, Canis familiaris
ccgggctgcaggaattcggcacgagaccgcatctacgtggcttctgtgcaccaggacctttcagacgacgacatcaagagcgtatttgaggcctttggcaaaatcaaatcctgcacgctcgcccgggaccctacaactggcaagcacaagggttatggtttcattgagtatgaaaaggcccagtcgtcccaggatgccgtgtcttccatgaacctttttgatctgggtggccagtacttgcgggtgggcaaggctgtcacaccccccatgcccctgcttacacctgccacacctggaggcctcccgcctgctgctgctgtggccgcggctgcagccacagccaagatcacagctcaggaagcagtggctggtgcagcggtgctgggtaccctggccacacctggattggtgtaccctgcactgactctggcccagcctctggggg

SEQ ID NO: 4595 - DNA, 401 bp, Canis familiaris
ttcggcacgagggcctgacgcggacgtgtggcccgctgcgcccgctcttcgcgccccgtcgctcccgccgcccgcacgatggcccacaagcagatctactactcggacaagtacttcgacgagcactacgagtaccggcatgtcatgttacccagagaactttccaaacaagtaccgaaaacccatctgatgtctgaagaggagtggaggagacttggtgtccaacagagtctaggctgggttcattacatgattcatgagccagaaccacatattcttctctttagacgacctcttccaaaagagcaacaaaaatgaagtctttctggggatcatcaaatctttttcaaatttaatgtatatgtgtatataagggtagtattcagtgaatacttaaaatg

SEQ ID NO: 4596 - DNA, 423 bp, Canis familiaris
gcacgagagaagaagaagggccgttctgccatcaacgaggtagtgaccagagaatacaccatcaacattcacaaacgtatccatggagtgggtttcaagaagcgtgcccctcgggcactcaaagagatccggaaatttgccatgaaggagatgggaactccagatgtgcgcattgacaccaggctcaacaaagctgtctgggccaaaggaataaggaatgttccataccgtatccgtgtgcggttgtccagaaaacgtaacgaggatgaagattcaccaaacaagctctacacgctggttacctacgtacctgtcaccactttcaaaaatctacagactgttaatgtggatgagaactaatcgctgattgtcaaataaaggtataaaactgaaaaaaaaaaaaaaaaaactcgagggggggcc

SEQ ID NO: 4597 - DNA, 417 bp, Canis familiaris
gcacgagctggcagcagcggcctggcagccgcccgcctcctgtcgcgctccttcctcctgcaacagaatggaattcggcattgttcctatatagcttcccggaaacatctctatgttgataaaaatacgaaggttatttgccagggtttcactggtaagcagggcacgtttcatagccagcaggcattggattatggcacccagctggttggaggaaccactccagggaaaggaggcaaaacacatctgggcttaccagtctttaatactgtgaaggaggccaaagaagagacaggagcgacagcttctgtcatttatgttcctcctccttttgctgctgctgccatcaatgaagctgttgaggcagaagtgcccttggttgtgtgcattactgaaggtataccacagcaggacatg

SEQ ID NO: 4598 - DNA, 396 bp, Canis familiaris
  misc_feature (323)..(323): n comprises a, c, g, or t, or includes no nucleotide
gcacgagctggcgccggcggcgggtactacccgggcgggtatggaggggcccccggaggacctacgtttcccggacaaactcaggatccgctctatggttactttgctgccgtagctggacaggatgggcaaatagatgctgatgaattgcagagatgcctgacacagtcaggcattgctggaggatacaaaccttttaacctggagacttgtcggcttatggtttcaatgctggatagagatatgtcaggcacaatgggtttcaatgaatttaaagaactctgggctgtgctgaatggctggagacaacacttcatcagttntgacagtgatcagagtggaacagtggatcctcaagaactgcagaaggccttgaccacaatgggttttcgtttg

SEQ ID NO: 4599 - DNA, 407 bp, Canis familiaris
gcacgagaaaaaaacaaaacaaaaataaataataataagtaaaataaatctgatactccatttgatcattgtaaatatttgatcttaagtcacttgacagtgtttgtttgaaccgtgtttgttttttctttgatgggtttaaaagaaatcatccaaagggagaaagagcagtacgccacttctgaaaacaaaacaacaaaaaaaaatagaaatgtttgctcttttctaatccaaaggatatatttgcagcatgctcgacttcaccaactctgaatgatgttttcatggacactgttatcactgagaccttggtatggtgcagcctttaatctctttcatatatcttccttgtgattttttttcctcttactgtagtttgactatgccttacctttgtaaatattttg

SEQ ID NO: 4600 - DNA, 418 bp, Canis familiaris
gcacgagaggactctcctaaacgtcccaaggaggcagaagaccctgaagaggaggagaaggaagtagcctccttggagggtgagaggcccctccccgtggaggtggagaaaaacagcaccccttctgagcccagctctggccgggggcctcctcaggaggaagaagaggaggaggaggaagaggaggaagaggctgccaaggaagatgctgaggccccaggcatcagagatcatgagagcctgtagccaccaatgtctcaagaggagcccctgccccgttcctgctgctgtctgggtgctactggggaaactggccatggcctgcaaactgggaacccctccccactccatcctgttctactgttccacctactctccccactccaagcccagctcctggagattgacctggatgggg

SEQ ID NO: 4601 - DNA, 383 bp, Canis familiaris
gcacgaggagaactagtctcgagttttatttgtgtcatttttgttttttgtagcagaattttccactaaggatggtccttgctaataagtgacattgattccaaaggactggggcgtctaggtggggaatgggctgtagggggtgaccctcagcaaactccccatcctcaaaaatcatgggagcttcagtgtttgggaagacattttaccctcttgttggttacacggaccaatgagattttcaattgagctgcccttaagaaatacagaagggcattgctcttggtgctccctagatgggattttcctttttctgttgtttacagtctcttatcagattatatttcctaatgtaaaacaaatgctctattgttttctaaaca

SEQ ID NO: 4602 - DNA, 125 bp, Canis familiaris
gcacgaggaaagcctggagcctgacgaggccatgctgccaggccagggccaggtcgccatgccctgggcactcagcccccagccccagctggcatccagccccgagcagggagaaggcaagggtg

SEQ ID NO: 4603 - DNA, 406 bp, Canis familiaris
cacgagggtggtaggaggcctgtgtgggttcctgagaggcggagtggaggctgtgtcccacaaactctggcatcatgaacatatttgatcggaagatcaactttgatgcactcttaaaattttcccacataaccccctctacacagcagcacctgaagaaggtctatgccagttttgctctctgtatgttcgtggcagctgcaggggcctatgtccatgtggtcactcatttccttcaggctggcctgctctctgccttgggctccctggggttgatgatttggctgatggcaacacctcatagccatgaaactgagcaaaaaagactgggacttcttgctggatttgctttccttacaggagttggcctgggccctgctctggagctgtgcattgccatcaaccc

SEQ ID NO: 4604 - DNA, 403 bp, Canis familiaris
gcacgaggaaacagtggttttcaaatcacaacaagcaacatgtggtggtgataacaaaaggaatgatttgatcttgatgaatggaagatactgacctttcaagtagtccacttaatcttgaagttgtcttagaaatttgtaagaaaaacttgagaatcaagaaagaagtttctgcaagaaaaatatgaagcaaattttgtacacagagagccagctgaatataagcaatgaagatgaacattcatggattacctactatatccgaaatcttgccatgagtgctatatgtgaagatagaggaggtgccatttataattcattcccagcacaggggaaaaatgatgataggactgaaatatttcatttcataaatgttctaaggaaatatgagagaaaagaggca

SEQ ID NO: 4605 - DNA, 404 bp, Canis familiaris
gcacgagggaaaatcagaaacttaactcttttgttgcagatagtcatcagtggctctgtaagaacccagaggaaaagaaccagaaggtttctgttaaatgcatcttgccttatctttttttattactatgtacaaagatttttttacacaaagaaacttaatgctgtattaataaattcagtgtgtagcttcaattggagtagttccaaaagtgaagattttgtgaggaataagtgcaaactttttttttaattctttgaaattgttgattctttgtgtctgcaatgaaattgtactccttgacagttgatagattatatattcttccatctatcaaacttgcattccactatatttatttttgccaaaagatgagttttatttgtttgaaatctgagacacta

SEQ ID NO: 4606 - DNA, 384 bp, Canis familiaris
ccgggctgcaggaattcggcacgagctttttagaatcttctgcaaagtcaaagatcaacgttaatgagatattttatgaccttgtcagacagataaatagaaaaacaccagtggaaaagaagaagcctaaaaagaaatcatgtctgctgctttagacttacagtaagcagcagctctgagccagattacaggaatgaagaactgttgcctaattgggaagtgccagcattccagacttcaaaaattaaatctgaagaggcttctcctgttttatatattatgtgaagaatttaaatcttatattggtttgcacaaattccctggagaaaaaaaattgctctgtgtatatctcttggaaaataagacaatagtatttctcctttg

SEQ ID NO: 4607 - DNA, 352 bp, Canis familiaris
ccgggctgcaggattggcacgagctagagtgtgagaccagctgccctgtggggactgagcgatgcaagatgtgttcacatctcacgtgatgacatcaacaaccctggcttgtctctgcaaacagtgtcaggatgtgcctgtgtccctaggagcataatgtgaggaggtggggagattggcccaccctgcccaccatgacctgtccctaatctgatgtgcgctctcttctctgatgtgctttcctgtccagcagagggagggctggaccatctccatccctgtctttgtttcatgttgggctgagtgtagtgccttacttttctattcaaaatgagaatccagggtagccctg

SEQ ID NO: 4608 - DNA, 353 bp, Canis familiaris
gcacgagctacgcagatgacatggacgccacctaccgccccatgtactcgagtgatgtgcccctggaccccctggacatgcacatggacatggacgcggactatcccatcgacacttacagcgacggcctgaggcccccctaccccacggcggaccatatgctggcctagctggctgcactccagtacggcaccttcctgcttgcaggcttcccccatgcctggggcctctgggccattgagacatgcttttcttccccgctagaacctgcttctcacaaaggccctgtcatctttcctttgaaaccttggcccttttctgggggaagtgagtgtggggccttttgccattga

SEQ ID NO: 4609 - DNA, 389 bp, Canis familiaris
gcacgagaccatttttatttggggcatgtatagttcttatgtctttcctggttgccttattcatccctgaataccgtaaaggcagtggaattcaaaaacatagcaacagcatcagcggcagcctgatcaataccccagagcggggcagtgatgaggacattgagccactactgcaagacaacagcatctgggagctctcttccttcgaggagtctgggaatcagtgcactgagctgtaaacttggcagaaaggggggttctgcacacaccttctctcagagccgtggggagccacaccacaaggagacttcatggtgctggaggggagatgctagtggcatcctacagggccaggtttgagaagtgaccctctccatccctccacctct

SEQ ID NO: 4610 - DNA, 396 bp, Canis familiaris
gcacgaggtgcgcggctgcccttgccgcagctgccgtggcggcggccccgcgctccgtgtacgccttctcagcgcgtccgctggccggcggggaacctatgagcctgggttccctgcggggcaaggtgctgctcatcgagaatgtggcgtcgctctgaggcacaacggtccgggactacacccagatgaacgagctgcagcggcgcctcggaccccggggcctggttgtgctcggcttcccgtgcaaccagttcgggcatcaggaaaacgctaagaacgaagagatcctgaattccctcaagtacgttcgacctggcggcgggttcgagcccaacttcacgctttttgagaagtgcgaggtgaacggcgcgcaggcgcaccccctcttcgccttcc

SEQ ID NO: 4611 - DNA, 447 bp, Canis familiaris
ccgggctgcaggaattcggcacgagaattccgataacgaacgagactctggcatgctaactagttacgcgacccccgagcggtcggcgtcccccaacttcttagagggacaagtggcgttcagccacccgagattgagcaataacaggtctgtgatgcccttagatgtccggggctgcacgcgcgctacactgactggctcagcgtgtgcctaccctacgccggcaggcgcgggtaacccgttgaaccccattcgtgatggggatcggggattgcaattattccccatgaacgaggaattcccagtaagtgcggcttcgggagaagttgcaagaggagatgcttcagagagaggaagccgagagcaccctgcagtctttccgacaggatgttgacaatgcttctttggcacgtcttgaccttgagcggaaagtggaatccttgcaag

SEQ ID NO: 4612 - DNA, 200 bp, Canis familiaris
ccgggctgcaggaattcggcacgaggtttggcgcctgcctttggcccggggctgatcctggagacccgggatcgaatcccacatcgggctcccggtgcatggagcctgcttctccctctgcctgtgtctctgcctctctgtctctctctgtgtgactatcatgaataaataaataaaatcttaaaaaaaaaaaaaaaaaa

SEQ ID NO: 4613 - DNA, 223 bp, Canis familiaris
  misc_feature (209)..(209): n comprises a, c, g, or t, or includes no nucleotide
  misc_feature (213)..(213): n comprises a, c, g, or t, or includes no nucleotide
  misc_feature (216)..(217): n comprises a, c, g, or t, or includes no nucleotide
ccgggctgcaggaattcggcacgagctgatttattataatcttttcaatatttctcaccctcttcatcctatttcaactaaaaatttcaaatcactactacccagaaaacccgataaccaaatctgctaaaattgctggtcaacataatccttgagaaaacaaatgaacgaaaatctattcgcttctttcgctgccccctcaataatanggtnctnnccctta

SEQ ID NO: 4614 - DNA, 368 bp, Canis familiaris
ccgggctgcaggaattcggcacgagccgctctggctggcccttgggggcggggctgtaggggaaagcgccaaatccgctgagatggctctgagagattcctctgcgaatccgttttcagttatcaagtggcatctacacttaaacaggtgaaacatgatcagcaagttgctcggatggaaaaattagctggtttggtagaagagctggaggcagatgagtggcggtttaaacccatcgagcagctgctgggcttcacaccctcttcaggttgaccttgccgggatggtcacctctgcaagtgcagggacagcgagggacttttcttggaacatacgcagccatccagagattcacagctcctttgctg

SEQ ID NO: 4615 - DNA, 368 bp, Canis familiaris
ccgggctgcaggaattcggcacgaggtgaaaaccaccgctaaacctaaaccaaaatgggaaaggagaagactcacatcaacatcgtcgtcattggacacgtagattcgggcaagtctaccactactggccatctgatctacaaatgtggtgggatcgacaaaagaactatcgaaaaatttgagaaggaggctgctgagatgggaaaaggctccttcaagtatgcctgggtcttggataaactgaaagctgaacgtgaacgtggtatcaccattgatatctccctgtggaaattcgagaccagcaagtattacgtgaccatcattgatgccccaggacacagagactttatcaaaaacatgattacagg

SEQ ID NO: 4616 - DNA, 416 bp, Canis familiaris
ccgggctgcaggaattcggcacgaggcggcgatggcctccttcgtgacggaggtcctggcgcactcggggaggctggagaaggaggacctgggcactcggatcagccgcctgacccggcgggtggaggagatcaagggtgaggtgtgcactatgatcagcaagaagtatagtgaattcctgcctagcatgcagagtgcccaagacctggttacccaagtggataagctgtctgaggacattgacctgctgaaatccaggatagagagtgaggttcgccgggatcttcatgtatcaactgctgaatttacagacttgaagcaacagctggaaagagactcagtagtcctaagtttgcttaagcagctgcagcagttttctgctgctattgaagaaagcaagaacacgaaataccaag

SEQ ID NO: 4617 - DNA, 423 bp, Canis familiaris
gcacgagcttttctcctttgttagtaccttcggtttagttcctccatccttatcctcagacccacccccagccagtggtttaatccacataccactaaaggctaataccacagaggcctacttgtggctccctcatatggtaacacctgttcctgtggacaggaaacaacagctgacactgaaggtccatcacaactgtctcacattacccgaggacacatccctcatcaggtattttaggatgtctctgagagccatcaaggcaagagagaactctaaactccttcttggttccagcccagagtttggggaaaattggaggaagaagtaagataggaaaagtcatggtgacctaggattggaacctttctgccctttggtttacagactgccttctgtcccagagcagctgagagatccttg

SEQ ID NO: 4618 - DNA, 432 bp, Canis familiaris
ccgggctgcaggaattcggcacgagtttcaatatttctcaccctcttcatcctatttcaactaaaaatttcaaatcactactacccagaaaacccgataaccaaatctgctaaaattgctggtcaacataatccttgagaaaacaaatgaacgaaaatctattcgcttctttcgctgccccctcaataataggtctccctattgtggtactgatcgtcatattcccttccattttattcccaacacccagtcgcctaatcaataatcggttaatctccattcagcaatgactaattcaactaacatcaaaacaaatactagcaattcataaccaaaagggacgaacctgagctctcatacttatatcactaattctatttattggctcaactaatctacttggactattacctcactcatttacgcccacaa

SEQ ID NO: 4619 - DNA, 368 bp, Canis familiaris
ccgggctgcaggaattcggcacgagaggatgtggtgaccctcttagctgagggcctacgtgagagccggaagcacatacaggatgagaagcttgtccgcttcttcttggacaaaacactgacttcgaggcttgggatccgcatgttggccacacatcatctggcgctgcatgaggacaagcccgactttgttggcatcatctgcactcgcttgtcaccaaagaagattattgaaaagtgggtggactttgccagacgcctatgtgagcacaagtatggcaatgccccccgtgtccgcatcaacggacatgtggccgcccgcttccccttcattcctatgccgctggactacatcctgcctgaactcct

SEQ ID NO: 4620 - DNA, 448 bp, Canis familiaris
  misc_feature (441)..(441): n comprises a, c, g, or t, or includes no nucleotide
ccgggctgcaggaattcggcacgagcagggcctcacagccactgtgctgaagcagggatctaaccaggccatccgcttcttcgtcatgacctccctgcgtaactggtacagaggggacaaccccaacaagcccatgaacccactgatcactggagtgtttggagctgtggctggtgcagccagtgtcttcgggaacactcctctggatgtgatcaagactcgcatgcagggcttggaggcgcacaaataccggaatacatgggactgtggcttgcagatcctgaggaatgaggggctcaaggcattctacaagggcaccatcccccgcctgggccgggtctgcctggatgtggccatcgtgtttgtcatctacgatgaagtggtgaagctactcaacaaagtatggaagacagactgagtcactgagggggtctgcatggnggctgcc

SEQ ID NO: 4621 - DNA, 400 bp, Canis familiaris
ccgggctgcaggaattcggcacgaggccagacccggagctgccgcgccagtcgtcgagcaggtcctcgccccgttagttcttgtcccggagcttcgcccgacacaccggctagcgaggcgtctctgccgccctcttcctccctcagctcctcttccttcgctcagtttgttgggagcgtgaaaggaggaggcccggggacgcccccaaaaccccttctgctcctgcccatcgcaagtgccgctcctgccatgggcctcaccatctcctccctcttctcccgcctcttcggcaagaagcagatgcgcattttgatggttggattggatgctgctggcaagacgaccattctgtataaactgaagttaggggagatagtcaccaccattcctaccattggtt

SEQ ID NO: 4622 - DNA, 413 bp, Canis familiaris
ttcggcacgagagccttccggcccagcagcgcgtcaggccccccgcggtccccgcccctcctgcgtcccgggagccggctcggtccggagccgcgcgccgagcctccgggcatgccccgctacgagctggctttgatcctgaaagccatgcagcggccagagactgctgctgctttgaaacgtaccttagaagccctgatggacagaggggcgatagtgaggcacttggaaaaccttggcgaccgagctctgccttacaggatttctgcccacaatcagcggcacgttagaggagggtatttcttggtggatttttatgcaccagccacagctgttgagagcataatggaacatttgtctcgagacgttgatgtgattagaccgaatgttataagacaccctctgacccagga

SEQ ID NO: 4623 - DNA, 208 bp, Canis familiaris
ccgggctgcaggaattcggcacgagcagccatgcaaaagacagtcaggaaacaagtcagcttgatgaccacagtatggaaaccaagggccgcaagcactcccaagagtataagctgagagcaagtgatgagagcaatatgcattcccatgagattggtagccaggaaaattctgaagtcagcagtgaacttgtcagccaattaagtca

SEQ ID NO: 4624 - DNA, 440 bp, Canis familiaris
ccgggctgcaggaattcggcacgagggaataagcatgcagagaatttgaccgcagctgggaagtgagccaagagaactctgaagaacgatgagaatcgtgtgttcttcgatatgcccttctgtccaagtacaaagctggacacagcaggcatagacagcctgcagtatggccatgttccagaaaagctgaggccaagactcctctaagaactttcttgagccaggacctagggccagcagtgataaagttagaagaggaagagcactggcatcctttgatctgtaaccggttacagaaccttctaaactgctcatagggctcaggtttgctgctggagctggacttccaaagcacccacttcgaggccaggctcatctttaaattcacattaaaccgagaagacggttaaagccaacacttccagtactgtctggggctg

SEQ ID NO: 4625 - DNA, 325 bp, Canis familiaris
gcacgaggggagaactagtctcgagttttttttttttttttttgaattgccacttcatgccttcggcccttttccccattgtgacatttgtatttttctctttgatttgcacaaagctctcacgtatctgctgggagcagatgaagtaggggcatcccttgtggcagatgaatgacagagccccatgtcttgagcctgcatcctctcctcagggatgccagcaattcttagggctctgaaagagtccctgaaacctagaaattgtcctctttctgacacttccgtgcctccacctcctctcccatcctctttggggtaccttagg

SEQ ID NO: 4626 - DNA, 377 bp, Canis familiaris
ttcggcacgagagtccggggagcacatcatcgcgggggctggggagctgcacctggagatctgtctgaaggacctggaggaggaccatgcgtgcattcccatcaagaaatctgaccctgttgtctcctatcgtgagaccgtcagtgaggagtcgaatgtgctctgcttgtccaagtcccccaacaagcacaaccggctgtacatgaaggcacggcctttccctgacggcctggctgaggacattgacaagggtgaggtgtctgcccgccaggagctcaagcagcgggcccgctatctggcagaaaagtatgagtgggatgtggctgaggcccgcaagatctggtgcttcgggcctgacggcactggccccaacgtcc

SEQ ID NO: 4627 - DNA, 384 bp, Canis familiaris
  misc_feature (111)..(111): n comprises a, c, g, or t, or includes no nucleotide
ccgggctgcaggaattcggcacgaggccgcaccgctcgttttcctttttgacatttcctttttctggcattgccttttttgacattttcttcccatctccgcccccccctnccgcaccccgccgtcccccccccaccccgcgcaggggcacctctacaccgttcccatccgggagcagggcaacatctacaagcccaacaacaaggccatggcggaggagatgagcgagaagcaggtgtacgacgcgcacaccaaggaaatcgacctggtcaaccgcgaccccaagcatctcaacgacgacgtggtcaagattgattttgaagatgtgattgcagaaccagaaggaacacacagttttgatggcatctggaaggccagcttcac

SEQ ID NO: 4628 - DNA, 432 bp, Canis familiaris
ccgggctgcaggaattcggcacgagctccagcagctgaagccaaggctgcagaagcggctgccagcgcctattacaacccgggcaacccacacaatgtctacatgcccacgaaccagcctccgccacctccctactaccccccagaagataagaagacgcagtagacccctcctgcccctgcctcccacccctcatcactctccccttcccttctcctgggggctgacactggggctaggagggtgatggaaggggccctgttcttcctccaggtctgattataaaatacttcccagagactggtgttgagggaagggggggcaccccttgacttgggagccatgcctcccgcttttcaagctcagagcccagggtgccgctcggatgcgctcccctctcaccatctacggggttctgctcaggagcgcggg

SEQ ID NO: 4629 - DNA, 424 bp, Canis familiaris
ccgggctgcaggaattcggcacgagagcggggtcggcgtgagcgctgccggcgcgccaaatgaagcacccgaaattccagacaacgtgggagattggctccggggcgtctaccgtttcgccaccgacaggaacgacttccggaggaacttgatcctcaatttgggactttttgctgcgggagtttggctggctaggaatttgagtgacattgacctaatggcacctcagccgggggtgtagccaaatagacacatggaaccccctgtgctgtacttgaaccttccaaaactagagcctccaatttatgaccgtcacaagacttagccctcttggaagttgaagcttcaatcagaccaccttcccttcccaattgcttcgtctccttgagcccactcagaactccattctctggtcagcagtcag

SEQ ID NO: 4630 - DNA, 397 bp, Canis familiaris
gcacgagtctacgtcgaagcccctcgagtggcctggcctaatattggaccaagattgttgaaaaccagacatatgatgagcgtctagagattaacgactctgaagaggttgcaagtgttcatactccaaccccaagacacaaaggacttcttcattccacccatcttcctaacaagactatggctgacaacagcagtgatgagtatgaagaggaaaacaacaaggagaagaaaaagacctcacagctgacacctcaacgaggcttcagtgaaaatgatgatgatgatgacgactcatctgagacagaatctgatgaagatgatgatgatgaagagcatggggcccctctggaaggggcctatgatcctgcagattatgaacatttgtcagtttcagc

SEQ ID NO: 4631 - DNA, 289 bp, Canis familiaris
ccgggctgcaggaattcggcacgaggccagagtctgaggtcactgctgctggctggaggtgtccgcatggcccagcggtttatcggaaggtcctgctcgctggagtggcatttgcatgcttctgctccctgcagtggcattcagcaggcttctgggcacaaaacggacagtttaaagccaccaccagccaaataataaccggctgagagacttcttgttcagagcctcctccagtggctggcataggatttgataacagctccgggaggaaccaagaacactgtatggg

SEQ ID NO: 4632 - DNA, 348 bp, Canis familiaris
gcacgagggctgcccaggcaggatcgggttggcagccccagcccgcccttcctgggtacgaggcctcaggacggcatgcactgcacccggtcggggccctcctcctcgtccgaggtgtcggaggagctgggagactcgtcggagtccgcatctgtggccctttcctgtcccaggcccttacattcagcagacacgcactttggactttttgctttagatgaaaaagacagacatcccaggagaaagaccagagggggagtgaacctgcggagtagctcggagtgggagcaggccccggggtgggctgcatggagaggcacagagggctcagcagaaatggcctctccc

SEQ ID NO: 4633 - DNA, 397 bp, Canis familiaris
gcacgaggacatccaggccgacaccagcggctacctggagaggatcctggtgtgcctgctgcagggcagcagggatgatgtgagtggtttcgtggacccgggacaggccgtccaagatgcacaggatctgtacgcagcgggcgagaagattcacggcacggacgagatgaaattcatcaccatcctgtgcacgcgcagcgccacccacctgctgagagtgtttgaggaatacgagcgcatcgccggcaagagcattgaggacagcatcaagagtgagacccatggctccctggaggaggccatgctcacagtggtgaagtgcacacggaacctccacagctacttcgccgagcggctctactatgccctgaagggagcagggacgcgcgatgggacc

SEQ ID NO: 4634 - DNA, 422 bp, Canis familiaris
gcacgagacttctctgggtagtggatttggctctccgtcagtgaccgacccccgaccactgaaccccagtgcatattcctccactaccttacctgctcagcgggcagcctctccgtactctgcacagagacccgcctcccctacagctgtgcgacggattgggtcagtcacctcccggcagacctccaatcccaacggaccaaccccacagtaccaaacgaccgccagagtagggtccccactgactctgatggatgcacaaactcgagtagcttccccatcccaaggccaggtggggtcgtcgtcccccaaacgctcagggatgaccgctgtaccacaacatctgggaccttcgctgcaaaggactgctcacgacatggaacaatatggacagcagcagtatgaaatttacgaaagaatgg

SEQ ID NO: 4635 - DNA, 432 bp, Canis familiaris
ccgggctgcaggaattcggcacgagcgggcgcgggcggacgggcgcgaggatggcgggcgggcgcggggccctcatcgtgctggagggcgtggaccgcgcggggaagagcacgcagagccgccggctggtggccgccctgtgcgccgcgggccaccgcgcagagctgctccgcttcccggagagatcaacggaaatcgggcaactcctgagctcctacttggagaagaagagcgacgtggaggaccactcggtgcacctgctcttctccgccaaccgctgggagcaagtgccgttaattaagaagaagttgagccagggcatcaccctcattgttgacagatacgcgttttctggtgtcgccttcaccagtgccaaggaggacttttccctggactggtgcaagcagccggacgtgggcctcccgaagccgg

SEQ ID NO: 4636 - DNA, 408 bp, Canis familiaris
ccgggctgcaggaattcggcacgaggctgccgctgcggggcgcggtgttggtgggtcggttggcttgtctctcaacgccggtgtccgtgccgttgaactgcccgccatggctgaactagatccgttcggcgctcccgccagcgctcctggcggccccgcgctggggaacggggtggccggtgccggcgaataatacccggccgcggccttcttggcgcagcaggagagcgagattgcgggcatcgagaacgacgaggccttcgccatcctggacggcggtgcccccggaccccagccgcacggcgagccgccgggggttccggatgctgtggatggagtgatgaatggcgagtactaccaggagagtaatggtccaacagacagttacgcagctatttcacaagtgga

SEQ ID NO: 4637 - DNA, 368 bp, Canis familiaris
ccgggctgcaggaattcggcacgagctggaggagtcaagcctcgcatgctgataacaattctgggcacagtaaggcccagtgcaaacagacttgctctagatttcaagagagggaatgatgttgccttccactttaacccacgcttcaatgaagacaacaagagagtcattgtttgcaataccaagctggataatatctggggaaaggaagaaaggcaggcagcttttccattcgaaagtggtaaaccattcaaaatacaagtgctggttgaatctgaccacttcaaggttgcggtcaatgatgcccatttgttgcagtacaatcatcggatgaaaaatctcccggaaatcagcaaactgggaatttc

SEQ ID NO: 4638 - DNA, 424 bp, Canis familiaris
ccgggctgcaggaattcggcacgagcacactgcccatcctgggtttctgccacctacctgcttcagggtcaagcctgggtgcagctgggggcccaaaaagaggcaattagtgaatttagccggtgccttgagctgcttttccggaccacacctaaggacaaagaacaaggtaatcaagatgcttcatttcacctgcttcagactctgaggaagatggatcggagggatgaggcctctgctctctggtggaggctagaggcccaaactaagttgccacaggagaatgctgcatggtctctccccctgtacctagaaacctgtttgggctggatttgttaccctgaccgtgaaacccttcttgaggaatttcggacatctctgccggagccttgtgacctgtagctgccacattttaaagagcctg

SEQ ID NO: 4639 - DNA, 400 bp, Canis familiaris
  misc_feature (357)..(357): n comprises a, c, g, or t, or includes no nucleotide
ccgggctgcaggaattcggcacgagggttggacggcaagcatgtggtctttggcaaggtcaaggagggcatgaacatcgtggaagccatggagcgcttcgggtccaggaatggcaagaccagcaagaagatcaccatcgccgactgtggacagatctgatgaatcttaactcctgttttatctgaacttccagaccgttcctttagctcaggagagcgcccctccacccccacctgcttgaaatagcccagtctccgcactctcactgcagttctgcgggctccgtggttcctttccccaggtatagctggattgcagagttcagtttatgatgatgaaataaaatctaaaccacanaaaaaaaaaaaaaaaaaaaaaaaaaaaaaaaaaaaaaaaaaaa

SEQ ID NO: 4640 - DNA, 392 bp, Canis familiaris
  misc_feature (373)..(373): n comprises a, c, g, or t, or includes no nucleotide
ccgggctgcaggaattcggcacgaggctgacgagaaggaagaggaaatgagctggaaggacatgtttgccttcatgggcagcctggataccaagggtaccagctacaagtatgaggtggcgctagccgggccagcccttgagctgcacaactgtatggccaagctgctggctcacccactgcagcggccctgccagagtcatgcctcctacagcctgctggaagaggatgatgaagccactgaggttgaagccaccgtctgaaccatccctgtgcgtctctgccttcccatgcggtgaagccctgggcttggagaatgggtctcaaagtaggctgtgtggcaccttggtagggagggttccaggaggctcctngggactctgggcactcatt

SEQ ID NO: 4641 - DNA, 395 bp, Canis familiaris
gcacgagccaagaagggaggttccactttttcaacttctctgttactaaatctaaatctgtgacccttttaagggactgcctgaagaaaaaaaagcaagacatttttaagaagcaatttaatagttctcttgctgatattgtgtttttttttttccctttgcctttcttagaatccaagaacttgaagtttttttcccttttctttttttagtttcactttcgagatcgcaggaaatcttccattcttccctggtgaaaataactggatttggactaatgaaaaaaaggaatggtcagccgttatcagagcaaatgaagacatttcttttagaggggaggagaatcatgagccagagtttgctttatcatatctactcctttttgggactgttgc

SEQ ID NO: 4642 - DNA, 425 bp, Canis familiaris
gcacgagggccggaactcaagatggctgcgctcttgtcgagacatgttggccgtcattgcctccgtgcccaccttagtcctcagctctgtatcagaaatgctgttcctttgggaaccacagccaaggaagagatggagaggttctggaataagaacactgatttaaaccgtcctctgtctccccatatcactatctacagttggtctcttcccatggcaatgtccatttgccaccgtggtactggtgtggccttgagtgcaggggtctctctttttggcttgtctgccctgttggtccctggaaactttgagtctcatttggaacttgtgaagtccctgtgcctggggccatctctgatctacacagccaagtttgcacttgtcttccctctcatgtatcacacctggaatgggatccgacattt

SEQ ID NO: 4643 - DNA, 392 bp, Canis familiaris
ccgggctgcaggaattcggcacgagcggggacagagccgggggcgggggctggcccgccgcagatcagctcaataaattgcgagctcggctgtgcccagtccctccactcagcgcaaaaatccggcaccatggtcatgatcttcggttactgggacattcgcgggctggcgcacgccgtccgcctgctcctggagtacacggactcgcactacgaggagaagaagtacacgatgggggacgctcccgactatgacagaagccagtggctgaatgaaaaattcaagctgggtctggacttccccaatctgccctacttaattgatggggctcacaagatcacccagagcaacgccatccttcgctacattgctcgcaaacacaacctctgtgg

SEQ ID NO: 4644 - DNA, 385 bp, Canis familiaris
ccgggctgcaggaattcggcacgagcagtgcagtcgtgatttcagtccatccctgaaatcacacacaatcttgtgtgattgagttaaatccagcttccgatctttgacaagcggggtcgaatctgaacttgacggccaaacatttctgacccggtaacgtcgctggatctctgggtagaactgttcgctcttgcaggggggcatgggggactcccacggggagcgttggctgagaagatgaaaggattctggaatatcccacgggatttccttccctctcctgcctgccttcccctcttccctgcccctctaaccttttgctgagtggggcggcaccactgacatttctgggcaacgtcggcgtcgctgtcaagttcctgtacta

SEQ ID NO: 4645 - DNA, 504 bp, Canis familiaris
  misc_feature (438)..(438): n comprises a, c, g, or t, or includes no nucleotide
cagcggcggcggcgcggagaagcgcagcggaggttttctggtttcggaccccagcggccggatggtgaaatcctccctgcagcggatcctcaacagccactgcttcgccagagagaaggaaggggataaacccagcgccaccgtccacgccgcccgcgccatgccgctcctcagcctgcacagccgcggaggccgcagcagcgagagttccagggtgtctcctcactgctgtagtaacctgggtccagggcctcggtggtgctcctgatgtccctcacccacccctgaagatcccaggtgggcgagggaatagtcagagggatcacaatctttcagctaatttattttactctgataatcggctgaatgtaacaagaggaactaacgtctaacagcaagacgaggattctgaacgttcaaaccaagctcacggcttcnaacacatttacttgaaaagcggtcttgaccggcggcttgcttttacattgagaatcccaggcgggg

SEQ ID NO: 4646 - DNA, 449 bp, Canis familiaris
catctactttgccccatgtggaaatagtgttgaattccaagtccgttatgccctagctgagtcggatagccacttgtagtccacatggtagttgtgattcaagaggaggaagagtaaagttgtcagaatcttggagaagtagggagtgaggaaaacaaagatcttcccagtttttggtgccaagtgagcaataaaagcacccatctgattgagtctggtgtccatctaatgatcctagcaaatagtaggttttgaaactagagttttatgtacttatgaattgtaataactttaatgacaataatcattcaggtactatgctaagtgcctgacatatatcttcctactttaagataatcctaagtggcagatattactgtattagttctgagaatgagaaaatggagatttaggcacttttactaacttgcctgggtcacaaagcttgg

SEQ ID NO: 4647 - DNA, 305 bp, Canis familiaris
  misc_feature (29)..(29): n comprises a, c, g, or t, or includes no nucleotide
  misc_feature (45)..(45): n comprises a, c, g, or t, or includes no nucleotide
  misc_feature (48)..(48): n comprises a, c, g, or t, or includes no nucleotide
  misc_feature (67)..(67): n comprises a, c, g, or t, or includes no nucleotide
  misc_feature (71)..(71): n comprises a, c, g, or t, or includes no nucleotide
  misc_feature (76)..(76): n comprises a, c, g, or t, or includes no nucleotide
  misc_feature (203)..(203): n comprises a, c, g, or t, or includes no nucleotide
  misc_feature (207)..(207): n comprises a, c, g, or t, or includes no nucleotide
  misc_feature (278)..(278): n comprises a, c, g, or t, or includes no nucleotide
  misc_feature (281)..(281): n comprises a, c, g, or t, or includes no nucleotide
tgaatgaatacaaagatccagagagcatnctacaccgatcgcctnagnaagtgcagacactcctctnctgntaatnttacttgaatgtgtgagcaaaacattgcatccctaagactctaaaggttttcttgttctttagtctcttaatcttcgctttgaaatgtgatggttacgattttgtttgtatcataacattgcaggtncaanaattcttttctttgatcacaataacatggaagtaagtaatataatttcaacctgagttagtgttgctctgnatntgctccttatgtaaagatgatctg

SEQ ID NO: 4648 - DNA, 581 bp, Canis familiaris
  misc_feature (18)..(18): n comprises a, c, g, or t, or includes no nucleotide
  misc_feature (48)..(48): n comprises a, c, g, or t, or includes no nucleotide
  misc_feature (50)..(50): n comprises a, c, g, or t, or includes no nucleotide
  misc_feature (106)..(106): n comprises a, c, g, or t, or includes no nucleotide
  misc_feature (224)..(224): n comprises a, c, g, or t, or includes no nucleotide
  misc_feature (240)..(240): n comprises a, c, g, or t, or includes no nucleotide
  misc_feature (253)..(253): n comprises a, c, g, or t, or includes no nucleotide
  misc_feature (297)..(297): n comprises a, c, g, or t, or includes no nucleotide
  misc_feature (309)..(309): n comprises a, c, g, or t, or includes no nucleotide
  misc_feature (321)..(321): n comprises a, c, g, or t, or includes no nucleotide
  misc_feature (328)..(328): n comprises a, c, g, or t, or includes no nucleotide
  misc_feature (350)..(350): n comprises a, c, g, or t, or includes no nucleotide
  misc_feature (378)..(378): n comprises a, c, g, or t, or includes no nucleotide
  misc_feature (380)..(380): n comprises a, c, g, or t, or includes no nucleotide
  misc_feature (414)..(414): n comprises a, c, g, or t, or includes no nucleotide
  misc_feature (482)..(482): n comprises a, c, g, or t, or includes no nucleotide
  misc_feature (489)..(489): n comprises a, c, g, or t, or includes no nucleotide
  misc_feature (507)..(508): n comprises a, c, g, or t, or includes no nucleotide
  misc_feature (517)..(517): n comprises a, c, g, or t, or includes no nucleotide
aagagggtaacatgaagnttggcactaccctgaagaactgtaggcatntnttggaatgtgctaaggaacttgatgtccaaataattggggttaaatttcatgtttnaagtgcttgcaaagaatctcaagtatatgtacacgctctatctgatgctcgatgtgtgtttgacatggctggagaatttggtttcacaatgaacatgttagatattggtggaggcttnacaggaactgaatttnagttggaagaggntaatcatgttatcagccctttgttggatgtctactttcctgaangatctggcattnagataatctcanaacctgnaagctactatgtgtattctgcntttacacttgcagctaatatcattgcananaaaggtggtggaaatgataaatttacctctggantagaaaaaccggaagtgatgaaccagcctccgtatatatgaatgatggtattaatggtcttttgcagnaaactgnttgaggacttaatccatnncaaaggtcncaataaatcaagaaagatgagcctttgtttacaagagcctttggggccatcctgggatgagctt

SEQ ID NO: 4649 - DNA, 442 bp, Canis familiaris
  misc_feature (112)..(112): n comprises a, c, g, or t, or includes no nucleotide
  misc_feature (198)..(198): n comprises a, c, g, or t, or includes no nucleotide
  misc_feature (312)..(312): n comprises a, c, g, or t, or includes no nucleotide
acgtgccctctatatgaggttggggagcggctgagtcggccttttccgcccgctcccccctccccccgagtgccgctccggctgccgcgcgctcgccccgagctcccggctnctgccaagcccgcgccgccgccgcccgtcttcagccgtcgtcatgatcatctaccgggacctcatcagccatgacgagatgttctncgacatctacaagatccgggagatcgcggacgggctgtgcctggaggtggaggggaagatggtcagtaggacagagggtaacattgacgactcgctcattggtggaaatgcctncgcggaaggcccggagggcgaaggtaccgaaagcacagtaatcaccggtgttgatattgtcatgaaccatcactttgcaggaaaccaagcttcacaaaagaaagcctacaagaagtcatcaaagattaca

SEQ ID NO: 4650 - DNA, 560 bp, Canis familiaris
  misc_feature (443)..(443): n comprises a, c, g, or t, or includes no nucleotide
  misc_feature (522)..(522): n comprises a, c, g, or t, or includes no nucleotide
  misc_feature (543)..(543): n comprises a, c, g, or t, or includes no nucleotide
tgtctattgattagacacttaataaaatttatcttccactgaaagagaaatcttttgtaaatcatactacttttgcactttgaaagaaaggcattaatcgtaaggaagcaagaatgggcacaattgaaagctacattatcataaataaaatcacagactgtctaatgttgcagaagaatgaactaataatagcaatcataaccaaacacaatgataattattattgaacattggatcacatattagtccagagaaagacagaagtggaaaaactctgacttacacaaaactgttttggtagttggacttcattctcttagtgactctagtcattttgcaatacatttgtatttggccatttaccgtaatcacatttttatatctgtacaatgacactttttgcagtcgtgcggtagtgcataacactgtccatctttgcttantggaactactacaaggatactatcatttaacaatattaatattacttgaaatagagtaagataaagaaaaagggctttntgatgtgcagtttgtgccttntttatttgccctgtctg

SEQ ID NO: 4651 - DNA, 420 bp, Canis familiaris
ggaagcctgtagcagcaaccatgtgcattggcccagagggagacttgcacggcgtgagccccggcgagtgtgcagtgcgcctggttaaagcaggagcttccatcgttggcgtgaactgccatttcgaccccacgattagcttgcagacagtgaagctcatgaaagaaggcttggatgctgcccgactgaaagcccacctgatgagtcagccgttggcctaccacactcctgactgcaacaaacaggggtttatcgatctaccagaattccccttcggactggaaccccgagttgcaaccagatgggatattcaaaaatacgctagagaagcctacaacctgggggtcaggtacattggcgggtgctgtggatttgagccctatcacatcaaggctattgctgaggagctggccccaagaa

SEQ ID NO: 4652 - DNA, 394 bp, Canis familiaris
  misc_feature (15)..(15): n comprises a, c, g, or t, or includes no nucleotide
  misc_feature (17)..(17): n comprises a, c, g, or t, or includes no nucleotide
  misc_feature (60)..(60): n comprises a, c, g, or t, or includes no nucleotide
  misc_feature (277)..(277): n comprises a, c, g, or t, or includes no nucleotide
  misc_feature (372)..(372): n comprises a, c, g, or t, or includes no nucleotide
gccacatataggatntntctgaatttttatggccttctcatccagctgctgctccgcatnctggaccccgcctatcccgatataacactgcctttaaactctgatgtccccaaggtatttgcagcattgcctgagttttatgtagaagatgttgctgaatttttattttttattgtacaatactctcctcaggtgctgtatgagccctgtactcaggatattgtgatgttcctcgttgtgatgttgtgtaaccagaactacatccgaaatccatatntggtggccaaactggtagaagtcatgtttatgaccaacccagctgttcagccacgaacccagaagttttttgaaatgattgaaaaccattctctnttcaccaagttgttggtccctt

SEQ ID NO: 4653 - DNA, 471 bp, Canis familiaris
  misc_feature (46)..(46): n comprises a, c, g, or t, or includes no nucleotide
  misc_feature (78)..(78): n comprises a, c, g, or t, or includes no nucleotide
  misc_feature (87)..(87): n comprises a, c, g, or t, or includes no nucleotide
  misc_feature (91)..(91): n comprises a, c, g, or t, or includes no nucleotide
  misc_feature (443)..(443): n comprises a, c, g, or t, or includes no nucleotide
tccggcctcgggctgagcttgcccgcgcccccggcccgtcctcggngcccgcccgggccgggccgcccgggccggcgnagcgccgtncctnggacgccatgtcgcacagcgggacccccgggctgcaggaggagaacttgcagggctcctgggtagagctgcacttcagcaacaatgggaacgggagcagcgttccagcctccgcttctatttataacggtgacctggaaaaaatactgctggatgcccagcatgaatctggacggagtagctccaagagttctcactgtgacagccctccgcgctcacagaccccgcaggatacgacccgagcttcggaagtagacacccacagcatcggagagaaaaacaagctcccagtctgaggaagattatattgagagaaggaaagaagttgagagcatctttgaagaagaactcanactggattgggattggtcaagtcggccg

SEQ ID NO: 4654 - DNA, 609 bp, Canis familiaris
  misc_feature (460)..(460): n comprises a, c, g, or t, or includes no nucleotide
  misc_feature (551)..(551): n comprises a, c, g, or t, or includes no nucleotide
  misc_feature (570)..(570): n comprises a, c, g, or t, or includes no nucleotide
  misc_feature (603)..(603): n comprises a, c, g, or t, or includes no nucleotide
cacagacccctcagtgctccagctgcagtcagactcagaacttgggcgaagactgcacaggctgggtgtgtcgaaggttacccaagtggatttcctgcccagggaagttgtgtcctactccaaggagacccagactcctctggctacacatcagtctgaagaggacgaggaagatgaggaaatggtagaacctaaagttggccacgattcagaactggaaaatcaagaccaaaagcaggaggtgaaggaagccccaccacgagagctgacagaggaagagaaacagcagattcttcattcagaggagtttctcatcttttttgatcggacaatccgggtaattgaaagagcgctagcagaagactctgacatcttctttgactacagcggtcgggaggtagagggaaaaaaatggggatgtccagctggagccaacctttttttaatcgtaagttttacnatgagcattgtccaagcatcagtagtccttgtttggactggtttttcaatccctgagcttgtggtggttctacacaacacaggatgctctnatgaaccaaatggagtggncttggttggacctgaagttaagaaacccccccnaatcgt

SEQ ID NO: 4655 - DNA, 401 bp, Canis familiaris
  misc_feature (12)..(12): n comprises a, c, g, or t, or includes no nucleotide
  misc_feature (22)..(22): n comprises a, c, g, or t, or includes no nucleotide
  misc_feature (33)..(33): n comprises a, c, g, or t, or includes no nucleotide
  misc_feature (39)..(39): n comprises a, c, g, or t, or includes no nucleotide
  misc_feature (196)..(196): n comprises a, c, g, or t, or includes no nucleotide
  misc_feature (293)..(293): n comprises a, c, g, or t, or includes no nucleotide
  misc_feature (314)..(314): n comprises a, c, g, or t, or includes no nucleotide
  misc_feature (321)..(321): n comprises a, c, g, or t, or includes no nucleotide
  misc_feature (349)..(349): n comprises a, c, g, or t, or includes no nucleotide
  misc_feature (374)..(374): n comprises a, c, g, or t, or includes no nucleotide
tctcgtattatngctactctgnttgatcgccanctctantacgactcactatagggaaagctggtacgcctgcaggtaccggtccggaattcccgggtcgacccacgcgtccgcgttctgagacccgcggcggctggagctggagagagacatggaattggagcagagagaggggaccatggcagccgtgggcttntgaagagttctcggcgccgccaggctcggagctggcgctgccgccgctgttcggtggtcacattttggagagtgagctggagacggaagtggagttngtgtccgggggtctgggtggntcatgtntccgggagcgagatgaagaggaagaggntgcccggggccagcggcggctgccngcgggaactaaatctgtatgaagtacc

SEQ ID NO: 4656 - DNA, 668 bp, Canis familiaris
  misc_feature (402)..(402): n comprises a, c, g, or t, or includes no nucleotide
  misc_feature (404)..(404): n comprises a, c, g, or t, or includes no nucleotide
  misc_feature (453)..(453): n comprises a, c, g, or t, or includes no nucleotide
  misc_feature (477)..(477): n comprises a, c, g, or t, or includes no nucleotide
  misc_feature (487)..(487): n comprises a, c, g, or t, or includes no nucleotide
  misc_feature (505)..(505): n comprises a, c, g, or t, or includes no nucleotide
  misc_feature (538)..(538): n comprises a, c, g, or t, or includes no nucleotide
  misc_feature (581)..(581): n comprises a, c, g, or t, or includes no nucleotide
  misc_feature (593)..(593): n comprises a, c, g, or t, or includes no nucleotide
  misc_feature (596)..(596): n comprises a, c, g, or t, or includes no nucleotide
  misc_feature (607)..(607): n comprises a, c, g, or t, or includes no nucleotide
  misc_feature (626)..(626): n comprises a, c, g, or t, or includes no nucleotide
cagatggagtacttagaactggccagaacctatctggagtgcaaggagccaaagctgtccctcaagtgcctgagctatgccaaggagttccagctgtctgcccagctgtgtgagaagctggggaagataagagatgctgcctatttctataagcgaagccagtgctacaaagatgctttcagatgctttgagcagatccaggaatttgatctagcactcaaaatgtactgtcaagaggagctttttgaagaagctgctattgcagtggaaaagtacgaagaaatgctgagggccaagacccttcccatatccaagctatcttattctgccagtcagttttacctggaagctgcagcaaagtacctgagtgcaaataagatcaaggagatgatggctggtctntncaaacttgacataaaaaaacagcttgtggttcttgaagtttcgtggacnactagcggaagctgaaacttgctnaacaaggaangtcggaaagaaaagcttnctttcttatgaacacatggcttgtttgttggangctgccaggctcacttgttacaaggactttcaggcctcgtgtntgttggggctgnccncctaaactggncagggatttggtgtagaanataccaggccattttggaaaagcccttacctttgtgtaaacc

SEQ ID NO: 4657 - DNA, 436 bp, Canis familiaris
  misc_feature (403)..(403): n comprises a, c, g, or t, or includes no nucleotide
atgagaaatgaacatacatggtataataaacttctttggcctgacagacatgggtaccaccaggccctaggtatagagagaacaggggcgatctctgtactgggatgtcaacttcatcacctctgtttcaattttttccccctcacttgaacaaaacactgagatcgtaattgaaaaacaggtgcttaattgcagctaaatcataatagagtatataagagaatccaggcatattaaaaaatttcagtttagaccatcaaagacagccatcgttactgtctcctctgagcttggaaaagcacacaagagaacaaattaaaatcgacaaattgatttcacttagaaaaacttgtaggaacagagaaccactgattttaatttgcctaattatcttatgacaagngtcaaaattaaaagaccctttaaggatttttac

SEQ ID NO: 4658 - DNA, 361 bp, Canis familiaris
ccagggctttcgggctgggccctggtgggttaggggggccaccaggccgggactgggtccgtctcttgaggatctcccgtagtgtgtcaatgggtgagccgttgacataccactcagtcacgcccatctgccgcaggtgcgagcgtgcgtgacttgataggcccttgcggttctcgaagaactcaccgcagaactcgcagcggatgtctcgagctggctctgggcccgaggagaggttgagaggagacggctccacatcagaggcccagaaaatgccggcggctgcggcggccgagaggtcctgctttccccaggggctggccgtacccgcggccttcagcttggcttcttggccggcggt

SEQ ID NO: 4659 - DNA, 420 bp, Canis familiaris
  misc_feature (101)..(101): n comprises a, c, g, or t, or includes no nucleotide
  misc_feature (416)..(416): n comprises a, c, g, or t, or includes no nucleotide
acgcgtgggcgcgagcggcgcccttttttttttttttttttaagacctcatcaacaagggctctagttcttctttcctctaattttcaaccattaactttntaaaggctccattctggtaggcagggtacttccagatgtattcccttgaccattggctctgaatgccttgagtcgtaatgtaggtatcgctgatgaggcacagacagtgcacacagctgtaattacagtcatcctctgtcctttttgtcttgccagttcaataaatgattaagtgattttgacatctgtgttgagacttaggtaatagtatcattaaattgtgacctctataaacttgtagttaccatgagcaatgaatatgtagaataaaataaccaccttaaaagctggggcccctctcccttttctcacctntgca

SEQ ID NO: 4660 - DNA, 432 bp, Canis familiaris
tcctaggcaacctgcagctcattctggagcataggcttctgcagcaactctgagattgaagcagattggaggcctagcaggttaggaggcataaaatcaagacctggagctttgtggccaagggagtcactgcatctcaatggggcctctttgtcagctctgctggtgtctcgcagccctgctggatgcaaagtggagccaaccagctaatcagattctgatcttaggaagttggcccttgtgggaatggcaggtgccctgaaggcccttgtactagaaactgctcttatataatataactgatctgggttgctaaactcatagtgtatagctcttgcattttcctgggtttttatccagctattgggaccctcttgacttctttgaagtctgtaggtttaggttcactacttcaatccaggactttttttt

SEQ ID NO: 4661 - DNA, 414 bp, Canis familiaris
  misc_feature (400)..(400): n comprises a, c, g, or t, or includes no nucleotide
gatttctatctgaagcaacataaattaatgtcagagaaggaagctaggtctattgtaatgcaaattgtaaatgcactaagatatctcaatgaaatcaaaccccctattatacattatgatcttaagccaggaaacatccttctggtagatggcacagcatgtggagaaatcaaaatcactgatttcggtctatccaagatcatggatgatgatagctatggtgtagatggaatggatctaacttctcaaggggcaggcacttactggtatttacctcctgagtgttttgtagttggaaaagaaccaccaaagatttccaacaaggttgatgtgtggtcagtcggcgtcattttctttcagtgtctttatggaagaaagccatttggtcacaatcaatctnaacaagacattctt

SEQ ID NO: 4662 - DNA, 489 bp, Canis familiaris
  misc_feature (465)..(465): n comprises a, c, g, or t, or includes no nucleotide
  misc_feature (475)..(475): n comprises a, c, g, or t, or includes no nucleotide
tggtggacgatgaactggctaccaggtttcttgaaaattttaaggcaaacctggagaatcctatccgactggcctagtcctccaaaataagaagttggctttggcttagttaattgtatagctgttaccagaatctacactgtaggaaaacaattaggcatataagcgtgatgtgggtgagttgtttatttatttaaaaaaggtgaatgagtttggcccagattgtcttcattttcagtttgggtttaatggtgtagaaataaataaactgtgactaataaaaaagaacatttggttagtcagatccatttttaacctctggtgctgtactaaagtggaattaaacttgatgtaaattaaatgtttggctcatttgagcattttagacaatatgagaatgtataataaattataaaatcaaaaaattgttagaactaattatgttgaagttagaaagtgatcttnagagagaagnccattattttaaca

SEQ ID NO: 4663 - DNA, 496 bp, Canis familiaris
  misc_feature (482)..(482): n comprises a, c, g, or t, or includes no nucleotide
atctatgataaggtacaaaatgaagccaagacacccttgaagaagtttttattgaacttggctatttcctgtaaattcaatgaagtgaaaaagggtatcatcaggcgtgacagtatttgggacaagctcatctttgcaaagatccaggccacccttggagggagaataaactttgtggttactggagccgcccccatctcctctccagtcctgatgttcctccgggcagcgctgggatgtccggtgttcgaagcttatggtcaaacagaatgcaccgctggctgtacatttacatcacctggggactggacatcagggcatgttggagtccccctggcttgcaatcatgtgaagctagaagatgtacctgacatgaactacttttcaagtgaacaatgaaggagagatctgcatcaagggcagcaatgtgttcaaaggatacctgaaggatcctgagaaaaccaaaggaactcttggatgangatggctgcttaca

SEQ ID NO: 4664 - DNA, 130 bp, Canis familiaris
atatttcttatactaattgtatcataaagccgtttattcttccttgtaagaatcctttactataaatatgggttaaagtataatgtattagacagttaaatatttttaataaatgtttcccttgttctat

SEQ ID NO: 4665 - DNA, 377 bp, Canis familiaris
gctgctcctagaatcacagatcctcaggaccatctcaggcatccaggcatggcaaaagtggaaataattcattttggccttcaaactttcaactcccatctctcccccaagaagtcagagacgctgttacttgaatgatttaggaaatgagtgtgtgcaccaaagacaaaaagatattgtctatcgttcatgtgcttgttttgcgctatggaacattttttaatttattctgagataaattattaagttgaaaatgtgtgtccccattcagaagtgagagattcttcttgtaatagttaaacttctgtcttgaagtttctgtggttcatagtctttgcacaggaaatctacggttttaagaaacccatacacatatc

SEQ ID NO: 4666 - DNA, 305 bp, Canis familiaris
atttatatatattaatgcagtaagttcagaaaactgtttatggtattttcgtgcatttgtgagccaaagaaaaaaagattaaaattagtgagacttgtatttatattagagtacccttaaaataatgatcgaagcatcagtttactgtctgtaagagaattctgatactgtacatagagtcatctatatggaaatccctgacttaaatagcatctgctcttctattaccctctctgtctggctgtatgtctggtgttctcaatgcttttctagtaactgttggataataactagatctcctgtaa

SEQ ID NO: 4667 - DNA, 471 bp, Canis familiaris
attagacaatgtggaattacattacaggcattgcactaaaagtgatgtgatttatgcatttatgcatgagaactaaatagatttttagattcctacgtaaacaaaatctttccatgacagtagcatactgatgagaaaacacacacacacaacagcagaaacaacaaaacaacaacaaagcatgctcagtattgagacactgtcaagattaagttataccagcaaaactgaagtagtttcactttctttctgtcaatatatagacttattaatcataatcatcctttttttaaaaaaatgaattttaaaaaagatggatttgacacactcaccatttaatcatttccagcaaaatatacgtttggctgaactatgtcaaatgaatgtaatataggatttatttgctgcttttgaaggctatgttttggagaaagcaatcttgctgtgaaacaagtgtggagatgtaaattt

SEQ ID NO: 4668 - DNA, 398 bp, Canis familiaris
ttccctcattcatcctaccgtatatccccttccccatgttcaattcaggcttgtgtgcaaagcacccaaacccagcctgcctcttttatgcctgggtcacagtgtttgtctggggtcagtgaggaagaaggatggaggttcacctctccagtagtctcagtgcttggctccaactctagacctttgaaactctggccaacagcagcttttgctatgaactccccccccccattaatgtgactccccagtttcaggaatctagactgacttgttcttcttccctctagataaatagcaaaacaagataaataaacaaatagaaatcctagcactttatcccaaacctaatgaacctccttgaggagaccatgctttaggcaaaacgctcaaacactgca

SEQ ID NO: 4669 - DNA, 430 bp, Canis familiaris
tattcatggctgaaacttgaccacactgttgctgattgtatggttttcacttgagcaccgtgtagaatgcctgattccttgtgctactcttctgctaatatgctctgggctggagacatgaaatcctcaagccatcagaacttgctacttaagtggcttgacaactgggccaccaaagaacttgaacttcatcttttaggaattgagctgttctggaacatactgctgcactttggaaagtcccaactaagtgccagtggcacctttttccatagggaatttgcccagctttgctttaaacgatgtcttgttttttatatataagtagtctgtaggtccaatccgcctcaaggccttggtcttggtgggtctccttcgtcattcaatcactttaattaaaaatggctgcagctgtaaggactcttgtctg

SEQ ID NO: 4670 - DNA, 246 bp, Canis familiaris
  misc_feature (140)..(140): n comprises a, c, g, or t, or includes no nucleotide
  misc_feature (148)..(148): n comprises a, c, g, or t, or includes no nucleotide
  misc_feature (170)..(170): n comprises a, c, g, or t, or includes no nucleotide
gaatttagataatgggctgtgtgcaatgtaaggataaagaagcaacaaaactgacagaggagagggatggcagcctgaaccagagctccgggtaccgctatggcacagaccccactcctcagcactaccccagcttcggngtgacctncatcccaaactacaacaacttncacgcggccggaggccaaggactcactgtctttgggggtgtgaactcttcatctcataccgggaccttgcgtacca

SEQ ID NO: 4671 - DNA, 368 bp, Canis familiaris
  misc_feature (126)..(126): n comprises a, c, g, or t, or includes no nucleotide
  misc_feature (146)..(146): n comprises a, c, g, or t, or includes no nucleotide
  misc_feature (148)..(148): n comprises a, c, g, or t, or includes no nucleotide
  misc_feature (231)..(231): n comprises a, c, g, or t, or includes no nucleotide
  misc_feature (294)..(294): n comprises a, c, g, or t, or includes no nucleotide
  misc_feature (349)..(349): n comprises a, c, g, or t, or includes no nucleotide
cagccccgggagtacggatcgctgagccctacctgaaattagaaggtcggtggcgagatgagctgggcgccagcgttcctgagcgctgccgaggtgcaggagcaccttcgcagcttcagcctgctnatcccgcctctggaggcggntntggccaacttcttcagcggccccgacggaggggtcatgcagccggtgcgcaccgtggtgccggtggccaagcacaggggtttnctgggggtcatgccggcctacagtgctgcagaggacgccctgaccaccaagttggtcaccttntacgagggccacaggaccaccttcacggtccccttccaccaggccactgtgctgntctttgagcccagcaatgg

SEQ ID NO: 4672 - DNA, 410 bp, Canis familiaris
ggccgtgaatgctcgagccctgcgagcagtgcagcaggacagcctggatgaggacctcatccgaaagctggcctatgtggctgctggtgatctggcccctataaacgctttcattgggggcctggctgcccaggaggtcatgaaggcctgctctgggaagtttatgcccatcatgcagtggctgtactttgatgccctggagtgtctccctgaggacaaagaggccctcacagaagacaagtgccacccgcgccagaaccgttatgatgggcaggtggccgtgtttggctcagacctgcaagagaagttgggcaaacagaagtacttcctagtgggtgcaggtgccattggctgtgagctgctcaagaacttcgccatgattgggctgggctgtggggagggtggagaaa

SEQ ID NO: 4673 - DNA, 403 bp, Canis familiaris
  misc_feature (236)..(236): n comprises a, c, g, or t, or includes no nucleotide
ctgccaccacttgaagatgtggggcagcctccactggaggaggctgagcaacctggggccctggcccgagagttcctggccgccatggaacctgagcccgagcccgccccagctccggatgagtggctggacatcctggggaatgggctgttacgaaagaagacgttggtcccaggcccacctggctcgagccgcccagctaaaggccaggtggtcactgtacagctgcagacctngctggagaatggcactcgggtgcaggaagagccagagctggtgttcaccttgggcgactgcgacgtcatccaggccctggatctcagcgttccactcatggatgtgggggagacagctatggtcactgctgattctaagtactgctatggcccccagggcaggagcc

SEQ ID NO: 4674 - DNA, 396 bp, Canis familiaris
aggtaggagctgaccgagtgatgggaagcgcgcgagccggggccaagagtttcaggtttctccttgtatggatcactgactgaataatagatggctttacctcgtctcacaggagctttgcgctccttttcaaatgtcaccaagcaagataattataatgaagaagtggctgatttaaaggtgaagcggtctaaacttcatgaacaaattctagatttggatgtgacgtggaagaagatagtaacatttttgaatgaaaaactggagaagagtgagatacaaagtgtaaatgaagacttaaatgatatattgcaggctgcaaaacaaataggtgactgtccattccagaagaggaaagctggatggagaagaggagaatgagaagaagagaagagc

SEQ ID NO: 4675 - DNA, 366 bp, Canis familiaris
  misc_feature (331)..(331): n comprises a, c, g, or t, or includes no nucleotide
ctgtgtcccttcaggatgaaagccgcactgctgaccttggccgtgctcttcctcacggggagccaggctcggcacttctggcagcaagatgaaccccagtcaccctgggatcgggtgaaggatttagccaccgtgtatgtggacgcagtcaaagacagcggcagagactatgtggcccagtttgaagcctccgccctgggaaaacagctgaacctgaaactcctggacaactgggacagcctgagcagcacggtgaccaagctgcgcgaacagatcggcccggtcacgcaggagttctgggataacctggagaaggagacggaggtgctgnggcaggagatgagcaaggacctggaggaggtgaag

SEQ ID NO: 4676 - DNA, 568 bp, Canis familiaris
  misc_feature (462)..(462): n comprises a, c, g, or t, or includes no nucleotide
  misc_feature (465)..(465): n comprises a, c, g, or t, or includes no nucleotide
  misc_feature (527)..(527): n comprises a, c, g, or t, or includes no nucleotide
  misc_feature (544)..(544): n comprises a, c, g, or t, or includes no nucleotide
  misc_feature (566)..(566): n comprises a, c, g, or t, or includes no nucleotide
aattatataaaaagcaacctttattttaaattgtcatctatgaacatggtatgagatggcagatttgttttcactttgattatccagcattgtaattagttaccatttgctttatgtaatttgttgaaggaactattatgattcatattatgttttttactagcaacaaattttattttactagcatttcatttagcttttatgtataaaaatgaagttgtaataggatcaaatatgcaaataacctctgtcagatgcaaagatttgtacagatttttttcatgtatctgaattaggtctaaatacacaaaaactgcctactaatttctcctccctaaaaccaaattgaaccaaactcagataaacataataacccaactttcttttcgtgtaatatttgcaagcaactagatgatagtggtatctagactcaggactccattctaattctctttttaattnggnaaggcatatgattattagaatttggtatctaacttggatatttcacaatttaatataagatnaatctaaagctttcatntttagcatgtcaaagccatttntg

SEQ ID NO: 4677 - DNA, 274 bp, Canis familiaris
actggctcacggacaagatggtgccgccggtgcaggtctccccgctcatcaagctcggccgctactccgccctggtcctcggcatggcgtacggagccaagcgctacagttacctgaaaccccgggcggaggaggagcggagggtggccgccgaggagaagaagcagcaggaggaacggaagcggatcgagcgggagcttgcggaagcccgagacgacagcatcctgaagtgaggctgcctgccctggagcggcgcgcgcgcgaataaaggctt

SEQ ID NO: 4678 - DNA, 486 bp, Canis familiaris
  misc_feature (253)..(253): n comprises a, c, g, or t, or includes no nucleotide
  misc_feature (475)..(475): n comprises a, c, g, or t, or includes no nucleotide
tttggagcatgacgtgaacatccagtttcccgataaggacgatgggagccagccccaggaccaaattacgatcacagggtatgaaaagaacacggaagcggcccgggacgccattttgaaaattgtgggtgaacttgaacagatggtttctgaggacgtcccgctggaccaccgcgttcacgcccgcatcatcggcgcccgcggcaaagccatccgcaaaatcatggatgagttcaaggtggacattcgcttnccgcagactggagccccagaccccaactgtgtcaccgtgacggggctcccagagaacgtggaagaagccatcgaccacatcctcaacctagaggaggaatatctggccgacgtggtggacagcgagtcactgcaggtgtacatgaagccaccggcccacgaggagtcaaggcaccatccaagggctttgtggtgcgggacgctcctggaccgttaaaagaangagaaggttcc

SEQ ID NO: 4679 - DNA, 473 bp, Canis familiaris
atacttaagcatatttctggctacattttatagttaaagtgttttatagtttacatttaaactggtactttttaaagaaaatttctgtttataactgacaccttcaaaccccagcaattgcctctttagttggaggccaccccccctccaagccaggtgttttccaccacactgttgtgtagcccaacacgagcatttccctccatgttactggtctccatgtgaacacgagagaatgtgaaaggatttctggattgaatgggaaggggtgagtccatagcctgggccagatgtgaagactttatgccatgttgtatcaacactcatctccaaagaggccttctctttgagatcctggaagaggcagagagaacagatacctgggtcattgattttatcttgatttgaatggttaatttctatcaatccactgactttttggtcaccaagcagtagaagacactgggattcag

SEQ ID NO: 4680 - DNA, 476 bp, Canis familiaris
  misc_feature (443)..(443): n comprises a, c, g, or t, or includes no nucleotide
ctctgcctcatggtgtgccagtggcgctgcctccgctgcctgcgccatcaacatgatgactttgccgatgacatctccctgctgaagtgaggaggcccatgggcagaagacagattcccctggaccacctttggtggttcactttggttacaagtaggagatactgatggcactgatggccagagcacctcaagaccctcgcctacccaccaaatgcctctgccttgacaaaagagaagggaaagctggcaaggtgggtgacaggaatggcacctgtaggaaccaggagagggaagaaagaagcattctggtggcaggaatattcttggtcacctcaagcctgagttgggaaattctgctgcttgacacttcagccttgaacctttgcccaccatccctttgggttggagaatccaaccattctattcttcttttcttagttncagaaatagtggcaccacaagccaagtcacccc

SEQ ID NO: 4681 - DNA, 442 bp, Canis familiaris
catatcttttctgttgtgacagacacctcacatactgctggtttgacaatgcatgcgtcaatactggcatatatgtttaatttggttgaagaaggaaaaataagtacaccattaaatcctggaaatccagttaacaaccaaatgttcattcaggaatatgtggcaaatctccttaaatctgcattccctcatctacaagatgctcaagtaaagctctttgtgacagggcttttcagcttaaatcaggatattcctgctttcaaggaacatcttagggatttcctagtacaaataaaggagtttgcaggtgaagatacatctgatctgtttttggaagaaagagaaacagcccttcgacaggctcaggaagagaaacataaacttcaaatgtctgtccctggcatccttaatccacatgaaatttcagaagaaatgtgtgatt

SEQ ID NO: 4682 - DNA, 636 bp, Canis familiaris
  misc_feature (424)..(424): n comprises a, c, g, or t, or includes no nucleotide
  misc_feature (437)..(437): n comprises a, c, g, or t, or includes no nucleotide
  misc_feature (487)..(487): n comprises a, c, g, or t, or includes no nucleotide
  misc_feature (503)..(503): n comprises a, c, g, or t, or includes no nucleotide
  misc_feature (518)..(519): n comprises a, c, g, or t, or includes no nucleotide
  misc_feature (528)..(528): n comprises a, c, g, or t, or includes no nucleotide
  misc_feature (562)..(562): n comprises a, c, g, or t, or includes no nucleotide
  misc_feature (604)..(604): n comprises a, c, g, or t, or includes no nucleotide
  misc_feature (628)..(628): n comprises a, c, g, or t, or includes no nucleotide
  misc_feature (633)..(633): n comprises a, c, g, or t, or includes no nucleotide
ccttcccagtgcccaagtctctgtggggaatgagaactggaagccactgctaccatctgcccaacaccagtagtgccaacgtgtcacactgcccagttgaggcccttcccactcagtgcccctgtaccctcctggcccccaccctctgctctcactccccggggggactccctcagatgaggccccttcctcctggaagccgaggctgaggagggtggagcccggccctggggaaggcagagccggggtctgatcgctttgagggatgctctgtgcgcgtctctcgccacgtccgtctcagccactttcagccttacacttattgtagaacgaccacagcccctcactccgtatagcactttaaagtttacatggttttttgacccgcaggatctcatttgagcctcatatctgctcaagaggnagggagcactctnttttattttgaaaacaagaaaacggaagtgggccaaggccacaaggactnttgagacgccatattnatttggctttaacgnncttttggtncttattcccatgaccaaaaattataaacattgtntaaaaagtaaatccgggggagactggctgggtaaaaaggggncctcttttatactggactataacnatatncta

SEQ ID NO: 4683 - DNA, 645 bp, Canis familiaris
  misc_feature (458)..(458): n comprises a, c, g, or t, or includes no nucleotide
  misc_feature (461)..(461): n comprises a, c, g, or t, or includes no nucleotide
  misc_feature (478)..(478): n comprises a, c, g, or t, or includes no nucleotide
  misc_feature (548)..(548): n comprises a, c, g, or t, or includes no nucleotide
  misc_feature (576)..(576): n comprises a, c, g, or t, or includes no nucleotide
  misc_feature (598)..(598): n comprises a, c, g, or t, or includes no nucleotide
  misc_feature (615)..(615): n comprises a, c, g, or t, or includes no nucleotide
  misc_feature (629)..(629): n comprises a, c, g, or t, or includes no nucleotide
  misc_feature (637)..(637): n comprises a, c, g, or t, or includes no nucleotide
gaccaccagctcctgcaccaacctgaaccaactggagcccagcaagacctcggttccaaatgaacttgtcactttcggacccagctctaagcaacggccagtggtctgcagtgtgcctcccagactcccgccagctgcggccccttctcactccgacaatgagtccatcattaagaggacatggtcgggtgaagagatggtgtgccccggtggagctacgatctggcccccaacttactccaggaaggaatgctgggaatacccccacactgaaatgacccctggccctctgccgccatcgcctcaccagcaccagatccaacctgtgatgccggacccaagtggcctctatgggggctttccctttccactggagctggaaaacaagcgggcacccctcccaccccgttatagcaaccagaacctggaagatttgatgcccacggcccccagtcccnggnacactggtggccctgtntaatgggtacacaagcataagttattaccattacagttccagcagggaggggggagggcctgctggaaangggggttcaaaggggggggatgcgcctnaaccgagctggaccttttatgntgattgggaggttgggntggcatccaaaggnggggcagnccaggttc

SEQ ID NO: 4684 - DNA, 486 bp, Canis familiaris
  misc_feature (436)..(436): n comprises a, c, g, or t, or includes no nucleotide
  misc_feature (449)..(449): n comprises a, c, g, or t, or includes no nucleotide
tttcttgtattatcctaaaagcagtttgtgggggaatgtatgcagtgggaaaccgagttcaacaacatttcctcccgtgggtgctacagatttcatctttcataaatgtatgctttgctcagagaaaatgattgcaatgggaatgaattcattgctttcctagagccgaacaagttctgcccatattaaaagtgtagatacactaagtcctggaagagacagatttcctaactatttttctctggcttcacattcgtgctggacacatttctagagttggcagtttatctcagatctttactcagattcctccatctcccataatctgtctataccccctacgaacttactactcagaaaggctaaatagaaacgtaacacccattaaaagcttgatgaatgggtgattgtatcggatcacagaagtgtggacagntcttgtgtcttcnttccgctgctacagaaatcataaaaaggaatccaagc

SEQ ID NO: 4685 - DNA, 557 bp, Canis familiaris
  misc_feature (427)..(427): n comprises a, c, g, or t, or includes no nucleotide
  misc_feature (450)..(450): n comprises a, c, g, or t, or includes no nucleotide
  misc_feature (453)..(453): n comprises a, c, g, or t, or includes no nucleotide
  misc_feature (498)..(498): n comprises a, c, g, or t, or includes no nucleotide
  misc_feature (550)..(550): n comprises a, c, g, or t, or includes no nucleotide
aatgattccaagcataaaagaacggacagatcaattttatgttgtttacgaaaaggtgaatctggccagtcatggccaaggttaacaaaagaaagggcaaagcttaattggcttagtgtggacttcaataattggaaagactgggaagatgattcagatgaagacatgtctaattttgatcgtttctctgagatgatgaacaacatgggtggtgatgaggatgtagatttaccagaagtagatggagcagatgatgattcacaagacagtgatgatgaaaaaatgccagatctggagtaagaaatgttgtcatcaccggattttgagaaagaaaagtaacttctctgcaagatttcataattgagagaattcctgaattgatagctctaaaggcagatgctgtatttgccttctttacccatttttnaacctggttggtttttttaaagnttnacttaagggtggtatgtcccattggatggggcaaattttaagcanttaggcaataaccttatgcatgaacttttccaaactttcatgaagctgtggngggccta

SEQ ID NO: 4686 - DNA, 330 bp, Canis familiaris
  misc_feature (49)..(49): n comprises a, c, g, or t, or includes no nucleotide
gctctaaaataagtaactcttgggcagcccgggtggctcagcggtttancgctgccttcagcccagggcatgatcctgcagacccaggatagagtcccacgtcaggctccctgcatggagcctgcttctccctctgcctgtgtctctgcctctctctctgtgtgtgtctatgaataaataaaataaatatatattaaaaaaaaaactcttcccaaaaatgaaatacaatttccccctgaaagaccattcagtagattttgaaactgttaaaaagctatgtcaaatgaactcagtttttaagttaataaacttattgttgatctaggctct

SEQ ID NO: 4687 - DNA, 504 bp, Canis familiaris
  misc_feature (405)..(405): n comprises a, c, g, or t, or includes no nucleotide
  misc_feature (434)..(434): n comprises a, c, g, or t, or includes no nucleotide
  misc_feature (437)..(437): n comprises a, c, g, or t, or includes no nucleotide
  misc_feature (452)..(452): n comprises a, c, g, or t, or includes no nucleotide
  misc_feature (467)..(467): n comprises a, c, g, or t, or includes no nucleotide
  misc_feature (476)..(476): n comprises a, c, g, or t, or includes no nucleotide
  misc_feature (479)..(479): n comprises a, c, g, or t, or includes no nucleotide
ttgttatgtttccatataactgtcaacatgttttctttgagagattagaagtatgtcttttcaataagttataatgaataaactcctctagatttattgcccaccttttaaagtgtttatttatttatttatttatttatttatttatttatgatagtcacagagagagaaagagagagaggcggagacataggcagagggagaagcaggctccatgcactgggagcccgatgtgggattcgatcctgggtctccaggatcgcgccctgggccaaaggcaggcgccaaactgctgtgccacccaaggatcccttgcccaccttttagagtcttagggtatcttacaatggatagtgggagggtttttcttagataggcttttatttttcatgcacaaaattttanaaatagatgactggaagtagcaaaaattntgnttaccatatggaaanggaaaaggatttccngtttttccngcnttgggacttaaattttgaagtttat

SEQ ID NO: 4688 - DNA, 698 bp, Canis familiaris
  misc_feature (378)..(378): n comprises a, c, g, or t, or includes no nucleotide
  misc_feature (380)..(380): n comprises a, c, g, or t, or includes no nucleotide
  misc_feature (462)..(462): n comprises a, c, g, or t, or includes no nucleotide
  misc_feature (518)..(518): n comprises a, c, g, or t, or includes no nucleotide
  misc_feature (556)..(556): n comprises a, c, g, or t, or includes no nucleotide
  misc_feature (569)..(569): n comprises a, c, g, or t, or includes no nucleotide
  misc_feature (575)..(575): n comprises a, c, g, or t, or includes no nucleotide
  misc_feature (592)..(592): n comprises a, c, g, or t, or includes no nucleotide
  misc_feature (601)..(601): n comprises a, c, g, or t, or includes no nucleotide
  misc_feature (626)..(627): n comprises a, c, g, or t, or includes no nucleotide
  misc_feature (637)..(637): n comprises a, c, g, or t, or includes no nucleotide
  misc_feature (659)..(660): n comprises a, c, g, or t, or includes no nucleotide
  misc_feature (675)..(675): n comprises a, c, g, or t, or includes no nucleotide
  misc_feature (687)..(687): n comprises a, c, g, or t, or includes no nucleotide
acctcatcaagaagaacaatcaccacgaggagaacatctcttcaaagatgaagggcttgaatggcaaagtgtcagacttggagaaagctgctgcccagaggaaggccaagcttgaggagaactcggccttccttcagttcaactggaaggctgatgtagtggaatcctggatcggtgagaaggaaaacagcctgaagacagacgattatggccgagacctgtcctccgtgcagactctcctcaccaaacaggaaacttttgacgctggtctacaggccttccagcaggagggcattgccaacatcactgccctcaaagatcagctgctggccgccaagcacattcagtcaaaggccattgaagcccggcacgcctctntnatgaagagatggagccagcttctggccaactcggcccccccaagaagaacttgttggaggcacagagtcacttccgcaaggnggaagaccttttcttgcctttgccaaaaaggcatcggccttaacaagctggtttgnaaacccgaaaaggatctgctgatctgtgcgttgaactncctggaggagatnaaactnttgggtgaggccacgancctttcgtnatccttaattttgccaggcgcttanncaatggttanttgaccgcaaacaaaacttcgnnggcttaccctaaccngttacatgaggnccggaggaagg

SEQ ID NO: 4689 - DNA, 680 bp, Canis familiaris
  misc_feature (388)..(388): n comprises a, c, g, or t, or includes no nucleotide
  misc_feature (415)..(415): n comprises a, c, g, or t, or includes no nucleotide
  misc_feature (419)..(419): n comprises a, c, g, or t, or includes no nucleotide
  misc_feature (436)..(436): n comprises a, c, g, or t, or includes no nucleotide
  misc_feature (444)..(444): n comprises a, c, g, or t, or includes no nucleotide
  misc_feature (461)..(461): n comprises a, c, g, or t, or includes no nucleotide
  misc_feature (495)..(495): n comprises a, c, g, or t, or includes no nucleotide
  misc_feature (502)..(502): n comprises a, c, g, or t, or includes no nucleotide
  misc_feature (552)..(552): n comprises a, c, g, or t, or includes no nucleotide
  misc_feature (557)..(557): n comprises a, c, g, or t, or includes no nucleotide
  misc_feature (565)..(565): n comprises a, c, g, or t, or includes no nucleotide
  misc_feature (578)..(578): n comprises a, c, g, or t, or includes no nucleotide
  misc_feature (620)..(620): n comprises a, c, g, or t, or includes no nucleotide
  misc_feature (622)..(622): n comprises a, c, g, or t, or includes no nucleotide
  misc_feature (654)..(654): n comprises a, c, g, or t, or includes no nucleotide
attccagcctctttctggaatatgcacgtttgcaagaaattctccccatctggaaagtttgtcccagcttcctcgtggcagtatcgccaggggctggtcctggtcagagagcaggcaggtccgcccagctctcctgggcaagcgccatggtgaccaagcccaacaaggtccatccggcctgaggatcccggctgtgagcatggccctggaaagacccaccactggactcttcccttgagtcagaggttactcgtgatcccacctgtaccctagcatcaatgtgcaggggggtctgcaggtcaggagaatctctacagggcaattcccagtttcctaagaacgaaatgtgcaataaagcctgttctttgtctacttctcagcagcccangagatgtagcactggaagtggtttctnaaantcttcgtggtgcctgtngaagcaantgcctgtccaaccaagnctaacttgcacctgttttaaggaacttaacccgngtcccanagcttttacctggcacaggccatgctaggtactttgggcaaacatgtggncaggnatcctctntgtttttgataanaatatcttggttggcacatcccttggctagttccatgctaangntatcaagctaaaactgggggggggggggcttnggcttacaacaccattcatttttgca

SEQ ID NO: 4690 - DNA, 456 bp, Canis familiaris
  misc_feature (8)..(8): n comprises a, c, g, or t, or includes no nucleotide
  misc_feature (57)..(57): n comprises a, c, g, or t, or includes no nucleotide
  misc_feature (69)..(69): n comprises a, c, g, or t, or includes no nucleotide
  misc_feature (110)..(111): n comprises a, c, g, or t, or includes no nucleotide
  misc_feature (118)..(118): n comprises a, c, g, or t, or includes no nucleotide
  misc_feature (137)..(137): n comprises a, c, g, or t, or includes no nucleotide
  misc_feature (235)..(235): n comprises a, c, g, or t, or includes no nucleotide
  misc_feature (264)..(264): n comprises a, c, g, or t, or includes no nucleotide
  misc_feature (292)..(292): n comprises a, c, g, or t, or includes no nucleotide
  misc_feature (326)..(326): n comprises a, c, g, or t, or includes no nucleotide
  misc_feature (374)..(374): n comprises a, c, g, or t, or includes no nucleotide
  misc_feature (398)..(398): n comprises a, c, g, or t, or includes no nucleotide
  misc_feature (412)..(412): n comprises a, c, g, or t, or includes no nucleotide
  misc_feature (416)..(416): n comprises a, c, g, or t, or includes no nucleotide
  misc_feature (429)..(429): n comprises a, c, g, or t, or includes no nucleotide
  misc_feature (454)..(454): n comprises a, c, g, or t, or includes no nucleotide
tcgacttnctccggttcaacgccaagtttgccgtggagctagaggggcagcagccgntcagtgtgccgnccagcaccaacagcgtcgtgtaccgggggctggagggcttnntggcggntatctccccctttaacttnacggcgatcggcggcaacctggcgggggccccggccctgatgggcaacgtggtcctgtggaagcccagcgacacggccatgctggccagctatgccgnctaccgcgtcttccgggaggctggcctgncccccaatatcatccagtttgtgccggntgacgggcccacgtttggcgacaccgtcaccagntccgagcacctctgtggcatcaacttcacaggcagcgtgcccaccttnaaacacctgtggaaagcaggtggnccagaacctaaacncggnttccgcactttcnacgccttggcccggagaatgcgggngg

SEQ ID NO: 4691 - DNA, 418 bp, Canis familiaris
aaataaggaattgttttacaagaagaaaacaaatctggttatccatgtagaagtaagcaaaatgaatagcacttattgctgacagagaattatagatgtcattttaagcattgctcctagcaagtaaaaaaaaaatgcataaaatatgcaactcttagttaaaggccttactagcagtataactacacagatcgtcagttttatcattgctttagttacaatcatctgtaaataatttaaatactacatggggttcaaattgagtggaatcaagtatagattaaaagtatacaatcattagcaggttaatgaatatctcagggcttatgaaatgtagttaaatttattaaaataaaagatgaaaaattagggtcatagctggtcaccaaatatgaagtcaatctagttatttacctgg

SEQ ID NO: 4692 - DNA, 653 bp, Canis familiaris
  misc_feature (319)..(319): n comprises a, c, g, or t, or includes no nucleotide
  misc_feature (378)..(378): n comprises a, c, g, or t, or includes no nucleotide
  misc_feature (454)..(454): n comprises a, c, g, or t, or includes no nucleotide
  misc_feature (504)..(504): n comprises a, c, g, or t, or includes no nucleotide
  misc_feature (530)..(530): n comprises a, c, g, or t, or includes no nucleotide
  misc_feature (538)..(538): n comprises a, c, g, or t, or includes no nucleotide
  misc_feature (580)..(580): n comprises a, c, g, or t, or includes no nucleotide
  misc_feature (603)..(603): n comprises a, c, g, or t, or includes no nucleotide
  misc_feature (619)..(619): n comprises a, c, g, or t, or includes no nucleotide
  misc_feature (628)..(628): n comprises a, c, g, or t, or includes no nucleotide
gctacagggcccttgggtagaccaggtctaatgggccctccgggacctgaaggaattgtgggaagtccaggacaaagaggtcgtccagggaaaaagggtgacaaaggacaaatagggcccacaggagaaattggaaacagaggtgctcctggacaaattggggaaagtggtcctaagggtgccagaggaactagaggtgctgtgggacatttaggattgattggacctgatggagaaccaggaattccaggatataggggtcatcagggtcaaccaggacttcctgggttgccaggacctaaaggagaaaagggttatncaggagaagatagcacagtactaggaccacctgggcctcgaggtgaaccaggtattatnggggaacaaggagagagaggagagccttgaaaaaaaggctattaaggtcatgttgggtttgccaggaccaaaaggngttcttggccaacaagggcccccagtgagccaggggaccaaggtgagcanggctaaaaggagaaagaggatttaangtcctaangggaaaaaaggactctggtcttttgaaacctgggattctggnttctgggctacccggcccaaagnattaaggttccctggnctgttggcnttagaaaatttgaaaatgggtccag

SEQ ID NO: 4693 - DNA, 409 bp, Canis familiaris
agaatagcgagggtctgggcaccgtccccgagcatgaacggatcctgcaggagattgagagcaccgacacagcctgcgtggggcccaccctccggtctgtgtatgacgaccaaccaaatgcacacaagaagtttatggaaaagttagatgcttgtatccgtaatcatgacaaggaaattgaaaagatgtgtaattttcatcatcagggttttgtagatgctattacagaactccttaaagtaaggactgatgcagaaaagctgaaggtgcaagttactgataccaaccgaagatttcaagatgctggaaaggaggtgatagtccaaacagaagatattatccgatgtagaattcagcagagaaatattacaacagtagtagaaaaattacaggtatgccttccagtgct

SEQ ID NO: 4694 - DNA, 335 bp, Canis familiaris
  misc_feature (216)..(216): n comprises a, c, g, or t, or includes no nucleotide
  misc_feature (329)..(329): n comprises a, c, g, or t, or includes no nucleotide
aatgctcgtttggctctgctcggcacgccgcccttgagttcttcgactcttgcgttgacaaggtccacccggagcaggagaagcctgagcccacacccttggtggagcttgaggagctgtcagggagtgagctcaccgtcttcatcacacctcctgaagagcctgcagcgcctgagggcagtgactccaccccccagtactgctacgacgggtttnccgagctgcgggctgagctgtttgagtcccctcgtgagcagcctggtgctctgcctgtgccaggcccatcccgcagcgcccccagcagccctgcccctcgccgtaccaaacangagatg

SEQ ID NO: 4695 - DNA, 292 bp, Canis familiaris
actccctcccaacccttgttgttcaactgtactgtttgatgtcttctcttactctgtatctctttgtactctgtatctatatatcaaaagctgctgctatgtctctctctctcctctctgtctcactctctaagtatctaatgatgtatttagcaatttctaagcatagtatactctcctcatttggggcaatagggaggagggtgaatgtttcttctttcaaacatgcgtctctcacactgagtggtattagtcatgaaggatcacagccccacacagaaaatatactgtt

SEQ ID NO: 4696 - DNA, 372 bp, Canis familiaris
  misc_feature (213)..(213): n comprises a, c, g, or t, or includes no nucleotide
  misc_feature (295)..(295): n comprises a, c, g, or t, or includes no nucleotide
  misc_feature (325)..(325): n comprises a, c, g, or t, or includes no nucleotide
  misc_feature (335)..(335): n comprises a, c, g, or t, or includes no nucleotide
  misc_feature (352)..(352): n comprises a, c, g, or t, or includes no nucleotide
  misc_feature (357)..(357): n comprises a, c, g, or t, or includes no nucleotide
aatgccatgcagcagcagttccaggcggtggtgcagcagcagcagcagctccagcagcagcagcagcagcagcagcaacacctgattaaattgcatcatcaaaaccagcagcagatacagcagcagcaacagcagctacagcggatggcacagctgcagctgcagcagcaacaacagcagcagcaacaagctttacaggcccagccgccactncagcaaccaccaatgcagcagccccagcctcccccctcccaggctctgccccagcagctacagcccatgcaccacccgcagnaccaccagccaccaccacaggcccaacagncaccagttgntcagaaccagccatctnagctnccgccgcagtcacag

SEQ ID NO: 4697 - DNA, 235 bp, Canis familiaris
cgtatgtatagtatgacacaatatttgtaaaaaaagaaaattatatataaatatatctacgtatgtatatatatgcataagaagctagaaggacatacactaaaatgttaatagtagttatttatgggtagtgggattatgggtgattattttttctttttgcttttctgtgttttctaatttttctacaatgaatatgtattccttgtgtaataaaaactaataataaaagttg

SEQ ID NO: 4698 - DNA, 377 bp, Canis familiaris
gcatgtctcccactccaagaaaattaactttaccttcagcagtttctgagggccaaacatgctgcaaaccagcttgcccaacaatcccaggaaagatgttttttaagacattgtcacagggaccaaggaacatactgttggcgagagttgaccttgttgtcagtgtttctcctgcctgaggtgatgacagatgagacaaagtaccactagctgacaagagtcacaccctctccattagtaccctgttaagggaaaatcctagcagagtcattgctacaggtatactgttgttgtatttttagagactgatttgtgcagaattgtgtatatttctgttgtctgaccttttgggggtaggggaagaacacatgtaatga

SEQ ID NO: 4699 - DNA, 480 bp, Canis familiaris
  misc_feature (26)..(26): n comprises a, c, g, or t, or includes no nucleotide
  misc_feature (146)..(146): n comprises a, c, g, or t, or includes no nucleotide
  misc_feature (398)..(398): n comprises a, c, g, or t, or includes no nucleotide
gccctcgctgctgcccccgccgctgnccccgccgctgcccccgccgctgctgccgccggccctgggaccgccgcctgaggaccccgccgccgcccgaggaccccgccgccgccgcgctcgatggcctgccgaccgcgaagcccttncgggtgcgggagccgccgcgacggcgacgccagcccgccgacccccgccagatggagccttggacggaagcgcagagccgacgggaagcgcaggaagcccgaggacgccgagggcccagtgaagcccgagggcgacggcaggcccgacagttttacgactcctgaaggcccgaagccccgttctagatgtacagattgggccagtgcagttgaagaggatgaaatgaggaccagagttaacaaagaaattgncagatataaaagaaacttcctataatgaattttggagaaaaaagaaaatcctaatcgggaagctttgactcaaagagggggg

SEQ ID NO: 4700 - DNA, 363 bp, Canis familiaris
gcaagaagccggaggcagcggggtgacaggtaggcggcggcggcgtctttgcggggcgcggagtgctgggtcaggagggcttcttcttctcgggctgcaggaacccccacaggggatgtgacgagggtggtccgggaaggcggtagctggagtggcggtggttccggaacctcgcgtagaccaggtagcagcttgggagggcggtgaggagaaggcagctgaggcggggggaggcccgggcgtcgcggggcgacgtgggggccctgggcggccggaggctgcggcggcaagggccgagggaggagagaggcgggagcacgacgctctcgtgagggctggaggagttcttgcacgaagctcgga

SEQ ID NO: 4701 - DNA, 442 bp, Canis familiaris
  misc_feature (405)..(405): n comprises a, c, g, or t, or includes no nucleotide
cattagactcctgatgatcatcttagtccaagcacagcctccccgtactgtcgcaggactaaaagtgacacagaaccccaaaagtcccagcagagctctggaaggacttcaggatctgatgaccctggaatatattacaatacagattcaacccacgcacaagttttgttaggcaagaagagactactgaaagctgagactttagaattaagtgacttctatgttagtgataagaagaaggatgtgtctccaccctttatttatgaggagacagaggaacaaaagcttcagactctagacattagtaaaaacttggagaaagaaaaattagagaattccagacccttagaatgcagatcagatcctgaatcacctatcaaaaaaccaagtttatctccactttcnaacttggatacttataccatagagatgcgaaccttcc

SEQ ID NO: 4702 - DNA, 399 bp, Canis familiaris
cctgggaagaggcggagaacaatatggcggatggcgaggagccggagaagaaaagaaggagaatagaggagctgctggctgagaaaatggctgttgatggtgggtgtggggacactggagactgggaaggtcgctggaaccatgtaaagaagttcctcgagcgatctggacccttcacacaccctgatttcgaaccgagcactgaatctctccaatttttgttagatacatgtaaagttctagtcattggagctggcggcttaggatgtgagctcctgaaaaatctggccttgtctggttttagacagattcatgttatagacatggacactatagatgtttccaatctaaataggcagtttttatttaggcctaaagatgttggaagacctaaagctg

SEQ ID NO: 4703 - DNA, 430 bp, Canis familiaris
  misc_feature (365)..(365): n comprises a, c, g, or t, or includes no nucleotide
  misc_feature (408)..(408): n comprises a, c, g, or t, or includes no nucleotide
tcaaagcgggaagaaaatcaaagggcaggttaaggttgggtctggccaggataccagacagaaggtttgtggtgggactactccctctgctcgagtaaaccccacttcatcccaggggagggtggaacacaaggtgggatctgggaggagctttcagtttctgccctgtagtggttcgaaggggagctcttggatatgtcctgtaacgttctcatttggaggggagccgctgggacccaacactggcttgggagggctagggccaaagagttagagggaacaggtcacgaggccccgaggcccccgtgccgtgtggcagcagccccaacaccaagcatgtccctcactgcctgccactccatctncctctgtgcccagtatccccctgagctgaggcacccacgtttncatcaagcctgcatgccaatgc

SEQ ID NO: 4704 - DNA, 444 bp, Canis familiaris
gagagaagccaggacctggaagccggggtgcatgtgactcttccccagcaacctcaaggagatgaggccttctcacagtccgcccaggcacatgcagcccctttggggccttccctggatgaggccaagacccctgatcagtcagagctctgggacatgcttctggctgcttgcagagctggagatgttgggatattgaaactccagctagctgctggcctcacagaccctggagttctgtctctgctcagtgcccccttgggctccaatggcttcaccctcctgcatgcagcagctgcagctgggagaggctcagtggttcgcctgctgctggaggcaggtgccgaccccactgtacagtaagtaatggtccccaagccgagccctttggggtatagagaggatcatctggaggctaacgttggtactggctacttgacaaga

SEQ ID NO: 4705 - DNA, 453 bp, Canis familiaris
  misc_feature (410)..(410): n comprises a, c, g, or t, or includes no nucleotide
  misc_feature (431)..(431): n comprises a, c, g, or t, or includes no nucleotide
  misc_feature (443)..(443): n comprises a, c, g, or t, or includes no nucleotide
taactgcagaagaaatgaatgcagtgatagaagagcgggatgctgctttgtctcagtgcaaacggctagagcaggagcttcatcatctgaaagagcagaaccagacttcagcaaacaacatgagacatctgactgctgaaaacaatcaagaacgtgctctgaaggcaaagttgttggctatgcaacaagccagagagactgcaattcaacagtacaaaaaactagaagaagaaatccaaacacttcgagtttactacagtttacacaaatctttatcccaagaagaaaacctgaaggatcagtttaaccatacacttagtacttacgaagaagctttaaaaagtagagagaacattgtctccatcactcaacaacagaatgaggaactggctcccaactacagcaagctntgacagatcggcaaacatggnaataggagcttnagcatgccat

SEQ ID NO: 4706 - DNA, 410 bp, Canis familiaris
aattctgataacctcaaatattagatttttaaaaaatagtcctatagttccctgatacttttttttccccagtctatttttttctctcttactcagattggataatttctgttgtagtgttttgtatatttatttatttacttactttttaacttggaactaattttattttatttatctttatttaaattcaatttgccaacatatagtataacacccagtgctcatcccatcatgggccctccttgggcccatcatgcagtcaccccattcccctgtgttttgttttaaagtaggctctgaaaaaaaataaataaataaatatagtaggctctttgctcaatgtgggacttgaactcatgaccctgagatcaagagtcacatgctccactgactgagccatccaggta

SEQ ID NO: 4707 - DNA, 256 bp, Canis familiaris
tggataggtacatataacttctctataagggctaaactgagaactaaaaataatgagaattcagttgaatatgactaattattagcagggtatattaattagttctcttgatgctttactgtgatgcaaagtatgtgatgtatttcaaacattttataattgttctgatgttaacctttaggccagatttgtatttctgatgcttttaatgttcttttaaaataatgtttggaaaataaaaaccctaacatttctg

SEQ ID NO: 4708 - DNA, 314 bp, Canis familiaris
  misc_feature (131)..(131): n comprises a, c, g, or t, or includes no nucleotide
  misc_feature (215)..(215): n comprises a, c, g, or t, or includes no nucleotide
  misc_feature (306)..(306): n comprises a, c, g, or t, or includes no nucleotide
  misc_feature (312)..(312): n comprises a, c, g, or t, or includes no nucleotide
tgggttcgccccgagagaggggcccgtgccttggaaagcgtcgcggttccggcggcgtccggtgagctctcgctggcccttgaaaatccgggggagagggtgtaaatctcgcgccgggccgtacccatatncgcagcaggtctccaaggtgaacagcctctggcatgttggaacaatgtaggtaagggaagtcggcaagccggatccgtaacttngggataaggattggctctaagggctgggtcggtcgggctggggcgcgaagcggggctgggcgcgcgccgcggctggacgaggcgccgtcgnccctcnca

SEQ ID NO: 4709 - DNA, 417 bp, Canis familiaris
acgtcaggtttgaggtaggtgtgaaggagaagaactaccatgacttcaagtgctttaacgaaacctcagatgcgaggccttctggccaagcgtctgcgatttcatatcgttggagccttcgctgtatccctgggggttgcagctttttataagtttgctgtggctgaaccaagaaagaaggcatatgcagatttctacagaaattatgattctatgaaagattttgaggagatgaagaaggctggtatctttcagagtgcaaagtgaatttggaatataaagaatttctttgggttgtgtttcattgaagcttgactgtcctgtgttcctgagctatgaaacacgaacactgggttatggaataagtttctcttaataaacaactaaaaaatgttttggactaagtctttaattatt

SEQ ID NO: 4710 - DNA, 417 bp, Canis familiaris
ttcctccagccaatggtcaggctgcagcaattcaggcactgcctacagattggcttatttatgatgaaatgaccagagcccatagaatagctaatattagatgttgttcagcagtgacacctgttactatattggtattctgtggaccagctaggttggcaagtaatgctcttcaagaaccttcatcatttcgagtggatggtattcctaatgacagtagtgatagtgaaatggaagatagaactactgctaatttggcagctttgaaacttgatgagtggctcaatttcaaactagaccctgaggcagccagtttattgctgcaactcagacagaagtggcacagcttatttttacgcccgaatgagagctccgtctaaaccttggtctcaagttgatgaagctccataagagcca

SEQ ID NO: 4711 - DNA, 414 bp, Canis familiaris
  misc_feature (406)..(406): n comprises a, c, g, or t, or includes no nucleotide
aataggactggagaggacagagagaaggggcctccttgcaagcacacacaggccactgggcaaggtcttgccgagtggccggtgtgtcccaaataggactggagaggacagagagaaggggcctccttgcaagcacacacagatttgtagtgtgctctccatgtatcctcttcccagcaaatgctgggccctttgcccttgctgacttgctgtcactgtgcttgtttcaacagcaggtactgcagcaggagcagctgtcaggcactggactgggacaggctggggacaaggaaggagcagccacaagtggcggacgtgccttggtggacatctgccctgggcctgagcccacactgtatttcctgaatggtttgtctgtgaatttgcttatgtggaccgctgtatnctgctgca

SEQ ID NO: 4712 - DNA, 385 bp, Canis familiaris
acgcgtggggcctttttctctgcactatttagatccgaacgaaccttatgatgtgtatattgagatgtattcagtgtgatttttaaaccaaattgtcttcctgtagtcgcaatatatactgtagcctttcgacagcaagtcttgctttcccagacagaaagccattctgaaaccctacagtatcacaggtgagaaaaggtggttaatttccccccaagacaataacagcactagtaatcccacttaatgagagcttatttaattgtacgtcagcctcttaactgctaagcactttgtgggtatcagcttttttcataaaagaacttttgtatttaatacaaagtttgctttgagacttttcagcatacaatctttttccataaac

SEQ ID NO: 4713 - DNA, 675 bp, Canis familiaris
  misc_feature (244)..(244): n comprises a, c, g, or t, or includes no nucleotide
  misc_feature (373)..(373): n comprises a, c, g, or t, or includes no nucleotide
  misc_feature (408)..(408): n comprises a, c, g, or t, or includes no nucleotide
  misc_feature (462)..(462): n comprises a, c, g, or t, or includes no nucleotide
  misc_feature (478)..(479): n comprises a, c, g, or t, or includes no nucleotide
  misc_feature (500)..(500): n comprises a, c, g, or t, or includes no nucleotide
  misc_feature (503)..(503): n comprises a, c, g, or t, or includes no nucleotide
  misc_feature (515)..(515): n comprises a, c, g, or t, or includes no nucleotide
  misc_feature (526)..(526): n comprises a, c, g, or t, or includes no nucleotide
  misc_feature (546)..(546): n comprises a, c, g, or t, or includes no nucleotide
  misc_feature (553)..(553): n comprises a, c, g, or t, or includes no nucleotide
  misc_feature (558)..(558): n comprises a, c, g, or t, or includes no nucleotide
  misc_feature (599)..(599): n comprises a, c, g, or t, or includes no nucleotide
  misc_feature (602)..(602): n comprises a, c, g, or t, or includes no nucleotide
  misc_feature (625)..(625): n comprises a, c, g, or t, or includes no nucleotide
  misc_feature (634)..(634): n comprises a, c, g, or t, or includes no nucleotide
ccactgctcaccccccgagggcaccatcaccaaagaaggcatgctgcattacaaggcaggcacctcctacttgggcaaagagcactggaagacttgcttcgtggtactcagcaacgggatcctctaccagtatcctgaccgcaccgatgtcacccctctgctctcggtgaacatggggggggagcagtgcggtggctgtcggagggccaacaccacggatcggccccacgccttccaggtcatnctcgccgaccggccgtgcctggagctgagcgccgagagcgaggctgacatggccgactggatgcagcacctgtgccaggctgtgtccaaaggggtcatcccccagggggtaactcccagcccctgcatnccctgctgcctagtgatcaccgatgaccgctcttnacgtgccacgaggactggcagactagcttttttccgttcttggggacaagcaancttggccgaaattaanngccggtttcaccggccctggnaanggagactgtgtnttggacttttncaagaaaagcaagaagcctntcctgcntgggncatttacttgagctgacgtttgaactggaaccggtcctttntgngctgggctttggggggaaaacanataacaagnggacctgcccacaagcccttcggaaacctcacaagaagttt

SEQ ID NO: 4714 - DNA, 449 bp, Canis familiaris
caaatcatgcattcaacaaaggaaatacactcagcatatgaagaagactcaaaacaagaaaacatcttcattttaaaaaagggaaaatattagaactgacatgtaagagaggacaaatatcttcttctacctttctgaaatctcaactgggaccccagcagaaaagcatacaaatttatttagtataagttttaggtaatccaagagactgcataagaaatgaagacctgaaggaatagttaaacctgaatgtttgtgtgctaggtttgatgaagagtggaaagttaatggaaaggtataataggacaaatgtgagtaaaataaagcatgggaaatttatagcaaagcctttttgttgagattctactgtgttccttcatctttgaagatagagatgttcttttctctggatcaggaaaggacctctccataaagatggtatacctgct

SEQ ID NO: 4715 - DNA, 613 bp, Canis familiaris
  misc_feature (260)..(260): n comprises a, c, g, or t, or includes no nucleotide
  misc_feature (443)..(443): n comprises a, c, g, or t, or includes no nucleotide
  misc_feature (469)..(469): n comprises a, c, g, or t, or includes no nucleotide
  misc_feature (486)..(486): n comprises a, c, g, or t, or includes no nucleotide
  misc_feature (531)..(531): n comprises a, c, g, or t, or includes no nucleotide
  misc_feature (543)..(543): n comprises a, c, g, or t, or includes no nucleotide
  misc_feature (546)..(546): n comprises a, c, g, or t, or includes no nucleotide
  misc_feature (562)..(562): n comprises a, c, g, or t, or includes no nucleotide
  misc_feature (572)..(572): n comprises a, c, g, or t, or includes no nucleotide
  misc_feature (586)..(586): n comprises a, c, g, or t, or includes no nucleotide
  misc_feature (603)..(603): n comprises a, c, g, or t, or includes no nucleotide
  misc_feature (607)..(607): n comprises a, c, g, or t, or includes no nucleotide
ggtcttgatttctcagatcgtattggaaaaaccaagagaacaggatatgaatctggagaatatgagatgcttggagagggtctaggagtgaaggagacaccccagcaaaagtaccagcgactactgcatgaggtccaagagctgacaactgaagttgagaaaatcaagacatcggtgaaggagtcagccactgaagagaagctgaccccagtggttttggctaagcagctggcagccttgaagcagcagctggttgcttnccacctggagaagctgctgggaccagatgcagctatcaaccttactgaccctgatggagctctggctaagcgcctgctgctgcagctggaagcaacaaaaaacagcaaaggaactggttcagggggaaagaccaccggtgggactcccgtagatagtaaccttgtcacttacgaactacattnttgggctgacaagacaaagttttttnaagttgccaaagtgcanaacttgaaaacgccttgcaaacttggaaccctgtccctttgatangacctcaaaatnccntttaacaaggtttaanggagcctgtnttatggagactgtnaactgttcaagcaaggngacncctgac

SEQ ID NO: 4716 - DNA, 576 bp, Canis familiaris
  misc_feature (328)..(328): n comprises a, c, g, or t, or includes no nucleotide
  misc_feature (412)..(412): n comprises a, c, g, or t, or includes no nucleotide
  misc_feature (415)..(415): n comprises a, c, g, or t, or includes no nucleotide
  misc_feature (440)..(440): n comprises a, c, g, or t, or includes no nucleotide
  misc_feature (478)..(478): n comprises a, c, g, or t, or includes no nucleotide
  misc_feature (481)..(481): n comprises a, c, g, or t, or includes no nucleotide
  misc_feature (523)..(523): n comprises a, c, g, or t, or includes no nucleotide
gccactcccgagggcctggatgtgatggcgtcacagaaaagaccctcccagaggcacggatccaagtacctggcctcagcaagcgccatggatcacgccaggcatggcttcctcccgaggcacagagacacgggcatccttgactccctcgggcgcttctttggcggtgacaggggtgtgcccaagcggggctcaggcaaggatggacatcacgcagcgagaactgcccactatggctccctgccccagaagtcccagcatggccggccccaagacgaaaaccccgtagtgcatttcttcaagaacattgtgacaccacgcacacctnctccatcgcaaggaaaggggcgaggactgtccctcacagatttagctggggagccgagggccagaacccgggattttggctacnganggcgggcttcaacttaaaaaggggntaaagggcaccgacgcccagggcaccttttccaaaatnttnaaactgggaaggaagaaatagtcgtttccggtcacccatggntagacgctgaagcccgcttgtgggccgcagaaccctgtccttaagtttttaat

SEQ ID NO: 4717 - DNA, 685 bp, Canis familiaris
  misc_feature (419)..(419): n comprises a, c, g, or t, or includes no nucleotide
  misc_feature (428)..(428): n comprises a, c, g, or t, or includes no nucleotide
  misc_feature (458)..(458): n comprises a, c, g, or t, or includes no nucleotide
  misc_feature (468)..(468): n comprises a, c, g, or t, or includes no nucleotide
  misc_feature (477)..(477): n comprises a, c, g, or t, or includes no nucleotide
  misc_feature (496)..(496): n comprises a, c, g, or t, or includes no nucleotide
  misc_feature (501)..(501): n comprises a, c, g, or t, or includes no nucleotide
  misc_feature (507)..(507): n comprises a, c, g, or t, or includes no nucleotide
  misc_feature (535)..(535): n comprises a, c, g, or t, or includes no nucleotide
  misc_feature (596)..(596): n comprises a, c, g, or t, or includes no nucleotide
  misc_feature (612)..(612): n comprises a, c, g, or t, or includes no nucleotide
  misc_feature (620)..(620): n comprises a, c, g, or t, or includes no nucleotide
  misc_feature (639)..(639): n comprises a, c, g, or t, or includes no nucleotide
  misc_feature (650)..(650): n comprises a, c, g, or t, or includes no nucleotide
  misc_feature (652)..(652): n comprises a, c, g, or t, or includes no nucleotide
acacaaatctaattattgaataaagagaagcatattctgagtaatcagttgtagggcatttctttaattttggcattttggagaaagtaggtagaatgtggaggaagaaataatttctttcaaaaatttgtggtaacgtataaaaaattttgctgtgtgtagatgctcaacagagtgggaggcagcttatttctgcccccagacattgtgaccttttgaaacaccagctctttgggaggtagaggaaagacacaggattctatgaagaaaagcaattagcattttctttaatgtatttctatcaaagagctactgctgaatcctgttctctaacccaaagggcagcgtaggtagtttcaggccccagaatattcagatattcctgttgtggtcttggtggggtgacaggatgcaaaaanaggattgangggcaaattggcatcaaaatggactgcctntttcacatancttacccangctggatgggatggatggngggcnctgaantccacacttttgcaagggttgaatcctntgctaaccttttctgggtccatacttttattggcttcctaaaatggttatgctgatactanttctgatggcccactnttcatggnaggagtagctttttttggnggcttaaaaananccttaaacaccttggctgggattcctttggtaa

SEQ ID NO: 4718 - DNA, 161 bp, Canis familiaris
ctctcagggctaggggaggaggggctaacggaaggggggttccatgtacatatttatctctccttccacatagccccccagaccttttgtacatttttacaggggtgcccctcccaataatctcccttcctggttaattaaatcctcagactggtgctgtg

SEQ ID NO: 4719 - DNA, 500 bp, Canis familiaris
  misc_feature (462)..(462): n comprises a, c, g, or t, or includes no nucleotide
  misc_feature (479)..(479): n comprises a, c, g, or t, or includes no nucleotide
  misc_feature (486)..(486): n comprises a, c, g, or t, or includes no nucleotide
acgcgtgggtgagccggctgagcggcgtgggactgcggctgaccacctcgctcttcagagactcgcccgccggtgaccatgactacgctctgcccgtgggaaagcagcagcagcagcagcagcagcagcagcagcagcagcagcagcagcaggacctgctggaagaggacgactcggcgggaggagtgtgtcttcatgtggacaaggataaggtgtcggtggagttctgctcggcgtgcgcccggaaggcgtcgtcttctcttaaaatgtagggtcaagtaatctgctctttatccgcgtttacccctttcaactcccttacaccatgtaaaacaccttagtgggacatcttcactggacacatttcagaggaggaaaaagtaatattgaatcgttaagtgtttagctaaaagcatgaatgtgacacttgtaaccaacttctaatgatacatgtgactattnaatttttttgcaggttntttttangggaattcttctgc

SEQ ID NO: 4720 - DNA, 672 bp, Canis familiaris
  misc_feature (440)..(440): n comprises a, c, g, or t, or includes no nucleotide
  misc_feature (544)..(544): n comprises a, c, g, or t, or includes no nucleotide
  misc_feature (590)..(590): n comprises a, c, g, or t, or includes no nucleotide
  misc_feature (597)..(597): n comprises a, c, g, or t, or includes no nucleotide
  misc_feature (640)..(640): n comprises a, c, g, or t, or includes no nucleotide
  misc_feature (651)..(651): n comprises a, c, g, or t, or includes no nucleotide
  misc_feature (666)..(666): n comprises a, c, g, or t, or includes no nucleotide
aactattgccctgccctagggatggtgaagttggtatatacgtatctatatattaaatactgaatggtgtcaatgcaatcctacatatacatacttaactcagatgggcaaatagagactagctctgggaaggaaggtgtggacaactacaaagaaaggttgggagcatgtgtggctcatgggaaataaccaggtcttaacagcacaaactgaattcatggaaaaatggcaaatttgagaagtctcccagtaagctggaacttttctggtttggttaactaacaaaaggtttcttgatttgtctcaacatttaaagccaaaggcttgggttcatgatttaggtgtcattgagtgtgggtacaatatttatatatggtgaattcagataaactttggtcaaagatggtctctggaaaaaaaatagaggcttgcattatggnaataaaaatttctgggctgttcctgggacatgctttaaaaaaaccaaaagtatatggatggttttttattttcatgggggtggggaaacaacatggtttttaanaatggtttgtaaagatgaaattaaaacttgttcacaagggataaanaagtgtntttgtgtaaaagttggagaactggatggatgcatatcacattntgggggggggncccttttttttgggnggaaaa

SEQ ID NO: 4721 - DNA, 670 bp, Canis familiaris
  misc_feature (389)..(389): n comprises a, c, g, or t, or includes no nucleotide
  misc_feature (439)..(439): n comprises a, c, g, or t, or includes no nucleotide
  misc_feature (457)..(457): n comprises a, c, g, or t, or includes no nucleotide
  misc_feature (468)..(468): n comprises a, c, g, or t, or includes no nucleotide
  misc_feature (483)..(483): n comprises a, c, g, or t, or includes no nucleotide
  misc_feature (488)..(488): n comprises a, c, g, or t, or includes no nucleotide
  misc_feature (500)..(500): n comprises a, c, g, or t, or includes no nucleotide
  misc_feature (554)..(554): n comprises a, c, g, or t, or includes no nucleotide
  misc_feature (567)..(567): n comprises a, c, g, or t, or includes no nucleotide
  misc_feature (575)..(575): n comprises a, c, g, or t, or includes no nucleotide
  misc_feature (591)..(591): n comprises a, c, g, or t, or includes no nucleotide
  misc_feature (603)..(603): n comprises a, c, g, or t, or includes no nucleotide
  misc_feature (627)..(627): n comprises a, c, g, or t, or includes no nucleotide
  misc_feature (643)..(643): n comprises a, c, g, or t, or includes no nucleotide
  misc_feature (655)..(655): n comprises a, c, g, or t, or includes no nucleotide
  misc_feature (664)..(664): n comprises a, c, g, or t, or includes no nucleotide
aaggagaaagaagaggacagctcggggcaggggtcccaccggggtgccgcccccgccgcagagggctcccgctctgtcctggacctggtcaactatttcctttcccccgagaggctgacggcggagaaccgctactactgcgagccctgtgcctcgctgcaggacgccgagaaggcggtggagctgagccaggggccgcgctacctcatcctgaccctgctgcgcttctccttcgacctgcgcaccatgcggcgccgcaagatcctggacgacgtctccatccccttgctgctgcgcctgccgctggcggggggccgcggccaggcctacgacctctgcagcgtggtcgtgcactcgggagtgtcctccgagagcggcactactactgntatgccgcgagggcgccgccgcccggccccttttttggtgcttgccgaanggcccagcccgaaacaanggtatttgttnaacgacactcggggnccttntctcttcgagtntgtaagaacgtaactctttttcccaagaaacgggctatgtgctttttccggaanggcctggggaggngcccgagntgagccaacttcccanaaggcggacggngccaccctcacaaaaattgatggnggcatttcaaaaaaanatctttacctgnggacagganaagagg

SEQ ID NO: 4722 - DNA, 392 bp, Canis familiaris
atatctggcacttcctgtcctccattgccatgtttgggtcattcctggtgttgctgacgctggacgacgacctggacaccgtgcagcgggacaagatctacgtgttctagcaggagctaggccccttgctttactcatggggccccaaggcctcctgccaccctgcctggagcctccgtagctctgggggtgtgagtccccagcctgcggcccacggtgggtagcagcaggacagcgaggtctaggccaagcctggcctgggacagtcatggcgggggccttgagccttgaagctgctctctgctggggaggaggcctgctccccccacaccccagatgttggccaattgctgctgcttctcagtgttgagggcctctcacgggccctgctg

SEQ ID NO: 4723 - DNA, 516 bp, Canis familiaris
  misc_feature (18)..(18): n comprises a, c, g, or t, or includes no nucleotide
  misc_feature (42)..(42): n comprises a, c, g, or t, or includes no nucleotide
  misc_feature (85)..(85): n comprises a, c, g, or t, or includes no nucleotide
  misc_feature (89)..(89): n comprises a, c, g, or t, or includes no nucleotide
  misc_feature (128)..(128): n comprises a, c, g, or t, or includes no nucleotide
  misc_feature (166)..(166): n comprises a, c, g, or t, or includes no nucleotide
  misc_feature (170)..(170): n comprises a, c, g, or t, or includes no nucleotide
  misc_feature (184)..(184): n comprises a, c, g, or t, or includes no nucleotide
  misc_feature (197)..(197): n comprises a, c, g, or t, or includes no nucleotide
  misc_feature (269)..(269): n comprises a, c, g, or t, or includes no nucleotide
  misc_feature (302)..(302): n comprises a, c, g, or t, or includes no nucleotide
  misc_feature (367)..(367): n comprises a, c, g, or t, or includes no nucleotide
  misc_feature (371)..(371): n comprises a, c, g, or t, or includes no nucleotide
  misc_feature (393)..(393): n comprises a, c, g, or t, or includes no nucleotide
  misc_feature (436)..(436): n comprises a, c, g, or t, or includes no nucleotide
  misc_feature (458)..(458): n comprises a, c, g, or t, or includes no nucleotide
  misc_feature (468)..(468): n comprises a, c, g, or t, or includes no nucleotide
  misc_feature (482)..(482): n comprises a, c, g, or t, or includes no nucleotide
  misc_feature (490)..(490): n comprises a, c, g, or t, or includes no nucleotide
catgctgattacattggngtatccagactgctttgcttttanccagtgctttcaaatttttttcacgacattcttgggatagttnaagnttgaaaataattaagtggtggtgttctttaaggaatttntataaccaaattgatcttattttttatttcactttatnatanaataaatatgtatnattatggcagggnatctctgtaattatcgatttaatcattgccacagtgtttccatatatttttttttctaagtatttactatanctcttatggtggtggcctggtgatggggactgnctttcatttattgatacatgaccaaccagatggtgattttcaagggaatttttagatcatctttntagntgggttgtagactaactaaagnaaaacttcctgacttgctcgggggaaaacattttgtggatganaaccggccctattggttaaaanattgaaaccnaaaataattttttngttaaatnaaaggaaaatgagatttggtccacat

SEQ ID NO: 4724 - DNA, 598 bp, Canis familiaris
  misc_feature (401)..(401): n comprises a, c, g, or t, or includes no nucleotide
  misc_feature (456)..(456): n comprises a, c, g, or t, or includes no nucleotide
  misc_feature (515)..(515): n comprises a, c, g, or t, or includes no nucleotide
  misc_feature (526)..(526): n comprises a, c, g, or t, or includes no nucleotide
  misc_feature (544)..(545): n comprises a, c, g, or t, or includes no nucleotide
  misc_feature (587)..(587): n comprises a, c, g, or t, or includes no nucleotide
cattcacaatgggggtggactgatatgtgtatgttgtcttgtgtcgttcatcagcttccccaaaatattatgtgtcttttgttctttccgagtctctttctttccaaaggttgtatatagtagtcatttagtggctctgactccctacataagatgtcttgggtttatttttccttttctctcctcagtggtgtttgctgaatgacaacaatttaggaatgctcaatgtgctgttgattctttcaatacacagtattgttcttgtaaaactgtgacattccacagagctactgtcactatactttctttgggtgtcaggctctgaaactctcaaaatttgctgtccttggttcctcatggctgtcatctgtctttatgatttcataattagacaatgtggnattacattacaagcattgcactaaaagtgatgtgatttatgcatttatgcatganaactaaaataaaattttaaaatcctaccgtaaaccaaaacttttccatgacagttgcanactggttgggnaaaccccccccccccacnnccggaaccaccaaaccaccaccaaagcttgctcaattttggnaccctgcaaaa

SEQ ID NO: 4725 - DNA, 285 bp, Canis familiaris
attcttcagggagagaaaagggatggtttctgaggggttctgaaaagtatggttgaatgtgcaacatacaggtaggttgtcagcataagctgaaatgtacgcatgtgagaacttgttgtcccccatccccccacacacactttttctttaactatactcttttttttcccccttcgagaagttgaggctgagggaggatggtaggcacaggaaaatttggcaaaactgctctgtgctttcgaaccaaagtgccccctcacccctgaaaaaaaaaaaaaaaaaaaa

SEQ ID NO: 4726 - DNA, 419 bp, Canis familiaris
  misc_feature (64)..(64): n comprises a, c, g, or t, or includes no nucleotide
  misc_feature (333)..(333): n comprises a, c, g, or t, or includes no nucleotide
  misc_feature (390)..(390): n comprises a, c, g, or t, or includes no nucleotide
  misc_feature (409)..(409): n comprises a, c, g, or t, or includes no nucleotide
cccatgaagcccaagatgcagggtatcgcatgtacaggaaaagccaaacgacaggcttcccttntctaattacaattttctcagcaccaaattacttagatgtatacaataacaaagctgcagtattgaagtatgagaacaatgtcatgaatatcaggcaattcaactgttctcctcacccatactggcttccaaatttcatggatgttttcacttggtccctgccatttgttggggaaaaagtgactgagatgctggtaaatgtcctcaacatctgctcagatgatgaactaggatcagaagaagatggatttgatggagcaacagccgcancccggaaggaggtgataaggaacaagatcccgagcgataggcaaaatggcccgagtnttttcagttctcacaaaanagagtgagag

SEQ ID NO: 4727 - DNA, 504 bp, Canis familiaris
  misc_feature (442)..(442): n comprises a, c, g, or t, or includes no nucleotide
  misc_feature (498)..(498): n comprises a, c, g, or t, or includes no nucleotide
aattgactctggctctaatccatatgagccatcagtcagagtgacattgaatcatggggcaaagagctgcccaggtggactaaattttcccaggacactagctagtgtgccttggatcaattacctcttctactgcattgaaaggtgccatgttttccaaaatgctcaattcccaacacctgggtaaacagtgacctcccagagagtggctcacataacaggcctctccctagggtgagccccataaacatgttttatcatttttgtctcatatttttacttcacaagtcagtgagtgtgttcaaggtaagtacaggattattctagtaagaataggcgattgctgccatgatcaattcccatattaatttcatttcattgtaaagataaaacccaattttgcttaagcacattgatgtaatttttggtattatttgcatgnaaaaaacaaaaaaattgagtgatagatcaatatgaaacttggtggtgaatgaatcnaaattt

SEQ ID NO: 4728 - DNA, 558 bp, Canis familiaris
  misc_feature (268)..(268): n comprises a, c, g, or t, or includes no nucleotide
  misc_feature (372)..(372): n comprises a, c, g, or t, or includes no nucleotide
  misc_feature (426)..(426): n comprises a, c, g, or t, or includes no nucleotide
  misc_feature (445)..(445): n comprises a, c, g, or t, or includes no nucleotide
  misc_feature (478)..(478): n comprises a, c, g, or t, or includes no nucleotide
  misc_feature (490)..(490): n comprises a, c, g, or t, or includes no nucleotide
  misc_feature (506)..(506): n comprises a, c, g, or t, or includes no nucleotide
  misc_feature (538)..(539): n comprises a, c, g, or t, or includes no nucleotide
  misc_feature (549)..(549): n comprises a, c, g, or t, or includes no nucleotide
acgctaaactgatgatcctacttattgtagaggagtggttggcccgagcaggagcacccagcaaatagggccccgtcattccgccagaggggcctccacccttaaactagtgggagggcagccacagatgctagcagcctctattgcccttagtcctagaaaaaccaaaattgtgcccttcccagacctcacccggaaactggggcttggaagggaaggtctcgggatcacaccagcctcaggttgctccagttgcatcgtgtcctgnaagggggcagactgccgagcagggtgggcccaactactggcttgttcctgtagccagccccatccctgtccatccctgtggtggtttcaggtggagttaaactnggcactggggttaagtgtgtgtgtggaaaataacaagctttttctcttcagagncccaagtttctaggttgcntgaagatttttgtaaaataaaaatgttgccagnttctttggctgnataattaattactatntctgaaggggaccgggggagattgtgtggcanngcatggtgtntgattttat

SEQ ID NO: 4729 - DNA, 495 bp, Canis familiaris
  misc_feature (388)..(388): n comprises a, c, g, or t, or includes no nucleotide
  misc_feature (398)..(398): n comprises a, c, g, or t, or includes no nucleotide
  misc_feature (407)..(407): n comprises a, c, g, or t, or includes no nucleotide
  misc_feature (423)..(423): n comprises a, c, g, or t, or includes no nucleotide
  misc_feature (428)..(428): n comprises a, c, g, or t, or includes no nucleotide
  misc_feature (493)..(493): n comprises a, c, g, or t, or includes no nucleotide
ggaaaagccttatgagtgtgaagaatgtgggaaaagcttcagtcggagctctcacctagctcagcaccagaggacccacacaggtgaaaagccttacgagtgtaatgaatgtgggcgaggcttcagcgagagatctgatctcatcaaacactatcgagtccacacgggggagaggccctacaagtgtgatgagtgtgggaagaatttcagtcagaactctgacctagtgcgccatcgcagagcccacacaggagaaaagccctaccactgtaatgaatgtggggagaatttcagccgcatctcgcacttggttcaagcatcagagaacccacactggggaaaagccatatgaatgtaatgcttgtgggaaaagcttcagtaggagctntcatctcatnacacaccanaagattcacaccgganagaanccctaccagtgcaacgagtgttggcgagcttttgtggaaaggcagatttatttaacaccaaaaancc

SEQ ID NO: 4730 - DNA, 523 bp, Canis familiaris
  misc_feature (385)..(385): n comprises a, c, g, or t, or includes no nucleotide
  misc_feature (408)..(408): n comprises a, c, g, or t, or includes no nucleotide
  misc_feature (502)..(502): n comprises a, c, g, or t, or includes no nucleotide
cccgtgcgccccggcgagaaggcggctgagaaatggaggggaaaatgaagtattaaaagtggcagctatgcggcagatcctaagagaaccatggcaacaccaggtgactgcccccgagatgaaccgcaggtgttgtggctgcatgtggtggaaaattggacaccaagagcaagtccgctaatcaaggatggtggaagactcaggaagaattcctaccgtggaatattctacagtcattgaaaatggagggagaagatcacgtggagtgcggtgaccaggaacatctccaggagcttgtgcacccggaagagtttgtggccatcgcagactactctgccactgaccaagacgcagctcaattttttaaggggagaaaaaaattctnattcttgagacagacaactgctnactggtggtggggcgaaccttccccgcttcttttggttccataccttgcaaaccaccttgggaagcacctggaggagtgtgaccctgaaacacntggcaggatgaaaagtacttt

SEQ ID NO: 4731 - DNA, 570 bp, Canis familiaris
  misc_feature (304)..(304): n comprises a, c, g, or t, or includes no nucleotide
  misc_feature (310)..(310): n comprises a, c, g, or t, or includes no nucleotide
  misc_feature (383)..(383): n comprises a, c, g, or t, or includes no nucleotide
  misc_feature (405)..(405): n comprises a, c, g, or t, or includes no nucleotide
  misc_feature (430)..(430): n comprises a, c, g, or t, or includes no nucleotide
  misc_feature (452)..(452): n comprises a, c, g, or t, or includes no nucleotide
  misc_feature (475)..(475): n comprises a, c, g, or t, or includes no nucleotide
  misc_feature (486)..(486): n comprises a, c, g, or t, or includes no nucleotide
  misc_feature (494)..(494): n comprises a, c, g, or t, or includes no nucleotide
  misc_feature (509)..(509): n comprises a, c, g, or t, or includes no nucleotide
  misc_feature (553)..(553): n comprises a, c, g, or t, or includes no nucleotide
  misc_feature (556)..(556): n comprises a, c, g, or t, or includes no nucleotide
gctttgagtgctgtgtttcccttttaccagagggcagcactgcataaattcctgtttttccccatagcatgttctgttggattgcatttactggcaaagaaaggacagatcacatactgggcagaagtcaccattcaaggctaaggtgggcttccagttgccttaatagaagtactcaagtctcttgggtaatgagctggaatgcccacagaagaggggttcctgttttcatttgaaaactttatgattaagagaacctttaaaaactgatttcaagtaagtttttggtgcccattaaaatggnggctgngggtcactactttcctagatggatgagactcttactattataacttaacgtgttcctttgcccctactgaggncatcctttcccacaaggatggnattgggatcaaaagataagactctngcttttgggtagtgtaaatgtnaaacactgtttcagcactttaanggttctggatnggttgganttcatagctcaatanctgataataaagttaaaaatttttgaaaaaaaaaaaaaaaaggnggncgttttaaggtcca

SEQ ID NO: 4732 - DNA, 468 bp, Canis familiaris
  misc_feature (156)..(156): n comprises a, c, g, or t, or includes no nucleotide
  misc_feature (406)..(406): n comprises a, c, g, or t, or includes no nucleotide
  misc_feature (423)..(423): n comprises a, c, g, or t, or includes no nucleotide
  misc_feature (441)..(441): n comprises a, c, g, or t, or includes no nucleotide
  misc_feature (456)..(456): n comprises a, c, g, or t, or includes no nucleotide
agagtgctcagtactagtccactgatggaaatgccacattttgtcagcagagaatcttacctacctggattcagtctcctgtggtctaaagagaaccctcagaacacaggacacctagggcaggccgctgcgcatatgagatgaactgcttttcanaaccagccttgtcataagaggctccatgggaggagcccaaactgctgcagaaatttttataactttgcaacttcttttttataagggacttttgtgctgtctacaacacatcaggactcttgaaccatctgataatttaatgagtatattttgcatgaacacaaaagtgaaaccatctgtactctgttgactattttatcttccctaactggatggaggggaatctctgaactttatgaatcagtattgncttcattacagagttgnacatgtattaaaaattgngctgcctttgccggngggatttggaga

SEQ ID NO: 4733 - DNA, 660 bp, Canis familiaris
  misc_feature (421)..(421): n comprises a, c, g, or t, or includes no nucleotide
  misc_feature (426)..(426): n comprises a, c, g, or t, or includes no nucleotide
  misc_feature (457)..(457): n comprises a, c, g, or t, or includes no nucleotide
  misc_feature (542)..(542): n comprises a, c, g, or t, or includes no nucleotide
  misc_feature (558)..(558): n comprises a, c, g, or t, or includes no nucleotide
  misc_feature (578)..(578): n comprises a, c, g, or t, or includes no nucleotide
  misc_feature (593)..(593): n comprises a, c, g, or t, or includes no nucleotide
  misc_feature (611)..(611): n comprises a, c, g, or t, or includes no nucleotide
  misc_feature (627)..(627): n comprises a, c, g, or t, or includes no nucleotide
  misc_feature (638)..(638): n comprises a, c, g, or t, or includes no nucleotide
tgaaaggaggaggaggaggagcgtccgcgctgccagctaggcctgaccatggacgaggaatacgatgtgatcgtgctggggaccggcctcaccgaatgtatcttgtcgggcatcatgtccgtgaacggcaagaaagtgctgcatatggaccggaacccctactatgggggtgagaagctcctccatcacacccctggaagagctctataagcgttttcaattgctggaggggccccctgaggcaatgggcaggggccgagactggaacgttgacctgatcccgaagttcctcatggccaatgggcagctggtaaagatgctgctgtatacaaaggtgacgcgctacctggacttcaaggtggtggagggcaagcttcgtctacaaagggggaaagatctataaaatgccattcactgagancgaanctttgctttcaatttgatgggattgtttganaaaaaccgtttcccaagtttctggtatttttggcaaacttttatgaaaatgaccccaaaccttcagggtgttgaccccaaaacancaacatgcgtgacgtntaccggaagtttgacttggncaggatgtaattgantttactggcatgcctggnctttaccgactgatantacttgacaancttttttaaacataaccgataa

SEQ ID NO: 4734 - DNA, 459 bp, Canis familiaris
  misc_feature (195)..(195): n comprises a, c, g, or t, or includes no nucleotide
  misc_feature (281)..(281): n comprises a, c, g, or t, or includes no nucleotide
  misc_feature (389)..(389): n comprises a, c, g, or t, or includes no nucleotide
  misc_feature (394)..(394): n comprises a, c, g, or t, or includes no nucleotide
  misc_feature (407)..(407): n comprises a, c, g, or t, or includes no nucleotide
  misc_feature (415)..(415): n comprises a, c, g, or t, or includes no nucleotide
  misc_feature (429)..(429): n comprises a, c, g, or t, or includes no nucleotide
  misc_feature (437)..(437): n comprises a, c, g, or t, or includes no nucleotide
  misc_feature (447)..(447): n comprises a, c, g, or t, or includes no nucleotide
agttgggaaattatcgggccttatccctcctggtggctctttaatggccttctcctgatcctacagtttctacatgtcttctggtcctacctaattgtgcgaattgcttttaaagctttgatccgaggaaaggtgacctatccaggaaggattagacccagactctgtactctccactcttttctcacctccttncttttttctatgcctggtgggagctggacagtttcatctcttgcatgtgtctaaggatgaccgcagtgatgtggaaagcagctcanaggaagaagatatggccaccaacatgaaaagcccctgtggcagcagctccagcaatggtgccaatcgggtgaatggtcacatgggaagcaactactgggctgaaaagnaaagngggttggggtggnaactacancgcacattggtttntaggggcncttgggaccnacttctttttgg

SEQ ID NO: 4735 - DNA, 585 bp, Canis familiaris
  misc_feature (411)..(411): n comprises a, c, g, or t, or includes no nucleotide
  misc_feature (514)..(514): n comprises a, c, g, or t, or includes no nucleotide
  misc_feature (517)..(517): n comprises a, c, g, or t, or includes no nucleotide
  misc_feature (527)..(527): n comprises a, c, g, or t, or includes no nucleotide
  misc_feature (543)..(543): n comprises a, c, g, or t, or includes no nucleotide
  misc_feature (552)..(552): n comprises a, c, g, or t, or includes no nucleotide
  misc_feature (566)..(566): n comprises a, c, g, or t, or includes no nucleotide
  misc_feature (570)..(570): n comprises a, c, g, or t, or includes no nucleotide
ctctctccttcatggtgtcccctttcttccattcaactcagagggagcccctcagaatggctgcagacctggggcatccagctgcctgtgcccacccagttgggcctctcagcccccaccgccctcccagcagccccaagaggaaggtcggcccaagctggctccagccctcaggccaggactccagaggcctctgcctccccaacttgccccccccacacccttggctggcctgggcggctgggggctccgacctcacaaatggcctcggcagtggggcccgctaggaaattccagccaggcagccccgaagcagcgcggggagggctggaggccgtgagtgacaccggctcctgcccctggctccgtacaagtgcaaatgagatgctttctggctgatcaagccactgnattttatgcaacttaaatgtctatgtcttggcaactctttcagtcaagaagaatagcagaaaattttaacgagaaaaaaaaaaaaaaaaaagggggggcggtntanaggatccaancttaacgtcccgtgcnttgcgacgncataactttttttnttgnggaacctaaattaaa

SEQ ID NO: 4736 - DNA, 447 bp, Canis familiaris
tattcgccttgttacattcaatgcaattctcaagtctttaaagaggtatgtgtttaatatttcctacggtgtaggagcatttgcagtcagccataggtacataggaagtagtcaactggctgatacgtttaaagcggcagtgagtagcaaggacagatacctccaatctgtgaaacacaaagatctgatggatcatatagaatgaatttgggtttttaaagaactatgaaaagttaggttttataagagttcttaaaacctataaactgttcattctttgggctagtggcttgggataaaataaatgaaaggaagtaccaaattggtttgtcgatggctttcttcttctagggcagcaatattataatgttcatgtgtgagccattcacacataggcaggcatacacaggcacaaggctttaagttcacactgatgccttgggaatt

SEQ ID NO: 4737 - DNA, 676 bp, Canis familiaris
  misc_feature (216)..(216): n comprises a, c, g, or t, or includes no nucleotide
  misc_feature (351)..(351): n comprises a, c, g, or t, or includes no nucleotide
  misc_feature (353)..(353): n comprises a, c, g, or t, or includes no nucleotide
  misc_feature (382)..(382): n comprises a, c, g, or t, or includes no nucleotide
  misc_feature (409)..(409): n comprises a, c, g, or t, or includes no nucleotide
  misc_feature (472)..(472): n comprises a, c, g, or t, or includes no nucleotide
  misc_feature (494)..(494): n comprises a, c, g, or t, or includes no nucleotide
  misc_feature (514)..(514): n comprises a, c, g, or t, or includes no nucleotide
  misc_feature (582)..(582): n comprises a, c, g, or t, or includes no nucleotide
  misc_feature (601)..(601): n comprises a, c, g, or t, or includes no nucleotide
  misc_feature (639)..(639): n comprises a, c, g, or t, or includes no nucleotide
  misc_feature (641)..(641): n comprises a, c, g, or t, or includes no nucleotide
  misc_feature (671)..(671): n comprises a, c, g, or t, or includes no nucleotide
gagctttacttcaacgtggacaatggctacttggagggactggtgcgcggcctgaaggccggggtgctcagccaggcggactacctcaacctggtgcagtgcgagacactcgaggacctgaagctgcacctgcagagcacagactacggcaacttcctggccaatgaggcatcgccgttgaccgtgtcagttattgatgaccggcttaaggagaanatggtggtggagttccgccacatgaggaaccatgcctatgagccactcgccagcttcctggacttcattacttacagctacatgatcgacaatgtcatcctgctcatcacgggcacgctgcaccagcgctctatngncgagcttgtgcccaagtgccacccactangcaacttttgagcagatggaagctgtnaacaattggccaaaaacctgccgagctctacaatggcaattttggtggacaacgcccctgggnggccttttttcaggaattggantttaaaacaaggacctttgntgagatgaacaatcgagatcatttgcacaacactttaaaaaggcctaccttgggagtctttttacaantttttgaacctaattgggngggaccacggccgatgccatgtgccccatctggagggngngctgggcaaccttacactgcccggccttgnagccc

SEQ ID NO: 4738 - DNA, 616 bp, Canis familiaris
  misc_feature (131)..(131): n comprises a, c, g, or t, or includes no nucleotide
  misc_feature (271)..(271): n comprises a, c, g, or t, or includes no nucleotide
  misc_feature (418)..(418): n comprises a, c, g, or t, or includes no nucleotide
  misc_feature (482)..(482): n comprises a, c, g, or t, or includes no nucleotide
  misc_feature (499)..(499): n comprises a, c, g, or t, or includes no nucleotide
  misc_feature (520)..(520): n comprises a, c, g, or t, or includes no nucleotide
  misc_feature (522)..(522): n comprises a, c, g, or t, or includes no nucleotide
  misc_feature (548)..(548): n comprises a, c, g, or t, or includes no nucleotide
  misc_feature (590)..(590): n comprises a, c, g, or t, or includes no nucleotide
  misc_feature (599)..(599): n comprises a, c, g, or t, or includes no nucleotide
gtggagtaaaatttgactacttaaaacattggcaaaaaaaaaaaatcaagatttaaatttgtatttgtactgaaaaagtaatcataactagtaaatctcagccaccttacacttgaaagaagagttgttgntatttcttaaatgttagcagactttcccgtctgtcaggaaaatcatatttatgaatcccgtcggtattgctttgtaactgaaaaaacatcaaatagtactcagacttgaattctttctaaatttgaaaaataaagtaatnaattgtatcacgctaaggacaagatgcagattctggggaaaaaatgtttttcttcatttcaaaatattctttactaataatggctttgagcaaagaagctcaatttttaggtgactgaaattagagagggtattggctgtagagtcnttttttgtgagccaaccttaaaatcaatttatttgaaatagcaaaacccggttagttttaattntccgcttctggtaatantaaaatttttggcttggttancncaattggaacaagtaaaaaaagttgnatgctggcatgcttcaatacccatgaatagcctatgaatacntgtcccaantggaggggcatggatgc

SEQ ID NO: 4739 - DNA, 493 bp, Canis familiaris
  misc_feature (68)..(68): n comprises a, c, g, or t, or includes no nucleotide
  misc_feature (149)..(149): n comprises a, c, g, or t, or includes no nucleotide
  misc_feature (216)..(216): n comprises a, c, g, or t, or includes no nucleotide
  misc_feature (289)..(289): n comprises a, c, g, or t, or includes no nucleotide
  misc_feature (302)..(302): n comprises a, c, g, or t, or includes no nucleotide
  misc_feature (318)..(318): n comprises a, c, g, or t, or includes no nucleotide
  misc_feature (431)..(431): n comprises a, c, g, or t, or includes no nucleotide
  misc_feature (452)..(452): n comprises a, c, g, or t, or includes no nucleotide
  misc_feature (463)..(463): n comprises a, c, g, or t, or includes no nucleotide
  misc_feature (480)..(480): n comprises a, c, g, or t, or includes no nucleotide
gggcctggtgggcagcctatagtggggagagcgacagtgaggaggaacaggaacgcgggggtccagancgagaggagaaactcactgactggcagaagctggcctgtctgctctttcggcgccagttccccaacaaggaggcgctcatncgccaccagcagctttctgggctacacaagcaaaaccttgagattcaccggcgagcccatctatcanagaacgagctggaagcactggagaagaacgacatggagcaaatgaagtaccgggaccgtgcagctgaacgcanagagaagtacggnatccctgagccaccanagcccaagaggaggaagtatggtggcatgtctgcagcttctgtggactttgagcaagcccacaagggatgggctgggcagtgacaacattggcaatccatgctttaaggcatnggcttggaaaaaggtaatggnctgggcccaanaacaaggcattgtgacncctattgaggcca

SEQ ID NO: 4740 - DNA, 317 bp, Canis familiaris
tagaatagccatatttgggagaaagataaaagaagaatctaaaagagcatatataagcttcacaaaggtaccaaagtttcattaaaaagtaccaaaatagggatccctgggtggcgcagcggtttggcgcctgcctttggcccaggacgcgatcctggagacccaggatcgaatcccacattgggctcccagtgcatggagcctgcttctccctctgcctgtgtctctgcctctctctctctctctctctctgtgaccagcataaataaataaaaaaaattaaaaaaaaaaataaaaaaataaaaaaatttattaaa

SEQ ID NO: 4741 - DNA, 425 bp, Canis familiaris
  misc_feature (95)..(95): n comprises a, c, g, or t, or includes no nucleotide
  misc_feature (223)..(223): n comprises a, c, g, or t, or includes no nucleotide
  misc_feature (270)..(270): n comprises a, c, g, or t, or includes no nucleotide
  misc_feature (287)..(287): n comprises a, c, g, or t, or includes no nucleotide
  misc_feature (332)..(332): n comprises a, c, g, or t, or includes no nucleotide
  misc_feature (358)..(358): n comprises a, c, g, or t, or includes no nucleotide
  misc_feature (390)..(390): n comprises a, c, g, or t, or includes no nucleotide
ttaccttcatggcccagctggtcatcagtatcatccaggccgtgggcatcccaggctggggagtctgcggctggatcgccaccatctccttcttnggaacaaatgttggctcagcagtggtgatgctcattcccaccatcatgttcacggtcgtggctgtgttttccttcatcgccctcagcatggttcataaattctaccggggcagtgggggaagtttcancaaagctcaagaggagtggaccacaggggcttggaagaacccacacntgcagcaggcgggccanaacgcaaccatgggggcgggccagggggccatgaatcaaccgcanactcaatacttcggcacccccaactncacatatttcaatgagatgtgaagcattcacnccttcccagaaggcaaggcttgggggtaatggggc

SEQ ID NO: 4742 - DNA, 535 bp, Canis familiaris
  misc_feature (311)..(311): n comprises a, c, g, or t, or includes no nucleotide
  misc_feature (425)..(425): n comprises a, c, g, or t, or includes no nucleotide
  misc_feature (451)..(451): n comprises a, c, g, or t, or includes no nucleotide
  misc_feature (466)..(466): n comprises a, c, g, or t, or includes no nucleotide
  misc_feature (496)..(496): n comprises a, c, g, or t, or includes no nucleotide
  misc_feature (504)..(504): n comprises a, c, g, or t, or includes no nucleotide
  misc_feature (506)..(506): n comprises a, c, g, or t, or includes no nucleotide
tcccggagtcctgggatcgagtcccacattaggctccccttcgggaccctgcttttccctctgcctgtgtctctgcccctctctctgtgtctcccatgaataataataataaaaaaagttattacaggtgaaatttggtacgatggtgtgaactttttgctttgggataagtgaattgggcaatagggtaaaggagtcaagtgtttctggagaccagagagaagtcaacttgcaataaaaagttaactgtgatccattgtggagccaaatagaaaggaaaagaagtaaataagatcctctatctgattttnctgagctagcctaatgtcgtgtatgttcattcttttgctctaataagacctttcctaagtcaacttaataaattgataatatgttatgtccatgtccattcattttataaattnactattgatatatgacagagaatatntttgtaaaaccatantttcccactttttaatttttaattgatttnggggaatngnctttttttaactggttttaaccttggtat

SEQ ID NO: 4743 - DNA, 443 bp, Canis familiaris
  misc_feature (422)..(422): n comprises a, c, g, or t, or includes no nucleotide
tttataagttagaccttgaaggaaagcgactacagggaattatgcaggaattccagaagcaagaactagaacgagaagaaaaacgagaaagtagaagaattctctatcagaatcttaatgagccaactacatggagtttaactagtgatcgaactagaaattgggttcttcaacagaaaatagaaggagagacaaaggaatcaagctatcttaaactgattgaaatgaatgaaggaggaactggctgtaatcatgaattagaagtgatcagacaaaagcttcaatgtgtggcttcaaaactacagcatctggccagaaagcctccaatagactacagtttgaaacagcagatgatgaagacttcatttgggttcaggaaaatattgatgaaattattttacaactgcaaaaattacccggcnaccaggggaagagcctggtta

SEQ ID NO: 4744 - DNA, 188 bp, Canis familiaris
gattatgagaggtccctgaatcgcctgacgctggatgacatcgaacgcttggcgagccgctttctgcaccctgaagtgactgaagctatggagaaggggttctccaaataagatcctcagagcgtggggaggagcctggccaggctgcaagctgcatgtagcattaaatgtgttctcttgttgcaaaa

SEQ ID NO: 4745 - DNA, 416 bp, Canis familiaris
  misc_feature (300)..(300): n comprises a, c, g, or t, or includes no nucleotide
  misc_feature (369)..(369): n comprises a, c, g, or t, or includes no nucleotide
cgtctgatcaccaaagatgtgtcaggcttccaaaccgtggcagctggtttctgcccaggaagggcatgttcctctcctctgtccccatacacttactcacacacacacacacacacacacacacacgcagtctcacactaacacaccctcttacacatacacaaacggacacacacccaatgagggtgaaagcggtgtgagccccctcagctgagattacagtgtggcctgctctccaatggcttcccccaggtgccttgcagtacctgttgacatctcccacacataaccagaagtttnagcgaacagggctgagctgacgtccatagcgacatgaacatctctctgtctggattctctgaagcccanagccactgaaaagtagggcaacaagcaacagaacattttgttctttt

SEQ ID NO: 4746 - DNA, 584 bp, Canis familiaris
  misc_feature (237)..(237): n comprises a, c, g, or t, or includes no nucleotide
  misc_feature (419)..(419): n comprises a, c, g, or t, or includes no nucleotide
  misc_feature (447)..(447): n comprises a, c, g, or t, or includes no nucleotide
  misc_feature (457)..(457): n comprises a, c, g, or t, or includes no nucleotide
  misc_feature (472)..(472): n comprises a, c, g, or t, or includes no nucleotide
  misc_feature (494)..(494): n comprises a, c, g, or t, or includes no nucleotide
  misc_feature (525)..(525): n comprises a, c, g, or t, or includes no nucleotide
  misc_feature (571)..(571): n comprises a, c, g, or t, or includes no nucleotide
ttttttttgcaaaacaatcggaaaacatttattatactgaaatgtatacatcctactattaaaaaaaatagcaaatttgctggtgccataatttaacctgctttgctgggacagactaatgttcaatgctgcttggtataatttcaagttcaatgagcttttaagtgttcttgaccccacttctaaaacctgatgaggaattcaaaatagcacacagcattaaatgacatttattgntccatatatgttgagactcaaaaaggaatgctaaacagacaagcaaaactctaaaacaagagatatgctcacttcttttccaaatgattggtacagaagaggtgttcatatgaaagcaaagggagatggcagaaagaaaagttcccccgcttcagggtctacagaattcaagatctttttanactggagatgaaaatggtttgagaacangctccttgtntccaataaccccctntacaaataaaacccaaaatgtnaaagctttttccatcgaagtagtttgtcttntgggagagatttcaaagcccaaattactcattcctattctggctgngcaaagataagaa

SEQ ID NO: 4747 - DNA, 611 bp, Canis familiaris
  misc_feature (418)..(418): n comprises a, c, g, or t, or includes no nucleotide
  misc_feature (454)..(454): n comprises a, c, g, or t, or includes no nucleotide
  misc_feature (492)..(492): n comprises a, c, g, or t, or includes no nucleotide
  misc_feature (524)..(524): n comprises a, c, g, or t, or includes no nucleotide
  misc_feature (568)..(568): n comprises a, c, g, or t, or includes no nucleotide
  misc_feature (588)..(588): n comprises a, c, g, or t, or includes no nucleotide
gaagttctggctgagagttccccaacagagagctggccgacccgctaccctcacaggactgggctgcaaaacagcatcgtcagcaccatgctatcacagctgaagaccaagggaatctgtgactcttctactccaaatggaattattgtcctcaaaagagagaaacctagacacggctatgaaaaagaaggtaatccacagaacaatctgcggaaagaagctacagtccttggaattatccagatcctgtgttgcctgttgatttcaagtttgggggccattttggtttctggtccctactcttcccacgtcaagccaacaatttccaccattttgatgtctgggtacccatttgtaggagctctatgttttgccattacgggatccctctgcattatttctgggaaaaagtcaactnaaccctttgccattgacaagctgactcaaacgtggngaggtctttcgccgctggagtaggcctttcgtccttgntgatgggctggtaaccctggggactgtttttnacgctgggcttaaaaagggaaattatcctcctgccttttcatgnctttccccgattttgaattnaggaaggttctggttacgtaatt

SEQ ID NO: 4748 - DNA, 438 bp, Canis familiaris
  misc_feature (185)..(185): n comprises a, c, g, or t, or includes no nucleotide
  misc_feature (212)..(212): n comprises a, c, g, or t, or includes no nucleotide
  misc_feature (215)..(215): n comprises a, c, g, or t, or includes no nucleotide
  misc_feature (230)..(230): n comprises a, c, g, or t, or includes no nucleotide
  misc_feature (268)..(268): n comprises a, c, g, or t, or includes no nucleotide
  misc_feature (270)..(270): n comprises a, c, g, or t, or includes no nucleotide
  misc_feature (278)..(278): n comprises a, c, g, or t, or includes no nucleotide
  misc_feature (327)..(327): n comprises a, c, g, or t, or includes no nucleotide
  misc_feature (388)..(388): n comprises a, c, g, or t, or includes no nucleotide
  misc_feature (399)..(399): n comprises a, c, g, or t, or includes no nucleotide
  misc_feature (402)..(402): n comprises a, c, g, or t, or includes no nucleotide
  misc_feature (419)..(419): n comprises a, c, g, or t, or includes no nucleotide
cgacgaccccgtggccctctcccgtcgcagcgcagccctgagcccgggagcgaggcccggaccggtcctttgggtgctcccgggcccgttgcgcgcgcccccgggcgggggtgtccttcgggccccggggcgggggggctcttgggccggccgacgcgcatatacgcggccttcctgtcctttgnagaaaccagacaccatgtgtgacgaanacnagaccaccgccctcntgtgcgacaatggctccggcctggtgaaagccggcttngncggcgacnacgcccctagggccgtgttcccgtacatcgtgggccgcctcgccaccanggcgtcatggtggggatgggtcaaaaggattctactgggcgacgagggccaaagcaaaganaagcatctganctnaagtcccattgagcacnggattataacaaatgggaa

SEQ ID NO: 4749 - DNA, 485 bp, Canis familiaris
  misc_feature (382)..(382): n comprises a, c, g, or t, or includes no nucleotide
  misc_feature (411)..(411): n comprises a, c, g, or t, or includes no nucleotide
  misc_feature (415)..(415): n comprises a, c, g, or t, or includes no nucleotide
  misc_feature (443)..(443): n comprises a, c, g, or t, or includes no nucleotide
  misc_feature (446)..(446): n comprises a, c, g, or t, or includes no nucleotide
  misc_feature (460)..(460): n comprises a, c, g, or t, or includes no nucleotide
tcttataagcagtataatggcagaattttaagccaatttgagagtctcttatcttttagtagaaatttcaaacattatttttgactgctgcagactactgaatatccagttgatgaaattgaaggtcttttacccagaagaaataaatcaagaagtaggacctgaggctcacgtgcttctgagctgctgtggatggccctctctctcttgaccacccttccgagtaggatgtcactgagatccctcaaatggagcctcctcctgctgtcactcctgagtttctttgtgatgtggtacctcagcctgccccactacaatgtaatagaacgtgtaaactggatgtacttctatgagtatgagccaatttacagacaagactttngcttcacacttcgagagcattcaaactgntctnatcagaacccaattcttggcattctggngancttaccccttcaanattgtgaaagccaaacaggccatta

SEQ ID NO: 4750 - DNA, 643 bp, Canis familiaris
  misc_feature (390)..(390): n comprises a, c, g, or t, or includes no nucleotide
  misc_feature (411)..(411): n comprises a, c, g, or t, or includes no nucleotide
  misc_feature (413)..(413): n comprises a, c, g, or t, or includes no nucleotide
  misc_feature (428)..(428): n comprises a, c, g, or t, or includes no nucleotide
  misc_feature (465)..(465): n comprises a, c, g, or t, or includes no nucleotide
  misc_feature (470)..(470): n comprises a, c, g, or t, or includes no nucleotide
  misc_feature (510)..(510): n comprises a, c, g, or t, or includes no nucleotide
  misc_feature (538)..(538): n comprises a, c, g, or t, or includes no nucleotide
  misc_feature (543)..(543): n comprises a, c, g, or t, or includes no nucleotide
  misc_feature (545)..(545): n comprises a, c, g, or t, or includes no nucleotide
  misc_feature (571)..(571): n comprises a, c, g, or t, or includes no nucleotide
  misc_feature (576)..(576): n comprises a, c, g, or t, or includes no nucleotide
  misc_feature (591)..(591): n comprises a, c, g, or t, or includes no nucleotide
  misc_feature (601)..(601): n comprises a, c, g, or t, or includes no nucleotide
ccctccctgagcattagtctctgtcaacatctcccttctgagaagtccttcatttatttacgtggtctggagccctcaaaatgatctattattaaggttcagggcagatctgtgccataacagttcccctttgtcctgttgttctccccctccccacagacaggaggactcctaccctgctttttttgcagtaattggctgcatgcccacagcctggtctgaaagtctcctctctccctttcagatgacccagcagatggctgggatgaacttctgtggagcccatggcatgctgagctatggacagtcgatgaacggcggaaatggacaggcagcgaatcagactctcagccctcagatgtggaaataaaaacaaaacacctgtatggnttccactcacctcagcccctntnttccaattttcctcnttcccaactttcccatccattccctttcctacctttntgttnggttaagaaatggtcaattgttgcctggggtttgggattntgccaacccaccactttctggacaccanacctntntgtggtctatgtggacatgtccctanccatnccgacttttttgagnctaaacccantcctttctggaccacaccttaggaattgtgggcaaaggactt

SEQ ID NO: 4751 - DNA, 406 bp, Canis familiaris
ttctagatagcgagcatgatttgatctgatatgaaatactgtggcagagctactgttttctgaaagtgagaagcaattcttagtttagaccaacccttaaagagaacttttggcagatctggttggcagtggtgagacacatctagaaaaagctgctcatggaactagttatgggaatggagtttaataacatttgtaatttattacactcatggctttttattgattatagtattgtctgactttactatgattccttcaacagaaaagttaactcttgtgcatatattgaagtgtttttcctgctatgaattctttaggatagagatttatttaccaaatgtgaattcttttgaggaagtatgaagttttgtagaaattgactgtgaaatgtcagagaaaaata

SEQ ID NO: 4752 - DNA, 516 bp, Canis familiaris
  misc_feature (398)..(398): n comprises a, c, g, or t, or includes no nucleotide
  misc_feature (416)..(416): n comprises a, c, g, or t, or includes no nucleotide
  misc_feature (481)..(481): n comprises a, c, g, or t, or includes no nucleotide
tcctgacatgaatgagacacacccactgagccagcttcactcgggtcctgggctgctccaagtctggggccttgggaccttgcagcaagaaagctggtgaggtggggctgggatgctgccataggagggtgggttgaggagaagagaaggatggggctgggcaggggcgctggggggacttggcttggattgagatggggtggagcacaggctggcgggcccaagcccattcttcccttgtgctttctctcctcagtcctggcaacagggctcactttgtctatgggatcgcttgtgaccacggctgcatctgggacctcaaattctgccccagtggagcatgggaacttcaggcaccccccggaaggtaccttcctgttgtttgtgggatgccctangactcaatcagaacaganagaccagaccctatgagtttccaaaagttgacacgggaggatggagttttccaacactctttggnatttcagggactaaacctaaaagttttttgaaagg

SEQ ID NO: 4753 - DNA, 392 bp, Canis familiaris
  misc_feature (6)..(6): n comprises a, c, g, or t, or includes no nucleotide
  misc_feature (17)..(17): n comprises a, c, g, or t, or includes no nucleotide
  misc_feature (35)..(35): n comprises a, c, g, or t, or includes no nucleotide
  misc_feature (42)..(42): n comprises a, c, g, or t, or includes no nucleotide
  misc_feature (58)..(58): n comprises a, c, g, or t, or includes no nucleotide
  misc_feature (82)..(82): n comprises a, c, g, or t, or includes no nucleotide
  misc_feature (87)..(87): n comprises a, c, g, or t, or includes no nucleotide
  misc_feature (277)..(277): n comprises a, c, g, or t, or includes no nucleotide
  misc_feature (331)..(331): n comprises a, c, g, or t, or includes no nucleotide
  misc_feature (339)..(339): n comprises a, c, g, or t, or includes no nucleotide
tccagncgccgcgccgncgacgtcggcgtcggcgnaggacanacccagcgagagccgncaggcaccgtggacacactcctangctgntgtggccccagccccgcctgacaggatgagcggctcagatgcggggctggaggaggagccagagctcagcatcaccctcacactgcggatgctgatgcatgggaaggaggttggcagcataattgggaagaaaggagagactgtaaagcgaatccgggagcagagcagtgcccggatcaccatctctganggctcctgccccgagcgcatcaccaccatcactggatctaccgccgctgtcttncatgcggnctccatgatcgccttcaagctggatgaggacctttgtgccgctcttgcaaatg

SEQ ID NO: 4754 - DNA, 673 bp, Canis familiaris
  misc_feature (163)..(163): n comprises a, c, g, or t, or includes no nucleotide
  misc_feature (183)..(183): n comprises a, c, g, or t, or includes no nucleotide
  misc_feature (200)..(200): n comprises a, c, g, or t, or includes no nucleotide
  misc_feature (212)..(212): n comprises a, c, g, or t, or includes no nucleotide
  misc_feature (373)..(373): n comprises a, c, g, or t, or includes no nucleotide
  misc_feature (392)..(392): n comprises a, c, g, or t, or includes no nucleotide
  misc_feature (481)..(481): n comprises a, c, g, or t, or includes no nucleotide
  misc_feature (493)..(493): n comprises a, c, g, or t, or includes no nucleotide
  misc_feature (513)..(513): n comprises a, c, g, or t, or includes no nucleotide
  misc_feature (518)..(518): n comprises a, c, g, or t, or includes no nucleotide
  misc_feature (536)..(536): n comprises a, c, g, or t, or includes no nucleotide
  misc_feature (548)..(548): n comprises a, c, g, or t, or includes no nucleotide
  misc_feature (561)..(561): n comprises a, c, g, or t, or includes no nucleotide
  misc_feature (612)..(612): n comprises a, c, g, or t, or includes no nucleotide
  misc_feature (617)..(617): n comprises a, c, g, or t, or includes no nucleotide
  misc_feature (648)..(648): n comprises a, c, g, or t, or includes no nucleotide
  misc_feature (662)..(662): n comprises a, c, g, or t, or includes no nucleotide
tttctgctgatttttttttaatgtttcagtttgtttctgacatctgttgtaatcattcctgtgctgtgtttttttattacccttggtaggcattagacttgcacttttttttttttttttttttttttttaagggttctgcatcgtggaagcatttgacccanaatggaaagcagggcatggnagctagcctatgatggnggattccttcanatgttttctttccttctttgagtatgggtgctttttccatctgctaccttttgttctctggttcaaatcattacagagtaaagggtctttgagttggtcggttccaaaagatggcctttatactcaatccacacacattggtcttctagccatgctgagcngaaaacaaaaaccgaaacngaaaaaccaagatgaagtgcccagtggcagccaaaaaacaaaacccctcaaaacccgcaaaagtaaaacaattgcaacgtgcattgtantaaaaaaaaggntttccattcggcaattggtnaattnatatggtatggttttaancactggttggtncctccctccattnttggcttcatgcagcaactcaaaaaatttaaaatgaagttacattgggttnttttnaacctttgcttgtaagtttaaaaaaattggncttgtgccaaattnaaaatttgttg

SEQ ID NO: 4755 - DNA, 537 bp, Canis familiaris
  misc_feature (419)..(419): n comprises a, c, g, or t, or includes no nucleotide
  misc_feature (445)..(445): n comprises a, c, g, or t, or includes no nucleotide
  misc_feature (470)..(470): n comprises a, c, g, or t, or includes no nucleotide
  misc_feature (487)..(487): n comprises a, c, g, or t, or includes no nucleotide
  misc_feature (497)..(497): n comprises a, c, g, or t, or includes no nucleotide
  misc_feature (518)..(518): n comprises a, c, g, or t, or includes no nucleotide
  misc_feature (520)..(520): n comprises a, c, g, or t, or includes no nucleotide
  misc_feature (532)..(532): n comprises a, c, g, or t, or includes no nucleotide
ttcagagacaagttattggaactatgactaagacatcagagaagaaaggttgctgggatccttgcctttgtgaaaatgtgctctacacagcccaacttgctgcctggaggagatggagctgctgcttccaaggagtcttgcagaattggataagaggcatattacagggggccattaaagactgaaatcctgaagagctctcatggaatcctttgtaccataagggaagagactcagatcagatttgatttgatatagaaaaaataatgaaccgtttttactgtttctgagtgttgtaactaaataaagttcatatggactccagcaggaagtgaataaataatagagatttcaataatgaattgttcatatacacctaaatcttctattgcacttgcttgagatggagaagagaaaangcatttccttttcctgggtgctggtncttttgacaagggaggggaagaaanactatagatcttggttngttaaggaanacattttaacctacaaaggtntnaaggcagcttgntttat

SEQ ID NO: 4756 - DNA, 626 bp, Canis familiaris
  misc_feature (346)..(346): n comprises a, c, g, or t, or includes no nucleotide
  misc_feature (370)..(370): n comprises a, c, g, or t, or includes no nucleotide
  misc_feature (390)..(390): n comprises a, c, g, or t, or includes no nucleotide
  misc_feature (417)..(417): n comprises a, c, g, or t, or includes no nucleotide
  misc_feature (429)..(429): n comprises a, c, g, or t, or includes no nucleotide
  misc_feature (487)..(487): n comprises a, c, g, or t, or includes no nucleotide
  misc_feature (515)..(515): n comprises a, c, g, or t, or includes no nucleotide
  misc_feature (524)..(524): n comprises a, c, g, or t, or includes no nucleotide
  misc_feature (550)..(550): n comprises a, c, g, or t, or includes no nucleotide
  misc_feature (582)..(582): n comprises a, c, g, or t, or includes no nucleotide
  misc_feature (588)..(588): n comprises a, c, g, or t, or includes no nucleotide
  misc_feature (590)..(590): n comprises a, c, g, or t, or includes no nucleotide
  misc_feature (612)..(613): n comprises a, c, g, or t, or includes no nucleotide
gtggcttctccgtctggcgatgcccgccgccttactgtttctagtcttcgggagtcagggctaaaggtcaaccagccagcctcttttgcagtcagcctgaacggggccaagggggcgatcgatgctaaggtgcacagcccctcgggagccctggaggagtgctatgtcacagagatcgaccaagataagtatgccgtacgcttcatcccgcgggagaacggggtctacctaattgatgtcaagttcaatggcacccacattcctggaagccccttcaagatccgagttggggagcctgggcacggaggggacccaggcctggtgtctgcctatggagccggcctanaaggtggtgtcacagggagcccanctgagtttatcgtgaacacnaacaacgcgggagctggtgccctgtcngtgacatcgatngggccttcaaagtgaaaatggattgcaagaatgccccagggctaccgtgtaactacantccatggacctggagtacctatttcatnaattggggncctacaatcggggcagccttaaggcnaatacagtccctttgtaaaacacacttcatanaatatngngttgggatcttacaaaatgcanngccccaaagggct

SEQ ID NO: 4757 - DNA, 426 bp, Canis familiaris
  misc_feature (331)..(331): n comprises a, c, g, or t, or includes no nucleotide
  misc_feature (399)..(399): n comprises a, c, g, or t, or includes no nucleotide
cgccgctgacgcaggccggcgcgcacagccgggcccggcgtcctccgcagcagccgcgagccgcgcggccggtgccagacggttccggcggggggcaggggcggggcgccccggcggtggaggagccccggcgaggcccgtctggctgtgacgagttgccatggcatcctactaccgacatcctagacgtgccgcgaagtgcgtccgctgacgacatcaagaaggcatatcgccggaaggcccttcagtggcacccggacaagaacccggataataaagaatttgctgagaggaagttcaaggaggtggccgaggcatatgaagtgctgtnagacaagcataagcgggaaatctacgaccgttatggccgggaaagggctgactggggcaggaactggnccattccgggcagaaccttgtggcggg

SEQ ID NO: 4758 - DNA, 457 bp, Canis familiaris
  misc_feature (381)..(381): n comprises a, c, g, or t, or includes no nucleotide
  misc_feature (441)..(441): n comprises a, c, g, or t, or includes no nucleotide
cccagccctgtgcgctcctcctcgggctgctgtcccctcggcctctccaaggcccatgtccttcctcagtagcacgggggagaactcagggtcttgttagagcctcttgtgtgtgtgccagaaaatacttcttgtttctgtgggggaatgtggagggcaaggaaaccctgtaaacacacacagaattctctggtcacggttttgggttcagaccctgccaccactggcctgtgggacatgccacagggaagctcctggatccaagggcactggctgcgtctcagagggaaggtcggcctgcaggccgttgtgaatcccctgccatcgcctgggcctcatacctcatggcattctccctttaagccatgggggtctgctcancactgtgggtgtgcctgggttgcaagggcacctgggtggatcctgtacctggcactgtgnccactcaatgggcact

SEQ ID NO: 4759 - DNA, 643 bp, Canis familiaris
  misc_feature (433)..(433): n comprises a, c, g, or t, or includes no nucleotide
  misc_feature (450)..(450): n comprises a, c, g, or t, or includes no nucleotide
  misc_feature (503)..(503): n comprises a, c, g, or t, or includes no nucleotide
  misc_feature (505)..(505): n comprises a, c, g, or t, or includes no nucleotide
  misc_feature (596)..(596): n comprises a, c, g, or t, or includes no nucleotide
  misc_feature (598)..(598): n comprises a, c, g, or t, or includes no nucleotide
  misc_feature (600)..(600): n comprises a, c, g, or t, or includes no nucleotide
  misc_feature (622)..(622): n comprises a, c, g, or t, or includes no nucleotide
  misc_feature (630)..(630): n comprises a, c, g, or t, or includes no nucleotide
tctgagccgaagacagatgctcggccactgagccacccaggtgtcactgggttagaatttaaaaccattatttattattcaaattgccccagcaacaggcactttgctagttctttcaagttcgttcctgtgtccttaggactcatctgcatcccttttttttaaagcactttatcactttctgacactatagaacactccaggcacatcttgttattttccctgcctaagcctttgaattagccatttctcctagaaaccctgtttcctttagtggagaatggtatttagaaaccaacatctggggagtacctgggtggatcagttggttaagagtccaactcttgatttcagctcaggtcgtgatctcagggtcatgagatcaggccctgtgctgggctctgcactcagtgtaaaagtctgcttcttcctnttcctgatctttttttnttcaaataatacaatcttaaaaaaaggaaaaaagaaaaaaaaatcacatctangnactgaagctatgatctaggtatactgctttgggtctttaaaggacagactatgatatatatgttgttagcaaccatgtttcacatagattntntnaaaaagcatgagttcacctatntttcactntgatccacacaaa

SEQ ID NO: 4760 - DNA, 318 bp, Canis familiaris
catctgtgccaaaacctccagaagacaagctggaagatgtgcattcaagtcgtccattaaaacaaagaagaagaatatagattgccagcagcaaattatgtttcctgagggactatttattatttttagcctgtcattttaattcttgaagaggttgtactgcaggaattttctaatgcattcctctttgtaatatcattcaacctacttatttaataaaatttcatcttttaaaattagtttatcatggacaaaatacatgccagccaaatatattccttaataaaagaaaacaacttttaaaaaaaaaaaaaaaaa

SEQ ID NO: 4761 - DNA, 619 bp, Canis familiaris
  misc_feature (89)..(89): n comprises a, c, g, or t, or includes no nucleotide
  misc_feature (393)..(393): n comprises a, c, g, or t, or includes no nucleotide
  misc_feature (401)..(401): n comprises a, c, g, or t, or includes no nucleotide
  misc_feature (431)..(431): n comprises a, c, g, or t, or includes no nucleotide
  misc_feature (447)..(447): n comprises a, c, g, or t, or includes no nucleotide
  misc_feature (501)..(501): n comprises a, c, g, or t, or includes no nucleotide
  misc_feature (505)..(505): n comprises a, c, g, or t, or includes no nucleotide
  misc_feature (521)..(521): n comprises a, c, g, or t, or includes no nucleotide
  misc_feature (540)..(540): n comprises a, c, g, or t, or includes no nucleotide
  misc_feature (545)..(545): n comprises a, c, g, or t, or includes no nucleotide
  misc_feature (554)..(554): n comprises a, c, g, or t, or includes no nucleotide
  misc_feature (584)..(584): n comprises a, c, g, or t, or includes no nucleotide
cactgactttctatcttttgaatataattactgtgaaagtctaaaagctgtgttctagaattctccgcctcacagcagataaataaggnagtgaattaattattcattccattccactatcatgaaggactccggatagacttggccagccgatgtttacaaacagaattttgtattttaattttacagattttcctacatgatttttctaaattactaggtcaggttgtaaaagtcagtgcaataacaaagattcctttttaagagaaaattgtttctatcactttcccataagctgtgtgaagaatcatggacagaacttacactacttttaccatgtttcatcttggcataacatggttattttttaaatagaaattttcattttttgtnaatttttnaaagaatatttcaattggagcgcatctggnggttcctaatctgggnaatttttggaggcaggctggcaacatttcccaaattgaccaaccattatacccntttntgatagtttatttaancatagggggattggccaanttttnaaaacctgngggtttccaacttttttgccaccttgactntgaaatccatgctgctttggggcatatactgacct

SEQ ID NO: 4762 - DNA, 463 bp, Canis familiaris
  misc_feature (209)..(209): n comprises a, c, g, or t, or includes no nucleotide
  misc_feature (212)..(212): n comprises a, c, g, or t, or includes no nucleotide
  misc_feature (232)..(232): n comprises a, c, g, or t, or includes no nucleotide
  misc_feature (262)..(262): n comprises a, c, g, or t, or includes no nucleotide
  misc_feature (289)..(289): n comprises a, c, g, or t, or includes no nucleotide
  misc_feature (341)..(341): n comprises a, c, g, or t, or includes no nucleotide
  misc_feature (351)..(351): n comprises a, c, g, or t, or includes no nucleotide
  misc_feature (365)..(365): n comprises a, c, g, or t, or includes no nucleotide
  misc_feature (377)..(377): n comprises a, c, g, or t, or includes no nucleotide
  misc_feature (394)..(394): n comprises a, c, g, or t, or includes no nucleotide
  misc_feature (416)..(416): n comprises a, c, g, or t, or includes no nucleotide
  misc_feature (419)..(419): n comprises a, c, g, or t, or includes no nucleotide
  misc_feature (451)..(451): n comprises a, c, g, or t, or includes no nucleotide
gctggggctggatgagcgtgagaagtcgctgcagatgatccgccagctggcagggccgctgtacagtgagaacaccctgcagttctacaatgagagggtggtgatcatgagctcaattctggagcacatgtgtgctgacgtgctgcagcagacagccacccagatcaagttcccatccacgggtgtggacacaatgccctactggaatntgntgccccccaagcgacccatnaaggaggtgctgacggacatatttgccaangtgctggaaaaaggatgggtggacagncgctccatccacatttttgacaccctgctgcacatgggaggtgtctactggntctgcaacancctgattaaaaganctgttgtagganacaccgaaagagcacantcttttggcccgtggaagctgnttntactgcatcttttttttgggcaatcctggagngaccttggtcct

SEQ ID NO: 4763 - DNA, 652 bp, Canis familiaris
  misc_feature (330)..(330): n comprises a, c, g, or t, or includes no nucleotide
  misc_feature (389)..(389): n comprises a, c, g, or t, or includes no nucleotide
  misc_feature (405)..(405): n comprises a, c, g, or t, or includes no nucleotide
  misc_feature (425)..(425): n comprises a, c, g, or t, or includes no nucleotide
  misc_feature (427)..(427): n comprises a, c, g, or t, or includes no nucleotide
  misc_feature (452)..(452): n comprises a, c, g, or t, or includes no nucleotide
  misc_feature (456)..(456): n comprises a, c, g, or t, or includes no nucleotide
  misc_feature (466)..(466): n comprises a, c, g, or t, or includes no nucleotide
  misc_feature (484)..(484): n comprises a, c, g, or t, or includes no nucleotide
  misc_feature (560)..(560): n comprises a, c, g, or t, or includes no nucleotide
  misc_feature (575)..(575): n comprises a, c, g, or t, or includes no nucleotide
  misc_feature (584)..(584): n comprises a, c, g, or t, or includes no nucleotide
acgccgcccccgggctgcagcaagccgcacctggagaagctgaccctggggatcacccgcatcctcgaatcttccccaggtgtgacagaggtgactatcatagaaaaaccacctgctgaacgtcatatgatttcttcatgggaacaaaaaaataactgcatgctacctgaggatgtgaagaatttttacctgatgaccaatggcttccacatgacatggagtgtgaagctggatggtgagtcaaccttcttgctgtaagagcacaccattccattgggcaagcatggcaattaacagcatctcaaaactgactcaactcaaccagtcttncgtgtactcactccctaatgcaccaactctggcagacctggaggatgatacacttgaangcttcatagcatcttnaccaggaagtagaagctttntnaagaaactactttttttattattcncaanaagaagtttnattcatttaagttttatnaggaaatggccgcaattcaatcacatcttcagctctcttttaatttagtctttactatttcacccatttgaactgntttttcactgaaatntggactctnaagcatgatgaggtggaataactttttcaaacttgtaaggtggtaaatattacctgacctgaagttta

SEQ ID NO: 4764 - DNA, 390 bp, Canis familiaris
  misc_feature (1)..(1): n comprises a, c, g, or t, or includes no nucleotide
  misc_feature (69)..(69): n comprises a, c, g, or t, or includes no nucleotide
  misc_feature (93)..(93): n comprises a, c, g, or t, or includes no nucleotide
  misc_feature (107)..(107): n comprises a, c, g, or t, or includes no nucleotide
  misc_feature (135)..(135): n comprises a, c, g, or t, or includes no nucleotide
  misc_feature (184)..(184): n comprises a, c, g, or t, or includes no nucleotide
  misc_feature (188)..(188): n comprises a, c, g, or t, or includes no nucleotide
  misc_feature (227)..(227): n comprises a, c, g, or t, or includes no nucleotide
  misc_feature (254)..(254): n comprises a, c, g, or t, or includes no nucleotide
  misc_feature (362)..(362): n comprises a, c, g, or t, or includes no nucleotide
  misc_feature (378)..(378): n comprises a, c, g, or t, or includes no nucleotide
  misc_feature (384)..(384): n comprises a, c, g, or t, or includes no nucleotide
nctacgagcaggttcagaaggggcccctgaaactaaaaggcgttgcagagctcggtgtgaccaagcggnagaagaaaaagaaggacaaagacnaggcgaaactcttngaagcgatgggaacgagcaaaaagaacnaggaggagaagcggcgaggcctggacaagcgaacccctgcccaggcggncttngagaagatgcaggagaagcggcaaatggaaaggatcctnaagaaagcatctaaaacccacaagcanagagtggaggacttcaacagacacttggacacccttaccgagcattatgacattcccaaagtcagctggacgaagtagccttcccacccaaggtattcagtggcatcnaggggaattggaaagnaaaagntaaagg

SEQ ID NO: 4765 - DNA, 550 bp, Canis familiaris
  misc_feature (410)..(410): n comprises a, c, g, or t, or includes no nucleotide
  misc_feature (427)..(427): n comprises a, c, g, or t, or includes no nucleotide
  misc_feature (457)..(457): n comprises a, c, g, or t, or includes no nucleotide
  misc_feature (465)..(465): n comprises a, c, g, or t, or includes no nucleotide
  misc_feature (475)..(475): n comprises a, c, g, or t, or includes no nucleotide
tccacactgcgagtgttgtacaacctgttcaccaagtaccggaacgtggagtgaggggcacaccgggccactccccgaccgcctgagcctgctagttcctgcgtccagctctgtgctctcccaccagcccagctaccgcccaggatagcaggcctgaagttaggaaggacggatccgtaactcagtgggcctgctcacacctcccaggccctggggactgactggccgttgtgcccatcctggtgccaggtccagatttcctcagtgtgatttgggagccagtttaggcccaagagactcccctcagaagatgaaaataaaggtaatggtccccatttaatggtcgtaaactatgtgccgggcaccacgctaagtgcttcgacatagtcatgatttccactgaaacaagnattatatataattcccntttacagattaaggaactgaggttaaaaanggttaagngactcgccanaggctggaattggttttttttttcgaacattgtttgctaataactagcccatacaagtacacttttgacattttt

SEQ ID NO: 4766 - DNA, 552 bp, Canis familiaris
  misc_feature (352)..(352): n comprises a, c, g, or t, or includes no nucleotide
  misc_feature (380)..(380): n comprises a, c, g, or t, or includes no nucleotide
  misc_feature (404)..(404): n comprises a, c, g, or t, or includes no nucleotide
  misc_feature (426)..(426): n comprises a, c, g, or t, or includes no nucleotide
  misc_feature (438)..(438): n comprises a, c, g, or t, or includes no nucleotide
  misc_feature (443)..(443): n comprises a, c, g, or t, or includes no nucleotide
  misc_feature (470)..(470): n comprises a, c, g, or t, or includes no nucleotide
  misc_feature (489)..(489): n comprises a, c, g, or t, or includes no nucleotide
  misc_feature (513)..(514): n comprises a, c, g, or t, or includes no nucleotide
gcagttttcctggtgctctcttggctggcctggtgatgtgggccaggcaggcagggactaacagagtttctctgcccaaggaagacagaacacagaggaccataaaggcaggaaccccacagactgtctcagcccatacactacaccacctcctggccttgtccgatgtctgtaccaaggccttgaggtagaaagttgcctgatcctctgtttcattgggactggatttgggggctgagcttaaatgctaggagagcccatcggggttgggcagacccgaccacttcatggtgcctgccttggggaagcagtatgtggccagaggccatggtggctgattccaattccatanaggacaacctaatcaacagcagcgtgtncaaaggcaccggaaacatggtggnggtagatttttggtaagttttncaatattttttngggtntacttaaaaaaggaagtttacttgganataactgggtttaaggaanacttttgaaggcccacattaccgnntcaagactattggaatggcttgggccttgctgggtcct

SEQ ID NO: 4767 - DNA, 440 bp, Canis familiaris
  misc_feature (371)..(371): n comprises a, c, g, or t, or includes no nucleotide
  misc_feature (385)..(385): n comprises a, c, g, or t, or includes no nucleotide
  misc_feature (391)..(391): n comprises a, c, g, or t, or includes no nucleotide
cgcccagctggtgaccctggagctccgcagcgagagtgtcactctcctggccttccagtttgggatgaatgcgagtactagccggtttttcctgcaaggaatccagttgaatatgactcttcctgatgccagagaccccacctttaaggctggcaacaactctctgagggcacttcaggccaccattgggaattcgtacaagtgtaacgccggggagcatgtgcaagtcacagaagccttttctgtcaacaacatcaaagtgtgggtccaggctttccaggtgcaaggtgacaagtttgggtctgtggaggagtgccagctggatgagaacaagcatgctgatccccatcgccgtgggtggtgccctgcanggctggtccttatngtcttnatcggctacctcattgcaggaagaagagacatgccggttccagacaatc

SEQ ID NO: 4768 - DNA, 401 bp, Canis familiaris
  misc_feature (323)..(323): n comprises a, c, g, or t, or includes no nucleotide
aagaagaggtcaccgcgtgagtccgctgccgcctgtgccgccaccaccgctaccgccgccaggtctgagccccggggctgcagccatggcctactgccggcaggaagggaaggatcgaatcatatttgtgaccaaagaggaccatgaaactccgagcaatgcagagctggtggctgatgatcccaacgatccgtatgaagagcatggattgatcctgccaaatggagacattaactggaactgcccgtgccttgggggaatggccagtggcccctgtggggaacagttcaagtcagccttttcctgcttccactatagcacanaggatgtcaaggggtcagactgtgtagaccaattccgggccatgcaggaatgcatgcagaaatatcccgacctctatc

SEQ ID NO: 4769 - DNA, 464 bp, Canis familiaris
  misc_feature (406)..(406): n comprises a, c, g, or t, or includes no nucleotide
gtgttatgtattcctatgacaaaaaattaagtcttcaaattttttaaagtttttttaatttaatttttccttttgggggtacagtttgctctaccaaatagtgatcgtaacaaattgatctgttttggatgttgctatagtgacatgcagttatatattttgtttttaaggggggggggaagcaaaagaaacaccagtgttagcttaatcttaatgtctggtgtttgtcatggtgaaattataactattacagtgtaggagaacaacgactatgttctctgaatgagcctttgtgcttttttgtcatgttatgcagtgaactatttttaaggtctaatcagtgattatttttccaactccgtgtttctctaaggaattatttcacacacggaccattcttagcagntttctcagtgatggaatatcatgaatgtgagtcattatgtagctggcgaccattggca

SEQ ID NO: 4770 - DNA, 438 bp, Canis familiaris
  misc_feature (191)..(191): n comprises a, c, g, or t, or includes no nucleotide
atgaaaaaagtgtacagaattaacatataaatcttgtaaaactggatcatgtcagaactgcttataattaatctttaccatttaatgccatctacctgaaaacagtgagatttatactgtatcaatgtctatttttttgtttttgctatgaatataattacagtattttaataattagttatttaatttgntctactagttggatacagaacacacaaatctagggagactaaagctggttggggctaagagagaagtttagtttacagaaaaaaggctttggtggtgggattttttttaaatgtgtgttatgtacatatatatatatatacatatatataaaaaaacaaatgaaacaattaatctagattttaacattttcagatatttagtgataatattatgaacaattctaaaagccctgtgatttgaaaaaaa

SEQ ID NO: 4771 - DNA, 555 bp, Canis familiaris
  misc_feature (456)..(456): n comprises a, c, g, or t, or includes no nucleotide
  misc_feature (476)..(476): n comprises a, c, g, or t, or includes no nucleotide
  misc_feature (531)..(531): n comprises a, c, g, or t, or includes no nucleotide
  misc_feature (542)..(542): n comprises a, c, g, or t, or includes no nucleotide
gacaggagcccacgtcgccgtcagccgggcccgccagccgcgccgcgccgaggaccgcaccatgttggcctgcgccaagctcgcctgcgcccccgctctgatccgagctggatccagagttgcatacagaccaatttctgcatcagtgttatatcgaccagaggctaggcctggagagcgctctacggtatttaatggggcccagaatggtgtgtctcagcgaatccaaagggagtttcagaccagtgcaatcagcagagacattgatactgctgccaaatttattggtgcaggtgctgcaacagtgggagtggctggttctggtgctggtattggaacagtctttggcagccttatcattggttatgccagaaacccttcgctgaagcagcagctgttttcatatgctatcctgggatttgcctttgtctgaactatgggtctcttttgtttganggtggtttctttgacttggnttgcatgtaacaaaaaatactgttgaaaggtggcattcataataaataccgatgnaaattttgggntttactgggattc

SEQ ID NO: 4772 - DNA, 662 bp, Canis familiaris
  misc_feature (432)..(432): n comprises a, c, g, or t, or includes no nucleotide
  misc_feature (455)..(455): n comprises a, c, g, or t, or includes no nucleotide
  misc_feature (460)..(460): n comprises a, c, g, or t, or includes no nucleotide
  misc_feature (553)..(553): n comprises a, c, g, or t, or includes no nucleotide
  misc_feature (612)..(613): n comprises a, c, g, or t, or includes no nucleotide
gcgctgctgtgcgggaccctggccgcgcccggcctggccagcaccatgtgcgcggcgcgggacgactggcgctgtgctcagtctatgcacgagttctcggccaaggacatcgatggacgcgaggtgaacctggacaagtaccggggcttcgtgtgcatcgtcaccaacgtggcctcgcaatgaggcaagacggacgtaaactacactcagcttgtcgacctgcacgcccgatatgctgagtccggtttacgcatcctggccttcccctgcaaccagttcgggaggcaggagccagggagcaatgcggagatcaaagagttcgccgccggctataatgtcaagttcgatatgtacagcaagatctgcgtgaacggagacgatgctcacccgctgtggaagtggatgaaaatccagcccaaggggaggggcatnctgggaaatgccatcaaagtggnacttnaccaaagttcttaattgccaagaatggttggtggtgaaacggtatggtccattggaagacccctgtaatagagaaggacttgccttgttcctntagttcacaagtatgcgccttccacggccctgcccttggagccttcaccggaccaatgnnagttgtttaaaacaacccgttgtgggcagaccgggaaccgggtcaacct

SEQ ID NO: 4773 - DNA, 576 bp, Canis familiaris
  misc_feature (440)..(440): n comprises a, c, g, or t, or includes no nucleotide
  misc_feature (443)..(443): n comprises a, c, g, or t, or includes no nucleotide
  misc_feature (450)..(450): n comprises a, c, g, or t, or includes no nucleotide
  misc_feature (540)..(540): n comprises a, c, g, or t, or includes no nucleotide
  misc_feature (551)..(551): n comprises a, c, g, or t, or includes no nucleotide
  misc_feature (558)..(558): n comprises a, c, g, or t, or includes no nucleotide
gtaaacgttatatgcagtttttatatataacttatttaatatgaatgtgacttaagcataaccttttcgctggagttgtgaaactgtttaatcgcttctgtgagagttcagacaggggctaaaggatgtgggagagaaagggaattttggaattatttttttttaactaagtaactcaacagaagtgtatcaaaacaagaaaacacccactttaaaccaaatgttctttagtcatgaggcaccttgctggagtctcggcttcccgaatgcccttgcctaagattggatagggggtgcggggcacacgggtattttaggggcacatctgaggactgattttaaataggctttaaaataaaaggccaatattagcataacgctataattctactaaaaggcttcagagtggcagaagttctgcttatgtcttagtaggtcanaangctgcangaaggtcagacataaaaacaaggagtaacacttttccaaagaaaaaagaagcaaattaattgggaaaagaacatggcctcatttcatctntttagtctaanaccatgnaacttttttctcgccata

SEQ ID NO: 4774 - DNA, 642 bp, Canis familiaris
  misc_feature (439)..(439): n comprises a, c, g, or t, or includes no nucleotide
  misc_feature (465)..(465): n comprises a, c, g, or t, or includes no nucleotide
  misc_feature (550)..(550): n comprises a, c, g, or t, or includes no nucleotide
  misc_feature (598)..(598): n comprises a, c, g, or t, or includes no nucleotide
  misc_feature (612)..(612): n comprises a, c, g, or t, or includes no nucleotide
  misc_feature (617)..(617): n comprises a, c, g, or t, or includes no nucleotide
acagcgggcctggaccgtggagcagctgcgcagcgagcaactacccaagaaggacattatcaagtttctacaggaccacggttcagattcgtttcttgcagaacataagttattaggaaacattaaaaatgtggccaagacagctaacaaggaccatttggttacagcctacaaccatctttttgaaagtaagcgtttcaaaggtactgaaagtataagtaaagtgtctgagcaggtgaaaaatgtgaagcttaatgaagataaacccaaagaaaccaagtgtgaagagactctggatgagggtccaccaaaatatacaaaatctgtccttaaaaaaggagataaaaccaactttcccaaaaagggagatgttgttcactgctggtatacaggaacactacaggatgggactggttttgatactaatattcaaaccagntcaaaagaagaagaaaaatggccagnctttaagttttaaggttggaatagggcaaagtttccgaggttgggatgaagccctcttactttgagtaaaggagaaaaggttcgntagagattgacccaaatgggcttttggaagaaggacagccttgtgccnaattccccaaagcnaaatnatttttaagggaaataggggaattg

SEQ ID NO: 4775 - DNA, 661 bp, Canis familiaris
  misc_feature (415)..(415): n comprises a, c, g, or t, or includes no nucleotide
  misc_feature (441)..(441): n comprises a, c, g, or t, or includes no nucleotide
  misc_feature (497)..(497): n comprises a, c, g, or t, or includes no nucleotide
  misc_feature (509)..(509): n comprises a, c, g, or t, or includes no nucleotide
  misc_feature (512)..(512): n comprises a, c, g, or t, or includes no nucleotide
  misc_feature (558)..(558): n comprises a, c, g, or t, or includes no nucleotide
  misc_feature (581)..(581): n comprises a, c, g, or t, or includes no nucleotide
  misc_feature (610)..(610): n comprises a, c, g, or t, or includes no nucleotide
  misc_feature (621)..(621): n comprises a, c, g, or t, or includes no nucleotide
  misc_feature (631)..(631): n comprises a, c, g, or t, or includes no nucleotide
  misc_feature (655)..(655): n comprises a, c, g, or t, or includes no nucleotide
tcttctcattcttttgatagtatcttttgcagagcataaatgtttaatattaacaaacaccagcttataaattcttccctcatggatcatgcctttggtgttgtatttttaaattcattgccatacccaaggtcatccaggttttctcatatattatcttaaaggagttttatagttttgcattttacatctaaataattttgggttaatttttgtgaagagtttaaggtctgtgtccagattttggggggaggggagtttatatgactgtatatagtttctccagaacaaaccgtttgttgaaaagactatattttcatctctgtattgcatttgcacttttgtcaaagatcaactgactacacttacagggttctatttctgggctttctgttctgctccattatctacttgnctattctttcaccaatatcacactgngctgatcactgtactttacagtaagccttgaggttggataggtggcagtccttaancatggaatctgnaanatcaattggggaagacccgacatatgaagtcttgccaaaatgagtntttctattatgacatggaaaacnctccattactaagtcattggtacttcatnaagtttggganttctaataanctggccaatttgtcgataacctanatatgg

SEQ ID NO: 4776 - DNA, 462 bp, Canis familiaris
  misc_feature (260)..(260): n comprises a, c, g, or t, or includes no nucleotide
  misc_feature (324)..(324): n comprises a, c, g, or t, or includes no nucleotide
  misc_feature (375)..(375): n comprises a, c, g, or t, or includes no nucleotide
attgtaaattggagtttatctgttctgttttttattgcatacaattattgttctagacaatcctaacctgataaattttaaatgtgtactttaataaaactctgcaaatgaaagaaattattcatttcacaaaagcattcttcatcttcaaagtagcttgtgacatagtttcttgaaacagcaagttctgatactatattgaaagtctaaattatagatctactgtttttcaggaatccatttgttatgtaaagcaaggntcacctatacagagagtgaaatggataattaggtaaatacatacctgggaaacataaggtttgnttgagtttttatatatataaatgtgggatgggcctaagaagttcccttatnaaaatggcaaacatagatatacaatttgtcaataatttcctgtgctgaaatataaaccttccttggggaggacacggcaaataacaa

SEQ ID NO: 4777 - DNA, 682 bp, Canis familiaris
  misc_feature (428)..(428): n comprises a, c, g, or t, or includes no nucleotide
  misc_feature (451)..(451): n comprises a, c, g, or t, or includes no nucleotide
  misc_feature (494)..(494): n comprises a, c, g, or t, or includes no nucleotide
  misc_feature (543)..(543): n comprises a, c, g, or t, or includes no nucleotide
  misc_feature (553)..(553): n comprises a, c, g, or t, or includes no nucleotide
  misc_feature (563)..(563): n comprises a, c, g, or t, or includes no nucleotide
  misc_feature (589)..(589): n comprises a, c, g, or t, or includes no nucleotide
  misc_feature (597)..(597): n comprises a, c, g, or t, or includes no nucleotide
  misc_feature (606)..(606): n comprises a, c, g, or t, or includes no nucleotide
  misc_feature (618)..(618): n comprises a, c, g, or t, or includes no nucleotide
  misc_feature (639)..(639): n comprises a, c, g, or t, or includes no nucleotide
  misc_feature (642)..(642): n comprises a, c, g, or t, or includes no nucleotide
attcttagtacaaattgctgtgggagcctagctagaaatgtgtctctggcattggaattacaacttcgaatcttgccacagatcagttggtacctacaggtccctctatcagggactctgtgataactacaatagcaggaggaaaagcctcctaactttcagtgaggaggtctacttgccttgggtataaaacagaaatgaaagtggataaagggttgtctcagactaaaactgatgtcttctgagctttcttccattttgctcttagacacaggcaaagtgcttccctagtgtctctgcatgtgaacatataaatgatcttttttctacatttactttaaaggtccattgttgacacattgcttatcggaaccacattttggtcacatatcattttgaaaggcagatatgaatgctgtattaagtangagaaacttcttcagtggaccangatgaagtatctctttagtcaattcaaaaacaaaatggtaggngttatttccagctttaggagaacaaggttggttatgagtaatctatttncatatatcanccttagaaanggaattatctgttgggttttttgggngggaaggngggcagcantaaattgtttcnaaagctggaaaaaaaatgtcnggngaattaatcctgggcttcattgggggttttaatgggggac

SEQ ID NO: 4778 - DNA, 280 bp, Canis familiaris
  misc_feature (209)..(209): n comprises a, c, g, or t, or includes no nucleotide
cggggcctaaacctgctgatacgcaaggacggccgcacggtgaatctggggggaaagacgttcggtgcccgtgttccccggggacgtgttcttgcctccacacccccggtggggggggctacggggacccagaggaccccgtgccaccatcggggtcgccccagcacatccccgccttccttgagcggggcagcgtctacgagtaccgnagggcccaggaggccgtgtgagggcggccctacaataaagatctccaggccctgtggccccgcggcagccg

SEQ ID NO: 4779 - DNA, 669 bp, Canis familiaris
  misc_feature (184)..(184): n comprises a, c, g, or t, or includes no nucleotide
  misc_feature (292)..(292): n comprises a, c, g, or t, or includes no nucleotide
  misc_feature (427)..(427): n comprises a, c, g, or t, or includes no nucleotide
  misc_feature (439)..(440): n comprises a, c, g, or t, or includes no nucleotide
  misc_feature (492)..(492): n comprises a, c, g, or t, or includes no nucleotide
  misc_feature (513)..(514): n comprises a, c, g, or t, or includes no nucleotide
  misc_feature (537)..(537): n comprises a, c, g, or t, or includes no nucleotide
  misc_feature (568)..(568): n comprises a, c, g, or t, or includes no nucleotide
  misc_feature (572)..(572): n comprises a, c, g, or t, or includes no nucleotide
  misc_feature (589)..(589): n comprises a, c, g, or t, or includes no nucleotide
  misc_feature (615)..(615): n comprises a, c, g, or t, or includes no nucleotide
  misc_feature (655)..(655): n comprises a, c, g, or t, or includes no nucleotide
  misc_feature (659)..(659): n comprises a, c, g, or t, or includes no nucleotide
aaattaagataaaggttatatttacaggatttaataagtcagctcagatgattcacattttactttagcagctatctccaaccattttcattcacaacttaacataaactggttgaaaatggagtctgtctttgccatcttgtggcttaaagttctttgactttgtgacgcattatgatagtgntctaactttaatcttttctcttcctggtgttcctttcaccatgaattcatagcatcaagtgaaacttcccagaatgagaactgttcaggttattctgacatacacagngaagcagaatgctatcaagaagacacaaattccaaactggtcagtgggaaatgactagaaatacaggcttttaggagtttgcatcttttagctatatttgcaaatactgagatttaagcagctgagaaacagcanagttgactaaannttttatattcttggcctcacagattttttggatctttttggaatggatcaanggatgttttggttccttccgnnttattaatgaaacactttttagngttttaacataaaactacttggtttgaaatnaagnggttggaacacaaattngactttatttaagcatgttgatttgnggttcatttaaaaactttaggccaatggacagttgatttngaantagccacggc

SEQ ID NO: 4780 - DNA, 687 bp, Canis familiaris
  misc_feature (452)..(452): n comprises a, c, g, or t, or includes no nucleotide
  misc_feature (477)..(477): n comprises a, c, g, or t, or includes no nucleotide
  misc_feature (520)..(520): n comprises a, c, g, or t, or includes no nucleotide
  misc_feature (570)..(570): n comprises a, c, g, or t, or includes no nucleotide
  misc_feature (584)..(585): n comprises a, c, g, or t, or includes no nucleotide
  misc_feature (644)..(644): n comprises a, c, g, or t, or includes no nucleotide
  misc_feature (667)..(667): n comprises a, c, g, or t, or includes no nucleotide
gtgcgggcagcatggcacgaggaagaagcaaggttaccgagcaggcacaagtcctaacagtcaagggatttgggggttgtgctttggggttcgaggtccgccactcacctcactgccacacgttagaaatgagacaatcaaagcccaacagggtgacactcctgtccatcagctggggtggggcatccgcacacgaggctggagcagcaggcaggctaggctggggccaaaggcctcgcagccgaagctcccaaacggttctcttcacctactggggaagcttcttaacacctgacagcgccagagacgggagcatggtcaagccaaacggcggacaggagccaacctggattgggtgtttgggaagggagggcgtatatagcagagaacatatggaacaagcttcgggggcctccttgcccccctcattctttcgctctttgcattccggncatatctgtcttggcctcatgcctnccgggcacatgggcccaactttatttgctgattcataaactgntggcttgttaagttagggttagatggggagagaaaagatgcatggacaanccccaaaggcctgnntaccgatacccttgcttatggttttaggggggacctacaaacattttcaaaaaaccccncttactggtttacttataaaacntcccggcaaaaaaaaaaaat

SEQ ID NO: 4781 - DNA, 572 bp, Canis familiaris
  misc_feature (451)..(451): n comprises a, c, g, or t, or includes no nucleotide
  misc_feature (469)..(469): n comprises a, c, g, or t, or includes no nucleotide
  misc_feature (497)..(497): n comprises a, c, g, or t, or includes no nucleotide
  misc_feature (522)..(522): n comprises a, c, g, or t, or includes no nucleotide
  misc_feature (540)..(540): n comprises a, c, g, or t, or includes no nucleotide
tgtcatgttaaaaatattgaaatcgcagcagacgtaagttctttgtttgatatacatcagggctttctcattaagagtatttttttaaaattgtcagttataggaagaaaattattcttccagcagctttataatatccttattaaatttaaattgttttagtggaaggaggcaaaaccggaagaccttatggattcaaaacttagatgtgtgtttgaattgccagcagaaaatgataaaccacatgatgtagaaataaataaaattatacccacaactgcatcaaagacagaaacaccaacggtgtctaaagctctgagttcttctttggatgacactgaagttaagaaggtgatggaagagtgtaagaggctgcagggtgaagtgcagaggctccgggaggaaaacaagcaattcaaggaggaagatggctccggatgaggaagacagnttaaagcaacagccctgngcctggggtagcttccacttggaaaggnggggggcctaagggcccggttcctngcccttgggggtttgttnttattggcggggggaccaaagggaagaacgcc

SEQ ID NO: 4782 - DNA, 566 bp, Canis familiaris
  misc_feature (483)..(483): n comprises a, c, g, or t, or includes no nucleotide
  misc_feature (562)..(562): n comprises a, c, g, or t, or includes no nucleotide
atttttgttaacattttaagaatctgtaaggcatgacaatatagctacttaaggggaagataagatttctttttgtttgagtgtgatactgtgacgtgtaggaactaaagctcagctagtttttctttcctagtcccatgctggcttattttaaccggacaaggtaacctatgttgtaaggtgtacgtaacctaatgttagccgtgtggtctcaagtgtggattccgtagtaagaccaagtgtttttttgtcactgaggtgttctgagctgtaccttgatgtgtaaaagaagaaatactggttaaaacaactttcaccttctaggatctactttttaaatcttctgtcccttgtagttctcaactgcatgtaccaggcctctagaaactagtagtgaaactgaaccaactggatgggagtagccatggatagggcttgttttccaaagaagagcgttggttaaagtacgagaatttaagcctnttaggcgtgttgtaaagcttgtcaagaagtaactccacaagttttgggggtgaaaagggtagtgctcaagcacatttgnttaa

SEQ ID NO: 4783 - DNA, 414 bp, Canis familiaris
  misc_feature (377)..(377): n comprises a, c, g, or t, or includes no nucleotide
  misc_feature (380)..(380): n comprises a, c, g, or t, or includes no nucleotide
  misc_feature (388)..(388): n comprises a, c, g, or t, or includes no nucleotide
aagggctggtgctgatgaacattgaccccaacggcaaaggctggattgactgggcggccaccaagctctctggcctgaccagcactttacctgatacggtgctaacccacctcttcagccaggaggagctggtgagcaacacagagctggtgcagagctaccggcagcagattgggaacgtggtgaaccaggccaacctgcagctcttctggaacatgtacaacagccgcagagacctggacattaacaggcctggaacagtgcccaatgccaagacgctccgctgccccgtgatgctggtggtgggggataatgcacctgctgaggatggggtggtggagtgcaactccaaactggacccaaccaccactaccttnctnaagatggnagattccggggggctttccaggtaca

SEQ ID NO: 4784 - DNA, 650 bp, Canis familiaris
  misc_feature (480)..(480): n comprises a, c, g, or t, or includes no nucleotide
  misc_feature (502)..(502): n comprises a, c, g, or t, or includes no nucleotide
  misc_feature (510)..(510): n comprises a, c, g, or t, or includes no nucleotide
  misc_feature (544)..(544): n comprises a, c, g, or t, or includes no nucleotide
  misc_feature (559)..(559): n comprises a, c, g, or t, or includes no nucleotide
  misc_feature (561)..(561): n comprises a, c, g, or t, or includes no nucleotide
  misc_feature (570)..(570): n comprises a, c, g, or t, or includes no nucleotide
  misc_feature (646)..(646): n comprises a, c, g, or t, or includes no nucleotide
tgtttaaaatatttcttacacttatgataagccaaatcagccttttagaaggtgctattgctaactgtggaataactggcaagaagaaaggcttttttttttccttttttttttcttttctttttaatggctggcttttaccggaaaagagatattttaaaaaatggcagaatttctagccttctgtatgtccaagattaggactgggttgtcaagattttcttctgttaaaggaaataaaactcgccattactgaattcagcttactattctaacttaagattcattccttaatgcttggaattttgatgtctcaaaactggaccagtggaagtgctgaatttgcattaaaaaagctaaggatacttcgcactttaaggtttaagttttactctgcttaaattaatgataagcagagcagccctgaacaatattttgtttatacaatcctgttgaagaatataatttatggttttttgnaggctggatctttcatctggtnaactgggnaaaacttttgaaaagcaatttttttaaatttggntttttaacaaaaaantncccaaaaanagatttccaagggggaaaaaatggtattatgactatgattcctggtttgcactactgtgctcaagaaaaaaacttnttaa

SEQ ID NO: 4785 - DNA, 549 bp, Canis familiaris
  misc_feature (447)..(447): n comprises a, c, g, or t, or includes no nucleotide
  misc_feature (465)..(465): n comprises a, c, g, or t, or includes no nucleotide
  misc_feature (479)..(479): n comprises a, c, g, or t, or includes no nucleotide
  misc_feature (498)..(498): n comprises a, c, g, or t, or includes no nucleotide
  misc_feature (545)..(545): n comprises a, c, g, or t, or includes no nucleotide
ctgctccaggtgcagcagagtctggggtactgcccgcagttcgatgccctgttcgacgagctcacaagcccgggagcacctgcagctgtacacgcggctccgcggcatcccctggaaggacgaggcccgggtaggcagcgccccggcaggggcagggcagaggaggggtgggccttgatgtcccttcccccccaggtggtcaactgggcactggagaagctggagctgagcaagtacgcggacaagcctgcgggcacctacagtggaggcaacaagaggaagctgtccacagccattgccctcatcggctacccggccttcatcttcctggacgagcccaccacaggcatggaccccaaggcccggcgcttctctggaatctcattctcgacctcatcaagacggggcgctccgtggtgctgacgtcacacaacatggaggaatgtnaggcgctttgcactcggntggccatcatggtngaacggcgccttgcgttgntgggcaggattcaacacctgaagaaccggttggagacggtacattgntacg

SEQ ID NO: 4786 - DNA, 479 bp, Canis familiaris
  misc_feature (187)..(187): n comprises a, c, g, or t, or includes no nucleotide
  misc_feature (247)..(247): n comprises a, c, g, or t, or includes no nucleotide
  misc_feature (252)..(252): n comprises a, c, g, or t, or includes no nucleotide
  misc_feature (255)..(255): n comprises a, c, g, or t, or includes no nucleotide
  misc_feature (473)..(473): n comprises a, c, g, or t, or includes no nucleotide
agggccgtctgagccatgagcagcgtccggggtgctatcctcttctgggtagtggtagcgtgggctaaaacggacaagcctttggaacagacaaatgagactggatttcagaaatgcaagaacgccttaaaactacctgttctagaagtcttacccggaggaggctgggataacctgcggaatgtanacatgggacgggtgatggacttgacctacaggagctgcaggaccacggaggatggacagnacatnatncctgatgaaatcaccagcatcgcccagaaacagagcaacctggagatgaactccgaaatcctggagtcctgggtgaattaccagagcagcacctccagctccatcaacctggagctctccctgtattccaaggtcaatggcaaattctcctctgatttcagcagatgaagacccttcaagtgaaggaccaagccataactacccgggttcagatccgnaaactg

SEQ ID NO: 4787 - DNA, 615 bp, Canis familiaris
  misc_feature (531)..(531): n comprises a, c, g, or t, or includes no nucleotide
  misc_feature (541)..(541): n comprises a, c, g, or t, or includes no nucleotide
  misc_feature (549)..(549): n comprises a, c, g, or t, or includes no nucleotide
  misc_feature (588)..(588): n comprises a, c, g, or t, or includes no nucleotide
  misc_feature (593)..(593): n comprises a, c, g, or t, or includes no nucleotide
ggtcgcatggaaatggagcttgattatgctgaagatgctaccgaacggcgccgtgtcctagaagtagaaaaggaagacacagaagaattgagacagaagtacaaggattatgttgacaaagagaaggcaattgccaaagcattggaagacctccgagccaacttctactgtgaactctgtgataagcaatatcagaaacatcaggaatttgacaaccatatcaactcctatgatcatgcacacaagcagagattgaaagatctcaagcagagagagtttgctcgaaatgtctcttcgagatcccgcaaagatgagaagaaacaggaaaaagcccttcggcggctccatgaattggcagagcaaaggaaacaagctgaatgtgcacctggaagtggtcccatgttcagaccaaccacagtggctgtagatgaagaaagtggagatgatgataaaagatgaatcagctacaacagtggcacaaggggccctggcccttggggccaggattgaattttcacaaataaaggaggnctttacttgngtcaaatnctaataccctggctgccaggccctgggtagtttccaagnataantttggattaaaaaattaaggac

SEQ ID NO: 4788 - DNA, 558 bp, Canis familiaris
  misc_feature (80)..(80): n comprises a, c, g, or t, or includes no nucleotide
  misc_feature (161)..(161): n comprises a, c, g, or t, or includes no nucleotide
  misc_feature (175)..(175): n comprises a, c, g, or t, or includes no nucleotide
  misc_feature (311)..(311): n comprises a, c, g, or t, or includes no nucleotide
  misc_feature (371)..(371): n comprises a, c, g, or t, or includes no nucleotide
  misc_feature (411)..(411): n comprises a, c, g, or t, or includes no nucleotide
  misc_feature (467)..(467): n comprises a, c, g, or t, or includes no nucleotide
  misc_feature (471)..(471): n comprises a, c, g, or t, or includes no nucleotide
  misc_feature (492)..(492): n comprises a, c, g, or t, or includes no nucleotide
  misc_feature (504)..(504): n comprises a, c, g, or t, or includes no nucleotide
  misc_feature (528)..(528): n comprises a, c, g, or t, or includes no nucleotide
cggcgctgcctgcagcctgcagcctcggccggccggcgagccagtgcgcgtgcgcggcggcggcctccgcggcgaccggngagcggacgcacggaccggcgagcgggcgagcgggcgagcggtgcgggcgcgaggcgaggccgagccacgagcgacatggncgaccgagagcagntgctgcagcgggcgcggttggccgagcaggcggagcgctacgacgacatggcctccgccatgaaggcggtgacagagctcaatgaacctctttccaatgaagatcgaaacctcctctctgtggcctacaagaatgnggttggtgccaggcgatcttcctggagggtcatcagcagcattgagcagaaaaccatggntgatggaaaaagaaattggagaaaagataaagcttaccgngagaagattggaaaggagcttggaaacaagtgtgccaatgattgtcctggctttgnttgncaaggttcctcattaagaacntgcaatgatttnaattatgagagcaaggtatttttnttgaaattgaaagggggattctaccgtttc

SEQ ID NO: 4789 - DNA, 343 bp, Canis familiaris
agatcccaagtcaaacagtgtggcttaaacattttttgtttcttggtgttgttatggcgagtttttggtaatgatgatccaatcattttgggaaattcttgcactgtatccaagttttttgatctggtgcgtgtggccctgtgggagtccactttcctctctatctctctctgttccaagtgtgtgtgcaatgttccgttcatctgaggagtccaaaatatcgagtgaattcaaaaccatttttcttttcctccttttaatgtgatggaatgaacaaaaaggaaaaaaaatcaaaaacccagtttgttttgaaaataaataaataaacaaataaataaataaa

SEQ ID NO: 4790 - DNA, 599 bp, Canis familiaris
  misc_feature (500)..(500): n comprises a, c, g, or t, or includes no nucleotide
  misc_feature (529)..(529): n comprises a, c, g, or t, or includes no nucleotide
  misc_feature (580)..(580): n comprises a, c, g, or t, or includes no nucleotide
  misc_feature (588)..(588): n comprises a, c, g, or t, or includes no nucleotide
agctgaggcgtgttggatcgtgggcagggcacagaaccgagcagagatcacactgcctcgttgacgctctgcgctccagccgggggggcgatggcggcttcatgtgtcctcctgcacactgggcagaagatgcccctgattgggctgggcacctggaagagtgatcctggccaggtaaaagcagctattatgtatgccctgagtgtaggctaccgccacattgactgtgctgctatctacggcaatgaggctgagatcggggaggccctgaaggagaatgtaggacctggcaaggtggtgcttcgagaggagctgtttgtgacttctaagctgtggaacactaaacaccaccccaaggatgtggagcctgccctccggaagacactggctgacctccagctggagtatttggacctgtacctgatgcactggccttatgcctttgacggggagacaacccttttcctaaaaatgccgatgggacaaatccgttttgactntaccactacaaggaaaacctggaaagctntgaggcactgggggttaaggactgggacaagcattggcctgtcaatttaanaatcgganaacgaaaatgg

SEQ ID NO: 4791 - DNA, 582 bp, Canis familiaris
  misc_feature (471)..(471): n comprises a, c, g, or t, or includes no nucleotide
  misc_feature (476)..(476): n comprises a, c, g, or t, or includes no nucleotide
  misc_feature (483)..(483): n comprises a, c, g, or t, or includes no nucleotide
  misc_feature (508)..(508): n comprises a, c, g, or t, or includes no nucleotide
  misc_feature (570)..(570): n comprises a, c, g, or t, or includes no nucleotide
ctaaccttgcaggatttagagttacaaaacgatgaagaaagaccaaatttaaataaaacacttcatcattttcatgtgtcgtgtgtaaaggcttaaagtaccatctttttggaggtggttcatgtattcaatttattcagtacagttctttgacaagtttagctttattttcaaaggacaagaaaatgcttaccttgtctagcatagtaattaatggtcatgtctgaagaggtcagatgggcctcaggtgggaaaatttaaaattctttttccatttggttgagatgttgcagtcaggaaccccaactcacttgatatgtttttacatgtgatcatttcccttgaagcttacacttcctaagggatacagaaatataggtgagatgggaaaactccttggcagaccttcatcttctgcctcaactataaaccagatataaatgttgaaaggagactggttttcattcttgnggganttagcantcagaaaattgcttcagcaattggnaaaacctcagctggttttaattttgagggaaggtttgatttaaggactaatggtacattgcngaaaatttaaaa

SEQ ID NO: 4792 - DNA, 538 bp, Canis familiaris
  misc_feature (503)..(503): n comprises a, c, g, or t, or includes no nucleotide
  misc_feature (534)..(534): n comprises a, c, g, or t, or includes no nucleotide
cgagttaacttgattgactcattgtttgaagttacaagagtgaagaatttagggaatattcaggaaagtggtatgagctgtattcgtaatctcagctcctggtttatcaaatgcaaaatgtaaccgtaaccagtggacattctgtaacaggcatttcactgttgagtaagaggatcacaagaggaatggtttttcaaagcatgtcaaaaatcaacagcaaaggttttttaaaaccaaatatcccagagctctgtcccttgtttaaattacatacagtcaatttctgaatcagcaaatagaactgattgttttaatactactgtacataagggattaattcttcccttataaattgaatgttaaatgtttcttatatataatcactttgttcttaaaatattatttgatcctggggcgcctggtgactcaataagcttctgacttttggttttggctcaagtcatgatctctgagggtgtgagagcaagccccgcatcggcttntgagctcaactaggagctgcttgggattctntttc

SEQ ID NO: 4793 - DNA, 622 bp, Canis familiaris
  misc_feature (412)..(412): n comprises a, c, g, or t, or includes no nucleotide
  misc_feature (440)..(440): n comprises a, c, g, or t, or includes no nucleotide
  misc_feature (475)..(475): n comprises a, c, g, or t, or includes no nucleotide
  misc_feature (504)..(504): n comprises a, c, g, or t, or includes no nucleotide
  misc_feature (511)..(511): n comprises a, c, g, or t, or includes no nucleotide
  misc_feature (521)..(521): n comprises a, c, g, or t, or includes no nucleotide
  misc_feature (533)..(533): n comprises a, c, g, or t, or includes no nucleotide
  misc_feature (548)..(548): n comprises a, c, g, or t, or includes no nucleotide
  misc_feature (553)..(553): n comprises a, c, g, or t, or includes no nucleotide
  misc_feature (572)..(572): n comprises a, c, g, or t, or includes no nucleotide
  misc_feature (589)..(589): n comprises a, c, g, or t, or includes no nucleotide
  misc_feature (613)..(613): n comprises a, c, g, or t, or includes no nucleotide
gacttcgtctttgcctgctcccaggcacagcagctcgagtgggtgaagagccactaccctggcctgcatgcccggctccaggagtttgcctgccgagggcagttcgtgcctgtagggggcacctgggtggagatggacgggaaccttcccagcggagaggctatggtgagacagttcctacagggccagaacttcttcctgcaggagtttgggaaaatgtgctcggagttctggctcccagacacatttggctactcggcacagctcccccagatcatgcgcggctgcggcatcacgcgcttcctgtcccaaaaactgagctggagcttggtgaactcctttccgcaccatacttttttctgggaggggctggatggctcccgcgtgctggcccacttccacctggtgactnctatgggatgcagggcaatgtggaggangtgcttgaagaccatggtcaaaaaaccgggacaangggggcggaccaacccaaaggcctttctnttttggnttcggggacngggggcgggggnccccccaaaccatgntggancgcttgaacggttgacaanaaaacggctttcagggngagttggtttttcggacgattttncggccttga

SEQ ID NO: 4794 - DNA, 616 bp, Canis familiaris
  misc_feature (244)..(244): n comprises a, c, g, or t, or includes no nucleotide
  misc_feature (268)..(268): n comprises a, c, g, or t, or includes no nucleotide
  misc_feature (363)..(363): n comprises a, c, g, or t, or includes no nucleotide
  misc_feature (439)..(439): n comprises a, c, g, or t, or includes no nucleotide
  misc_feature (480)..(480): n comprises a, c, g, or t, or includes no nucleotide
  misc_feature (528)..(528): n comprises a, c, g, or t, or includes no nucleotide
  misc_feature (550)..(550): n comprises a, c, g, or t, or includes no nucleotide
  misc_feature (556)..(556): n comprises a, c, g, or t, or includes no nucleotide
  misc_feature (586)..(586): n comprises a, c, g, or t, or includes no nucleotide
ggcgccgggacgagggtgctgctgcgcacccgccgctcgcagtcgtccctgctgaggtcgcctgccttgcggagcaccgccaccttcgcccaagctctccagagcgtgccagagacacaggtcagcctgctggacaacgggctgcgagtggcctccgagcagtcctcccagcctacctgcacggtcggggtgtggattgatgttggcagccgttaccgagactgagaagaacaatggggcaggntactttctggagcatctggctttnaagggaacaaagaatcgacctggcaatgccttggagaaggaggtggagagcatgggggcccatctcaatgcctatagcacccgggagcacactgnctactatatcaaggcactctccaaggacctaccaaaagctgtggagctcctggctgacattgtgcagaactgcagnctagaaaactcccagatcgagaaggagcgtgatggtgattntacaaggagcttgcaggagaacgatgcgtgcatgccgggatgtggtcnttgactacctgcatgccacaanattcanggcacacctttagccaggctttggaggggnccagggggaatgtaaggaaactatttatgc

SEQ ID NO: 4795 - DNA, 528 bp, Canis familiaris
  misc_feature (409)..(409): n comprises a, c, g, or t, or includes no nucleotide
  misc_feature (438)..(438): n comprises a, c, g, or t, or includes no nucleotide
  misc_feature (446)..(446): n comprises a, c, g, or t, or includes no nucleotide
  misc_feature (452)..(452): n comprises a, c, g, or t, or includes no nucleotide
ggcacaatctcagctctcttggctgcactgaggaattaagaaggaaatttgtactgggtaaatgatatttttgtctgtcaggcccaaaatccagaaatgaatcccttcctcttaactgaatgccacttatccataaaggaatagatttccccaagaaagaactctgcatttcatggtcctcttccatgtggaggctgctgagggtgctgacatgactctgtgttagattccataaaagccaagttttctacaaaactgtcagccaagtaagagcccccctactgaaccccgtttccccacccatgccctctagactcacaccacagtcccacagactcagagttcagaatccagatgggttactgttaacaccagtctcctccttccatcctgcacacacacaggcatncagccatcctgacctcggatgcgccccangtccatangaactnctaggtaccctgggcaagtcgctgtgacttcgaaggaagcttgttacattgggcccaggcagctgaacccacctcg

SEQ ID NO: 4796 - DNA, 660 bp, Canis familiaris
  misc_feature (432)..(432): n comprises a, c, g, or t, or includes no nucleotide
  misc_feature (489)..(489): n comprises a, c, g, or t, or includes no nucleotide
  misc_feature (516)..(516): n comprises a, c, g, or t, or includes no nucleotide
  misc_feature (548)..(548): n comprises a, c, g, or t, or includes no nucleotide
  misc_feature (643)..(643): n comprises a, c, g, or t, or includes no nucleotide
cccagagcaaaacgaggacgaagtgcagaatgcctacatacaaccaggtaaatacagggatttggtaatggtaactgtgtgtgatgactctctttccattctactattctttcttcttgcacataatggtattattacaaatatgtaaaattagtttcccaagtattcaaaatttgttttgttttattggaggctgtggaaaggttccaaatatattttaattctaatccagacagactgcttttctatttgtatattcaaactccagagactgatgtgcctctgtggaactctttacacattcctaaaactgaggaaccgatttccacaattacaattcaaaatgctcactatgagcagccccaccaaggcccctggcagcacacacacatacctgtctagtcacaggaggtctgatctgtgcatggcagnggtattggtttcatgattatggttggtttagcctttttaatttgcttttggggaccnactataattatattaattgcttttaanaaaacttaataatgggcatttttattggctgngcataacttccttatgataaagaatgagaatatttgacctacttttaaaccttcttccttcttatcccttacattaaaaggtatatacaaagttntattaacatatacaatt

SEQ ID NO: 4797 - DNA, 665 bp, Canis familiaris
  misc_feature (506)..(506): n comprises a, c, g, or t, or includes no nucleotide
  misc_feature (593)..(593): n comprises a, c, g, or t, or includes no nucleotide
  misc_feature (596)..(596): n comprises a, c, g, or t, or includes no nucleotide
  misc_feature (604)..(604): n comprises a, c, g, or t, or includes no nucleotide
  misc_feature (656)..(656): n comprises a, c, g, or t, or includes no nucleotide
  misc_feature (662)..(662): n comprises a, c, g, or t, or includes no nucleotide
cctgaaggtgggcgaagggaagtagcaggcacgtgatgctggcaaggatgtttctggggctggggaactagtgggagaaagtcctgcagagcccagcagccagagccgcagatgacaaggcggtcactcacagccaggacctgagtctgtgttaggaaaacatattaattctcatataaacccagttcctcaccattttcctctcatctttcagtgccatttctcttcatgttaggctgtttgtacaaacttttgggagccggggtggtacatcagttctctggaatccgccaggccgctggggggtggatcaccacaccctgtagggcttctcccctcctagctgtctttgggaaacgcaggactgggaggctgttttgaccagagaggccaaggtcaagagcaaggtgtagaaaaattgtaaaatagaaaaagtgggtgttggggaattgggtttggtttgtttggtttggtttcacaattggatagctgcacaagaggctttncttcagtttcagcatggtcttccttttttcctttctacgtttttcttctattaatcaagagaaacttaaagtccatgggatggcggnttnacagctgngaactcgtcacctcaacattatgaaaagttgttttttaatctgcaactttgnccgtgnggg

SEQ ID NO: 4798 - DNA, 522 bp, Canis familiaris
  misc_feature (468)..(468): n comprises a, c, g, or t, or includes no nucleotide
  misc_feature (476)..(476): n comprises a, c, g, or t, or includes no nucleotide
atcctgctctctcctccccactcccaatagtatttggtacccaggctggttcttgggctaggtagtagggaccaggtttgtttcctccctatcagttctaacacaatcaactctgataccagtgttagtggaagacctgattctcctagtagacccaccaggtcctatcactatcttatcaccacactgcttccaggtatgggacctgccgagtgtggaaatacctgatgagggaagggaagggaagagacgaggagggcctctggagatcctggccttggccagctgcccacaagccataaaccaataaaataagaatattgaatcacagttctttatctgggttctcttcattccccttgcacttggtgctgctctggctgactgggaacacccccaaccacaaagactgtcagaagactggagactccggttttcagctcaaaacttactgtgtaaataaacttncagaatgntaccatgtaatggaaacgccccaactgctttataattttatcacgt

SEQ ID NO: 4799 - DNA, 483 bp, Canis familiaris
  misc_feature (458)..(458): n comprises a, c, g, or t, or includes no nucleotide
aagcagcctttgcttccaggctgggagcagaggtgggaaagctgtacttcagaagaggacttggcggctgagtaggcaagtgttctgctccccagcgctcacctggaagcagccttttcaagctggagacctgcttgtctccatatggtccaggttaggtgacctggccctcatgctgatgttcctgataatcttgaaaggttcttctggaacccctgccaccttagtcatgagagcagaaagtgcaatatagccttttacctggtgggagggagggaaagggaatttatttctgagagaaaaatatataaacagatcttctacatttatatttttaactttctgttaaaaaaaaaaaaccactttccgatattgccttgcctcttgagctcttgctacagtcgcctttgctactgctttaaaagagaattacaggtattggtaaagaacaagactgntttattaaaagctttattcaacttg

SEQ ID NO: 4800 - DNA, 557 bp, Canis familiaris
  misc_feature (458)..(459): n comprises a, c, g, or t, or includes no nucleotide
  misc_feature (475)..(475): n comprises a, c, g, or t, or includes no nucleotide
  misc_feature (492)..(492): n comprises a, c, g, or t, or includes no nucleotide
  misc_feature (510)..(510): n comprises a, c, g, or t, or includes no nucleotide
  misc_feature (523)..(523): n comprises a, c, g, or t, or includes no nucleotide
  misc_feature (547)..(547): n comprises a, c, g, or t, or includes no nucleotide
ttcaaaaaccatcaaatgagaaaattgcaagtagtgtgacagagctgattgattttgttgctttcttgattttttgttttcaaaatgggtttactaagatgtagatgacttaactgcctcctccttcgtctgaaaaaatgccaatattcaatcatcatgcagcattataacaagccttataagtcctaaagcattaagttgcactttcttgaggaggggtagtgcagtatttctctggccagtatgaatgaagtttatacttaacatatttgatagatcaagctatggcacagcaactcatcagatagctagctttgacgtctgggcacaattgaaccaacttccatcgtgaatctttataatgattgactttggtgtatagtgcagtaaacaaatagtgctcctagttaagtatttgtcagcatccttttgctctaactcgttctatttttacagcnnacaaacttggcatgtnttagaagaaaaaaaaancctggtcaggaggtttcncctatcacactgngtaaagccataaacatcaaaggcnaaggtccatt

SEQ ID NO: 4801 - DNA, 235 bp, Canis familiaris
atatttttccatccttaaaaaatgacgtccaaggaaaatatttagatgcaacttattagaatggtgtggaagaaatggtaattcttgataccgaggtgtttcttttcgttcttatcactgcggagaaaatatcctgaccaaaaaaaaaaaattcatttttggggattcctttcttttacaaattgtgctgaggcaactatggcatagaaataaacatttgacattaaaataagcc

SEQ ID NO: 4802 - DNA, 572 bp, Canis familiaris
  misc_feature (453)..(453): n comprises a, c, g, or t, or includes no nucleotide
  misc_feature (498)..(498): n comprises a, c, g, or t, or includes no nucleotide
  misc_feature (501)..(501): n comprises a, c, g, or t, or includes no nucleotide
  misc_feature (532)..(532): n comprises a, c, g, or t, or includes no nucleotide
  misc_feature (565)..(565): n comprises a, c, g, or t, or includes no nucleotide
aagctagtggacagcaagaatttcgatgactacatgaagtccattggtgtgggttttgctaccaggcaggtggccaacatgaccaagcctaccacagtcatcgaaatgaatggggacactatcatcataaaaacacacagcaccttcaagaacacagagatcagcttcaagttaggggtggaattcgatgagacaacagcagatgacaggaaggtcaagtccaccgtgacgctggatggaggcaaacttgtccatgtgcagaagtggaacgggcaagagacaacacttgtgcgggagctagttgatgggaaactcatcctgacacttacccatggcagtgcagtttgcactcgtacttacgagaaagaggcatgacctgcccactccttcactgtctgctcctctgccaatcggctagccctggactcaacaccggattggctcatttttttncttggcatttttggataaatccgcttggttgggttggggaaattnttntgagtcaggtggaccagctgggccactttgntctacgggatgttggtttttactgatccaaggngcctaag

SEQ ID NO: 4803 - DNA, 519 bp, Canis familiaris
  misc_feature (476)..(476): n comprises a, c, g, or t, or includes no nucleotide
atggtagaacctaaagttgccacgattcagaactggaaaatcaagaccaaaagcaggaggtgaaggaagccccaccacgagagctgacagaggaagagaaacagcagattcttcattcagaggagtttctcatcttttttgatcggacaatccgggtaattgaaagagcgctagcagaagactctgacatcttctttgactacagcggtcgggagttagaggaaaaagatggggatgtccaggctggagccaacctttctttcaatcgtcagttctacgatgagcattggtccaagcatcgagtagtcacttgtatggactggtctctccagtaccctgagctgatggtcgcttctacaacaacaacgaggatgctcctcatgaaccagatggagtggccttggtttggaacatgaaggttaagaaaaacccaccagaatacgtcttcccttgtcaggcattttgtgatgtagggngctttgctcgtttccatcccacttgggggtgggggggacttac

SEQ ID NO: 4804 - DNA, 491 bp, Canis familiaris
  misc_feature (113)..(113): n comprises a, c, g, or t, or includes no nucleotide
  misc_feature (150)..(150): n comprises a, c, g, or t, or includes no nucleotide
  misc_feature (237)..(237): n comprises a, c, g, or t, or includes no nucleotide
  misc_feature (256)..(256): n comprises a, c, g, or t, or includes no nucleotide
  misc_feature (402)..(402): n comprises a, c, g, or t, or includes no nucleotide
ttctagatcgcgagcggccgcccttttttttttttttttttttttccatttgctaaagttgaaactaacgcagggagtccattgggacatgttgttccacccttcaaaacagngcccgctaatgaaatgatctgataggaaatattcggnttccttacccaaagtaaagatcacctgatcagaaaggacaagtacaatattttgagaagctatagctactaaacatttgagattcanatctccaaatcagtttctntcaggattccaacattgctctctgtaaaggaacactgtatgatttagtacaacttctcaataggtagcactggtctgacttaatctacagtctgggaaatcacaaattaattaattcttctcataaatcattcatcttagacttgngaataagcaatcagttaccagtctggggggatattttttaggattttatctggtctttttcttgctcaaggctggtagggtggatctgg

SEQ ID NO: 4805 - DNA, 672 bp, Canis familiaris
  misc_feature (450)..(450): n comprises a, c, g, or t, or includes no nucleotide
  misc_feature (493)..(493): n comprises a, c, g, or t, or includes no nucleotide
  misc_feature (513)..(513): n comprises a, c, g, or t, or includes no nucleotide
  misc_feature (516)..(516): n comprises a, c, g, or t, or includes no nucleotide
  misc_feature (556)..(556): n comprises a, c, g, or t, or includes no nucleotide
  misc_feature (558)..(558): n comprises a, c, g, or t, or includes no nucleotide
  misc_feature (567)..(567): n comprises a, c, g, or t, or includes no nucleotide
  misc_feature (598)..(598): n comprises a, c, g, or t, or includes no nucleotide
  misc_feature (606)..(606): n comprises a, c, g, or t, or includes no nucleotide
  misc_feature (645)..(646): n comprises a, c, g, or t, or includes no nucleotide
ttatgtctcatatgtttgatcacattcaaggattattatacttgtgcttcaaccagtctaaattggattctttaatgttgtctcaccataacacaaaaagcatgaacttgtattaatcctctataatagattgatcgtgcaccgtgtccacaggaggttggactgccaggccattttctggaatttaaggtgttgcattatttcatcaatcatttgtttacaaaaaagaaaaactaaaaaataaatttaaaatgtgaacccgtcaggtatggagtaacacctgtatcttggtatagaactgatctttttcttttgtttttgaaatactatattaatttggaatgaggtatgattctgttaaagaaaatgtatttgaagactcttcaaagcaggggctgaaacgacttcacaccattagcgggtgagacatacctctagatattttgaggnatttactatattaactacatttaaaaaggttttaaggtcgctntaaggcagaaacaatacaancantggatccaggggaatttttggggattttacttgggagggngngtataaagnaatttgaggcactggaatgacaagaaactgnttaagggngaatccaaaaattaaagcttttaaattttaagaatttgnnaaaatgtggtgggcttttttttgcca

SEQ ID NO: 4806 - DNA, 486 bp, Canis familiaris
tgttggcattatcagttgaactgtaaatataaaatgcttcttccaattagtctctatgatgattaagtttctaaaatttatctgaacaccattcagaaacttgttttggggaatttgatagttattgatgtacatctgttaaactgatgacagacataactcatcattccccagaaaccttttttgattacagtatctaacattttgcctcctcttttttggttttgctggttataaaggtttggattggagagggctcactggatcccaatccttggagctggatcattggattcaaatcataatgtggataggataggggaggatgaattacaaggattcatggagcgggatcagattaccaggaacataggagtggattcctgccccaaccaaaccgcattcgtgtggattttttttttttttttattcaacctaaatgggtattccaagaaattttttttttttccaattttgacaatgggg

SEQ ID NO: 4807 - DNA, 596 bp, Canis familiaris
  misc_feature (467)..(467): n comprises a, c, g, or t, or includes no nucleotide
  misc_feature (481)..(481): n comprises a, c, g, or t, or includes no nucleotide
  misc_feature (562)..(562): n comprises a, c, g, or t, or includes no nucleotide
  misc_feature (574)..(574): n comprises a, c, g, or t, or includes no nucleotide
cccgcgctggcgacggctggtttcctggccttgctcctcatcctcctcgctgcgtgccgcctggatgccgtgcagcatcccccaaagattcaagtgtactcacgacacccagcagagaatggaaagccaaatttcctgaactgctacgtgtcagggttccatccaccagagattgaaattgatttgttgaagaacggaaaggagatgaaagcagaacagacagacctgtctttcagcaaggactggaccttctatcttctggtccacactgaattcactcccaatgagcaggatgagtttagctgccgtgtaaagcatgttactctcagtgagccccagatcgttaagtgggaccgagacaactgactagcatcacagctttgaagatgatgcatttattgaactaatcccaaatgctttgggtttttcttcatgctgatagggttttatgctttaatcataaagtnttttggaacaaatnccaattccaactaagttggtaattctacattggcacttgggtaattatgcttgacctatctgggccagtaactttagttgnggggctggaagntaaaaaatccgggggagagaat

SEQ ID NO: 4808 - DNA, 650 bp, Canis familiaris
  misc_feature (420)..(420): n comprises a, c, g, or t, or includes no nucleotide
  misc_feature (427)..(427): n comprises a, c, g, or t, or includes no nucleotide
  misc_feature (445)..(445): n comprises a, c, g, or t, or includes no nucleotide
  misc_feature (483)..(483): n comprises a, c, g, or t, or includes no nucleotide
  misc_feature (493)..(493): n comprises a, c, g, or t, or includes no nucleotide
  misc_feature (515)..(515): n comprises a, c, g, or t, or includes no nucleotide
  misc_feature (539)..(539): n comprises a, c, g, or t, or includes no nucleotide
  misc_feature (545)..(545): n comprises a, c, g, or t, or includes no nucleotide
  misc_feature (594)..(594): n comprises a, c, g, or t, or includes no nucleotide
  misc_feature (605)..(605): n comprises a, c, g, or t, or includes no nucleotide
  misc_feature (631)..(631): n comprises a, c, g, or t, or includes no nucleotide
  misc_feature (647)..(647): n comprises a, c, g, or t, or includes no nucleotide
caggtgtgctcctcctgccacagcatggactatgtggcctaccgccacctggtgggggtctgctacaccgaagatgaagccaaggcgctggctgaggaggtggaggttcaggacggccccaatgaggatggagagatgttcatgcggccagggaagctctccgactatttccccaaaccataccccaaccctgaggccgcccgagcagccaataacggagcactgccccctgacctcagctacatcactcgagctaggcacggtggtgaggactacgtcttctccctgctaaccggctactgtgagccacccaccggcgtgtcactgcgagaaggcctctacttcaacccctacttccctggacaggctattggcatggcgcctcccatctacgatgaagtcctggagtttgacgatggnaccccanctccatgttccaagtagncaaaggacgtgtgtacctttcttggcttgggatttgancaaaaaaacnaccatcggaaaccatggggttnaaaaagttgataataatggcttgntttttncctgactacccatgaacgggataatggtggtcttaaaaacggaagttgnattttggcacnaaagaccttgtcatggtggtaattgntgcttaggggcctgancca

SEQ ID NO: 4809 - DNA, 487 bp, Canis familiaris
  misc_feature (450)..(450): n comprises a, c, g, or t, or includes no nucleotide
  misc_feature (469)..(469): n comprises a, c, g, or t, or includes no nucleotide
ttttccttataaattgtctattttttaaaaaaaaagaaactatttaccacaagttgaagaggggggtaaggccaaattgccagcatttgttaaaagattaatattcttaagtagcactctgatacatttccaagcttatcatcagaggggaatcagtaacgatccgctattgtatttcgaccaacttctaatatgtagctcattagaagccaggatttagaaagctcttcttaagccatttaggatttcttacattgagtttcatattatagaactttctaggattaaaaaaaaaaaacagaatcattttagcctcaggactgagaatgtggaacctgaataaattagctttaagtatatcattaaaatcttatgcacaataagctcattagattctagttggctcctttagaataccaatgccataggccggagataatggaaggtatnaacagtgcttgcaatggangggggttcaaaaaaaggg

SEQ ID NO: 4810 - DNA, 448 bp, Canis familiaris
  misc_feature (134)..(134): n comprises a, c, g, or t, or includes no nucleotide
  misc_feature (165)..(165): n comprises a, c, g, or t, or includes no nucleotide
  misc_feature (241)..(241): n comprises a, c, g, or t, or includes no nucleotide
  misc_feature (390)..(390): n comprises a, c, g, or t, or includes no nucleotide
  misc_feature (422)..(422): n comprises a, c, g, or t, or includes no nucleotide
gcggcgccgaaggggagcctgtgggtcagggcccaacggggactcccgccgctgctgctgttgaccatggccctggctggaggctcggggaccgcttcggctgaagcatttgactcgatcttgggtgatacggngtcttgtcaccgggcctgtcagttgaccttncccttgcatacctaccccaaggtgcctgccaatttgtacacagtggatcacacagaagaagagttgtatgcatgtnagagaggttgcagactgttttcaatttgtcaatttgtggatgatggaattgatttaaatcggaccaaaatggaatgtgaatctgcatgtacagaagcatatttccaatctgatgagcaatatgcttgccatcttggttggcagaatcanctgccatttctgaactgagacaaaaacaactnatgttccttgatgcccaaaatgcacc

SEQ ID NO: 4811 - DNA, 545 bp, Canis familiaris
  misc_feature (240)..(240): n comprises a, c, g, or t, or includes no nucleotide
  misc_feature (328)..(328): n comprises a, c, g, or t, or includes no nucleotide
  misc_feature (330)..(330): n comprises a, c, g, or t, or includes no nucleotide
  misc_feature (394)..(394): n comprises a, c, g, or t, or includes no nucleotide
  misc_feature (402)..(402): n comprises a, c, g, or t, or includes no nucleotide
  misc_feature (446)..(446): n comprises a, c, g, or t, or includes no nucleotide
  misc_feature (455)..(456): n comprises a, c, g, or t, or includes no nucleotide
  misc_feature (481)..(482): n comprises a, c, g, or t, or includes no nucleotide
  misc_feature (497)..(497): n comprises a, c, g, or t, or includes no nucleotide
  misc_feature (528)..(528): n comprises a, c, g, or t, or includes no nucleotide
gctgccggggagggaggaagccgacgggccgcggagcagcctgcacgcccagcccagcccagcccagccgtcccctctggccactgctgcggacacctgccttaacacggacacctggagtactccacagttttgccttaaaggacctccccgagatgccccagccctgtctgcttctccctccaggaccgagaggcacttgtagaattgggaggggggagctgagcacgactgtccttncggtcaggattaccgtgatgtgagaatgtgcgtgagagcgagcgagagcgagagggggaagaggaggaaggaatatgagccttctctnangagaggaggggggagatgggagaagggagacagggtcattttcagcagagtctagaaatctctnttttaggnaaaaatacctaaaaagactaacctgccttccacctgtccggtgngaaaaatgnncccatctttgcttctgtcttcaatnngcaccggccttgttntaccctggaataaagggattgattgtctttnaaaaaaaaaaaaaaggg

SEQ ID NO: 4812 - DNA, 577 bp, Canis familiaris
  misc_feature (418)..(418): n comprises a, c, g, or t, or includes no nucleotide
  misc_feature (439)..(439): n comprises a, c, g, or t, or includes no nucleotide
  misc_feature (462)..(462): n comprises a, c, g, or t, or includes no nucleotide
  misc_feature (493)..(493): n comprises a, c, g, or t, or includes no nucleotide
  misc_feature (503)..(503): n comprises a, c, g, or t, or includes no nucleotide
  misc_feature (505)..(505): n comprises a, c, g, or t, or includes no nucleotide
  misc_feature (518)..(518): n comprises a, c, g, or t, or includes no nucleotide
  misc_feature (541)..(541): n comprises a, c, g, or t, or includes no nucleotide
  misc_feature (544)..(544): n comprises a, c, g, or t, or includes no nucleotide
  misc_feature (561)..(561): n comprises a, c, g, or t, or includes no nucleotide
  misc_feature (572)..(572): n comprises a, c, g, or t, or includes no nucleotide
tcagcaccagagaatgataggtgtcagaatgccgcatttgagcaagtaaaattgtaaagcacgtagtgagtgtacatccatctgagtagtacattgataatttggtttggacaccgtaaggaatatttatggcttcccaaatgcaaaattccattttatttgtgtaatttctctgagtatttatattccatctctttcctccgttcttaaatgaattttcactgttggcacatttgaggcttaaatataaggaacataacacttgcattctaatttttgcaaaattgtaaatgtgtgtctggtatttacagcaaaatactgtgtatccttttatgggtaaaacaaaactgaacattgcatgcctgtaatgtggtgactttgtaatttaaggggtctttggggcttctgtgacttttgnaatgcttacattcaaggcctnatggtgcattaactaacatggtncccccggaggatatagccctgtgggttaacnaactttgccngntttactccggaanttccaaccaatttactgtgacanttncgcaggggtcaatcaantaaaataattntatgt

SEQ ID NO: 4813 - DNA, 160 bp, Canis familiaris
  misc_feature (42)..(42): n comprises a, c, g, or t, or includes no nucleotide
  misc_feature (77)..(77): n comprises a, c, g, or t, or includes no nucleotide
  misc_feature (84)..(84): n comprises a, c, g, or t, or includes no nucleotide
  misc_feature (148)..(148): n comprises a, c, g, or t, or includes no nucleotide
agggggagtagtggggcgaggctcctgatatccagcccccanactgacagacggacagacagacatgcaaacaccanactgaancacatgtaatatagactgtgtatgtttacaatgttgtgtataaatgggacaacttcttgccctncatcccctcccc

SEQ ID NO: 4814 - DNA, 672 bp, Canis familiaris
  misc_feature (119)..(119): n comprises a, c, g, or t, or includes no nucleotide
  misc_feature (414)..(414): n comprises a, c, g, or t, or includes no nucleotide
  misc_feature (500)..(500): n comprises a, c, g, or t, or includes no nucleotide
  misc_feature (510)..(510): n comprises a, c, g, or t, or includes no nucleotide
  misc_feature (512)..(512): n comprises a, c, g, or t, or includes no nucleotide
  misc_feature (526)..(526): n comprises a, c, g, or t, or includes no nucleotide
  misc_feature (538)..(538): n comprises a, c, g, or t, or includes no nucleotide
  misc_feature (544)..(544): n comprises a, c, g, or t, or includes no nucleotide
  misc_feature (598)..(598): n comprises a, c, g, or t, or includes no nucleotide
  misc_feature (617)..(617): n comprises a, c, g, or t, or includes no nucleotide
  misc_feature (631)..(631): n comprises a, c, g, or t, or includes no nucleotide
  misc_feature (661)..(661): n comprises a, c, g, or t, or includes no nucleotide
  misc_feature (668)..(668): n comprises a, c, g, or t, or includes no nucleotide
cagagtggagtggtcgccggagatgcgtgactgtctgttctgaggagcggctgacagcgcgatggagcgggccagggaccgcttacacctgagacggactacggaacagcacgtcccanaggtggaagtccaagtcaaacgtagaaggacaagcctcactgagcaaccaagagtgtcagctgtacccaaggcgatctcagcagcagcaagtccctgtggtggatttccaggcagaactgagacaggcattcttggctgagacaccaagaggtggttaaagcagtattggaacatccaggtagctaatatccaagtgaaaaaccaggctccatctactgtttgaagcttctgccccaagcttgcattgtttgtaggagaacctgcatcatacctttatcttgtagccttccttangtcttaaggatcctgaaacctaactggacattggatttggtggaacagcaccatgacttgttggaaagacaacaagatgcttgcancacattgctntngaatgagatgtatntttcaagaaggncgaatntttattggcacctttaagggtttggcaagcatataacttgatctttgcgattgngatgaattaggaagataanccaaaaatgcgaancaccaaacgtgaaaaaaacgtgtttgggtntttgttntact

SEQ ID NO: 4815 - DNA, 637 bp, Canis familiaris
  misc_feature (416)..(416): n comprises a, c, g, or t, or includes no nucleotide
  misc_feature (443)..(443): n comprises a, c, g, or t, or includes no nucleotide
  misc_feature (448)..(448): n comprises a, c, g, or t, or includes no nucleotide
  misc_feature (457)..(457): n comprises a, c, g, or t, or includes no nucleotide
  misc_feature (509)..(509): n comprises a, c, g, or t, or includes no nucleotide
  misc_feature (522)..(522): n comprises a, c, g, or t, or includes no nucleotide
  misc_feature (528)..(528): n comprises a, c, g, or t, or includes no nucleotide
  misc_feature (537)..(537): n comprises a, c, g, or t, or includes no nucleotide
  misc_feature (573)..(573): n comprises a, c, g, or t, or includes no nucleotide
  misc_feature (578)..(578): n comprises a, c, g, or t, or includes no nucleotide
  misc_feature (622)..(622): n comprises a, c, g, or t, or includes no nucleotide
tctgccgtatccctgcccaggctgggacacacttctctgtgctggctgtgtggggcaggcgtggggcctgctgttgcctgggacatggcttcacacagctgcagagctgtctactctattacctctgaccttggccctacctggagcccactttggcttcactgctttagacttagactctaaagtgggcccaacgtgatcctggagtcctgggatcgagtcccacatcgggctccctgcatggagcctgcttctccctctgcctgtgtctctgcccccacgcccctgtgtctttcatgaaaaaaatctttaggggcgcagctccaaggcggctccagcagaggaagagaccccacgcggaggggactgcgtggctctgggagcaactctgaggggctcgggccggcggcttcgcngaaggggcttgcgccggcaagaacccnaatcnaaaaccaanccccggacaattgggaaccggggaaaaaacccaagaatttggccttcccttnggacaaggcggangccaanaaggagggnccaggacaacgaggacaattctggccccaacttganaaaanaaagggtccccccgcccccgagcatcaagccttttgaaaaccanagttttggactcttg

SEQ ID NO: 4816 - DNA, 623 bp, Canis familiaris
  misc_feature (418)..(418): n comprises a, c, g, or t, or includes no nucleotide
  misc_feature (424)..(424): n comprises a, c, g, or t, or includes no nucleotide
  misc_feature (437)..(437): n comprises a, c, g, or t, or includes no nucleotide
  misc_feature (463)..(463): n comprises a, c, g, or t, or includes no nucleotide
  misc_feature (508)..(508): n comprises a, c, g, or t, or includes no nucleotide
  misc_feature (537)..(537): n comprises a, c, g, or t, or includes no nucleotide
  misc_feature (553)..(553): n comprises a, c, g, or t, or includes no nucleotide
  misc_feature (572)..(572): n comprises a, c, g, or t, or includes no nucleotide
  misc_feature (602)..(602): n comprises a, c, g, or t, or includes no nucleotide
  misc_feature (620)..(620): n comprises a, c, g, or t, or includes no nucleotide
agaatttgtcaacatctaacaaaatgtcttaacaatttgccctgtgtcaaccttttgactcctatttctagatctgtccttgaagatatacctgtgcaatataaaaagtatatgcacatgggtgttcatgacagcattacaaaaagtaacaaaagacaacaaataaaccattagaaacaactataagggggtgcctgggtggctcagtggttgagcgtcggcctttggctcaggctgtgatcccggggtcctgggattgagtcccacatcaggcttccctcagggagcctgcttctccctctgcctatgtctctgctctctctacacctcttatgaataaataaataatatatttttttaaagaaataactataagtacacccacacagtagaaaactacttatttataaaaacatangatggnaaatctcttctgngataagaacatgaatatatctatatnggtccattgcaaaagaaccataagggggcaaaccagaactactgnaaatcttctttttgggaaggtgtggtgantcggtggaaaaaaatntttgggataaacttttggnacacatttaaaagctgccttgataaataancttttatttccaaaatgngtt

SEQ ID NO: 4817 - DNA, 488 bp, Canis familiaris
  misc_feature (446)..(446): n comprises a, c, g, or t, or includes no nucleotide
  misc_feature (461)..(461): n comprises a, c, g, or t, or includes no nucleotide
  misc_feature (465)..(465): n comprises a, c, g, or t, or includes no nucleotide
aaagaattcaacaatgaattccattcttttagtcattaggactattcaagttacctatttcatctttggtgagtttttgtagtttgtgatttttcaggattagctccatttcatccaagttgtcaaatttatgcacagagagttatttgtagtattccttattatctttattatctgcagagtccacagaaatatcacctttttattcttcatgctgataatttgtcttctctctttatttctttattagtctggcaagaggtttatcaattttttaaaatctttttagacaattacctaccctgtttattttctctttttgttcttcccttttctacttcattgatttctgttctttattatttccatggttctgcttatttcaaatttatcttggtctcttttctaattttataaggcagaaacttaaattttagacctgcatnccacaaaattgatgngggnaatttaaattttggtcatttcaa

SEQ ID NO: 4818 - DNA, 432 bp, Canis familiaris
  misc_feature (301)..(301): n comprises a, c, g, or t, or includes no nucleotide
  misc_feature (322)..(322): n comprises a, c, g, or t, or includes no nucleotide
  misc_feature (324)..(324): n comprises a, c, g, or t, or includes no nucleotide
  misc_feature (358)..(358): n comprises a, c, g, or t, or includes no nucleotide
  misc_feature (373)..(374): n comprises a, c, g, or t, or includes no nucleotide
  misc_feature (389)..(389): n comprises a, c, g, or t, or includes no nucleotide
  misc_feature (406)..(406): n comprises a, c, g, or t, or includes no nucleotide
tcccctcgtcccgtctcgtgctgcccgtgccccgaccccgtcccgaccccgtcccgacccctcagcagccaggcagacataacaacaaaaatactaaacggagcttcactgcgctgagctgtttcctgcccaaacgaggggagtaatgtgaaccgtgtgagtgcgtgggtaccgtgtccgtgctggtgtctgtgtgtatgtgcacgtgtgtgtgcgaccagagggagggcctgggcctgcggggggcggggggatgtaagggcacaagagggcttggggcgtggggtcccggcccggctgnctacctcccctgcgccgtggntnccgcccgcccgtcgtgcaagaaacaaatccccanacgtgttttgctcanntgaccaccttgtctnttccgaaaacaaaaaancattcgccctgctcgattttttttgt

SEQ ID NO: 4819 - DNA, 603 bp, Canis familiaris
  misc_feature (279)..(279): n comprises a, c, g, or t, or includes no nucleotide
  misc_feature (288)..(288): n comprises a, c, g, or t, or includes no nucleotide
  misc_feature (389)..(389): n comprises a, c, g, or t, or includes no nucleotide
  misc_feature (402)..(402): n comprises a, c, g, or t, or includes no nucleotide
  misc_feature (423)..(423): n comprises a, c, g, or t, or includes no nucleotide
  misc_feature (426)..(426): n comprises a, c, g, or t, or includes no nucleotide
  misc_feature (489)..(489): n comprises a, c, g, or t, or includes no nucleotide
  misc_feature (526)..(526): n comprises a, c, g, or t, or includes no nucleotide
  misc_feature (547)..(547): n comprises a, c, g, or t, or includes no nucleotide
cacctcgagagctggggctgggcctggggttgggcctgaaagagaaggaagaggcagtggtggctgcagcagccgggctggaagaggctagcgcagcagtggctgttggggcaggaggtgcccccaccggccctgccgtcattggtcccagcctgccgttggccctggccatgcctttgcctgagcctgagcccctgcctctaccgctggaagttgtacgaggcctactgcccccactgcgtattcctgagctcctgtccctgcgtgcacgaccccggnccccacggnctgagccaccccctggcctcatggctcttgaggtcccagagcccttgggtgaggacaagaagaaaggaaagccagagaaattgaaacgctgcatttcacancaactgggagcanctgggaggacccaatcttctntantgggatgcaaaataacttccggatcttttttggggacttggccaatgaaatgaatgatacatnttgggacgagccttaacccgtttcaatccttcttaanggtaaggggatccaaacaacncacggcaaaacaaaggctatggcttttcagtttaagatccaacactaccttccccc

SEQ ID NO: 4820 - DNA, 677 bp, Canis familiaris
  misc_feature (17)..(17): n comprises a, c, g, or t, or includes no nucleotide
  misc_feature (263)..(263): n comprises a, c, g, or t, or includes no nucleotide
  misc_feature (500)..(500): n comprises a, c, g, or t, or includes no nucleotide
  misc_feature (516)..(516): n comprises a, c, g, or t, or includes no nucleotide
  misc_feature (590)..(590): n comprises a, c, g, or t, or includes no nucleotide
  misc_feature (628)..(628): n comprises a, c, g, or t, or includes no nucleotide
  misc_feature (649)..(649): n comprises a, c, g, or t, or includes no nucleotide
  misc_feature (671)..(671): n comprises a, c, g, or t, or includes no nucleotide
gagcctgcttctccctnccgctggtggtctctggcctctctctctctctctctggggctatcataaaataaaataaaaaaatttaaaaaaaaaaaaggggccttttaaacttcctctggcaaggtcttattcattttggtcttttttttttttttttttcctgagtaaattgtaaatggcttttaatttccttttcaagtttgctctttgttactctggatatgtcagtatagataggtttttgaaataaaaatgttactcanaagctggaacaagaatgtgacaacaaatatacatggtttaaattgtgttagaacactcaagtttaagagctttgtaatttttactcaagtaggcaagtactattacgacttaatcatccctttttgttaaataatagatctgagtgggacatacttctgaaggatgtgcaatggtcaatcataaagtgtggacaaaaactgacaagcaggaagcttatgtcctcaatggagaagtancatgttggtttccaanaacgttcaattttgaaaacatgtggaccacccttttcttgaagcactggttcccctgttgaacttgtagggatnacaggggttggctcaatcaagtaagaatcaacattttnttttttccccagccaaggtanggcttggaatagcattgcctanaaaaaa

SEQ ID NO: 4821 - DNA, 211 bp, Canis familiaris
  misc_feature (59)..(59): n comprises a, c, g, or t, or includes no nucleotide
  misc_feature (74)..(74): n comprises a, c, g, or t, or includes no nucleotide
  misc_feature (82)..(82): n comprises a, c, g, or t, or includes no nucleotide
  misc_feature (110)..(110): n comprises a, c, g, or t, or includes no nucleotide
  misc_feature (112)..(112): n comprises a, c, g, or t, or includes no nucleotide
  misc_feature (153)..(153): n comprises a, c, g, or t, or includes no nucleotide
  misc_feature (164)..(164): n comprises a, c, g, or t, or includes no nucleotide
  misc_feature (179)..(179): n comprises a, c, g, or t, or includes no nucleotide
ttttttttttttttttttttggattctttaaatatatgttattctcatttagtgccctntttagccagaatctnattactgnttcatttttgtaataacattttatttangnattttccatatattggccctgctaaaatagaatatagcatntttcatatggnaggaaccaaaaaggnaactttcctttaattccctttttacactttat

SEQ ID NO: 4822 - DNA, 567 bp, Canis familiaris
  misc_feature (457)..(457): n comprises a, c, g, or t, or includes no nucleotide
  misc_feature (483)..(483): n comprises a, c, g, or t, or includes no nucleotide
  misc_feature (485)..(485): n comprises a, c, g, or t, or includes no nucleotide
  misc_feature (490)..(490): n comprises a, c, g, or t, or includes no nucleotide
  misc_feature (514)..(514): n comprises a, c, g, or t, or includes no nucleotide
  misc_feature (550)..(550): n comprises a, c, g, or t, or includes no nucleotide
tcaacagaagtatctctctaggctttgtattagtatggtttgagataacatgtcgaaaaatgttcacatttgtagattaagctggaatatgagagcaataagaacaaatttattttgcttcccacagtattatgactggttttagaaacctgaggcctttataacttaattatgttaaagagtaaaaaatagagttggccttgtactacagagatataactcatttgtatattgtagcaaaatctaaagtggcactgaatatgtccttgctgactttttgaaaacttgattttagccagaaagtaaacaaaatcatcaacagtaatgataaatgtgaacatttttgcctgttcattaaaatatatctgtgattttcaagcacttatgcatatactttttctgtcttattctggtaaaggagaattatttttatgatgaattggttaaggaataaatnggtttttttaagggaattttacaaananacctnaagggtttgggcatttggaaaaanatttaaagatgaaaagtttttggggtaacagttccncacctgacaaaaaaatg

SEQ ID NO: 4823 - DNA, 632 bp, Canis familiaris
  misc_feature (406)..(406): n comprises a, c, g, or t, or includes no nucleotide
  misc_feature (478)..(478): n comprises a, c, g, or t, or includes no nucleotide
  misc_feature (488)..(488): n comprises a, c, g, or t, or includes no nucleotide
  misc_feature (525)..(525): n comprises a, c, g, or t, or includes no nucleotide
  misc_feature (549)..(550): n comprises a, c, g, or t, or includes no nucleotide
  misc_feature (552)..(552): n comprises a, c, g, or t, or includes no nucleotide
  misc_feature (590)..(590): n comprises a, c, g, or t, or includes no nucleotide
  misc_feature (600)..(600): n comprises a, c, g, or t, or includes no nucleotide
ctgaagatctggtgtcgccatgggtcgccgccccgcccggtgttaccggtactgtaagaacaagccgtatccaaagtcacgcttctgcagaggtgtccctgatgccaagattcgcatctttgatctggggcggaagaaggcaaaagtggatgagttcccattatgtggccacatggtgtcagatgagtatgagcagctctcctctgaagccctggaggctgcccgtatttgtgccaacaagtacatggtgaaaagctgtggcaaagatggttttcacatccgagtgcggctccatcccttccatgttatccgtatcaacaagatgttgtcctgtgctggagctgacaggctgcagacaggtatgcgaggtgcctttgggaaaccccaaggcacaataaccaaggtncacattgggcaaatcattatgtcattcgtccaacttgaaaacaaaggacattttgattgagggccttcccanggccaaattnaagttcctggccgccaaaaaaccaaatttcaaaaaangggggtttctaaatttaatgcggnncnaatttaaaaattgggggccgaaaacgggttatccaaanggttgggggnaaaaacatcctaatcggggcccttggcaaaag

SEQ ID NO: 4824 - DNA, 676 bp, Canis familiaris
  misc_feature (416)..(416): n comprises a, c, g, or t, or includes no nucleotide
  misc_feature (449)..(449): n comprises a, c, g, or t, or includes no nucleotide
  misc_feature (457)..(457): n comprises a, c, g, or t, or includes no nucleotide
  misc_feature (472)..(472): n comprises a, c, g, or t, or includes no nucleotide
  misc_feature (486)..(486): n comprises a, c, g, or t, or includes no nucleotide
  misc_feature (563)..(563): n comprises a, c, g, or t, or includes no nucleotide
  misc_feature (593)..(593): n comprises a, c, g, or t, or includes no nucleotide
  misc_feature (610)..(610): n comprises a, c, g, or t, or includes no nucleotide
  misc_feature (618)..(618): n comprises a, c, g, or t, or includes no nucleotide
  misc_feature (646)..(646): n comprises a, c, g, or t, or includes no nucleotide
gacccgcagacgccgaggccgcgacgagcacagcccgggacccgatgtctccgagcagcctgcgccgccgcgtcgccgtcaaccccatggcgcggctcctgagactctgcgcttggctcctggcgctcggccccgggctcctggcgaccgtgagggcggagtgcggccaggactgcgcgacctgcagctaccgcctggcgcgcccgagcgacctcaaccccctggcttgcaccctggaatgcgaagggaaactaccctctctcaaaacctgggaagcctgcaaggagctcctgcagctgtccaaactggagcttcctcaagatggtgccaccgccctcagggagaccagcaagccggaggagagccatgcactggccaaaaagtatgggggcttcatgaaaagatatggaggcttnatgaaaaaaatggatgaactttatcttcaggangcagaacnaaaaggccaatgganggggaagtcctggncaagagatatgggggcttcatgaaaaaaaacggaaaggaaggaggatgtcctggccaactcttaaaacttgttaaanaacttgtgggaaccggggaaaacccaaaangtgggccccaccaaaanggcagtgntgatgaaaattgaataaaaatttggggntttattaaaaccttaaaaaaaacccaactg

SEQ ID NO: 4825 - DNA, 617 bp, Canis familiaris
  misc_feature (230)..(230): n comprises a, c, g, or t, or includes no nucleotide
  misc_feature (453)..(453): n comprises a, c, g, or t, or includes no nucleotide
  misc_feature (551)..(551): n comprises a, c, g, or t, or includes no nucleotide
  misc_feature (568)..(568): n comprises a, c, g, or t, or includes no nucleotide
  misc_feature (612)..(612): n comprises a, c, g, or t, or includes no nucleotide
aaatccgtctactccctgacaataaatgagcataaaagtaaaatcatctttacgcagatgactgaactcccaggatctgcaaaggccccctattaccttctctgcacaaaccctaaaacacacacacacacacacacacatacacacacacttttttacttttaacctactctgtacatgctacatttgttatctttttcctaggtccacccagaattatcccatctttncgaatccttatccctatgaatcttcaaaatatgttaaattatgtgttatatgtttgctttctataaattctttaaaattaatttatatatactttgtgaagtctactgtaaagggatgtccgttgtcattgattaaatgtaatgtttatgattattttggtaaaaataacttcggatgctaggctcttgttaagaaataaaattttcatgacaaaattgcttntattgggaaatatatgatttggcatactttatttttatcacaatctattccagataaataataatttggggacattgtacttaaacctattgagcccntttggatggaatgaaangaaactgtcctggaactaaattgaattttggcgacaaaaatatntatat

SEQ ID NO: 4826 - DNA, 513 bp, Canis familiaris
  misc_feature (452)..(452): n comprises a, c, g, or t, or includes no nucleotide
  misc_feature (484)..(484): n comprises a, c, g, or t, or includes no nucleotide
  misc_feature (487)..(487): n comprises a, c, g, or t, or includes no nucleotide
gtaggaatggactgggaccttgtctcacactgatgatacctcagacgttggctggctatgtgaactgcctatttcctatgctggagttgttttgatttttaactaaatgaatatctgtagattctttcctcccctatcccagaaaacaaaacaaaataatgctttttgaaactgtttctagaattttaaagtgaaaaatgatggtactctccaaaattctttatttcagaacatgacaatagattcttaacataggttcaggatcaaaacagcataccctctaaactcagactgtctgttgactccaagggttttttttgatcaagacagtaacaaacttttttccctttgacatgctctgatttttgttgtttgtggggagtgtgtgtgtgtgtgtgtgtgtgtgtgtgtgtgtgcaatgccaacaatatcaatgcctgcctgagaaaagnaaaatacatttctgggtttgtttgaggagaanggngtttaaagcacaaaaaacaatatccc

SEQ ID NO: 4827 - DNA, 401 bp, Canis familiaris
  misc_feature (364)..(364): n comprises a, c, g, or t, or includes no nucleotide
gagacacaggcagagggtgaagcaggctccctgcagggagcctgatgtgggactcgatcctgggaccccggggtcacaccctgagccaaaggcagacactcaaccactaagccacctaggccctaggcatccctacctacctggttgtaacaataaaaagaaattttatatatatgcttaatatgtgttaaactatatacattttcaaaaatatgtattaaatatgtgtatatgtaaaatattttaagtgatttttaaatgtctcatatactgtgtacaatatgtattaaggtgttaaagtataaaggcctaaacaattcttagcatatggtaaaaactacatattaatccttatttttactgnatatgggctttttctttttttttttttttatatgggc

SEQ ID NO: 4828 - DNA, 412 bp, Canis familiaris
  misc_feature (242)..(242): n comprises a, c, g, or t, or includes no nucleotide
  misc_feature (302)..(302): n comprises a, c, g, or t, or includes no nucleotide
  misc_feature (392)..(392): n comprises a, c, g, or t, or includes no nucleotide
  misc_feature (398)..(398): n comprises a, c, g, or t, or includes no nucleotide
ttcttttctgaagattttatttattcgtgagagacagagagaggcagagacacaggcagagggagaggcagaccccatgcagggagcccgacgtgggactccatcccgggactccagggtcacgccccgggctgaaggcaggcgctagaccgctgggccacccgggctgccccaagattttatttttaagtaatctctacacccaacgcgaggctcgaactcctagcccctagatcaagggncacacattccatccactgagccagccaggcacccaccacgctgctattcattttccttgncttttttttttatgaaaacaggacttggctgtgtgcgttcttcacatttttgtcactcaacattctgtttcttcgattcattcgtgctgngtgggnctctggcctttttc

SEQ ID NO: 4829 - DNA, 147 bp, Canis familiaris
  misc_feature (2)..(3): n comprises a, c, g, or t, or includes no nucleotide
  misc_feature (53)..(53): n comprises a, c, g, or t, or includes no nucleotide
  misc_feature (66)..(66): n comprises a, c, g, or t, or includes no nucleotide
  misc_feature (109)..(109): n comprises a, c, g, or t, or includes no nucleotide
  misc_feature (111)..(111): n comprises a, c, g, or t, or includes no nucleotide
  misc_feature (116)..(116): n comprises a, c, g, or t, or includes no nucleotide
tnnatcgccagctctaatacgactcactatagggaaagctggtacgcctgcangtcccggtcccgnatttcccggtcgcccacgccgtccgctatttggaaagaagcanantattntttttcccttggggatggaatgcataataat

SEQ ID NO: 4830 - DNA, 365 bp, Canis familiaris
  misc_feature (340)..(340): n comprises a, c, g, or t, or includes no nucleotide
catgcatattttaatatccatttggatagccagaagtagaatcataaagataaactatgagttgttactttgttacttaagaaatatcatattttatttgtaacatatatgaaaaaggccattcttaagtttgctccttaaaactaatgctgtcaagtgttagctgtgtgcatgtaaaccagttgcacatcagaaacatattcaaagttgatctatgtaacttattcactctgtaaatacatttaaagtttttgtgatgtaatcttggttgatattcagaacttcctttagactaaaaaaaaaagacccaagttaacaaaaaaaaaaaaaaaaaaaaaanaaaaaaaaaagggggggggggtctg

SEQ ID NO: 4831 - DNA, 575 bp, Canis familiaris
  misc_feature (345)..(345): n comprises a, c, g, or t, or includes no nucleotide
  misc_feature (401)..(401): n comprises a, c, g, or t, or includes no nucleotide
  misc_feature (421)..(421): n comprises a, c, g, or t, or includes no nucleotide
  misc_feature (427)..(427): n comprises a, c, g, or t, or includes no nucleotide
  misc_feature (468)..(468): n comprises a, c, g, or t, or includes no nucleotide
  misc_feature (483)..(483): n comprises a, c, g, or t, or includes no nucleotide
  misc_feature (501)..(501): n comprises a, c, g, or t, or includes no nucleotide
  misc_feature (527)..(527): n comprises a, c, g, or t, or includes no nucleotide
  misc_feature (572)..(572): n comprises a, c, g, or t, or includes no nucleotide
tcgctgctgatggcgaggaggtgctgcggctgctgtgtgtgtgtctcggctcttcttctcccccgtgcggaggacttcagggttttctgtcacttcccaggtctttttacggggggaagaccacacactacactgtaggaaaagcaaatagaagccatgtttcgaagacccgtattacaggtatttcatcagtttgtgagacgcgagtctgaaatagccagcagcttggttcttgaaagatctctgaaccgtgtgcagctgcttgggcgagtgggtcaggaccctgtcatgaggcaggtagaagggaaaaacccagtcacgatattttctctagcgacaaatganatgtggcggtcaagggaaaagtgaaacatacccaaatgggtgatggtaatcaaaanacaacgtggcacagaatatnatattncgaccaggctcaaagatgtggcatatcaatatgtgaaaaangggtcccgaattatnttaaagggaaagaaactntgtgaatccccaacaaaataatgggngggacagcacaacaatcatacttgatacatattttttgatgaccnacc

SEQ ID NO: 4832 - DNA, 655 bp, Canis familiaris
  misc_feature (469)..(469): n comprises a, c, g, or t, or includes no nucleotide
  misc_feature (513)..(513): n comprises a, c, g, or t, or includes no nucleotide
  misc_feature (538)..(538): n comprises a, c, g, or t, or includes no nucleotide
  misc_feature (546)..(546): n comprises a, c, g, or t, or includes no nucleotide
  misc_feature (553)..(553): n comprises a, c, g, or t, or includes no nucleotide
  misc_feature (569)..(569): n comprises a, c, g, or t, or includes no nucleotide
  misc_feature (588)..(588): n comprises a, c, g, or t, or includes no nucleotide
  misc_feature (615)..(615): n comprises a, c, g, or t, or includes no nucleotide
  misc_feature (629)..(629): n comprises a, c, g, or t, or includes no nucleotide
  misc_feature (642)..(642): n comprises a, c, g, or t, or includes no nucleotide
  misc_feature (647)..(647): n comprises a, c, g, or t, or includes no nucleotide
catttggatgagtttgcatgtggaaactgccttcatcttgacaaaaaagcccaggatgctgacggcgctgctgctgctccccgcgctggccggcctcctccccgccgcagacggacaggccttccacctggggagatgcccgacgccgccggtgcaggagaacttcgacgtgcacaagtatcttggacgatggtacgaaattgagaagatcccagtgagctttgagaagggaagttgcatccaagccaactattcgctaatggaaaacggaaacatcaaagtgataaaccaggagttgagatctgatggcaccgtgaatcaaatcgaaggcgaagccacccagggcaaccttacagagcctgccaagctgggagttaagtttttctggttgatgccatcagctccatactgggtctgccaccgactacgagaactacgcccttgtgtactctgaccacaatcggctggntttttcacatggatcatgtttggatcttgggaagaaaccttatnttcttccagaaacaagtgacctatntgaaaganatctggncttttaatgacattgncatcgagaaaatgactatnacagaatcaggtgacttgccccaatcnttggaaaggttcangggggaaccttgngttcnttcacgtt

SEQ ID NO: 4833 - DNA, 494 bp, Canis familiaris
  misc_feature (328)..(328): n comprises a, c, g, or t, or includes no nucleotide
  misc_feature (373)..(373): n comprises a, c, g, or t, or includes no nucleotide
  misc_feature (385)..(385): n comprises a, c, g, or t, or includes no nucleotide
  misc_feature (408)..(408): n comprises a, c, g, or t, or includes no nucleotide
  misc_feature (421)..(421): n comprises a, c, g, or t, or includes no nucleotide
  misc_feature (428)..(428): n comprises a, c, g, or t, or includes no nucleotide
  misc_feature (435)..(435): n comprises a, c, g, or t, or includes no nucleotide
  misc_feature (449)..(449): n comprises a, c, g, or t, or includes no nucleotide
  misc_feature (481)..(481): n comprises a, c, g, or t, or includes no nucleotide
tctgcacgccgcgcggtacccgcacgccttcgtcaacgggctgttgctggcgccctcgccgcggtcgggagagtgtctgtgtctcaccgactgtgtgcccctgttcacagccacctgggccctgtccgtcatgctggaggtcgccctcaaccaggtggatgtgtggggcgcgcaggccggtctgatagtggctgggtactaccatgccaatgcagctctggacgaccagagtgctgggcccctggccttgaaaattgctgggcggattgcagaattcttccctgatgcagtccttgttatgttggacaatcaaaaactggtgcctcancctcatgtgccccctgtcattgtcctggaaaaccatggtcttcgntgggtccccaangacaaaaacttaatgatgtgganggactgggaaaantaccgcnaaatggnggagcactcttgangggccgggcccccaacaccttttggactttanttgccccttttaa

SEQ ID NO: 4834 - DNA, 464 bp, Canis familiaris
  misc_feature (443)..(443): n comprises a, c, g, or t, or includes no nucleotide
  misc_feature (451)..(451): n comprises a, c, g, or t, or includes no nucleotide
tttttttaagattttatttattcatgggagacacaggcggggggagaggcgggctgcacgcggggggcccgatatgggactcgcccctgggaccccaggatcacgccctgggctgaaggcagacgctcaaccacagagccaccaagccacccaggcgccccaacagtggatatgatttaaacaagtcataaggagttcaatcgaaagaaagccatgtatattcataacccaaaattagcatcatttttggaaactgccccaattcaaaaggttacagaatatttagaaatgttttccacattaaaaacagtaaacacaagtatttggaatatcagtaaactgatcaggagttttgtcttctcctttataaggaataagctggatgtgttaccatcttattagtacttggtaatttcttcaccagtataattaatacccccagnaaaagganttttcagttatct

SEQ ID NO: 4835 - DNA, 481 bp, Canis familiaris
  misc_feature (89)..(89): n comprises a, c, g, or t, or includes no nucleotide
  misc_feature (440)..(440): n comprises a, c, g, or t, or includes no nucleotide
  misc_feature (458)..(458): n comprises a, c, g, or t, or includes no nucleotide
acgcgtgggcggctctggggacagcatagcaggaggccgggctgagccgtaggcactgggtgtcagccagctcacccttgccttctctncaggaaggcccgccccgtcacttccactcaatgttccccaacttacaagcccagcacctccctcttcttgactgacataaaaatatgtagcgacaagctgtctgccacagcagaaatctgatcagacattgatttcagcaattgcctctataggccaagacataaggcaaatttgtttcggagcactgttactgctgatgcagggctgaggcgggaagggccagtggcatgcgaagagccgtagcaacatcccaaataggagctccagttagagataattggaatacagatttgaatagtgtgctcctccgcaggtcatgcattttcattcttggaaaatgcgaattggangggaaagctgggctttanttttccaagggtacaagtaaccc

SEQ ID NO: 4836 - DNA, 522 bp, Canis familiaris
  misc_feature (407)..(407): n comprises a, c, g, or t, or includes no nucleotide
  misc_feature (429)..(429): n comprises a, c, g, or t, or includes no nucleotide
  misc_feature (479)..(479): n comprises a, c, g, or t, or includes no nucleotide
  misc_feature (481)..(481): n comprises a, c, g, or t, or includes no nucleotide
tcccgccagcctgagatcttggcgaggctgcaggccgaggtggacgaggtcatcggttctaagcggcaccttgactgtgacgatctggggaggctgcagtacctgtcccaggttctcaaggagtcgctgaggctgtacccgccggcgtggggtaccttccgcctgctggaggaggagaccctgatcgacggggtcagagtgcccggcaacaccccgctcctgttcagcacctacgtcatggggcgtatggacacgtactttgaggacccactgactttcaaccccgatcgcttcagccccaaagcgcccaagccgagattcacctacttccccttctctctgggaccccgctcctgcatcgggcaagcaagtttgctcagatggaggtgaaagtggtcatggccaanctgctgcaaaagcttggagttnccgctggtgccccggcagcgctaccggcttgcaggaacaaggccaccttnanccgttgaacccctgcttgggacttttgaaccccggggtgga

SEQ ID NO: 4837 - DNA, 617 bp, Canis familiaris
  misc_feature (433)..(433): n comprises a, c, g, or t, or includes no nucleotide
  misc_feature (474)..(474): n comprises a, c, g, or t, or includes no nucleotide
  misc_feature (476)..(476): n comprises a, c, g, or t, or includes no nucleotide
  misc_feature (484)..(484): n comprises a, c, g, or t, or includes no nucleotide
  misc_feature (502)..(502): n comprises a, c, g, or t, or includes no nucleotide
  misc_feature (536)..(536): n comprises a, c, g, or t, or includes no nucleotide
  misc_feature (570)..(570): n comprises a, c, g, or t, or includes no nucleotide
  misc_feature (586)..(586): n comprises a, c, g, or t, or includes no nucleotide
  misc_feature (589)..(589): n comprises a, c, g, or t, or includes no nucleotide
tgttagaggtgttagaggtatagatggtttagtaaagatgtagtttgtaatgttttatccatttagcatgtgtttatttttccttatgtactcagaggtgacttatttgttcagctcagtgatattatacagctaagtatatcattcattagcaaaaggagaagcaatctcaatctaacatcagaaatgtttatttaatattgagttgaatatttgactctaacacttttctacatacaaaacacaagtatcttgagggttcttcaaaattgcattgtagaggaattcagtatgtcataaatacttaaagatttgacactagactgtagtatccatatgttggttaattttcttatgagccccatgatggaaagacttaaagatgaatttgagaaaaactgaaaattagattatcagggtctgttaaaattgntacatgtatcttgcttaagttttggttcattaatttatatncnctcaattncataaagcaaaatttggnggaaacacctgaagttgggcaatatttcataganatacttttttatcctgggttttctacttatacangctgctttcttttttntanatggtaaaatggtaaggaactttaaaac

SEQ ID NO: 4838 - DNA, 637 bp, Canis familiaris
  misc_feature (434)..(434): n comprises a, c, g, or t, or includes no nucleotide
  misc_feature (444)..(444): n comprises a, c, g, or t, or includes no nucleotide
  misc_feature (495)..(495): n comprises a, c, g, or t, or includes no nucleotide
  misc_feature (524)..(525): n comprises a, c, g, or t, or includes no nucleotide
  misc_feature (558)..(558): n comprises a, c, g, or t, or includes no nucleotide
  misc_feature (563)..(563): n comprises a, c, g, or t, or includes no nucleotide
  misc_feature (583)..(583): n comprises a, c, g, or t, or includes no nucleotide
  misc_feature (625)..(625): n comprises a, c, g, or t, or includes no nucleotide
tgaccctcaccctgagtcttttaaaatccattccagtacatttaacacacttcctttcccctctacacctttcttccaaagggaaggagaaccagtggtgtttgttttctatctgagtcaggaagaacgaatcaggtcatcatatctgtgatgagacttacggagcacaccactctctcctgactccagcttcaggtgcagggacaagcagtcagcaaccacctgatggtgcttcacgtcattcgtgaggtttgtggccacagtggcacttgggtgtagctctgtcatttgtcctatatggtagacggcagattacctccagatcctgccatctgtatatttttggttgacttccatgtcatctctacttcgttttgggctttcatccctagcttattttgtggctttttaaaaagttgatttttttgtattgngtaattctgngatccctgatgggcagtacccccgggtccctgacctggcatgcacttgctnttttttcttccaaaaagaacacacactgnnttaacttatgggtttattaaagaaggtcatgtntttgngtttggccaaacaatatggnaaaataaaaaattgttatgcaatgaaggaagcataaaagttnttccttgaaaaa

SEQ ID NO: 4839 - DNA, 233 bp, Canis familiaris
  misc_feature (49)..(49): n comprises a, c, g, or t, or includes no nucleotide
  misc_feature (55)..(55): n comprises a, c, g, or t, or includes no nucleotide
  misc_feature (68)..(68): n comprises a, c, g, or t, or includes no nucleotide
  misc_feature (115)..(115): n comprises a, c, g, or t, or includes no nucleotide
  misc_feature (121)..(121): n comprises a, c, g, or t, or includes no nucleotide
  misc_feature (205)..(205): n comprises a, c, g, or t, or includes no nucleotide
gggggtgaaactgtggtgtgtgggagtggggagcaaacttgtcttgctntctttntcaaaaaagtttntaaataagggctgtgtctttgtggattaccttcttttattcttcctnccaganctcatgctatgaggatgttgggggtaggattaacttgatttttctctattcattcttctctccttctgtctgctccctgcttanccctcggttttctcattcctctggagtt

SEQ ID NO: 4840 - DNA, 526 bp, Canis familiaris
  misc_feature (432)..(432): n comprises a, c, g, or t, or includes no nucleotide
  misc_feature (479)..(479): n comprises a, c, g, or t, or includes no nucleotide
gtacagaaaaacgccaagtacatctgcctggctaacaaggactgccctgtggacaagaggcggcgaaaccgctgccagttctgtcgcttccagaagtgcctggccgtaggcatggtgaaggaagttgtccggacagacagcctgaaggggcggcggggtcggctcccttcgaagcccaagcagcccccggacgcctcccctgccaacctcctcacgtccctggtcagggcacacctggactccgggcccagcacagccaaactggactactccaagttccaggagctggtactgcccacttcgggaaggaagatgccggggacgtgcagcagttctacgacctgctttcgggttccctggaggtcatccgcaagtgggccgagaagatccccggctttgccgagctgttccccggtgaccaagaactgctgnttgagttggccttcttggacttttattcttccccttgcttaccgttnaaaccggcccaggggaaactaattttttgtttgggcctggggttcac

SEQ ID NO: 4841 - DNA, 477 bp, Canis familiaris
  misc_feature (361)..(361): n comprises a, c, g, or t, or includes no nucleotide
  misc_feature (384)..(384): n comprises a, c, g, or t, or includes no nucleotide
  misc_feature (409)..(409): n comprises a, c, g, or t, or includes no nucleotide
  misc_feature (419)..(419): n comprises a, c, g, or t, or includes no nucleotide
gaaccacaagacttgcaggggacccgagagagggggtgagagaccgagcgcggcagcgtgggggtgagtgtggtgtgaacgaattcattagccatggatgtattcatgaaaggactttcaaaggccaaggagggagtcgtggctgctgctgaaaaaaccaaacagggtgtggcagaagcagcaggaaagacaaaagagggtgtcctctatgtaggctccaaaaccaaggaaggagtggttcatggtgtgacaacagtggctgagaagaccaaagagcaagtgacaaatgttggtgaggccgtggtgacaggggtgacagcagtagcacaaaagacagtggagggagcagggagcatcgcanctgctactggctttggcaaaaangatcagttgggcaagaatgaaaaangaggccacangaaggaattttggaagatatgccttgttgatcctgacaatgaaggcatatgaaatgcc

SEQ ID NO: 4842 - DNA, 214 bp, Canis familiaris
gcatggtgggcgtctacaacggcaagaccttcaaccagcccgagatgatcggccactacctgggcgagttctccatcacctacaagcccgtgaagcacggcaggcccggcatcggggccacgcactcctcccgcttcatccccctcaagtagccggtcggccaataaaggcaccgactcccggggaaaaaaaaaaaaaaaaaaaaaaaaaaaaa

SEQ ID NO: 4843 - DNA, 567 bp, Canis familiaris
  misc_feature (209)..(209): n comprises a, c, g, or t, or includes no nucleotide
  misc_feature (314)..(314): n comprises a, c, g, or t, or includes no nucleotide
  misc_feature (418)..(418): n comprises a, c, g, or t, or includes no nucleotide
  misc_feature (426)..(426): n comprises a, c, g, or t, or includes no nucleotide
  misc_feature (428)..(428): n comprises a, c, g, or t, or includes no nucleotide
  misc_feature (454)..(454): n comprises a, c, g, or t, or includes no nucleotide
  misc_feature (475)..(475): n comprises a, c, g, or t, or includes no nucleotide
  misc_feature (490)..(490): n comprises a, c, g, or t, or includes no nucleotide
  misc_feature (499)..(499): n comprises a, c, g, or t, or includes no nucleotide
  misc_feature (505)..(505): n comprises a, c, g, or t, or includes no nucleotide
  misc_feature (532)..(532): n comprises a, c, g, or t, or includes no nucleotide
  misc_feature (536)..(536): n comprises a, c, g, or t, or includes no nucleotide
  misc_feature (541)..(541): n comprises a, c, g, or t, or includes no nucleotide
  misc_feature (563)..(563): n comprises a, c, g, or t, or includes no nucleotide
cctgcggctccgactggatcccagcgggcagctccgggagcaagttcctggccctgctggtgaatctggcgtgtgtggaggtacggctggccctggaggagacgggcaccgaagtgaaagaggatgtggtgaccgcctgctatgccctcatggagctggggattcaggagtgcacccgctgcgagcagtcgctgctcaaggagccccanaaggtacagctcgtgagcatcatgaaggaggccatcggggctgtcatccaccacctgcagcaggtggggccagagaagcagaaggagccctttgtgtttgcttcngtgcggatcctgggggcctggctggccgaggagacctcatccctgcgcaaggaggtctgccagctgctgcccttcttgtgcgctatgccaaaaacctctaccangaaggccnangaagggaatgaacctttccaaaaggnggcaaccttgcaattttcccnaccgccccagggccncctggccanggggangttttccggttcctcttcccggttggngccncttanttgtcaaaaatgggccccgganatcc

SEQ ID NO: 4844 - DNA, 482 bp, Canis familiaris
  misc_feature (293)..(293): n comprises a, c, g, or t, or includes no nucleotide
  misc_feature (355)..(355): n comprises a, c, g, or t, or includes no nucleotide
  misc_feature (378)..(378): n comprises a, c, g, or t, or includes no nucleotide
  misc_feature (404)..(404): n comprises a, c, g, or t, or includes no nucleotide
  misc_feature (455)..(455): n comprises a, c, g, or t, or includes no nucleotide
  misc_feature (457)..(457): n comprises a, c, g, or t, or includes no nucleotide
  misc_feature (463)..(463): n comprises a, c, g, or t, or includes no nucleotide
gggggctgccggacccactggcatgttctttggatcggcacctagtcccatgggaggaatttctcctgccatgactccctggaaccagggggcaactccagcctatggtgcctggtcccctagtgtcggaagcggaatgacgccgggggcagccggcttctctcccagtgctgcgtcagatgccagtggcttcagcccaggctactctcctgcctggtctcccacgccgggctcgcctgggtcaccgggcccctccagcccctacatcccctcaccaggtggcgctatgtctnccagctactcaccgacatcgcctgcctatgagcctcgctcccctgggggctatacaccccanagtccctcctatttccctacttngccttctacttccccaccttttcgtnctacttttcaactaatccaactataattccacattaaccaacttcttcccnantttttncaattattcccaacttttt

SEQ ID NO: 4845 - DNA, 424 bp, Canis familiaris
  misc_feature (27)..(27): n comprises a, c, g, or t, or includes no nucleotide
  misc_feature (216)..(216): n comprises a, c, g, or t, or includes no nucleotide
  misc_feature (366)..(366): n comprises a, c, g, or t, or includes no nucleotide
gggtccgggatgggcacactgctcatnagcaaggtgcgcgaggagtaccccgaccgcatcatgaacaccttcagtgtggtgccctcccccaaggtgtcggacacagtggtggagccctacaacgccacgctgtccatccaccagctggtggagaacacggacgagacctactgcatcgacaatgaggctttgtacgacatctgcttccgcactctnaagctggccacgcccacctacggtgacctcaaccacctggtgtcggccaccatgagcggcgtcactacttctctccgcttcccggccagctcaatgctgacctgcgcaagctggccgtgaatatggtgcccttccccgctgcacttcttnatgcccggctttgcccactaccgcgagggggagcaagcaataccgggcgcttacgggg

SEQ ID NO: 4846 - DNA, 572 bp, Canis familiaris
  misc_feature (452)..(452): n comprises a, c, g, or t, or includes no nucleotide
  misc_feature (468)..(468): n comprises a, c, g, or t, or includes no nucleotide
  misc_feature (502)..(502): n comprises a, c, g, or t, or includes no nucleotide
  misc_feature (509)..(510): n comprises a, c, g, or t, or includes no nucleotide
  misc_feature (533)..(533): n comprises a, c, g, or t, or includes no nucleotide
  misc_feature (544)..(544): n comprises a, c, g, or t, or includes no nucleotide
  misc_feature (550)..(550): n comprises a, c, g, or t, or includes no nucleotide
  misc_feature (562)..(562): n comprises a, c, g, or t, or includes no nucleotide
aacgtcatcggtatagtaaatatctactacggataccactgatttcctactaaaagacacattatctgcaggaagcaaacaggaatcaaaaagctacagaacataaactatcatcaaacaaaacccctcttttggggcaacaacaaaatcatcgacactgcgagtcaacaaggagaacgttactttaaataagacataataaaagaaagattttttttaattttctcttttttttttcttggctttttttctcctttttcttgattctagttcttgttcaatggtggcaagtgctgattacggccaatccctgtcaatcctgggaggtttatataaatacattttgagtgttctatatttcaatgtattttgattcattttgcaattcctgtatatgcaaacttgacaaatctgtaaattgcttatagtatgtgtgatataacttcaaagtnatagactatgaccttnatgccagctgattttatctttaaatttttaaatntttcctnntcaggatcttttttgttgggccnccaaccacccntttttnaataaagaattngtttttaatt

SEQ ID NO: 4847 - DNA, 546 bp, Canis familiaris
  misc_feature (399)..(399): n comprises a, c, g, or t, or includes no nucleotide
  misc_feature (414)..(414): n comprises a, c, g, or t, or includes no nucleotide
  misc_feature (420)..(420): n comprises a, c, g, or t, or includes no nucleotide
  misc_feature (424)..(424): n comprises a, c, g, or t, or includes no nucleotide
  misc_feature (464)..(464): n comprises a, c, g, or t, or includes no nucleotide
  misc_feature (493)..(493): n comprises a, c, g, or t, or includes no nucleotide
  misc_feature (517)..(517): n comprises a, c, g, or t, or includes no nucleotide
  misc_feature (528)..(528): n comprises a, c, g, or t, or includes no nucleotide
accaccgtggcaaattcaaagtggcatcttttcgcaaaaagtacgagcttgggcccccggtggctggcacgtgttaccaggcggagtgggatgactatgtgcccaaactctgtgaacagctgtctgggaagtagggcagtgctgggagacagtagctgtcccagaagtctcaagcagtgttctcaagttcagtgatgcatgtagatttctccactttccctgtccccgttctcacaggtgaggcctgagcaatcagatagtggtttagagtgacttttcctcctgcctatcctttataattctagagagtcacatctcgggtttatgttttgatcaaaactgaactccattttggaggatattttggtactatgttggggttatcaaattgttaatatnagaagagcaacccanaatttnaaanaaaggaaaattgaggtgaaaaaccagtctatagttaatangggccaagcatcaaagaatttttaagggnggtttaaaaaaaaaaattaattgnctttgcttttntcaacctgaatccggaat

SEQ ID NO: 4848 - DNA, 431 bp, Canis familiaris
  misc_feature (134)..(134): n comprises a, c, g, or t, or includes no nucleotide
  misc_feature (269)..(269): n comprises a, c, g, or t, or includes no nucleotide
  misc_feature (408)..(408): n comprises a, c, g, or t, or includes no nucleotide
  misc_feature (416)..(416): n comprises a, c, g, or t, or includes no nucleotide
ggtttgcttagagtctgtttttcttactagagaaatgtcacatcttcattttcaggtgcgactgccatgcattgggttccaccaacgggcagtgtgacatccgcactggccagtgtgagtgccagcctggcatnaccggtcagcactgtgagcactgtgaggtcaaccactttggatttggacccgaaggctgcaaacgtaaggagctgggagcatagaactctaagtctttcctaatcccagttagaaccacagtctctcaccagctnaatctggccccatggcttacagtcaaggctgctgacctagtcatcaaaaatgctcaactcaatgaaattatccttttctaaaactggggattgagagcttctatagttcctttacagccgccttatttacatctttttnatataaanggttctggatctttt

SEQ ID NO: 4849 - DNA, 503 bp, Canis familiaris
  misc_feature (410)..(410): n comprises a, c, g, or t, or includes no nucleotide
  misc_feature (429)..(429): n comprises a, c, g, or t, or includes no nucleotide
  misc_feature (486)..(486): n comprises a, c, g, or t, or includes no nucleotide
  misc_feature (490)..(490): n comprises a, c, g, or t, or includes no nucleotide
  misc_feature (495)..(495): n comprises a, c, g, or t, or includes no nucleotide
tcatatttggatcttgttcactttctctaacttaaagttcagctaattgcctgtttaaggaagcagtatctgaaaagttacattattattgacagtggaattatatatttttactcttatgtttctctaaatgtttttcttttcccattgctgaaaaaattagaaacttgtggtcccctctaaacctcagtggtacctggaatctactgtcctcacagtgtctggcactgtccactgtggcctttcttagcatttttacctgcagaagaactttgtatggcactattgtgttgatcctattgtaaatctaaatatacatctcactggaataattaattgtatgtagcactgtgctgtgtagatagttcctattggaaaaaatgagttgaagtttatgaaagccacaaagnatgagaatctattatgttnaaatcaataaggggaaatccaaaaccccccgtttattttggcttttaggaaactggnttgnggggnaaatggta

SEQ ID NO: 4850 - DNA, 543 bp, Canis familiaris
  misc_feature (76)..(76): n comprises a, c, g, or t, or includes no nucleotide
  misc_feature (111)..(111): n comprises a, c, g, or t, or includes no nucleotide
  misc_feature (160)..(160): n comprises a, c, g, or t, or includes no nucleotide
  misc_feature (444)..(444): n comprises a, c, g, or t, or includes no nucleotide
  misc_feature (492)..(492): n comprises a, c, g, or t, or includes no nucleotide
  misc_feature (506)..(506): n comprises a, c, g, or t, or includes no nucleotide
  misc_feature (523)..(523): n comprises a, c, g, or t, or includes no nucleotide
ccagctctatacactactatagggaaagctggtacgcctgcaggtccggtcccggattccgggtcgcccacgcgtnccgaaaaaatcagagctacaaaggaaacatgctgncacggaacaatttcagtgttctgactgacataagcaaactggaactatnagaaggatcaaggctgcaaatggctttgagagccataaattgtaaaatcaatatgctaagctactggaagccaatgtggaaagcgctgtacaggagcactccagcgatccaggctggctcccaccaacgcctggcatcacgattctataaattaaatttcaacaggtttggctttttcaccaaatgggcttgcagcttctactagaaaaaaaaggcatgttctttaagtgaaggggtggggaggaggaagatgcccttcatacaagagcaagccgacagtttancttttgatgtcagaaacagctaaaccacccttctgggtgccatgaggncccaaattccaagnggggggaaaaggccccntttaaaatttgggggaaaaa

SEQ ID NO: 4851 - DNA, 618 bp, Canis familiaris
  misc_feature (162)..(162): n comprises a, c, g, or t, or includes no nucleotide
  misc_feature (370)..(370): n comprises a, c, g, or t, or includes no nucleotide
  misc_feature (402)..(402): n comprises a, c, g, or t, or includes no nucleotide
  misc_feature (435)..(435): n comprises a, c, g, or t, or includes no nucleotide
  misc_feature (448)..(448): n comprises a, c, g, or t, or includes no nucleotide
  misc_feature (497)..(497): n comprises a, c, g, or t, or includes no nucleotide
  misc_feature (528)..(528): n comprises a, c, g, or t, or includes no nucleotide
  misc_feature (564)..(564): n comprises a, c, g, or t, or includes no nucleotide
  misc_feature (582)..(582): n comprises a, c, g, or t, or includes no nucleotide
  misc_feature (613)..(613): n comprises a, c, g, or t, or includes no nucleotide
aagccaacctttaagaaggccacggtgaccctggaggaccacctggcgtgcaagtgtgagacagtggtggctgctcgacccgtgacccgaaccccggggagttcccaagacctgcgagccaagacaccccaaactcgggtgaccattcggacagtgcgagtncgccggccccccaaggggaagcaccggaagttcaagcacacacatgacaagaaggcactgaaggagaccctcggagcctaggggcatctggaggagattgagggcagggttatttaatatggtatttgctgtatcgcccccatggggtccttggagtgataatattgttcccctcgtcccgtctgtctcgatgcctgattcggacggncaatggtgcttcccttttcgcgcgtcattcgnccaacaacgggtcccttactggccgcaacaccnttgccaaaacttnggaaggaacgggggacccgactcattgtgggttcttcgtgcccaagatntggataatcttaaaaaaccaaggttgttgtnccaatccggtggtcaatggtccggggtggcaaactnaagtggccaagccttagnatgaggcttcttgacggaccagcattcaagnactca

SEQ ID NO: 4852 - DNA, 559 bp, Canis familiaris
  misc_feature (433)..(433): n comprises a, c, g, or t, or includes no nucleotide
  misc_feature (459)..(459): n comprises a, c, g, or t, or includes no nucleotide
  misc_feature (473)..(473): n comprises a, c, g, or t, or includes no nucleotide
aagctatctggtaaatgactaaattgggcttcaaggaggagcagctgtcaatctgtgcgatgtatgacagttagctgtggccaactcgggggctgtgtcatttgtcctgtcttcaaattgaggtcagagtgtcacacaagcccctccccagggagcagggtggactggagtaagttgcgtattctagctgtcagttcagtggaaacgccacatgggacttgtcactctgccacatggtaagtgacatgcaggctggcaggtcatacttggtcagcactctagagccggcctctggattgggctaaagcagcaggatccacagaggcccagcctcggcctggtgtcatacacagattgccgattcttgaatgtgtgctccgttctggctgagtctgcagaaggaagagagcaagccatcgcatgcacttctctntgagttccctacgtcctgtcacccancaaggatggccggnaaaaggcattgttaaaaaggaggtaggggaacaaaatggaccaaccatttttgcctggttgcccaaatagcacttattgttaacca

SEQ ID NO: 4853 - DNA, 631 bp, Canis familiaris
  misc_feature (397)..(397): n comprises a, c, g, or t, or includes no nucleotide
  misc_feature (413)..(413): n comprises a, c, g, or t, or includes no nucleotide
  misc_feature (434)..(434): n comprises a, c, g, or t, or includes no nucleotide
  misc_feature (473)..(473): n comprises a, c, g, or t, or includes no nucleotide
  misc_feature (502)..(502): n comprises a, c, g, or t, or includes no nucleotide
  misc_feature (554)..(554): n comprises a, c, g, or t, or includes no nucleotide
  misc_feature (630)..(630): n comprises a, c, g, or t, or includes no nucleotide
cgttgcatgaccgcttcttggaattccgctatgacctgggcaagggagcagcggtcatcaggagcaaggagccggtggccctggacacctggaccagggtctcactagagcgcaatggccgcaagggtgccatgcgtgtcagtgatgggcctcgcgtgctgggagagtccccgaaatcccgcaaggtgccacacactgtcctcaacctgaaggagccactctatgttggaggggcccctgacttcagcaaactggcccgggcagctgcggtattctctggcttcgatggcgccatccaactggtctccttgaaaggccaccagctgctgtcccaggagcacgtggtgcggtcagtggatgtctcatcttttgcccaccacccttgtactcaggcctngggccacccatgcctnaatggggccttctgcctcctngagaggccttctatgagtgccttgtgccccgggggcttntcagggctttaattgtaaaaggggctgantgagaagtcaacaagggatgtggacgcccttggcttttacggacagactacntcgagtaccttaatgccctgaatgaaagtagaaggccttcaaagaaaccacttttacttaacctgccacggaagcnt

SEQ ID NO: 4854 - DNA, 445 bp, Canis familiaris
cataatcccaaagaaacatgagcacctgaaaagtctataaagagttatagcagttgtaaaattgaaccccatccttttctgccccaaccactgtgcatagaacacaggcagtgtataattggtatccattaaaaatctgttcttgttggttgtttgtatagaaattgaataaactgcctgaggagaggtaggagttggtgccccagaataaaacttctcttttgtggaaataagtgacctctagcctatcagctaattctctgactgttgaaacccctcctcaagtacctaagtgcttctagtcccggaagaggcttattggagaaacagatccaaccatacactggcagaggccacccatgccaactcctattaaagttaacagttatattgattcttaaatgcaaacagctaggaatctcagtctttgggcattggggtgggg

SEQ ID NO: 4855 - DNA, 514 bp, Canis familiaris
  misc_feature (362)..(362): n comprises a, c, g, or t, or includes no nucleotide
  misc_feature (421)..(421): n comprises a, c, g, or t, or includes no nucleotide
  misc_feature (425)..(425): n comprises a, c, g, or t, or includes no nucleotide
  misc_feature (443)..(443): n comprises a, c, g, or t, or includes no nucleotide
  misc_feature (457)..(457): n comprises a, c, g, or t, or includes no nucleotide
  misc_feature (484)..(484): n comprises a, c, g, or t, or includes no nucleotide
  misc_feature (496)..(496): n comprises a, c, g, or t, or includes no nucleotide
attttaagactgtctgaagaaaacattgattcctcagcgggaaatggggtcctcactaaagctactgtccccatttatgcaacaggagtccttacgtgttatattcaggaagaagaccgaaaactgttagttggattcttagaagatgtaatgaccctgctttcattatctcacgctcctcttgatagcttgaaggcttcttttgtggaactgggtgcaaatccagcctaccatgagttattgttaactgttttatggtatggtgttgtccatacttcagcacttgtgagatgtactgctgctagaatgtttgagctgttggtgaagggggtgaatgaaactctggtagctcagagggttgntcctgctctcattactctcttcagtgaccctgaaatctctgtcagaattgccacaattncggnctttggcactattatggnaaccgggtattcanagagaggtgctgggaaagggtgaaaangcagttggcttntttctgggagatcctcag

SEQ ID NO: 4856 - DNA, 555 bp, Canis familiaris
  misc_feature (476)..(476): n comprises a, c, g, or t, or includes no nucleotide
  misc_feature (527)..(528): n comprises a, c, g, or t, or includes no nucleotide
ttcttcacatgctagctgtgaacttttgtttggtgctctatccaaaaaccagagcagatgagacacctaaaaatatcctcatttgcatctgctccccttccttatgagagggagggtcatccctcctgattttgccttacaacaagaaaacaactaagacaatttgggaattaattcatcgttcatctctcatgctagcatgtcaggccctccatcatttggttcaaattgatgctaaattgcaagagaacagaacaggagtctttggcatttttccactgcatgtagttgctagcagagatgattaataaaagtcccttggatgtgaattgaaaaacttggttaagtgaattagatcctctttactttgtcttctaacacaaaacatagtattatggggttcatattttttaaaggtagtgaaacaaaatataacaaaattaccacatatttataaaatatggatcacattcttnctataaaaaattaagatcaattcttctagaatggaaggagataacatggtnnggtgccaaacaaatctatattggttct

SEQ ID NO: 4857 - DNA, 289 bp, Canis familiaris
agaagaatgtctccttgaacaacttgagtgctgatcaggtaaccaaagccgtggagaatgtgctaagtggcaaagcctgaagcctccactgattgttaagagcaacaacagccccacaacttgggctttgttggactgagtaaaatgtgaaaaaatgtgttctgttcttgtgccgaagaatgctatctctggatgttcttatactcattttacccttcaacccttaacctgcaaccactgaggcaaaacagtttaatataaaaataaaactttattctgtcccatcaaa

SEQ ID NO: 4858 - DNA, 651 bp, Canis familiaris
  misc_feature (427)..(427): n comprises a, c, g, or t, or includes no nucleotide
  misc_feature (432)..(432): n comprises a, c, g, or t, or includes no nucleotide
  misc_feature (489)..(489): n comprises a, c, g, or t, or includes no nucleotide
  misc_feature (493)..(493): n comprises a, c, g, or t, or includes no nucleotide
  misc_feature (556)..(556): n comprises a, c, g, or t, or includes no nucleotide
  misc_feature (588)..(588): n comprises a, c, g, or t, or includes no nucleotide
  misc_feature (611)..(611): n comprises a, c, g, or t, or includes no nucleotide
  misc_feature (639)..(639): n comprises a, c, g, or t, or includes no nucleotide
ccgaggcgcggccagaaaagggccggaactcggtgagccggaggcggctctcggcgggactgaagagcggcgcgcaccgagggtcgtgggggcggcgcctgcgtcccctgctcgcgcgacatggccttcaacttcggggctccctcgggcacctctggcaccgccgcggcccccgcggcccccgcgggtgggtttggaggatttgggacaacatctacaacagcaggttctgctttcagcttttctgctccagctaacacaggcgctactggactctttggtggtactcagaacaaaggttttggatttggtactggttttggcacaacaactggaagtagtactggtttaggtactggtttgggaacaggactgggatttggaggatttaatacacaagcagcagcaacaagcaaaactacattangtggnctctttagtcaagcccacacaactcttacccaagtccaatcaactgataaatactgnaagngctcttttttgttcaacccttgttggaagatgagagagatgcttttttaagcaaaatggaatnactgcagccttttggggaacaggaaaaggatntttcaacaataacatccaccagnggaattacacaagaaaaacctttgccgnttaaggcagagg

SEQ ID NO: 4859 - DNA, 281 bp, Canis familiaris
ggagcatcagcctcaagttggacagcgaggagtgaggtccaaaatgtggctggccctgagttatttattcgtgtacttgaggggcccaagtggcacctgtgggaagctgggggcccagatcgctggcccccccaccccacaccctgcatccctgtctgcccctcgatgttacttccctttcatgtgggggggcacctagcctcgggggaggagggagcagtaagggcctggaggcctttccagtgtgtgtaaatccatgaaaataaagcacctgtaaccca

SEQ ID NO: 4860 - DNA, 656 bp, Canis familiaris
  misc_feature (376)..(376): n comprises a, c, g, or t, or includes no nucleotide
  misc_feature (480)..(480): n comprises a, c, g, or t, or includes no nucleotide
  misc_feature (505)..(505): n comprises a, c, g, or t, or includes no nucleotide
  misc_feature (568)..(568): n comprises a, c, g, or t, or includes no nucleotide
  misc_feature (577)..(577): n comprises a, c, g, or t, or includes no nucleotide
  misc_feature (608)..(608): n comprises a, c, g, or t, or includes no nucleotide
cttgaccctgcgggcctctccccgaggaagctcccgctcgcttcgcccggcgcggccctcggagctggaacagtgagcagaatgagtacctcacaggaccagagtggccgctccagtaatagagaaccccttttgaggtgttgtgatgcacggagggacttggagcttgctattggtggagttctccgggctgaacagcaaattaaagataacttacaagaggtcaaagcccagattcacagctgcataagccgtcatctggaatgcctccgaagccgtgaggtgtggctgtatgaacaggtagatctcatctatcagcttaaagaggagacacttcagcagcaggcccaacagctctactggttactgggccagntcaattgtcttattcatcaactggagtgcacccaaaacaaaaatctagcttatcaagtgtttgtgtgcctggagagactggcaatttgaccttcaaacctgaanattgactatctattgtttgaagaanaaacaattgttttggccaggccataacacatttggatccttaaaacatccaaatctgggcatntattggtanctaatataaaatgggcttctgggaaaaggtntttcatgccgaaaaatagatcacatacgtgttttaagaggtctgagaa

SEQ ID NO: 4861 - DNA, 677 bp, Canis familiaris
  misc_feature (489)..(489): n comprises a, c, g, or t, or includes no nucleotide
  misc_feature (525)..(525): n comprises a, c, g, or t, or includes no nucleotide
  misc_feature (560)..(560): n comprises a, c, g, or t, or includes no nucleotide
  misc_feature (570)..(570): n comprises a, c, g, or t, or includes no nucleotide
  misc_feature (581)..(581): n comprises a, c, g, or t, or includes no nucleotide
  misc_feature (595)..(595): n comprises a, c, g, or t, or includes no nucleotide
  misc_feature (672)..(672): n comprises a, c, g, or t, or includes no nucleotide
tccaatgaaaataaagaacaaactaactagtgtcttccacccgggctctcagctggaggtctcgaacctggagacagaaaggactcttctgaaacgtactcaagtctttgatttcgagtttgaatttgaaaccagttcgttttctctgcccatcgcatcttaacatgtagggcatctttctccccataggcaaaccacacagggctcactttgtcacttgtggctgctttgaagacaatgacctaactccttgacgcctctcttagggctccccggagttctattttaaggcaaaccatccccaacatgccttccaaatcggtgaaaatctatccagtcatttttctgcgcttcaataacacaaactgagccttttatctaggggcctgggtattaaaggataaaggggtccttggggattttctcaggcaaagggctcaagaataacctggcctcttctggacaattaatgtgaaagcaggatatggnccggatcttttttaggccaattaactcttacttgtntgggagagtggagcaaagaggaatgaaaatggctnaactttccgnctgtctaggtnttccaagtgcttanaagggaaaaattgatctttctttcagggaaaacttacttccatccccagtttattaattaattaccggaactggganaatgg

SEQ ID NO: 4862 - DNA, 613 bp, Canis familiaris
  misc_feature (445)..(445): n comprises a, c, g, or t, or includes no nucleotide
  misc_feature (460)..(460): n comprises a, c, g, or t, or includes no nucleotide
  misc_feature (574)..(574): n comprises a, c, g, or t, or includes no nucleotide
  misc_feature (604)..(604): n comprises a, c, g, or t, or includes no nucleotide
  misc_feature (611)..(611): n comprises a, c, g, or t, or includes no nucleotide
atatttaatagcagacaaaatagaattcaatatgaaaagcgttatgagacaaatgcaattctcaaaaattgataaaagaacattccactacaagtcatgaatctatgcatctaacaatagctccaaaatttataaaacaagtactatgagaaatgtcaagagaaagtgacaaatccacaattacagagagacaggtcaacatacttttaggaaggagacacaaataatagttaacacttactgggcacttctttgcgagtggcactgaactatacttttccatgcattatctaaagctataggaaatgttaatagtaatttgacaagtcatatacatacaccatatacatataccataaatacctttgtacctgttaatagagaataaacattttttcagacattcagtagatgttcactggaagaccacacattatgcacttgncccccaataacagtnacaggacagggacaacaggccacaccaccctggaggcaacatggctggcaaggagtccaaggaaatgaacattaccctggattggcaatagctcttgtgaagactaatttggantatgaataagggggcatactttttgcatancaatggntt

SEQ ID NO: 4863 - DNA, 628 bp, Canis familiaris
  misc_feature (506)..(506): n comprises a, c, g, or t, or includes no nucleotide
  misc_feature (510)..(510): n comprises a, c, g, or t, or includes no nucleotide
  misc_feature (541)..(541): n comprises a, c, g, or t, or includes no nucleotide
  misc_feature (562)..(562): n comprises a, c, g, or t, or includes no nucleotide
  misc_feature (602)..(602): n comprises a, c, g, or t, or includes no nucleotide
gggcctccgcgctcctcccgagatggcgaaccggggcccgagctacggcctgagccgcgaggtgcaggagaagatcgagcagaagtacgacgcggacctggagaacaagctggtggactggatcatcctgcagtgcgccgaggacatcgcgcacccgccccccggcagggcccactttcagcaatggttaatggacgggacggtcctgtgcaagctgataaacagtttatacccacccggacaggagcctattcccaagatctcagagtcgaagatggcttttaagcagatggagcaaatctcccagttcctaaaagcagcagagatctacggggtcaggaccactgacatttttcagacggtggatctgtgggaagggaaggacatggcagctgtgcagaggaccctgatggctctcggcagcgtttgcagtcaccaaggatgatggctgttacaggggaaaagccttctggtttacaaggaaagcccacagaatcggcgaggantttnagaggagcaagtttcgccagggacagaacgnaatcggcttgaaatgggcagnaacaagggggctccaagccgcatgacgggtaccgggatgnccagcagatattgtagaggttgcttc

SEQ ID NO: 4864 - DNA, 625 bp, Canis familiaris
  misc_feature (459)..(459): n comprises a, c, g, or t, or includes no nucleotide
  misc_feature (561)..(561): n comprises a, c, g, or t, or includes no nucleotide
  misc_feature (573)..(573): n comprises a, c, g, or t, or includes no nucleotide
caccaccgggcagggcaccaccggccccggcgccgccgctcgcctccccagtgtgctgactcggctccccggacctcagcaggatggaagagaagctgaagaaaaccaaaatcatctttgtggtgggagggcccggctcagggaagggcacccagtgtgagaagattgtgcagaagtacggctacacccacctctccaccggggacctcctgagggccgaggtcagctcaggctcggccaggggcaagatgctgtcggaaatcatggagaaggggcagctggtgccactggagacagtgctggacatgctccgagatgccatggtggccaaggtagatacttcaaaggcttcctgatcgatggctaccctcgggaggtacagcagggagaggagtttgagcggaggattggacaagcccacgctgcttgtgtatgtggaccaagcccagagaccatganccacggttcttgaacgtggagagacaacgggcgagtggttgcaatgaggagaccatcaaaaacgggtggggacctattcaaggcccaaaacctgtaattgcntttttaaaaaanggcatctacccaaggcaatgttaaggttcctgggcaatgtttttccaagttt

SEQ ID NO: 4865 - DNA, 631 bp, Canis familiaris
  misc_feature (439)..(439): n comprises a, c, g, or t, or includes no nucleotide
  misc_feature (483)..(483): n comprises a, c, g, or t, or includes no nucleotide
  misc_feature (523)..(523): n comprises a, c, g, or t, or includes no nucleotide
  misc_feature (540)..(540): n comprises a, c, g, or t, or includes no nucleotide
  misc_feature (565)..(565): n comprises a, c, g, or t, or includes no nucleotide
  misc_feature (581)..(581): n comprises a, c, g, or t, or includes no nucleotide
  misc_feature (592)..(592): n comprises a, c, g, or t, or includes no nucleotide
gagaggccggagcgtcgggtcggaggctgagaggctgcagcggccaggagcgaccccgccccctccccgctcgctctgggctatgtctggcttttgtggaaagcagattcaacatatcgaagggaaatgaaaacgcagacggcagcttccagatcaacagccattactggtgcaatgatgacaggagtcactcagaaaacatttgccacgaggactgtcaagacgtactgagcctcaatcttctctcagccatcagctgtgcaaaaaaagattgtctctggagcaggggggtagcatggaggttgcactgtgcaggccggccactctcctactggatgacaggatgtttctcgggatgagacaggacacagggctgccgtagagtcattccagagctcctcttctcactcaggaattcatttctccttcctcttggctntgcttcaaggtattttcttttcttccatttaccaataaacctgncataagccccaagaataaatgggttttttgggctttcctncttgaccctgtctgggnccaagcccctggttttgccttttanttgcaaaccaagaggnccccatggaanaagtggtatatttggataattattaaagattccttgggc

SEQ ID NO: 4866 - DNA, 608 bp, Canis familiaris
  misc_feature (490)..(490): n comprises a, c, g, or t, or includes no nucleotide
  misc_feature (527)..(527): n comprises a, c, g, or t, or includes no nucleotide
  misc_feature (534)..(534): n comprises a, c, g, or t, or includes no nucleotide
  misc_feature (536)..(536): n comprises a, c, g, or t, or includes no nucleotide
  misc_feature (554)..(554): n comprises a, c, g, or t, or includes no nucleotide
  misc_feature (605)..(605): n comprises a, c, g, or t, or includes no nucleotide
agctagtggcagaagacatcccactgctcttcagcctcttatcagatgtgttccccggggtccaataccaccggggcgaaatgactgcgctccgagaagagctgaagaaggtgtgccaggaaatgtacctgacatatggagatggagaagaagttggcggcatgtgggttgagaaggtcctccagctctatcagatcacccagatcaaccatggcctgatgatggtggggccctcaggaagtgggaagagcatggcttggcgtgtgctcctaaaggctttggagaggctggagggtgtggagggtgtggcccatatcattgaccccaaggccatcagcaaagaccacctttatggaaccctggaccccaacaccagggaatggacggatggactgttcacacatgtcctgcgaaagatcatagacaatgtgaggggtgaactacagaagcccccaatggattgtcttttgtggtgacgtggaccccagtnggtggagaacttgactcagtggttgatgacaccaacntttgatntngccaatggggagcgcctnaaaccttcacccaatggcgaataatgtttgaggggaggacttaaattgccncct

SEQ ID NO: 4867 - DNA, 642 bp, Canis familiaris
  misc_feature (461)..(461): n comprises a, c, g, or t, or includes no nucleotide
  misc_feature (464)..(464): n comprises a, c, g, or t, or includes no nucleotide
  misc_feature (471)..(471): n comprises a, c, g, or t, or includes no nucleotide
  misc_feature (508)..(508): n comprises a, c, g, or t, or includes no nucleotide
  misc_feature (588)..(588): n comprises a, c, g, or t, or includes no nucleotide
  misc_feature (614)..(614): n comprises a, c, g, or t, or includes no nucleotide
ctgtgctgtaactgaaccccttcagttacaaaattataggacttggtttaaaatgttctattttttaagtcattccatttgaaactttttaatgaacctgactattctaaaatctgttgttttagtgaggctctgaaatgagcaaaagtagactttttagagtagaataaatataaaaacatttatgactttccggaaactctaaatcaaagttttaaaaagatgtttggatatatttgagtactcagatcatgaaaatagaaattgctctgccaacaactaaaaggacagactgacgggaaatgagacacctggttgacttaacccttaagcagacaatgctgttaataactaatggcttctctgatatttattataagttttagtactgatcttttcccaatgctgcacactcctgtgtttggaaccttattttaatggctttgcaacaaaaatcctgnatncaggttnctataatttaagaaaagcacccaataaaggttttctnttaacagaccagatgcacccgaaatatggggctatatgataccaaacatgtttaactttttagggcaaatactcacctgnaagtttagcttaaggtggacttttgnggaaaaaaaaactttggtctcaaattca

SEQ ID NO: 4868 - DNA, 661 bp, Canis familiaris
  misc_feature (513)..(513): n comprises a, c, g, or t, or includes no nucleotide
  misc_feature (575)..(575): n comprises a, c, g, or t, or includes no nucleotide
  misc_feature (601)..(601): n comprises a, c, g, or t, or includes no nucleotide
  misc_feature (618)..(618): n comprises a, c, g, or t, or includes no nucleotide
  misc_feature (656)..(656): n comprises a, c, g, or t, or includes no nucleotide
  misc_feature (660)..(660): n comprises a, c, g, or t, or includes no nucleotide
cagataatctctctttttttagaacttggaaagttattacttactattaagcctggagctttgatagttctaaaaggttactagtgcctccagagtcactcagctctatttccagagcaactctcctagcagtggacatccctcttccctccaggtcttgtctcttcctggaatgtccacaagcagcagatacagctggtctccccacagctgctgaaaggaaccctggtgtgacctctcagcacagaaactggtcttccccgatgtgagcaggcttccggggaacacagaatccacatgaccttaagattatctacaactccatcgtggtgctgttgtcttccaggctcactggtccctcctcggccagcggctggggcctcctcaccagtggtggagagaggttcttttcaacaacctggttattcaaggaaagaggttctggactcccccattggtggttcttcaacaggaagtggcaggtggacaaggctggtgtagaatccggttttnaaagggcagtaatggattggcttttgtgaccaaggaacaaatcaatcctaagacattttatngaggggatgaatcttttgtcaagttnagtttggccttaacctntgtcaccccaagacaagtttaccctttttgggatggtnaggna

SEQ ID NO: 4869 - DNA, 560 bp, Canis familiaris
  misc_feature (319)..(319): n comprises a, c, g, or t, or includes no nucleotide
  misc_feature (439)..(439): n comprises a, c, g, or t, or includes no nucleotide
  misc_feature (459)..(459): n comprises a, c, g, or t, or includes no nucleotide
  misc_feature (461)..(461): n comprises a, c, g, or t, or includes no nucleotide
  misc_feature (464)..(464): n comprises a, c, g, or t, or includes no nucleotide
atgggtgtggctgggcaccccggtttccagcattctctgcttcccccaccacattctacattcctgtcacccacctcattgattcactgaccaaatccttaaccttagcgatggtttgggagacggggggttggatagcatcctctttcttggcccttccttattctgggaaaagagggttcttctccttgtgtgtgtctcttccccctctactcctaattcttctgctctgtttgggaagaacgtggaggaaaagctgacttctgcccccactgctcttacccctactgtagtggcctttggagatgccccctgcctncccccaccaactctcttgtgtgttggagagaaggggccctcccagcacaaaagttgcattcttcccccccttcggcccgcctcggtaatttattctaatttaataactctggcccgcccnactgagaaagggagcactgngnctntcgcccaaacctttttgtgcggcctggaaggggagaagggcttgggtgccggccaactgaagggggaacctgccggtttggttcttgtttttgggg

SEQ ID NO: 4870 - DNA, 531 bp, Canis familiaris
  misc_feature (393)..(393): n comprises a, c, g, or t, or includes no nucleotide
  misc_feature (458)..(458): n comprises a, c, g, or t, or includes no nucleotide
tataaatttaactagttgccctgtcctgcattttatctgcaatactagttataatctgctggtacataacttcttttgttgatcagattcttcctactttaaccactgagaactcttttaggttagctcctgtgtccttttgagatgtcttcatccctctgtttttttgaacacttccttatgttctggccctaagagacacttttggcttaatactgtatttttcccaacccttgacctaaaaccagccctttctctaaagaatctcagttccttttattggaaagtggtagttagaaaccaagatgtaggtgctgggtgtgcttgtagctattgggggtcaggtagttttaaaagtcagtgtatacatcataccataagtgacaatggagnttctgtatttttagtatttaataaggaattaatttcaattcttatcaaaaaaagctgggtggtgnctgagccttttataatttcttagctcttaaatttattttattaaagggaggttggaacatacttggagacaaa

SEQ ID NO: 4871 - DNA, 672 bp, Canis familiaris
  misc_feature (496)..(496): n comprises a, c, g, or t, or includes no nucleotide
  misc_feature (609)..(609): n comprises a, c, g, or t, or includes no nucleotide
  misc_feature (623)..(623): n comprises a, c, g, or t, or includes no nucleotide
attttaaatgttctttagaagaacattttgctaaagcatgactaaactgcaaaaaaacaaaaaacaaaaaaaagagctactgtatttagacttaggataaaaggcagagtaacattacttaaaaaaaggatatgtttacatttaattttggctaccaggagtttattttctttaatttaaaatttttttgccaatggtgccaagtaatgtgaatgctaatattgcttaaaaaattaagttacttttgctaaacagataatcataagatgaatccgtatatagcttaacaccatccactcactccaacaaaagaacacttagaacgatcaaaatctgacaaaagaaatagtgtgaaaagtaggaaaacgtctgacgttttcatatctcctgctggaaatcagaaaatgtaaccaaaaaatgcacaaaaaatactaaaaaatttaaaagatccaactggtctcgtagggtggcatgggctatactctttccatataangggggccaaagaaatctgtgctttaaaaattaaactactaacgttaaatgggagaataaagctcgcatttctgatgcccgttaaaattccaggttaagttcaggatcagtggngtaaactgaaaaanagttttttttggtttggtggcacctgaagtaaactaaggttgtgggaag

SEQ ID NO: 4872 - DNA, 606 bp, Canis familiaris
  misc_feature (444)..(444): n comprises a, c, g, or t, or includes no nucleotide
  misc_feature (469)..(469): n comprises a, c, g, or t, or includes no nucleotide
  misc_feature (515)..(515): n comprises a, c, g, or t, or includes no nucleotide
  misc_feature (537)..(537): n comprises a, c, g, or t, or includes no nucleotide
  misc_feature (541)..(541): n comprises a, c, g, or t, or includes no nucleotide
  misc_feature (552)..(552): n comprises a, c, g, or t, or includes no nucleotide
  misc_feature (590)..(590): n comprises a, c, g, or t, or includes no nucleotide
ttctttctaccacttgagggggctgactcacagaaggggacagatagagtgaacaacactcctatcccattggctgctattctgaaaccattcgattgacttcctgaggttgggctgggtgggggctgctcagctggccactgcaaattatacctgcccatgtttctaaaagcgatttccagctgttctgtaaatacctggtgctaacgtcccatgccgctccgccgtgatgcacctgcccacccgcacgaaggtcccctgttggaacagatgtggggatgttgctttgtcatgtacaggttaccctttggttatttttttctttatgccccttgaaactaatcctgtcaagaaaccataccgggctagctgaagggtggggagagggcagatgagccccaccatgctctggagagaacataacctgcaataaaacaagtctanaaggctaagcttgcccgggggtggngggcaaggacaagttttgttccttgtcaagttggcccctctgcttntccgggggaattggttggttcntaanacctggctggnttttgggcctttttccggggccaacttgctggcccccnaaattccccagggaga

SEQ ID NO: 4873 - DNA, 454 bp, Canis familiaris
  misc_feature (165)..(165): n comprises a, c, g, or t, or includes no nucleotide
  misc_feature (417)..(417): n comprises a, c, g, or t, or includes no nucleotide
agccccgccagaccccgctccgcccgcgccccgctccactgccgaggctcccgcagccccggcatcggccccgctgagccctccccgggggctatgggtgcgcccccgggctaccgaccctcggcttgggtgcatctgctccaccagctgccccgcgccgacttncagcttcgcccggtacccagcggtttcgcgccccaagagcaagaataccagcaggccctgttgctggtggtggccctggcaggcctgggcttgggcctgagcctcattttcattgccgtctacctcatccgcttttgctgctgccggaccccagagccctccggggccaagagtcccccaccagggggaggctgtgtcacatggagctgcattgctgccctactcgtcggctgcgccggcattggcatcggnttctatggcaacaagcgagaccaagtgatgggggtgt

SEQ ID NO: 4874 - DNA, 604 bp, Canis familiaris
  misc_feature (481)..(481): n comprises a, c, g, or t, or includes no nucleotide
  misc_feature (494)..(494): n comprises a, c, g, or t, or includes no nucleotide
  misc_feature (505)..(505): n comprises a, c, g, or t, or includes no nucleotide
  misc_feature (553)..(553): n comprises a, c, g, or t, or includes no nucleotide
  misc_feature (569)..(569): n comprises a, c, g, or t, or includes no nucleotide
  misc_feature (589)..(589): n comprises a, c, g, or t, or includes no nucleotide
agggaaaggacatgcatgtgctgtaagttcctaggtgcaagctttttcttgttctgttttaaacagctttataaactattgttcatagaagatattatgtacatttatttcagataaaggaaaataagtttactttgtatctgaactcaaaacaaagtagttgtatattttaacatctgaaattgggatttcccgatgtgacacatcactaatgcaaacccttccagcctatcagacaccaggctgcctactggtaatctgtgtacagtatataaacatgtaaaaataggttgtattttactctatgtatgatgctaatcaatgaacactttatttattttacagagaaaacttatctgtgaactttactatatatctgtttattttattttattattttttttttaataaaaaaagggttttaaatgctatgcagtcattagtagaaacggtttaaggatgctggctggcttgtactctntatggctgcaggnaatcaggatcnttttgcatggatccaagggagtagttactcaagaaagggctggattgntttcctggtccagtgngcttttttaaaaggactggnttagatatgctccat

SEQ ID NO: 4875 - DNA, 568 bp, Canis familiaris
  misc_feature (420)..(420): n comprises a, c, g, or t, or includes no nucleotide
  misc_feature (422)..(422): n comprises a, c, g, or t, or includes no nucleotide
  misc_feature (425)..(425): n comprises a, c, g, or t, or includes no nucleotide
  misc_feature (460)..(460): n comprises a, c, g, or t, or includes no nucleotide
  misc_feature (500)..(500): n comprises a, c, g, or t, or includes no nucleotide
  misc_feature (526)..(526): n comprises a, c, g, or t, or includes no nucleotide
  misc_feature (531)..(531): n comprises a, c, g, or t, or includes no nucleotide
  misc_feature (542)..(542): n comprises a, c, g, or t, or includes no nucleotide
gaagtgtagacaggttccacctgaccccatcctggaaagtccttttgaagagatggccctggtgaggggcggctggctgtggagacagagctccatcctccgccgctggaagcggaactggttcgccctgtggctggatgggaccctgggctactaccatgatgagactgcacaggatgaggaggatcgcgtgctcatccagttcaacgtccgcgacataaagattggccaagagtgccgtgatgtgcagcccccagagggccggagccgagatggcctgttgactgtgaacctccgggagggctcccgcctacacttgtgtgcagagaccaaggatgatgccatagcatggaagacggcactgctggaggcgaactcaccccggtacgcgtctacaggccgtaccaggactactattangnggnacccccaaacgcgcacgaaagccacatatattcgnagttctacggaccctacgcaagccccggtgtgaccacgtngtagtgcgggagggatccttgtcagngttgngcttccgttgncatggcatgcttccgggcttgcacaa

SEQ ID NO: 4876 - DNA, 641 bp, Canis familiaris
  misc_feature (409)..(409): n comprises a, c, g, or t, or includes no nucleotide
  misc_feature (414)..(414): n comprises a, c, g, or t, or includes no nucleotide
  misc_feature (463)..(463): n comprises a, c, g, or t, or includes no nucleotide
  misc_feature (466)..(466): n comprises a, c, g, or t, or includes no nucleotide
  misc_feature (520)..(520): n comprises a, c, g, or t, or includes no nucleotide
  misc_feature (522)..(522): n comprises a, c, g, or t, or includes no nucleotide
  misc_feature (526)..(526): n comprises a, c, g, or t, or includes no nucleotide
  misc_feature (562)..(562): n comprises a, c, g, or t, or includes no nucleotide
  misc_feature (589)..(589): n comprises a, c, g, or t, or includes no nucleotide
tgttggggggtttcggggggtcgcaggagctgctgccgccgctgccgccgctgccgcgtttgatcctttgcgatggcaggctttgagaacttaaacacggatttctaccagaccagttacagcatcgatgaccagtcacaacagtcctatgattacggaggaagtggaggaccctatagcaaacagtatgctggctatgactactcgcagcaaggccgatttgtccctccagagatgatgcagccacaacagccatacaccgggcagatttttcagccaactcaggcatacactccaacaacacctcagccattctatggaaacaattttgaagatgagccacccttattagaagaattaggtatcaattttgaccacatctggcaaaaaacactaacagtgttacatncgttnaaagtacagatggcagcatcatgaatgagactgatttggcaggaccaanggntttttgccttgcctttggagcccgttgttactggctggcaaaatccagtttggntntgtntttgggatcaggcaattggatgtctaggaaaggttngtttctaaattaaagagtatgacaggngtttcattttggtgtgggggaggggcctgggaattggtttttccatgaccca

SEQ ID NO: 4877 - DNA, 411 bp, Canis familiaris
atcttctgtaggaaggtacggcttttccctatcaccccaaccacaccgccagtccattcttagggaaccgcacaccaggactggtgtgttttagctttcagcctttggggttatttgaccaacaaacagtctttccggaagaataaagcagtccccagggattaacagatcagaatgttcacacaacttcatctttttctaacactgagcatgaaggtagcagaggctggtgtgattctaggctgttcttctaaccaaactaattttttcactgctgaccagtgaggcaggggttgcactggaccaaaggctgaagcttggccatctagcattccaagcaacatggtttcttctaagcattccttttattctgtattccaccctgggtgggcctgaacctgggagtgcagg

SEQ ID NO: 4878 - DNA, 605 bp, Canis familiaris
  misc_feature (416)..(416): n comprises a, c, g, or t, or includes no nucleotide
  misc_feature (506)..(506): n comprises a, c, g, or t, or includes no nucleotide
  misc_feature (524)..(524): n comprises a, c, g, or t, or includes no nucleotide
  misc_feature (545)..(545): n comprises a, c, g, or t, or includes no nucleotide
  misc_feature (563)..(564): n comprises a, c, g, or t, or includes no nucleotide
  misc_feature (576)..(576): n comprises a, c, g, or t, or includes no nucleotide
agccacagcgtgcggggcgagccagcgagagggcgcgagcggcggcgctgcctgcagcctgcagcctcggccggccggcgagccagtgcgcgtgcgcggcggcggcctccgcggcgaccggggagcggacgcacggaccggcgagcgggcgagcgggcgagcggtgcgggcgcgaggcgaggccgagccacgagcgacatgggcgaccgagagcagctgctgcagcgggcgcggctggccgagcaggcggagcgctacgacgacatggcctccgccatgaaggcggtgacagagctcaatgaacctctttccaatgaagatcgaaacctcctctctgtggcctacaagaatgtggttggtgccaggcgatctttctggagggtcataacaagcattgagcagaaaaccatggctgntggaaacgaaaagaaattggagaaaagttaaagcttaccgggagaagattgagaaggaactggaaacagtgtgcaatgatgtcctggttntgttgacaagttctcatnaaaactgcaatgatttcagtntagagcaaggtatttttnntgaaatgaaagngattactaccgttcttgcaaagtagtttc

SEQ ID NO: 4879 - DNA, 521 bp, Canis familiaris
  misc_feature (445)..(445): n comprises a, c, g, or t, or includes no nucleotide
  misc_feature (515)..(515): n comprises a, c, g, or t, or includes no nucleotide
  misc_feature (518)..(518): n comprises a, c, g, or t, or includes no nucleotide
gtcaggtagaggcaactgacttcatttgtgccacacgcatgggcattgcagccttgtgctcccccaggcctgcagccgcctggggcccaagttgcagtgagcagggtggggtctgggaggggttgagaggcaggaatgggggtcagaagaaacgggagcagctcttgggctgaatataaagataggggagccagaaatgggcagctctcccagggagtgagcagctactgtaacttttttaaattaagacaaaaagccttgaagaaaatgactttatttttctaagtgtaacctcagtatttatgtaatttgtacaggggccgtgccctaccccactctgccccctttggggtagaccttgaggatgggccagcatagggggagggtcttttaccccgtgtcagagcctaccttcaccccctttattcagaaagggagctttttnaaaacagggcaacagttggggtagaggtttattaaccctgtgactggcttaagaggaacaatcctgcttntgnatt

SEQ ID NO: 4880 - DNA, 640 bp, Canis familiaris
  misc_feature (374)..(374): n comprises a, c, g, or t, or includes no nucleotide
  misc_feature (386)..(386): n comprises a, c, g, or t, or includes no nucleotide
  misc_feature (458)..(458): n comprises a, c, g, or t, or includes no nucleotide
  misc_feature (469)..(469): n comprises a, c, g, or t, or includes no nucleotide
  misc_feature (509)..(509): n comprises a, c, g, or t, or includes no nucleotide
  misc_feature (541)..(541): n comprises a, c, g, or t, or includes no nucleotide
  misc_feature (562)..(562): n comprises a, c, g, or t, or includes no nucleotide
  misc_feature (609)..(609): n comprises a, c, g, or t, or includes no nucleotide
  misc_feature (619)..(619): n comprises a, c, g, or t, or includes no nucleotide
  misc_feature (626)..(626): n comprises a, c, g, or t, or includes no nucleotide
  misc_feature (634)..(634): n comprises a, c, g, or t, or includes no nucleotide
accgaggcccccctgaaccccaaagccaaccgtgagaagatgactcagatcatgttcgagacgttcaacaccccagccatgtatgtggccatccaggctgtgctgtccctgtacgcctctggccgcaccactggtattgtcatggactctggggatggcgtcacccacactgtgcccatctacgaggggtacgccttgccccacgccatcctgcgtctggacctggctggccgggacctgactgactacctcatgaagatcctcacggagcgtggctacagcttcaccaccactgctgagcgggagatcgtgcgtgacatcaaggagaagctctgctacgtcgccctggacttcgagcaggagatggccacggncgcgtcctcgtnctccctggagaagagctacgagcttgcccgacgggcaggtgatcaccattggcaacgagcgggttccgttgncaaaggcactntttcaggctttctttttgggtattggagtcctggggcatncacgagaccacttttaactcatcatgaagtgngacgggggcattcggaagganctttacgccaacacggggctgtttgggggacacatgtccccggattnccacaggtgnaaaaagnaataaaancctggc

SEQ ID NO: 4881 - DNA, 606 bp, Canis familiaris
  misc_feature (424)..(424): n comprises a, c, g, or t, or includes no nucleotide
  misc_feature (487)..(487): n comprises a, c, g, or t, or includes no nucleotide
  misc_feature (507)..(507): n comprises a, c, g, or t, or includes no nucleotide
  misc_feature (515)..(515): n comprises a, c, g, or t, or includes no nucleotide
  misc_feature (568)..(568): n comprises a, c, g, or t, or includes no nucleotide
  misc_feature (576)..(576): n comprises a, c, g, or t, or includes no nucleotide
  misc_feature (583)..(583): n comprises a, c, g, or t, or includes no nucleotide
aaggcgaaaagatatgttatgctattaatttgggaaaagaaatcattgaggttcagaaggcccacgacctggtttcagaatgctgacaatcgtttgtggaatgtcctctggatgccttgatactgagagatgggagggaaacagaaatggttgacaaccttcctacccatctacaaatgttattttaggtgctttgtggtaagtctttttcttagattgtactgttctgtgctcagaatgaaagttaatgaaaaaatgcattgttcactttattcaattgtcatctcttcagtttctagtacttttttaaaaatggtaaaagcctagatttataatttgataaacactaagtatttcctattaatataacctatttttgtattttacttaatgaactttaagtgcctgtcactctgaaaattgngtatttataatcaagcttgtctcacaggtgggcctaatacattaatttgtgcactcaagtgangagccctgctttaaggcctngcactacnaaactggagggctaggtttgatcatttttcagacctgccataaaaaactagcngatgaggnccccaanggtggttagttttcaatggaact

SEQ ID NO: 4882 - DNA, 518 bp, Canis familiaris
gaagttgagtggtggggagaagcagcgtgtcgccattgctcgcaccattctcaaggctccagacatcattctgctggatgaggcaacatcagcgctggatacgtctaacgagagggccatccaggcttctctggccaaagtctgtgccaaccgcaccaccatcgtagtggcccacaggctctcaaccgtggttgatgctgaccagatccttgtctttaaggacggctggatcgtggagagaggacggcacgaggctctgttgtcccgaggtggcatgtatgctgacatgtggcagctgcagcagcggggacaggaagaagtctctgaagacaccaaacccctggactgagatatggtgaccaaggctgtggccacgtccctcccaaaggataatccagtggggaagaagatgtagcccttttcctggtatatttcaagccaagtggttggggtatggtgctagctataggagggaaaaagaacctttcagagaacacttttttgggggaaataaaaaa

SEQ ID NO: 4883 - DNA, 667 bp, Canis familiaris
  misc_feature (473)..(473): n comprises a, c, g, or t, or includes no nucleotide
  misc_feature (476)..(476): n comprises a, c, g, or t, or includes no nucleotide
  misc_feature (508)..(508): n comprises a, c, g, or t, or includes no nucleotide
  misc_feature (599)..(599): n comprises a, c, g, or t, or includes no nucleotide
  misc_feature (645)..(647): n comprises a, c, g, or t, or includes no nucleotide
aagccctaactcagcctactttatagcataagggaccatagtgtctgtgtagaccaagggggcagctggccttacaccttattaaagaagagaagcagggtattgtcagcatcttctcactcccttctccttgataacagctaccatgacaaccctgtggtttccaaggagcttagaatggagagaaattagctcatatgaaaaaaagactggcctaaggaacagcagttgttagttgctaatggtgtaaactgacccagccctctggtagacacaggatagataactctttggatagcatgtcttttttctgttaattagttgtatactctggcctctgtcatatcttcacaatggtgctcttttcatggggtattagccattcagttacagaagatgatttgaagatcttgatttgtttcagaatgatgcatatttcacatttttcaggttgggtatactttgtttggggntgnacccagaagggctaagagaaaggatctttggntatgattctctacaaaggaatatggacgttaacattgaaatacattaaaatggctagttcatacatctactaaatttttccaaatatttgnttttgaagaaacaaaatggtgaattgacctaatggaaaacctattnnntgactttttaagtagggggg

SEQ ID NO: 4884 - DNA, 391 bp, Canis familiaris
  misc_feature (69)..(69): n comprises a, c, g, or t, or includes no nucleotide
  misc_feature (110)..(110): n comprises a, c, g, or t, or includes no nucleotide
  misc_feature (169)..(169): n comprises a, c, g, or t, or includes no nucleotide
  misc_feature (171)..(171): n comprises a, c, g, or t, or includes no nucleotide
  misc_feature (247)..(247): n comprises a, c, g, or t, or includes no nucleotide
  misc_feature (251)..(251): n comprises a, c, g, or t, or includes no nucleotide
  misc_feature (296)..(296): n comprises a, c, g, or t, or includes no nucleotide
  misc_feature (305)..(305): n comprises a, c, g, or t, or includes no nucleotide
  misc_feature (331)..(331): n comprises a, c, g, or t, or includes no nucleotide
aaaaagaagaagagaaacaaaggattataaaagcccaaacaaacaacaacaactaaaggtcagtctgtntcccgggcctgacagatttttccagttttgtccgtgtcttntggccccaatcacctggggccccgggtgactcctcaagcataatcgctgactaggcttntnttttcacccgacaccagtcttttcacttcaggcgctgggtcacgttggccagggcaactgcgaaggcctgcacagntganaaggggtactggaagtctaaaatgtacgcgttgccatcaatcctnccaaactgnattacctgccgccctccagctaaatntggaagttctttgccgactcctgggtcacccgccccccgaagtcaagttggtacacctgg

SEQ ID NO: 4885 - DNA, 628 bp, Canis familiaris
  misc_feature (430)..(430): n comprises a, c, g, or t, or includes no nucleotide
  misc_feature (441)..(441): n comprises a, c, g, or t, or includes no nucleotide
  misc_feature (447)..(447): n comprises a, c, g, or t, or includes no nucleotide
  misc_feature (463)..(463): n comprises a, c, g, or t, or includes no nucleotide
  misc_feature (473)..(473): n comprises a, c, g, or t, or includes no nucleotide
  misc_feature (556)..(556): n comprises a, c, g, or t, or includes no nucleotide
cggggcggcgtccgggacagggcgggggcggccccggggcggggggccggggcccggggaccccccacccagcgagacacacaagctggtggtcgtgggcggcggcggcgtgggcaagagcgcgctgaccatccagttcatccagtcctactttgtgtctgactacgatcccaccatcgaagactcctatacgaagatctgcacggtggatggtgtcccggcccggctcgacatcctggacaccgcaggccaggaggagttcggtgccatgcgggagcagtacatgcgcgctggccacggcttcctgctggtgtttgctattaatgaccggcagagtttcaacgaggtgggcaagcttttacgcagatccttcgagtcaaggaccgagacgatttccccatcgtgttggttgggaacaaggcttatctgnagacacagcgncaggtnccccgatctgaagctnttgcttttgnggcttccacacgtgggctaatttgagggctcagccaaactgcgcctaatgtggacgaggcctttaacaacttgtgcggctgtncggaagtaccaggaagaaggaagtttcggccaagccaccaatgccccaaggaagaaagacggaggttgtcct

SEQ ID NO: 4886 - DNA, 637 bp, Canis familiaris
  misc_feature (404)..(404): n comprises a, c, g, or t, or includes no nucleotide
  misc_feature (521)..(521): n comprises a, c, g, or t, or includes no nucleotide
  misc_feature (529)..(529): n comprises a, c, g, or t, or includes no nucleotide
  misc_feature (614)..(614): n comprises a, c, g, or t, or includes no nucleotide
agtgcgcctgtggtggctgtggccggcctcggtgactcctaccagttctttcgggacgtctcagcggactttgagggccagagtcccaagtgtgcccagggtgtgcgggacgcattccagcagatccaggacttgtgctttcagggagcctgtgacgtggtcagccgggagtttggcacctgccagcccctgtccagccggaaggacctgacccagctctttgggtttgcccggaacgccttcactgtgctggccatgatggactacccataccccacccacttcattgcgcaccttcctgccaacccagtcaaggtcggctgtgaccggctgctgagtgagagccagagcatcaaggggctaagagcactggcaggtctggtgtacaactcctcgggcaccgngccctgctatgacatctaccttcagtacaagcctgtggaaacctacggctggggttaagcccaatgccaaagctggattacaaggctgaccgagataaactgactttcagaacaagngaagactnttccgagctgcattatgaccctccgcagaagactgctggaactggggggtggctcgaggatggttcaacactttggggagactanaggcagaaatctttttaagggac

SEQ ID NO: 4887 - DNA, 608 bp, Canis familiaris
  misc_feature (493)..(493): n comprises a, c, g, or t, or includes no nucleotide
  misc_feature (508)..(508): n comprises a, c, g, or t, or includes no nucleotide
  misc_feature (524)..(524): n comprises a, c, g, or t, or includes no nucleotide
  misc_feature (535)..(535): n comprises a, c, g, or t, or includes no nucleotide
gctgcggcgccgggctacccggaggcggatcaacaagcgaggagcgaagagctgcaacgctcatctgcggggtggtgtgagggcctccccctccaggcctcgcccctgccctcttccttttttctcttctggccactccggccctcctccttcccctcgcttcgcttgtactttggacacctttccctagatgtgacgtgtctcctgttcccttccggccctgcccgcctccctgtaccagagccgtgacctctcgaggccccacctccgctgagctcccggggccgggggagcaggggggcacccagggtggagtccgtgactgccaccctgaagtcaggccgtccaggggccgccacgggccgccacagctgcgatggcaagcccgggagaaggactggatggaggggccggctgggggggtggggcccgggagaggggacagggagggaatgtgtgccggggttaaaaaatgtttgacaagtggtgaagnctaaaagcttgttcntggacgggccaaaatncggatgcccanatccggcttaggatgggggaatggccacggatgggccccccaaaaccaagggcagggggtgtctggggttcct

SEQ ID NO: 4888 - DNA, 605 bp, Canis familiaris
  misc_feature (468)..(468): n comprises a, c, g, or t, or includes no nucleotide
  misc_feature (476)..(476): n comprises a, c, g, or t, or includes no nucleotide
  misc_feature (535)..(535): n comprises a, c, g, or t, or includes no nucleotide
  misc_feature (543)..(543): n comprises a, c, g, or t, or includes no nucleotide
  misc_feature (575)..(575): n comprises a, c, g, or t, or includes no nucleotide
  misc_feature (596)..(596): n comprises a, c, g, or t, or includes no nucleotide
gcgggggaactggttctgggttcacctccctgctgatggaacgtctctctgtcgattatggcaagaagtccaagctagagttctccatctaccctgccccccaggtgtccacagctgtagtagagccctacaactccatcctcaccacccacaccaccctggagcactctgattgtgccttcatggtagacaatgaggccatctatgacatctgtcgtagaaacctcgatattgagcgcccaacctacactaacctcaaccgccttattagccagattgtgtcctccatcactgcttccctcagatttgatggagccctgaatgtggatctgacggagttccagaccaacctggtgccctatccccgcatccacttccctctggccacatatgcccctgtcatctctgctgagaaagcctaccatgaacagctttctgtagcagagatcaccaatgcatgctttgagncaagcaancagatggtggaaatgtgaccctcgccatggtaaaacatggcttgttgctggtgtaccgnggtgacgnggttccaaaaagtaaaggttgcattgcacatnaaaacaacgcagatcagttgnagactgggg

SEQ ID NO: 4889 - DNA, 442 bp, Canis familiaris
  misc_feature (430)..(430): n comprises a, c, g, or t, or includes no nucleotide
gatctagtgaaaacacaaatgtgtaactatgattagacttttgggcaacattttatcccttatttaaatacaaaattttaaagtaaaattgaggtctaggatagggtagaaaaataaaagtaacgatttaggtaaataaaattgtctgtcttagttttatagaatatattaaaatatattaaatacatttattggcattttctttctcctaaaacttatctagtgagaacttaaaaataaaggtaaaatgctgcctgaaaataatgtccaagcacctttgactaggataacattttcactacttgtgtgacactgtgtgttgcatgaagtaggatttgggtatacagtaaatgcttctaaaaggcattgtgcatattgacatatccaataatctgaaccgtgttcagcaaacttaattcaggaaagtggnggtctacacaaa

SEQ ID NO: 4890 - DNA, 601 bp, Canis familiaris
  misc_feature (144)..(144): n comprises a, c, g, or t, or includes no nucleotide
  misc_feature (219)..(219): n comprises a, c, g, or t, or includes no nucleotide
  misc_feature (223)..(223): n comprises a, c, g, or t, or includes no nucleotide
  misc_feature (309)..(309): n comprises a, c, g, or t, or includes no nucleotide
  misc_feature (367)..(367): n comprises a, c, g, or t, or includes no nucleotide
  misc_feature (449)..(449): n comprises a, c, g, or t, or includes no nucleotide
  misc_feature (474)..(474): n comprises a, c, g, or t, or includes no nucleotide
  misc_feature (476)..(476): n comprises a, c, g, or t, or includes no nucleotide
  misc_feature (504)..(504): n comprises a, c, g, or t, or includes no nucleotide
  misc_feature (558)..(558): n comprises a, c, g, or t, or includes no nucleotide
  misc_feature (577)..(577): n comprises a, c, g, or t, or includes no nucleotide
ggttcctgggccttctccacagcagccgtggcgtccgatcgtgtctcaatccattctctggggcatatgacgcctgtcctgtcgccccagaacctgctgtcttgtgacacacacaaccagcagggctgccgtggtgggcgtctngacggtgcctggtggttcctgcgacggcgaggggtcgtgtctgaccactgctacccgttcgtgggccgtgagcangacnaggctggcccggcgccccgctgtatgatgcacagccgggccatgggtcggggcaagcgccaggccactgcccgatgccccagcagncatgtccatgccaatgacatctaccaggtcactcctgcctaccgcctcggcaccaacnagaaggagatcatgaaggagctgatggagaatggccctgtccaagctctcatggaggtgcacgaggacttcttctgtaccanggcggcatctacagccacacaccantnagccttgggaggcccgagcgatacccgnccgcattgggaccactcggtcaagaatcacaagggtgggggagaggagaccttnccgcatggaaggacgcttnaatactgggacgggggccaactcg

SEQ ID NO: 4891 - DNA, 617 bp, Canis familiaris
  misc_feature (520)..(520): n comprises a, c, g, or t, or includes no nucleotide
  misc_feature (562)..(562): n comprises a, c, g, or t, or includes no nucleotide
gcgccaacatggcggccgagcgcaagacgaaactgtccaagaacctgctgcgcatgaagttcatgcaaagaggactggattcggagaccaggaaacaactagaagaggaagaaaagaaaatcattagtgaagagcactggtatttggatttgccagagcttaaagaaaaagaatgtttcataatagaagagcagagtttcttgttatgtgaagatcttctctatggaagaatgtcattcagaggatttaatcctgaggttgagaaattaatgcttcagatgaatgctaaaaacaaagtggaagaagttgaaagtgaagcagtggagcttgatgtgtcagatgaagaaatggccagaagatatgagaccttggtggggacaattggaaaaaagtttgccaagaagagagaccgtgctaattatgaagaagatgaaaatggacacataaaaccaacagttaaagtaaagaagatgtttttaaagccccaggattaaagtagatgctttaagacagagctcanggaagcctcgtaagagttacatattgtggactcatctgtggnctctggtagctattaatactatgatggttatttgtaaagaaatggataattttga

SEQ ID NO: 4892 - DNA, 390 bp, Canis familiaris
  misc_feature (180)..(180): n comprises a, c, g, or t, or includes no nucleotide
  misc_feature (251)..(251): n comprises a, c, g, or t, or includes no nucleotide
  misc_feature (311)..(311): n comprises a, c, g, or t, or includes no nucleotide
  misc_feature (313)..(313): n comprises a, c, g, or t, or includes no nucleotide
  misc_feature (340)..(340): n comprises a, c, g, or t, or includes no nucleotide
  misc_feature (349)..(349): n comprises a, c, g, or t, or includes no nucleotide
gacattggcagcactttgtgaaatttcccctagaaacacgtctttggaaaagtgccctgtgagttcacctctccccgataacagcgatttgttcggagcagtctggtataagcggaatgaaacccgtaggccgagggagagctcaagtcagcacgctggggacagacggtggcaaaaatntgtttcgtggcagagagctaggaatatccgagtgctccacccgcagactggggactcgccctgcaggcagntgaccctgctcccccaggaccaaccgggggacaggaccccccgccctttcccctattttntncccgcccctgggtctgccttggactgncgaaccttntgaattttctgggacctgggacctcaagggcaagaaagaag

SEQ ID NO: 4893 - DNA, 581 bp, Canis familiaris
  misc_feature (436)..(436): n comprises a, c, g, or t, or includes no nucleotide
  misc_feature (439)..(439): n comprises a, c, g, or t, or includes no nucleotide
  misc_feature (462)..(462): n comprises a, c, g, or t, or includes no nucleotide
  misc_feature (465)..(465): n comprises a, c, g, or t, or includes no nucleotide
  misc_feature (471)..(471): n comprises a, c, g, or t, or includes no nucleotide
  misc_feature (534)..(534): n comprises a, c, g, or t, or includes no nucleotide
  misc_feature (538)..(538): n comprises a, c, g, or t, or includes no nucleotide
  misc_feature (541)..(541): n comprises a, c, g, or t, or includes no nucleotide
  misc_feature (559)..(559): n comprises a, c, g, or t, or includes no nucleotide
  misc_feature (571)..(571): n comprises a, c, g, or t, or includes no nucleotide
aagggaccattgtacattttgaacaatagacagagatggtatcacgaggactcttcttgaaatatggaaatcccgtctggagatcagtggccacgttaccacaggccctggttcatattttcatcaatctaaggtgcagtttctaaatttgtaagagtaggtgtaaaaaaaaaaagtgcttcttatctttgttaacattgtattttttttttcttgatgtatttctctcttgattactcatgtttatgttgtgagcacatggaaacagtgatgctaatgcatggctagttgcctttttaagattgtgacaccagacttaccttttaaagcttagtatagagacaattttactggaaataactactgtgaactattgaagaatgatctctttgtgatttaagcagtggctggattggaacttttaatatgctaatgnggnacattaattacctttatgaaagnggnatattnaaaaaaagcacactaacccctccgaagtggtttacctactttaaaacgtttaaacggatggcncctntgnaactatccctccaagggnatgaatatttgnaaaggcttca

SEQ ID NO: 4894 - DNA, 612 bp, Canis familiaris
  misc_feature (392)..(392): n comprises a, c, g, or t, or includes no nucleotide
  misc_feature (517)..(517): n comprises a, c, g, or t, or includes no nucleotide
  misc_feature (532)..(532): n comprises a, c, g, or t, or includes no nucleotide
  misc_feature (600)..(600): n comprises a, c, g, or t, or includes no nucleotide
  misc_feature (602)..(602): n comprises a, c, g, or t, or includes no nucleotide
atctcttaattttggcttttaacagtggccaaagacttggtcagcctatttcttggttccttgatgctttaaaatttcagtagcaatgcattttaacctgctgaatacaactctggtgaataggtggcccattctcccgttaggagctgcttactctgctgtaaaagatggtttctcagaccatagcttaagtcagttcagttttcttccaagaaactgctctggagtaaaatgtccaggtttggtttctcctggacatatccgggcagccacagcagcactgcctcatgttctgcgtgcctgttgtggcaagatttctgttcctgcattatgatctcctcaggatatctgtgctcccttgttccacaactggccgtcccctccctcttctnctcccctcccccttctcccccttcccctctcctcagcccacaagctattgattccacataggctcaagtctgggaacatgggctgaaggctttggtgcactgcagcattttcttccagtagctgngaaggatgtactttntaacccaaggagaatttatcaagagcgtacatactagggtggatgtacctttggaccccacactaaananatcttgttaa

SEQ ID NO: 4895 - DNA, 608 bp, Canis familiaris
  misc_feature (450)..(450): n comprises a, c, g, or t, or includes no nucleotide
  misc_feature (481)..(481): n comprises a, c, g, or t, or includes no nucleotide
  misc_feature (511)..(511): n comprises a, c, g, or t, or includes no nucleotide
  misc_feature (536)..(536): n comprises a, c, g, or t, or includes no nucleotide
  misc_feature (550)..(550): n comprises a, c, g, or t, or includes no nucleotide
  misc_feature (573)..(573): n comprises a, c, g, or t, or includes no nucleotide
aaatgacgctcgccagcaaccggagcctggcagaaggaaaccttctgtaccagccccaactggatgccctgaaagcacgtttgacccaaaaataccaggaactccaggttctcttcgaagcctatcagataaagaagaccaagttagataagcagtctagcagcgcttccttggagaccctgctggcacttcttcaggcagaaggggccaagattgaggaagacactgagaacatggctgagaagtttctcgatggagagcttcctctggattccttcatcgatgtctatcaaagccagcggaaactggcccacacacgaagagtgaaaatcgagaagctccaggagctggtgctaaaggggcagagactcccgcaggcctcggcgccagccccgctgctgccaaggtgcccgagccagcccctgcagcccccctgcctaccctactcanagccagtgggccccccttcgtgctactcggngcatcccccaccaccgccccgtgcctggangacgtttgggcacgctatttaccancggcatgggcttangaccaaccttcctacccaggatnaaagtgccttcttttgcccccgacgggcttgcccc

SEQ ID NO: 4896 - DNA, 589 bp, Canis familiaris
  misc_feature (345)..(345): n comprises a, c, g, or t, or includes no nucleotide
  misc_feature (383)..(383): n comprises a, c, g, or t, or includes no nucleotide
  misc_feature (447)..(447): n comprises a, c, g, or t, or includes no nucleotide
  misc_feature (464)..(464): n comprises a, c, g, or t, or includes no nucleotide
  misc_feature (513)..(513): n comprises a, c, g, or t, or includes no nucleotide
  misc_feature (525)..(525): n comprises a, c, g, or t, or includes no nucleotide
  misc_feature (533)..(533): n comprises a, c, g, or t, or includes no nucleotide
  misc_feature (545)..(545): n comprises a, c, g, or t, or includes no nucleotide
  misc_feature (557)..(557): n comprises a, c, g, or t, or includes no nucleotide
cccgtgggcggcaggaaggcccggaggggcatcctagaacgtttaaactctggagaagttgtgattggagatggagggtttgtctttgcactggagaagaggggctatgtgaaggcgggcccttggaccccggaagctgctgtggaacatccagaagcagttcgccagcttcatcgggagttcctcagagctggatccaatgtcatgcagaccttcaccttttatgcaagtgaagacaagctggagaacagaggaaactatgttgcagagaaaatatctgggcagaaagtcaatgaagctgcttgtgacattgcccggcaagtggctgacgagggagatgctttngtggcaggaggcgtgagtcagacaccctcgtaccttanttgcaagagtgaaactgaagttaaaaaagtatttcagcaacagttggaggtctttgtgaagaanaacgtggatttcttgantgccgagtatttttagcaccgttgaaaaactgtgtgggcaggttgaagncttgaaagcgtntgggaagnctgtacaacaancatgtgcattgnccaaaggagaattgaccgcgtgagccccgcca

SEQ ID NO: 4897 - DNA, 607 bp, Canis familiaris
  misc_feature (494)..(494): n comprises a, c, g, or t, or includes no nucleotide
  misc_feature (510)..(510): n comprises a, c, g, or t, or includes no nucleotide
  misc_feature (535)..(535): n comprises a, c, g, or t, or includes no nucleotide
  misc_feature (540)..(540): n comprises a, c, g, or t, or includes no nucleotide
tccccgtgctcctgcacatcccgggactggccagcaaggtcttctccgcgcagaaggccttcataaccctgacaaatgaaatgatccaggagcacaggaagacccgggaccccacccagccaccccgacacctgatcgacgccttcgtggatgagatagaaaaagacgtgtccagcaggagatagatgaggtgatagggcgggagcagctaccagagatgggagaccagacccgtatgcccttcaccgtggccgtgatccatgaggtgcagcgttttggggacatcgtcccactcggtgtgccccacatgacgtcccgagacactgaagtgcagggcttcctcatccccaaggggacgacactcatcaccaacctgtcgtcagtgctaaaggacgagaaggtctggaagaagcccttccgcttctaccccgagcactttctggacgcccagggccacttcgtcaaagcatgaggccttcatgcccttctctgangccgccgcgtctgctnggggagccctggccgcatggagctnttctntttttactgctctgcaggcttaactttttatgctggggcagcccgccaggacacgggtttacttcta

SEQ ID NO: 4898 - DNA, 309 bp, Canis familiaris
ttccctgggcctgtttaatgctaattagggcttcaaccagttgctgtttacaactgtgtgctttagaaagcaagggccctctgcaaagaccacattggtggtcttaaactgaactggtaggattgaagacccccttccccagccccacagaaaagcctctttacattcctgtttatttagaaatatgtagcaaccacatcattaacataaataaacaaattgtggagaactgaaactttggccttcatgcttcttaatgatggccaaatgcttcttaagaatctgctgtaatccctaactctagggtcc

SEQ ID NO: 4899 - DNA, 619 bp, Canis familiaris
  misc_feature (421)..(421): n comprises a, c, g, or t, or includes no nucleotide
  misc_feature (428)..(428): n comprises a, c, g, or t, or includes no nucleotide
  misc_feature (438)..(438): n comprises a, c, g, or t, or includes no nucleotide
  misc_feature (487)..(487): n comprises a, c, g, or t, or includes no nucleotide
  misc_feature (540)..(540): n comprises a, c, g, or t, or includes no nucleotide
  misc_feature (564)..(564): n comprises a, c, g, or t, or includes no nucleotide
  misc_feature (570)..(570): n comprises a, c, g, or t, or includes no nucleotide
  misc_feature (614)..(614): n comprises a, c, g, or t, or includes no nucleotide
gtgtgactttaggaacagtgggagagcacctgtagaaaggattgtcatcctaaagtagaatgtgcctcctctttggagtgtaaatgggaaggagaattttagcatgctcactgacctacctgcagctccagcgacagctaggatgtgtgttctccagccttcttcatgaggctgggtcaagttctttttaagtcagaacagcagattcagctctgacattctgatttgaatgatactgttcacgaatcagaatcctgtctattagactggacagcttgtggcaagctaatttgcctgtaataagccagaacttttttttattgatactgtaaatattgtgtgtgtgtgtgcgtgtgtgtgtgtgtatatatatatatacacatatatatatatttgtcaggtatctaagttaatttaaagntgtttgngcctttttgnttttaatgctttgatatttcaaatgttagcctcaattccgacaccatangtaggacgtaaagcttgctgataattcaagcatgaaatggatattcaaatggnaatctgctcaaaatgaaggccatnaaacanatggttggtgaaatgaggaaagatgccttgggagttgattgcantggaa

SEQ ID NO: 4900 - DNA, 404 bp, Canis familiaris
  misc_feature (383)..(383): n comprises a, c, g, or t, or includes no nucleotide
gggagtgtgtttctgctgtgtgctctgtctgctggctccttcccagaggcacccactgatggagactcctcttgagaaggccctgaccactatggtcagcactttccataaatattctgggagagaaggcagcaaactgaccctgagcaggaaggaactaaaggagctgatcaagaaggagttgtgtcttggagagaagatgaaagagagcggcatcgatgatctgatgaggaccttggacaagaacagtgaccaggagatcgacttcaaggagtacacggtgttcctgaccacgctgtgcatggcctacaacgacttcttcctggaggaagataaatgaccagggctcaaccccttgccctggcctcttcagctgtctccanacactccttggccctggcctg

SEQ ID NO: 4901 - DNA, 623 bp, Canis familiaris
  misc_feature (479)..(479): n comprises a, c, g, or t, or includes no nucleotide
  misc_feature (521)..(522): n comprises a, c, g, or t, or includes no nucleotide
  misc_feature (555)..(555): n comprises a, c, g, or t, or includes no nucleotide
  misc_feature (578)..(578): n comprises a, c, g, or t, or includes no nucleotide
  misc_feature (583)..(583): n comprises a, c, g, or t, or includes no nucleotide
  misc_feature (614)..(614): n comprises a, c, g, or t, or includes no nucleotide
gttggtcacagcactgtgtgatatcaaacaagcctatacacagtttggaggaaaacgtccctttggtgtttcattgctttacatcggctgggacaagcactatggctttcagctctatcagagtgaccctagtgggaattatggaggatggaaagccacgtgcatcggaaacaatagtgctgcagcggtgtcgatgttaaaacaagactacaaagaaggagaaatgactctgaagtccgcacttgctttagctatcaaagtcctaaacaagaccatggatgtgagtaaactctcggctgaaaaagtggagattgccaccctgacaagagagaacgggaagacggtcatcagggtcctgaagcagaaggaagtggagcagctgatcaagaaccacgaggaggaagaagcgaaagcggagccgagagaagaaagaaaaagagcagaaagagaaggagaaataggaggagaaccctgggctntggcggcttcgggggccggtgccccttgccgggcttccttgnnccggtggcaaactggggcggcaccagcgcaagnctgccgtttttgtccggtgagtnttgantgaccttcggcctaatggccccctcgccctncctggttgg

SEQ ID NO: 4902 - DNA, 636 bp, Canis familiaris
  misc_feature (477)..(477): n comprises a, c, g, or t, or includes no nucleotide
  misc_feature (513)..(513): n comprises a, c, g, or t, or includes no nucleotide
  misc_feature (531)..(531): n comprises a, c, g, or t, or includes no nucleotide
  misc_feature (598)..(598): n comprises a, c, g, or t, or includes no nucleotide
  misc_feature (628)..(628): n comprises a, c, g, or t, or includes no nucleotide
  misc_feature (633)..(633): n comprises a, c, g, or t, or includes no nucleotide
tttatccataacagagccaagagcttcaactcaataccattttggcttcacttattgacttttctcaaaactctattaagcaaactattgacattcacattttattcaaaagaaaactgaaatgagagggggaataaaacttcagagtggataattataacactgaatttcaaaacctgttgtcttaagacctctataatgaattctatacttctcctctagggagtcacgttcaatttaaaattgcatatcaagttcaacaagcatatgactcctcttgatcatagcaattaaagaccaagaggttgttctttgtagaagaacaaaagtatagccacttattaatgaaatcaagtttttagattaagttgagcaattagatttcactaaaaaacaaaaacaaaagatgactcacgagaaatttgcactggctaactttgactttctttaacattaatggctaatagaatggaagangcaataaaacaatatttaaattgctggttggaaagncaaaatattaaattgctncatatccatgaataatcaatgggaaataattgcttttataccaaaaatgattggaaaattttaaaanttatcatcttagttcatggtcatctaactngggtnttt

SEQ ID NO: 4903 - DNA, 674 bp, Canis familiaris
  misc_feature (402)..(402): n comprises a, c, g, or t, or includes no nucleotide
  misc_feature (430)..(431): n comprises a, c, g, or t, or includes no nucleotide
  misc_feature (458)..(458): n comprises a, c, g, or t, or includes no nucleotide
  misc_feature (500)..(500): n comprises a, c, g, or t, or includes no nucleotide
  misc_feature (502)..(502): n comprises a, c, g, or t, or includes no nucleotide
  misc_feature (522)..(522): n comprises a, c, g, or t, or includes no nucleotide
  misc_feature (552)..(552): n comprises a, c, g, or t, or includes no nucleotide
  misc_feature (583)..(583): n comprises a, c, g, or t, or includes no nucleotide
  misc_feature (607)..(607): n comprises a, c, g, or t, or includes no nucleotide
ctggcccgggccatcgaggacggagatgagaagggggcagcccaggcagcagccctgctggcccagcatcacgtggccctcagcgtccggctccgggaggcctgcttccctcctggccccatcaggctacaggtcacagttgaagatgctgcgtcctctgcccacgtgtccctgcaagttcacccccattgcaccatcgcaactctccaggagcaggtgttctcggagtttggcttcccgccagctgtgcagcgctgggtcatcgggcagtgcctgtgtgtgcccgagcgcagccttgcttcgtatggggtccggcgggatggggatcctgctttcctctatctgctctaacgcccggagaggctcaggacgcaaccctctgggcccccggaaagacagatngggaactaaatcggctggtttcccaagnnactggggctggccaagaagggcttaanccagcaagcttcccaagcccctttaagctgggttggtcctgncnttctgcaaattaataaatgncccaagccacccggtttgagatgggcaganccaaagccctgaattgggacccctttttgangctcaaccacaaccgcaaagtttnaaaaagagaaggctgatcctcggcccaggtcctgggcttgctgaaatttaaggatttgtgattgtat

SEQ ID NO: 4904 - DNA, 388 bp, Canis familiaris
ttcattcagagctagaactcagcagtctataaaaacaattttatattcaagccattaaaataacaaaacctagtgaagcagtaaaaaagacgactgcccacttaattaatttagatatattttgagagaaagagacaagtttatttattttttgtgttaagtgataaaacggcagatataactgaataagatatttcaggaggagactccttaaaaatgtttcttcttgggcagccttggtggctcagcagtttagcgccgccttcagcccagagtgtgatcctggagacctgggatcgagtcccatatcaggctccctgctcagtgaggtctgcttctccctctgcctgtgtctctgcctctctctctctctctctctggctctcat

SEQ ID NO: 4905 - DNA, 520 bp, Canis familiaris
  misc_feature (305)..(305): n comprises a, c, g, or t, or includes no nucleotide
  misc_feature (496)..(496): n comprises a, c, g, or t, or includes no nucleotide
caatttatttagaatcttcatttttctcattcaagctcactgtattagttatttttagcccataattaaaaacatgatcacttttacacaggcgtagtttggtgcatttcatttataaggttttaaagttatttataagttaactgaaatcacagtcggctggaatatgaaatgaaaataatctcttgactgataagttggttatatttttagaggtgacccagagatctctagcttgaaggcaatgaccttttgggggagggctaagggtatttgggtgcttttttgtcacatcagtaacttanaaagtaggaaaatagcaaagggttctattcaacaatatagttcatggcttttgtggaggcttctgaaaccttttaagccaggtgactaatattttattttgaaggaaaattgcttatctaagtcaaaatcatgccactgagcctttgttttcagctgaagaccaaaaaatcaccggtggttatttggtttnaaggcccatcttatttcctccact

SEQ ID NO: 4906 - DNA, 398 bp, Canis familiaris
aaaatgcctaaaacaaaacgaaagaaaaaaaataatttagaaaacaagactgcaaaaattgtgcaaattgaagaaaataagccttattctctgaaacgtggaaagcacgtatattccataaaggctagaaatgatgccttatctgagtgtacaagcagatttgtaacccagtatccatgtatgataaaggggtgtacatcagttgttacaagtgaaagcaatataattagacattataaatgccataaattatcaaaggcatttacatcacaacaccgaaatcttctcattgtcttcaagcggtgttgcaactcacaattaaaggacacttctgagcaagaaagtgataagagtgatgtgaaaaattctgatgcatgtgtatcaaagagcaatggtta

SEQ ID NO: 4907 - DNA, 399 bp, Canis familiaris
atacaaataggttgttcatttttggcatgtattccttttttttttttaatctgatttttgttttctcagacagatgtagtagtaatgattagcattggaaaatacatatcactattcttggaatatttatggtcagtctgctttcagtagaatattcttgatagcattgacacgatagatcttattccatattcctttattattgattattttattctcatttttgctttcatttatacatattttgatggagaagaggttgggcttttaaaaaataagaaaagttattgtaacactaaaataccccttattttttgacttctgaaagcctttgttccatgtctcaaaatataaaatgggtgggtggtatttttatttgggttatacaggttccaaatg

SEQ ID NO: 4908 - DNA, 529 bp, Canis familiaris
  misc_feature (366)..(366): n comprises a, c, g, or t, or includes no nucleotide
  misc_feature (389)..(389): n comprises a, c, g, or t, or includes no nucleotide
  misc_feature (425)..(425): n comprises a, c, g, or t, or includes no nucleotide
  misc_feature (431)..(431): n comprises a, c, g, or t, or includes no nucleotide
  misc_feature (479)..(479): n comprises a, c, g, or t, or includes no nucleotide
  misc_feature (487)..(487): n comprises a, c, g, or t, or includes no nucleotide
  misc_feature (522)..(522): n comprises a, c, g, or t, or includes no nucleotide
tgtctttaaaggatgaattagcatggtcttaaaaatacatttctgaggttactaagctgtattttgagttatgggcaaaatgctgagaaaacccagttggcatttatacaaatgctgacctcaggtctatagttcttaaatgtggctaattctgtaatatagtcttggtatttttcaattatgaatgcataacctatttctaggcagactctcttacttgaacacaagtccaaaaactaatttagaatcttttttgcccagatcttttgaaatttacaccccagagatttaagaagaaaacctctaaatttcaaaattatgaagaattacagaattactcatttaaggtctttaaaagaaaattgnacattgtcaaaggaaaatttaantcaaatcatgtttgtaaaactggccgaattttgggnatgcangttttcattttgcaaatatttaatatataaacctatgatgtccaggtnccacatgnatagggtacctagatggtttgagaaattaaatttnttggggt

SEQ ID NO: 4909 - DNA, 407 bp, Canis familiaris
  misc_feature (21)..(21): n comprises a, c, g, or t, or includes no nucleotide
  misc_feature (30)..(30): n comprises a, c, g, or t, or includes no nucleotide
  misc_feature (93)..(93): n comprises a, c, g, or t, or includes no nucleotide
  misc_feature (151)..(151): n comprises a, c, g, or t, or includes no nucleotide
  misc_feature (253)..(253): n comprises a, c, g, or t, or includes no nucleotide
  misc_feature (316)..(316): n comprises a, c, g, or t, or includes no nucleotide
  misc_feature (319)..(319): n comprises a, c, g, or t, or includes no nucleotide
  misc_feature (370)..(370): n comprises a, c, g, or t, or includes no nucleotide
  misc_feature (380)..(380): n comprises a, c, g, or t, or includes no nucleotide
  misc_feature (392)..(392): n comprises a, c, g, or t, or includes no nucleotide
atacccagctttatacgactnctatagggnaagctggtcgcctgcaggtccggtccggaattcccgggtcgacccacgcgtccgggccgcttntcggagaccgggagcgcttgcagcatggctgaccaactgactgaggagcagattgcanaattcaaagaagccttttcactatttgacatggatggcgatggaactataacaacaaaggaattgggaactgtaatgaggtctcttgggcagaatcccacanaagcggagttacaggacatgattaatgaagtagatgctgatggaaatggcacaatttgacttnccngaatttctgacaatgttggcatagaaaaatgaaagacacagacagttgaanaagaaattanagaagcatttcntgtgtttgataagga

SEQ ID NO: 4910 - DNA, 474 bp, Canis familiaris
  misc_feature (352)..(352): n comprises a, c, g, or t, or includes no nucleotide
  misc_feature (370)..(370): n comprises a, c, g, or t, or includes no nucleotide
  misc_feature (403)..(403): n comprises a, c, g, or t, or includes no nucleotide
  misc_feature (424)..(424): n comprises a, c, g, or t, or includes no nucleotide
  misc_feature (446)..(446): n comprises a, c, g, or t, or includes no nucleotide
  misc_feature (450)..(450): n comprises a, c, g, or t, or includes no nucleotide
gggggaataagaaagagagaggaggaaggagagaaggcaggaagaaggcaagggacgatacaaccatgctgtgctgtatgagaagaaccaaacaggttgaaaaaaatgatgaggaccaaaagattgaacaagatggcatcaaaccagaagataaagctcataaggccgcgaccaaaattcaggctagcttccgtggacacataacaaggaaaaagctcaaaggagagaagaagggtgatgcccaagctgctgaggcagaagcgaaggagaaggatgaagctcctgttgctgatggcctggagaagaaagagggagaagggtgccacttcccttttgaggcagcccctgcctnaagccccaaagccttgangaacctggcaaggcaggcgaaacttccttcgangagaaaaaagggggaagggcnccccttgttgcttgccacaaancaanggggccccccaaggcttcttgccc

SEQ ID NO: 4911 - DNA, 517 bp, Canis familiaris
  misc_feature (353)..(353): n comprises a, c, g, or t, or includes no nucleotide
  misc_feature (371)..(371): n comprises a, c, g, or t, or includes no nucleotide
  misc_feature (394)..(394): n comprises a, c, g, or t, or includes no nucleotide
  misc_feature (453)..(453): n comprises a, c, g, or t, or includes no nucleotide
  misc_feature (507)..(507): n comprises a, c, g, or t, or includes no nucleotide
atgatataaaacagtttatccccttcctgatttttacctataaaattggcaggctaataaaaaaaatcttggtttttttaatttggaagagaagagacctatcagattgtcaaagctcttcatgtattaaaagcctgtcttctgtaaaactgacctagcagacaagctgaatttgaagtagactgtgatataggctataagttgtggaataaccttagttttcttttaagatcagttactgacttagataatgtattattgaataccaagataaagaaaaatgcacctacaaactaattaaaagtctctgtggtcaccaagtcaagatggtattgatctgtggtaatcaaagnaacttactggctagcctntgaataaaattccaaaatatcgnattcatttcatctttggaaatgggggcttttttttttttccaccacccaatgggactgntggggggttaaagggaaacttacaccaccccgttcctggataactaactttttntatttttatt

SEQ ID NO: 4912 - DNA, 163 bp, Canis familiaris
  misc_feature (32)..(32): n comprises a, c, g, or t, or includes no nucleotide
  misc_feature (35)..(35): n comprises a, c, g, or t, or includes no nucleotide
  misc_feature (117)..(117): n comprises a, c, g, or t, or includes no nucleotide
  misc_feature (149)..(149): n comprises a, c, g, or t, or includes no nucleotide
accccaacttcttcaagatggtggagggcttnttngaccgcggcgccagcatcgtggaggacaagctggtggaggacctgcggacgcgcgagagcgaggagcagcggcggaaccggntgcgcggtatcctgcgcatcatcaagccctgnaaccatgtgctcag

SEQ ID NO: 4913 - DNA, 592 bp, Canis familiaris
  misc_feature (81)..(81): n comprises a, c, g, or t, or includes no nucleotide
  misc_feature (97)..(97): n comprises a, c, g, or t, or includes no nucleotide
  misc_feature (101)..(101): n comprises a, c, g, or t, or includes no nucleotide
  misc_feature (130)..(130): n comprises a, c, g, or t, or includes no nucleotide
  misc_feature (147)..(147): n comprises a, c, g, or t, or includes no nucleotide
  misc_feature (300)..(300): n comprises a, c, g, or t, or includes no nucleotide
  misc_feature (356)..(356): n comprises a, c, g, or t, or includes no nucleotide
  misc_feature (392)..(392): n comprises a, c, g, or t, or includes no nucleotide
  misc_feature (432)..(432): n comprises a, c, g, or t, or includes no nucleotide
  misc_feature (463)..(463): n comprises a, c, g, or t, or includes no nucleotide
  misc_feature (474)..(474): n comprises a, c, g, or t, or includes no nucleotide
  misc_feature (483)..(483): n comprises a, c, g, or t, or includes no nucleotide
  misc_feature (495)..(495): n comprises a, c, g, or t, or includes no nucleotide
  misc_feature (520)..(520): n comprises a, c, g, or t, or includes no nucleotide
  misc_feature (551)..(551): n comprises a, c, g, or t, or includes no nucleotide
cgcctgccctgcgatgccctggttaaacacatgtcggacatgtacgtccacctgacagctccccagcctgacccagccagngagggcctggggccgncagntgaggatgctgggacaagctccagccggnaggaggccgcaggccangcccctccccaggcctctgagagcactgggcctgctgaaccaaggtctccttggcaagcagcaggggtctgtcccctgaacccattcttggtgcccctggaatttctgggccaggcagccactcctgcaaggtgaaggcccggcaggcggacnacacagcagacatctgtgagccccctggccctcgggcctgcctgggctggcactgngtttgtcatgaggatccaatcatggtggaaaggccnttgacatggtgggcaacaaggggtggcctttaagaatgancgacacaagaaggagtttcataaacaagcanaaaggtttcangggcttggncccaaaacttanggtgggggcaatccgggcaacttgnttaaaaccacagttaaatacttgtccctttncaaaatctggattttttgtcctgtaattgggagtaaaagtc

SEQ ID NO: 4914 - DNA, 411 bp, Canis familiaris
  misc_feature (402)..(402): n comprises a, c, g, or t, or includes no nucleotide
taagtggaccaggtcggggtctggtggaggtgtggatggaggccgatagctgtttgggggatcatggaggtgacatcaggtagagtgacagccagatttccgtaatgaagtacagaaggggccagaaggccaacaaggccatatctcagtaagagcgcaggtgggacagctggtcgcctcttgtatagccacagggagtggtgtggtcagctgtctctgtggcatggagcaggtctgggggccctgtgagatgcatggaggagaggacacgggcccctaggccttttccccttctgctgacagcattgctgtggggggggggtggcccactgctctcccctggccctctgtctcccctgagctgggggcacaccccctgtgttgtgcttgcgactttgcatnaataaacca

SEQ ID NO: 4915 - DNA, 265 bp, Canis familiaris
  misc_feature (67)..(67): n comprises a, c, g, or t, or includes no nucleotide
  misc_feature (206)..(206): n comprises a, c, g, or t, or includes no nucleotide
agttctagatcgcgagcggccggccttttttttttttttttcatgctgccatttgtaatatgtttgngaaaatccttgggattaaagttttggttacaaattgttgtttaacctgaaagcctatttttccttgcaaaactaaaatctgtgagcttggtatcaagtccaggtataacattcctattggaagccatacttatattttnttgtaaagggcttttgaattaataaaatattagcataattgtgtaatagtcaaaaaaaa

SEQ ID NO: 4916 - DNA, 546 bp, Canis familiaris
  misc_feature (375)..(375): n comprises a, c, g, or t, or includes no nucleotide
  misc_feature (391)..(391): n comprises a, c, g, or t, or includes no nucleotide
  misc_feature (411)..(411): n comprises a, c, g, or t, or includes no nucleotide
  misc_feature (473)..(473): n comprises a, c, g, or t, or includes no nucleotide
  misc_feature (492)..(492): n comprises a, c, g, or t, or includes no nucleotide
  misc_feature (502)..(502): n comprises a, c, g, or t, or includes no nucleotide
  misc_feature (516)..(516): n comprises a, c, g, or t, or includes no nucleotide
acgcgtgggcggacgcgtgggttcttagacataatgattctatccagtgtgtctcctacaaccctgttacccaccaactggcatcttgttcctccagtgactttggtaagttttgattcctgatgttttgtcctggaattactgaaaatctgctgacacccatccagaatgtggtggttttatcctgggagagttaatgctacttccctctcttcagtggctgaggggaggctgacacttattctttaaattgtgtagaaatcaaaaagagtggatgggtaacattgaatctggtaagaaatctgggagacagcaggaagggccttagggagggagatggtaagaagggtggggagagcataaacaacttggcgntgccactctgggaagnctttccacctcatctgtcangaagtaggcattaattcctgcctctggggtccctaaaaaccacggatggggaaattcttcanttgtttcaactgggcttgngtaagggggncacccgtactttgnttggggaatacttgtccttccaaaggggtt

SEQ ID NO: 4917 - DNA, 455 bp, Canis familiaris
  misc_feature (385)..(385): n comprises a, c, g, or t, or includes no nucleotide
  misc_feature (394)..(394): n comprises a, c, g, or t, or includes no nucleotide
agacctttattggcccttaattaaacctgacactaaaatggatattttagtctttctgcatgtgaaatttggtgtaagaagatagaactataatacatacagtatatggaaggatagacatagtgctttgttcatactaattgcaaagctgccaaaatagctgaagcttaattacttgacttgccttgatttataggactggggcttggagaaaaggagcagatgttcctctaagacttttattacagaagccttatatacattgatttgattttgtatttgtagctcagagccattgttgtctaaacccaacttttctaagttaacaacaacacaatttttttccccagcaaagacctcatggtatacaaaggcaggttaactnttccttgcnttgggcaataagggggggggtggttggcattcattaaaggctaaaagcaaaatggtaactt

SEQ ID NO: 4918 - DNA, 525 bp, Canis familiaris
  misc_feature (331)..(331): n comprises a, c, g, or t, or includes no nucleotide
  misc_feature (406)..(406): n comprises a, c, g, or t, or includes no nucleotide
  misc_feature (421)..(421): n comprises a, c, g, or t, or includes no nucleotide
  misc_feature (425)..(425): n comprises a, c, g, or t, or includes no nucleotide
  misc_feature (440)..(440): n comprises a, c, g, or t, or includes no nucleotide
  misc_feature (450)..(450): n comprises a, c, g, or t, or includes no nucleotide
  misc_feature (462)..(462): n comprises a, c, g, or t, or includes no nucleotide
  misc_feature (485)..(485): n comprises a, c, g, or t, or includes no nucleotide
  misc_feature (498)..(499): n comprises a, c, g, or t, or includes no nucleotide
gtcaggtgactaaagatgactagtgattcctattggggacgactgctagagtccagggtcagatactacatacagggccgagctgacactgggaaggctgctgtgggatggaggtgtagagaaggcacagctccaagtcagcagtcctgcgtctagcccagttcagccctctgtctcttgaggtggagtggacttctactactctttcttagctcctaatctatcttctgcttcctttcttccagggaactagtgccaaatggccttttcctgccagttttggtaccttttctggcttctctattcctgctcacttctctatttttaaagngccaaataaatcccttcccctttgtcagaaagcacaagtgatggcccttgagccctacctgagaacttatgggangggcccggcttgctntttntaagggcaacaatgnttgcttgaanttaaggcttgcnggggtggtggcaaaacttctgcnccctaagaggacnnatagggacatggtgcccccggcccag

SEQ ID NO: 4919 - DNA, 541 bp, Canis familiaris
  misc_feature (23)..(23): n comprises a, c, g, or t, or includes no nucleotide
  misc_feature (85)..(85): n comprises a, c, g, or t, or includes no nucleotide
  misc_feature (210)..(210): n comprises a, c, g, or t, or includes no nucleotide
  misc_feature (254)..(254): n comprises a, c, g, or t, or includes no nucleotide
  misc_feature (283)..(283): n comprises a, c, g, or t, or includes no nucleotide
  misc_feature (300)..(300): n comprises a, c, g, or t, or includes no nucleotide
  misc_feature (319)..(319): n comprises a, c, g, or t, or includes no nucleotide
  misc_feature (393)..(393): n comprises a, c, g, or t, or includes no nucleotide
  misc_feature (412)..(412): n comprises a, c, g, or t, or includes no nucleotide
  misc_feature (420)..(420): n comprises a, c, g, or t, or includes no nucleotide
  misc_feature (496)..(496): n comprises a, c, g, or t, or includes no nucleotide
  misc_feature (516)..(516): n comprises a, c, g, or t, or includes no nucleotide
  misc_feature (527)..(527): n comprises a, c, g, or t, or includes no nucleotide
aaattaagcctgaaacaggttgnttttttttttttaaacttctttacttaagaactttcttggcaaggctgcatattttcattgncactaatgtattaaatatacattttaatgaactaattatttttgcatattttaaattctttatatgataggtattttttataacaggatattaacataagttaaattctatgtatttgaaactgntacagaactttcctcttcaaacagcaaagttttaaggacattgngttaaaaaaaaaaaaaaaggaaagggganattttagttaggcctgncatttacattatataaaanataatcattattttgaaggttttttattcttatatggcaatatgtttttgtatcaaaaacactcattatatatntcaaggaaaagaaactacnctccttanccccggcataagaaaaaaaccttttgaggcatctcattttgatgcccagtcaggggtataactcaggatatgaggnctcaggcttggagagactgngaattttgctncccgggcatatggg

SEQ ID NO: 4920 - DNA, 378 bp, Canis familiaris
  misc_feature (191)..(191): n comprises a, c, g, or t, or includes no nucleotide
  misc_feature (242)..(242): n comprises a, c, g, or t, or includes no nucleotide
  misc_feature (282)..(282): n comprises a, c, g, or t, or includes no nucleotide
  misc_feature (290)..(290): n comprises a, c, g, or t, or includes no nucleotide
  misc_feature (341)..(341): n comprises a, c, g, or t, or includes no nucleotide
  misc_feature (359)..(359): n comprises a, c, g, or t, or includes no nucleotide
accttggatgtgttttctggctgtggggggttgtcggaagggttccaccaagcaggcatctcagaaacactgtgggccatcgagatgtgggaccctgcggcccaggcgtttcggctaaacaaccctggatccacggtgttcacggaggactgcaacgtgctgctgaagcttgtcatggctggggaggcaancaactcccgtggtcagaagctgcctcagaagggaaatgtggagatgctgtncggtgggccgccctgccaagggtttagtggcatgaaccgnttcaactntcgtacctactccaagttcaagaactccctgggggtttcctttctcagctnctgggactactaccgggnccggtactttcttttggag

SEQ ID NO: 4921 - DNA, 243 bp, Canis familiaris
  misc_feature (60)..(60): n comprises a, c, g, or t, or includes no nucleotide
  misc_feature (63)..(63): n comprises a, c, g, or t, or includes no nucleotide
  misc_feature (69)..(69): n comprises a, c, g, or t, or includes no nucleotide
  misc_feature (114)..(114): n comprises a, c, g, or t, or includes no nucleotide
  misc_feature (125)..(125): n comprises a, c, g, or t, or includes no nucleotide
  misc_feature (131)..(131): n comprises a, c, g, or t, or includes no nucleotide
  misc_feature (163)..(163): n comprises a, c, g, or t, or includes no nucleotide
  misc_feature (178)..(178): n comprises a, c, g, or t, or includes no nucleotide
  misc_feature (193)..(193): n comprises a, c, g, or t, or includes no nucleotide
  misc_feature (207)..(207): n comprises a, c, g, or t, or includes no nucleotide
gcctttcaaattgagtggtctgtccttcaagagaaatcggaaggagggtgggggtgattnctntgcctnctcacccacagaggaagagcaggagcagggcgagatcggtgcctncggcgaggaangcacancccaagaagggaaggctgtcgccaccccttanagccaagaaccccangccaagggggcagangctagtgctgcctncaagggaggagacacagaaaaagaagcagggcccca

SEQ ID NO: 4922 - DNA, 389 bp, Canis familiaris
  misc_feature (218)..(218): n comprises a, c, g, or t, or includes no nucleotide
  misc_feature (249)..(249): n comprises a, c, g, or t, or includes no nucleotide
  misc_feature (284)..(284): n comprises a, c, g, or t, or includes no nucleotide
  misc_feature (290)..(290): n comprises a, c, g, or t, or includes no nucleotide
  misc_feature (342)..(342): n comprises a, c, g, or t, or includes no nucleotide
  misc_feature (373)..(373): n comprises a, c, g, or t, or includes no nucleotide
gagagcaggacggagggctgatcggtgccgaggagaaagtgatcaacagcaagaataaagtggatgagaacatggtcatcgacgagactctggatgttaaggaaatgatcttcaatgccgagagggtcggcggcctggaggcagagccggaatccgtggggccgctgcgggaggacttcagtctcagcagcagcgcgctcatcgggctgttggtcatngccgtgggcatcgccacagtcataagtcatnaacctggtgatgcttgaggaaaaaaaagtaccggnaccatnaagccacgggatcgtggaggttgacccaatgcttcaccccaaaaaaagcgtnacctgaacaagatgcagaaccatgggttttnaaaacccacgtccaat

SEQ ID NO: 4923 - DNA, 612 bp, Canis familiaris
  misc_feature (257)..(257): n comprises a, c, g, or t, or includes no nucleotide
  misc_feature (368)..(368): n comprises a, c, g, or t, or includes no nucleotide
  misc_feature (426)..(426): n comprises a, c, g, or t, or includes no nucleotide
  misc_feature (442)..(442): n comprises a, c, g, or t, or includes no nucleotide
  misc_feature (446)..(446): n comprises a, c, g, or t, or includes no nucleotide
  misc_feature (549)..(549): n comprises a, c, g, or t, or includes no nucleotide
  misc_feature (552)..(552): n comprises a, c, g, or t, or includes no nucleotide
  misc_feature (569)..(569): n comprises a, c, g, or t, or includes no nucleotide
  misc_feature (609)..(609): n comprises a, c, g, or t, or includes no nucleotide
gcttgttagagaaatgtcagtcagttattcagttgaaaataagtaatgatttcatggttggttcctctactagatgtgaataaaaattgtgcctttagcacttggaaagtatttttacctggcaaagtaaaattgttgaaggagtgtctttgtttttagatagtaccatttgttggtgaaccatacttctattcatgtcagtggaaacttcattaagatgcacttaattatgttccaggttgtccataatataaaanagatctgcttttgtttttgtctatctaaaaatagagaactgtaaatgtaaagatataatcataatttaaatgattataaccttttagagatgcagcttgcattttcattgnctttttttaacatcatcatcattcttactaatgaaaattatttcagagcagccaggtnttcattaaataacagngagncacttcaaaactgaattattatataattatgcttgggattgaaaaaaaattaaccccaaatcccagtcccttcaagggaactttgaattacccgggtagaaanggnaaggtgggttgctttcntcaaattttgggatatgacatattacaggattacagaggnttt

SEQ ID NO: 4924 - DNA, 573 bp, Canis familiaris
  misc_feature (411)..(411): n comprises a, c, g, or t, or includes no nucleotide
  misc_feature (427)..(427): n comprises a, c, g, or t, or includes no nucleotide
  misc_feature (429)..(429): n comprises a, c, g, or t, or includes no nucleotide
  misc_feature (471)..(471): n comprises a, c, g, or t, or includes no nucleotide
  misc_feature (484)..(484): n comprises a, c, g, or t, or includes no nucleotide
  misc_feature (492)..(492): n comprises a, c, g, or t, or includes no nucleotide
  misc_feature (498)..(498): n comprises a, c, g, or t, or includes no nucleotide
  misc_feature (513)..(513): n comprises a, c, g, or t, or includes no nucleotide
  misc_feature (528)..(528): n comprises a, c, g, or t, or includes no nucleotide
aaacttccatgacatgtttcagcccttctttgacatgatacaccaggctcaacaggccatggatgtcaacctgcatagaattccttaccacttcccaattgaattcccagaagaagataaccgcaccgtgtgcaaggagatccgtcacaactccacagggtgcctgaaaatgaaggaccagtgtgaaaagtgccaggagatcttgtcagtggattgttcttccaacaaccctgcgcaggtccagctgcgacaggaacttagtaattccctccagattgcggagaagttcaccaagctctacgacgagctgctgcagtcctaccaggagaagatgttcaacacgtcctccctgctgaagcagctgaacgagcagtttagctgggtgtccaactggctaacctcactcaaagngaagacccattctttntncaggtcacgacgggggggttctcagacttctgacttcaatgntcccgggggcttnactaaagngggtgngaagctctttgattntgaccccatcacggngatgatcccagaagcagtcttcaggaacaatcctaaatttatgga

SEQ ID NO: 4925 - DNA, 593 bp, Canis familiaris
  misc_feature (183)..(183): n comprises a, c, g, or t, or includes no nucleotide
  misc_feature (185)..(185): n comprises a, c, g, or t, or includes no nucleotide
  misc_feature (238)..(238): n comprises a, c, g, or t, or includes no nucleotide
  misc_feature (245)..(245): n comprises a, c, g, or t, or includes no nucleotide
  misc_feature (315)..(315): n comprises a, c, g, or t, or includes no nucleotide
  misc_feature (380)..(380): n comprises a, c, g, or t, or includes no nucleotide
  misc_feature (465)..(465): n comprises a, c, g, or t, or includes no nucleotide
  misc_feature (474)..(474): n comprises a, c, g, or t, or includes no nucleotide
  misc_feature (478)..(478): n comprises a, c, g, or t, or includes no nucleotide
  misc_feature (510)..(510): n comprises a, c, g, or t, or includes no nucleotide
  misc_feature (528)..(528): n comprises a, c, g, or t, or includes no nucleotide
  misc_feature (540)..(540): n comprises a, c, g, or t, or includes no nucleotide
  misc_feature (568)..(568): n comprises a, c, g, or t, or includes no nucleotide
aagaaagaggcccctgggccccgggaagaactgagatcgaggggccgggcctcccctggaggggtcaagcacgtccagcagtgatggcaaagccgagaagtctaggcagacagccaagaaggcccgtgtggaagaagcctccaccccaaaggtcagcaagcagggccggagcgaggagatctnanagagcgaaagtgaggagaccaatgcaccaaaaaagaccaaaactgaggagctncctcggncacagtctccctccgatctggatagtttagatgggcggagcctcaatgatgatggcagcagtgaccctanggatattgaccaggataaccgaagcacgttttctagcatctacagccctgggaagcgtggagaangacttccactcatttttttggctttttccaagggccaagccggcccttacaaccaacttcaattttttttttccttccccccggncggcagganaagnaccccccgacaggcaaaagcttggttttgaancccatcttttttggaaanccactgggtatnaatgctcccatggggccccccccacttnaatgtttcaaggttcttcttggggg

SEQ ID NO: 4926 - DNA, 557 bp, Canis familiaris
  misc_feature (432)..(432): n comprises a, c, g, or t, or includes no nucleotide
  misc_feature (465)..(465): n comprises a, c, g, or t, or includes no nucleotide
  misc_feature (476)..(476): n comprises a, c, g, or t, or includes no nucleotide
  misc_feature (513)..(513): n comprises a, c, g, or t, or includes no nucleotide
  misc_feature (515)..(515): n comprises a, c, g, or t, or includes no nucleotide
  misc_feature (517)..(517): n comprises a, c, g, or t, or includes no nucleotide
  misc_feature (543)..(543): n comprises a, c, g, or t, or includes no nucleotide
gggacccctgcgagagatctgcggctagccggctgcacttgctccacgggtcgggggatcgcaggcggcagatttgaaggatgatgtgccattgaaaagaaaggtcaaaggctaaacaaggagaagagaaagaggaagacttcaaagatgcgaaggatgagttcttgcagcaacatctgtcggtccaagcaggcacagactgctactgagggtaactaccagcgctatggagtccggtcctacctgcaccagttttatgaggactgtaccacctcaatctgggagtatgaggatgatttccagatccagagatcccctaataggtggagctcagtattctggaaggtcgggctcatctcgggcacagtctttgtgattcttggactgaccgtctggcagtgggctttctggtgcccccccaaatcgaagccnttcggggaagccgactttttggtgggggacacncagccgtgcangttaacggaccctcacgcgtgcaactggccgggcggntntnttttgctggggggcacgtccatggcngggtgtcttctgat

SEQ ID NO: 4927 - DNA, 631 bp, Canis familiaris
  misc_feature (405)..(405): n comprises a, c, g, or t, or includes no nucleotide
  misc_feature (464)..(464): n comprises a, c, g, or t, or includes no nucleotide
  misc_feature (474)..(474): n comprises a, c, g, or t, or includes no nucleotide
  misc_feature (482)..(482): n comprises a, c, g, or t, or includes no nucleotide
  misc_feature (505)..(505): n comprises a, c, g, or t, or includes no nucleotide
  misc_feature (520)..(520): n comprises a, c, g, or t, or includes no nucleotide
  misc_feature (529)..(529): n comprises a, c, g, or t, or includes no nucleotide
  misc_feature (537)..(537): n comprises a, c, g, or t, or includes no nucleotide
  misc_feature (557)..(558): n comprises a, c, g, or t, or includes no nucleotide
  misc_feature (573)..(573): n comprises a, c, g, or t, or includes no nucleotide
  misc_feature (603)..(603): n comprises a, c, g, or t, or includes no nucleotide
  misc_feature (607)..(607): n comprises a, c, g, or t, or includes no nucleotide
  misc_feature (617)..(617): n comprises a, c, g, or t, or includes no nucleotide
atttgagtagacggggccctcttttggtggatgtagcacaatttccacactgtgaaggcagtattagaagacttaattgtaaaagctctctcttgtcactgtgttacacttatgcattgccaaagttttgttagtcttgcatgcttaataaaagtgctgagactgttattaagtaataagctgtcaaacatttactgaaaatagaattggccccatggcttgatgtgaagacagcgaggaaagaagcaccagtcaagttgtgacaaagcccaaattaaagtgacctctaaatcttagtgaattgtctttttttgaggataaactagtcccttagggttagcaaacacttgttaataatgtctaaactttttttaaatgagtcatttaaattaaagtttaagttanggcatatttttcaagttaaacttaaattgcatttgaactatcaaaacaactcctttttntgaaaaaggncttgtagntaatttgaaataaatcagtatanacaaggatgtctggntactgaggntataaggnagtaatgagatgagaactanncctggcttcaatggnatataatcccggaggacatagggattcttntagngtacaaccgnggaagatgtaattg

SEQ ID NO: 4928 - DNA, 702 bp, Canis familiaris
  misc_feature (380)..(380): n comprises a, c, g, or t, or includes no nucleotide
  misc_feature (397)..(397): n comprises a, c, g, or t, or includes no nucleotide
  misc_feature (409)..(409): n comprises a, c, g, or t, or includes no nucleotide
  misc_feature (426)..(426): n comprises a, c, g, or t, or includes no nucleotide
  misc_feature (438)..(438): n comprises a, c, g, or t, or includes no nucleotide
  misc_feature (448)..(448): n comprises a, c, g, or t, or includes no nucleotide
  misc_feature (470)..(470): n comprises a, c, g, or t, or includes no nucleotide
  misc_feature (486)..(486): n comprises a, c, g, or t, or includes no nucleotide
  misc_feature (501)..(501): n comprises a, c, g, or t, or includes no nucleotide
  misc_feature (504)..(504): n comprises a, c, g, or t, or includes no nucleotide
  misc_feature (533)..(533): n comprises a, c, g, or t, or includes no nucleotide
  misc_feature (542)..(542): n comprises a, c, g, or t, or includes no nucleotide
  misc_feature (553)..(553): n comprises a, c, g, or t, or includes no nucleotide
  misc_feature (568)..(568): n comprises a, c, g, or t, or includes no nucleotide
  misc_feature (587)..(587): n comprises a, c, g, or t, or includes no nucleotide
  misc_feature (595)..(595): n comprises a, c, g, or t, or includes no nucleotide
  misc_feature (607)..(607): n comprises a, c, g, or t, or includes no nucleotide
  misc_feature (646)..(646): n comprises a, c, g, or t, or includes no nucleotide
  misc_feature (663)..(663): n comprises a, c, g, or t, or includes no nucleotide
  misc_feature (667)..(667): n comprises a, c, g, or t, or includes no nucleotide
  misc_feature (682)..(682): n comprises a, c, g, or t, or includes no nucleotide
cagcccgggcgtgggccgtgaagtccagacaccacagcaagtgggatggagcactatcggaaagctggctctgtggaactcccagcaccttctccaatgccgcagctacctcctgataccctggagatgcgggtccgagatggcagcaaaatccgcaaccttctggggctggcactgggtcgattggagggtggtagtgcacggcatgtggtgttctcaggttctggccgggccgcagggaaggcggtgagctgtgctgagattgtcaagcgacgtgtaccaggcctgcaccagcttaccaagctgcgcttctgcagactgaagacagctgggtgccaatctcacctgacacgggcctggatcccctcacagtgcgccgncatgtacctgcaagtgngggtactgttanccgggaccccctaaaancccaaagaatgngggttaccanccttccaggaacaccccctggnctgggggcccaaaatngaagcttcaactttnggnccaccaacccccaaaaaagggttcgaganaacttggtncttgaaaaatntggggagcaaggttnttttcaggcatggactatnttaaaaangggtttaccttnttttgaaaaggcttttttaaattgtttaaaaatcccaanaagacctgaattttgcnaagnggggggcttcctttngggctttccgttttttttgg

SEQ ID NO: 4929 - DNA, 460 bp, Canis familiaris
  misc_feature (354)..(354): n comprises a, c, g, or t, or includes no nucleotide
  misc_feature (398)..(398): n comprises a, c, g, or t, or includes no nucleotide
  misc_feature (432)..(432): n comprises a, c, g, or t, or includes no nucleotide
  misc_feature (444)..(444): n comprises a, c, g, or t, or includes no nucleotide
cccagctgtgatgtggggcctgggggcctgggccaagccgtggggggggccccgtgctgcccccccggctacactcctagaagcacttctcagccgaggcaccccgcctggcggggcggatggcggcgggcagcccgaggacgcggggcccagcacgtctgtcttgtcacctgtgtgtttggtgtcgagtccccgggtggaccccggactgaacgtccgcccgtcgacatggagggggctggagttgtttctcaggcaatcctgtattttaattttagatgtatctcctgaagcatatttttcataaaatgtagcgtgtaaatagctttttaaataacttcttttttataagantaaaagtatctttaggaatttttttttaaaaaagtccgtcattnaaatttataccaagttttttgccgagtattaacnaaaaacttgggnttggcctttccttctt

SEQ ID NO: 4930 - DNA, 626 bp, Canis familiaris
  misc_feature (155)..(155): n comprises a, c, g, or t, or includes no nucleotide
  misc_feature (240)..(240): n comprises a, c, g, or t, or includes no nucleotide
  misc_feature (356)..(356): n comprises a, c, g, or t, or includes no nucleotide
  misc_feature (391)..(391): n comprises a, c, g, or t, or includes no nucleotide
  misc_feature (394)..(394): n comprises a, c, g, or t, or includes no nucleotide
  misc_feature (422)..(422): n comprises a, c, g, or t, or includes no nucleotide
  misc_feature (444)..(444): n comprises a, c, g, or t, or includes no nucleotide
  misc_feature (467)..(467): n comprises a, c, g, or t, or includes no nucleotide
  misc_feature (494)..(494): n comprises a, c, g, or t, or includes no nucleotide
  misc_feature (503)..(503): n comprises a, c, g, or t, or includes no nucleotide
  misc_feature (517)..(517): n comprises a, c, g, or t, or includes no nucleotide
  misc_feature (538)..(538): n comprises a, c, g, or t, or includes no nucleotide
  misc_feature (554)..(554): n comprises a, c, g, or t, or includes no nucleotide
  misc_feature (558)..(558): n comprises a, c, g, or t, or includes no nucleotide
  misc_feature (580)..(580): n comprises a, c, g, or t, or includes no nucleotide
  misc_feature (599)..(599): n comprises a, c, g, or t, or includes no nucleotide
  misc_feature (614)..(614): n comprises a, c, g, or t, or includes no nucleotide
gtcggggtggccataacccaggccccacgtcccagtgggggcccctgaaccgtggctcccagttgcacagcacctgctgggtctcccaggaatcaggtgttgagggtgggcgacggatctctggcagttcaagcccaacaagcccacccactctntgcagagatggtggccacacagcagcagatgaacgacgcacagctggtgctccagcagcgagactactgtgcccactacctcatncggctgctcaagtgcaagcgtgacagcttccccaacatcctggcctgcaagcacgagcagcacgactgggactactgcgagcaccttgagtgagccccagacccgccccacattcncaagccctggcctggccccccgcaggatactgccncanaggcagaacacaatgaactagcaccgantttttccagccaagcttcaacnttggtttgaaaagaggaaatttnagggggccttgcttgggtggggccacntggcttttnaggccacctgaaangaatgggccaggcccggattntggtaggaaggcccancttntgcacttgggctcactggtgtncacttcgggcagaccccanaatttaaaccaggcncacaaggttttt

SEQ ID NO: 4931 - DNA, 336 bp, Canis familiaris
  misc_feature (308)..(308): n comprises a, c, g, or t, or includes no nucleotide
  misc_feature (312)..(312): n comprises a, c, g, or t, or includes no nucleotide
  misc_feature (314)..(314): n comprises a, c, g, or t, or includes no nucleotide
gctgagcagagcagagctgccgctgagacaaggccctcaccatggccgagtcccccggctgctgctccgtctgggcccgctgcctccactgcctgtatagctgccactggaggaaatgccccaaagagaggatgcaaaccagcaagtgcgactgtatctggtttggcctgctcttcctcacctttctcctctccctgggctggctgtacatcgggctcatccttctcaatgacctgcacaacttcaatgaattcctgttcaccactggggacactggatggactggtcccttggcatttctgctgggncatntntctacttgtcacatatgcatca

SEQ ID NO: 4932 - DNA, 310 bp, Canis familiaris
  misc_feature (80)..(80): n comprises a, c, g, or t, or includes no nucleotide
  misc_feature (85)..(85): n comprises a, c, g, or t, or includes no nucleotide
  misc_feature (108)..(108): n comprises a, c, g, or t, or includes no nucleotide
  misc_feature (126)..(126): n comprises a, c, g, or t, or includes no nucleotide
  misc_feature (133)..(133): n comprises a, c, g, or t, or includes no nucleotide
  misc_feature (135)..(135): n comprises a, c, g, or t, or includes no nucleotide
  misc_feature (152)..(152): n comprises a, c, g, or t, or includes no nucleotide
  misc_feature (172)..(172): n comprises a, c, g, or t, or includes no nucleotide
  misc_feature (179)..(180): n comprises a, c, g, or t, or includes no nucleotide
  misc_feature (204)..(204): n comprises a, c, g, or t, or includes no nucleotide
  misc_feature (223)..(223): n comprises a, c, g, or t, or includes no nucleotide
  misc_feature (228)..(228): n comprises a, c, g, or t, or includes no nucleotide
  misc_feature (260)..(260): n comprises a, c, g, or t, or includes no nucleotide
  misc_feature (265)..(265): n comprises a, c, g, or t, or includes no nucleotide
tgtgagaccctgctgtgcctgtagctccttcaggtcaaagacgtcttccccctttgtaggtccttgtctggaaatgagtnatatnttaccagcatgccttgtcctaancatctcatccttgtttgngactgangnttgcctgcctaaatgtncaaaccgccactgtgtgcanagtgcanntatttatgacttaattttctaatnccaccacagagaaagtggntcatnccaaagaagaaaaccttagtatgcatcatatnctggntcactactttactggagttaaacaacatgtgaaaaccttcttagc

SEQ ID NO: 4933 - DNA, 522 bp, Canis familiaris
  misc_feature (358)..(358): n comprises a, c, g, or t, or includes no nucleotide
  misc_feature (405)..(405): n comprises a, c, g, or t, or includes no nucleotide
  misc_feature (412)..(412): n comprises a, c, g, or t, or includes no nucleotide
  misc_feature (437)..(437): n comprises a, c, g, or t, or includes no nucleotide
  misc_feature (447)..(447): n comprises a, c, g, or t, or includes no nucleotide
  misc_feature (460)..(460): n comprises a, c, g, or t, or includes no nucleotide
  misc_feature (472)..(472): n comprises a, c, g, or t, or includes no nucleotide
  misc_feature (494)..(494): n comprises a, c, g, or t, or includes no nucleotide
  misc_feature (497)..(497): n comprises a, c, g, or t, or includes no nucleotide
  misc_feature (507)..(507): n comprises a, c, g, or t, or includes no nucleotide
tatgctgtcagtgaattagcaggtcatcaaaccagtgctgaatcttggggtactggcagagccgtggctcgaattccccgagttcgaggcggtgggactcaccgttctggccagggtgcttttggaaatatgtgtcgtggaggccgcatgtttgcaccaaccaaaacctggcgccgttggcaccgcagagtgaacacaacacaaaagcgatacgccatctgctctgccctggctgcctcagccttaccagcactggtcatgtctaaaggtcatcgtattgaggaagttcctgaacttcctttggtggttgaagataaagttgaaggctacaagaagaccaaggaggcagttttgcttnttaagaaacttaaagcctggaatgatatcaagaaaggtctatgcctnttaacgnatgagagcttggcaaaggcaaaatnggaaaacccnctcgaatcaacgnaggggaccttcnttatttacatgaaacacggttnatnaaggcttaanaacatcctggaatac

SEQ ID NO: 4934 - DNA, 669 bp, Canis familiaris
  misc_feature (412)..(412): n comprises a, c, g, or t, or includes no nucleotide
  misc_feature (419)..(419): n comprises a, c, g, or t, or includes no nucleotide
  misc_feature (431)..(431): n comprises a, c, g, or t, or includes no nucleotide
  misc_feature (445)..(445): n comprises a, c, g, or t, or includes no nucleotide
  misc_feature (452)..(452): n comprises a, c, g, or t, or includes no nucleotide
  misc_feature (480)..(480): n comprises a, c, g, or t, or includes no nucleotide
  misc_feature (512)..(512): n comprises a, c, g, or t, or includes no nucleotide
  misc_feature (533)..(533): n comprises a, c, g, or t, or includes no nucleotide
  misc_feature (553)..(553): n comprises a, c, g, or t, or includes no nucleotide
  misc_feature (571)..(571): n comprises a, c, g, or t, or includes no nucleotide
  misc_feature (592)..(592): n comprises a, c, g, or t, or includes no nucleotide
  misc_feature (605)..(605): n comprises a, c, g, or t, or includes no nucleotide
  misc_feature (630)..(630): n comprises a, c, g, or t, or includes no nucleotide
  misc_feature (640)..(640): n comprises a, c, g, or t, or includes no nucleotide
gactgtatcttgacctgatattttaatttttttatttatttttaattttttttaatttattttttttgacctgatatttttagagggaaagatttttcattatggattcagtttttttaatgtttactagtcttattcagattttctatttcttcttgcatcattttcaattatttctatttttctaggaaaattgttcatttcaaatgtattgccatggtgttgtttatgttattcagtatccctacccttttctttcataataatctttaattgtgcctcctctttttctcatgatcagtcttattaaaggtttatttcctttgttaaagttttcaaagaactagtttttggtattattgatctttttctttttttatttctgcttttttcctctatttcttttggaggnttattgntattggtgaggnctttttaagcttcnttaggtngagggccttactatttaaaattcaagcnaggtatttttttggtcaattgcatttaaaagnttgtaaattttccctcttaanaaactgctttagcttcaatnttacaaggtttaaaaaangtaatatttttggtgggtggncaagttctaaaanttttacattttccctggcatttatnttaaaaatcncaaaatatttaggaccggcttttactttt

SEQ ID NO: 4935 - DNA, 447 bp, Canis familiaris
agtttaggactagtgctgagtgtatgtggagagtttatattcctatgtgatatactattattaatgcatgtggtgtcatgcttgtctttgaatatataatagtgctaaattgcaaagtcatatggagcttttgaattattttgaccttttactgctactttgtctgctatattcaaaccctgaggcattcccaagctagaagataaaaatcaactttccaaaatgtccacatcctataaatgttgctcagcaaaagtccacagtgtcttccaaattatattgtaatatcttttacttgcaagtcagtaatatacatgggattgaatttttaaggagaaaaggaaagggtggaaaactaaggcattaggttgagaatatgcagtgagtgcctactaaccaatggacattatgctaatcactttctagccaatttcttacaatttaatt

SEQ ID NO: 4936 - DNA, 634 bp, Canis familiaris
  misc_feature (399)..(399): n comprises a, c, g, or t, or includes no nucleotide
  misc_feature (410)..(410): n comprises a, c, g, or t, or includes no nucleotide
  misc_feature (437)..(437): n comprises a, c, g, or t, or includes no nucleotide
  misc_feature (439)..(439): n comprises a, c, g, or t, or includes no nucleotide
  misc_feature (497)..(497): n comprises a, c, g, or t, or includes no nucleotide
  misc_feature (526)..(526): n comprises a, c, g, or t, or includes no nucleotide
  misc_feature (551)..(551): n comprises a, c, g, or t, or includes no nucleotide
  misc_feature (553)..(553): n comprises a, c, g, or t, or includes no nucleotide
  misc_feature (580)..(580): n comprises a, c, g, or t, or includes no nucleotide
  misc_feature (604)..(604): n comprises a, c, g, or t, or includes no nucleotide
cgcggccaccgcgagccctgccgctgcagccggggcgccgacctgagcgcccgctccgcgcccccgaggacagcgccggccaccccgacgcccgcaccatgcaggccacggccgatttcaccaagatggactgtgtgtggagcaactggaaaagtcaggctattgacctgctctactggcgggacatcaagcagaccgggatcgtgttcgggagcttcctgctgctgctcttctccctgacccagttcagcgtcgtgagcgtcgtggcctacctggccctggccgcactctcggccaccatcagtttccgcatctacaagtctgttttacaagcagtgcagaaaaccgacgagggccaccctttcaagacctacttggagctcgagatcacgctttctnaggagcagatncagaaagtacacggactggcttggagntntatgtgaacaataaaactgaaaggaactgaggaggtttttccttgtccaagacctggnggattcttaaaaattgaaggccttgatgngggttcctgacttacgttggcgctntntttaatggctgaccctgttgttaaggnttgggggtttaaaggttactttanccgaagggatgtaagcaccagcacaaattg

SEQ ID NO: 4937 - DNA, 318 bp, Canis familiaris
  misc_feature (111)..(111): n comprises a, c, g, or t, or includes no nucleotide
  misc_feature (142)..(142): n comprises a, c, g, or t, or includes no nucleotide
  misc_feature (287)..(287): n comprises a, c, g, or t, or includes no nucleotide
  misc_feature (311)..(311): n comprises a, c, g, or t, or includes no nucleotide
tcgaaggtcaccaggggccggtgactggaattaactgccatatggctgtgggcccaatcgacttctcacacctgtttgtcacgtcatcatttgactggaccgtcaaactgnggaccacaaagcacaacaagccgctctactnctttgaagacaacgcggactacgtgtacgacgtcatgtggtcccccgtgcaccccgcgctcttcgcctgcgtggacgggatggggcgcctggacctctggaacctcaacaatgacacggaggtgccaacagcgagtgtggccatngagggggcttccgccctaaaccgngttcgct

SEQ ID NO: 4938 - DNA, 647 bp, Canis familiaris
  misc_feature (376)..(376): n comprises a, c, g, or t, or includes no nucleotide
  misc_feature (417)..(417): n comprises a, c, g, or t, or includes no nucleotide
  misc_feature (442)..(442): n comprises a, c, g, or t, or includes no nucleotide
  misc_feature (444)..(444): n comprises a, c, g, or t, or includes no nucleotide
  misc_feature (464)..(464): n comprises a, c, g, or t, or includes no nucleotide
  misc_feature (473)..(473): n comprises a, c, g, or t, or includes no nucleotide
  misc_feature (544)..(544): n comprises a, c, g, or t, or includes no nucleotide
  misc_feature (552)..(552): n comprises a, c, g, or t, or includes no nucleotide
  misc_feature (571)..(571): n comprises a, c, g, or t, or includes no nucleotide
  misc_feature (579)..(579): n comprises a, c, g, or t, or includes no nucleotide
  misc_feature (599)..(599): n comprises a, c, g, or t, or includes no nucleotide
  misc_feature (632)..(632): n comprises a, c, g, or t, or includes no nucleotide
  misc_feature (646)..(646): n comprises a, c, g, or t, or includes no nucleotide
gataaacccagcgccaccgtccacgccgcccgcgccatgccgctcctcagcctgcacagccgcggaggccgcagcagcgagagttccagggtgtctcctcactgctgtagtaacctgggtccagggcctcggtggtgctcctgatgtccctcacccacccctgaagatcccaggtgggcgagggaatagtcagagggatcacaatctttcagctaatttattttactctgataatcggctgaatgtaacagaggaactaacgtctaacagcaagacgaggattctgaacgtccagaccaggctcacgggctccaaacacattaactggagagcggtgctgagcggcggctgcctctacatcgagatcccaggcggngccctgcggagggcaacaaggacagcttccaagtttttttngaggttcccggaggaggaagttgancnccgcccacgttttattttgntttcataanaaccgcgatgacagagccgccttgttcggacctttagatttttgggctttgagattgtgagaccgggcatncccttgtncccaaagaaccgaccttgntttatggnctaacgtttgagagagagtnttcggagaggaggagtaatggaaggccccttgnggcctttggttttnc

SEQ ID NO: 4939 - DNA, 424 bp, Canis familiaris
  misc_feature (232)..(232): n comprises a, c, g, or t, or includes no nucleotide
  misc_feature (393)..(393): n comprises a, c, g, or t, or includes no nucleotide
  misc_feature (395)..(395): n comprises a, c, g, or t, or includes no nucleotide
  misc_feature (407)..(407): n comprises a, c, g, or t, or includes no nucleotide
aggccaggtgcctgacggaagaggttgaggagcctgctgcaactgagaggcctgcccagccgggagctgccaacccgctggtggtgggagccgtggccctcctggacctcagcctggcgttcctgttctcccagctcctcacctgaggctcctgcccagccaagttctggctttggttgctgcctcttcacttctttgacctgcctttttctcctttcctcctcctggttgntttttttcctttctttctcttctcccttccctttcttccttgtccccctttgattttgtcttttgctttttctttccagctctcctttcagactctctcatttactctggatctgtctctgtcttcctcactcccttcccaccccaccccacccccacctntntttttagattgnttacatatgaagggctt

SEQ ID NO: 4940 - DNA, 473 bp, Canis familiaris
  misc_feature (343)..(343): n comprises a, c, g, or t, or includes no nucleotide
  misc_feature (354)..(354): n comprises a, c, g, or t, or includes no nucleotide
  misc_feature (432)..(432): n comprises a, c, g, or t, or includes no nucleotide
  misc_feature (457)..(457): n comprises a, c, g, or t, or includes no nucleotide
  misc_feature (466)..(466): n comprises a, c, g, or t, or includes no nucleotide
gaatcaacaaaccataggagctcgaaaggaactccagaaagaacttcaagaacagatgtcccgtggtgatccatttaaggatataattttgtatgtcaaggaggagatgaaaaaaaacaacatcccagaacccgttgtcattggaatagtctggtccagcgtaatgagcaccgtggaatggaacaaaaaggaggagcttgtagcagagcaagccatcaagcatttgaagcaatacagccctctacttgctgcctttactactcaaggtcagtctgagctgactctgttattgaagattcaggagtattgctatgacaacattcatttcatgaaagccttccanaaaatagtggngcttttttataaagctgaagtcctgagtgaagagcccattcttgaagtggtataaaaaagcccatgtttgccaggggnaaagggttttcctttggccaaatgnaaaagtttntaaaggg

SEQ ID NO: 4941 - DNA, 518 bp, Canis familiaris
  misc_feature (44)..(44): n comprises a, c, g, or t, or includes no nucleotide
  misc_feature (174)..(174): n comprises a, c, g, or t, or includes no nucleotide
  misc_feature (419)..(419): n comprises a, c, g, or t, or includes no nucleotide
  misc_feature (450)..(450): n comprises a, c, g, or t, or includes no nucleotide
  misc_feature (468)..(468): n comprises a, c, g, or t, or includes no nucleotide
  misc_feature (471)..(471): n comprises a, c, g, or t, or includes no nucleotide
aacagaccaaaatattatggaagagagtttcacgggatcatctnccgggaacaggcagacgagcttctcggaggcgtggagggcgcctacattcttagagaaagtcagcgccagccaggatgctacacattagctctcagatttggaaaccagactttaaactacaggctcttntatgatggaaaacactttgtgggcgagaagaggtttgaatcgattcacgatctggtcacagatggcttgataacattgtacatagaaacaaaggcttctgaatacatttccaaaatgacaacaaaccccatttatgaacacattggatatgccactctactccgagaaaaagtatccaggaggcttgagcaggtctaaaaatgaatcaagaaaaacaagcgttacaaatgaaggaacacacaacnagttggaaagatctcgtccctggtcccgaanggccgccttacgcacaantgncaaccactttaactaccagaaggcccaccacttcaaggtccatacat

SEQ ID NO: 4942 - DNA, 382 bp, Canis familiaris
agagcaaaggaggtttcagggatccagtggttttggtaaactgaggaatttgagaaggcgtgagcgcgggaaacgtgggagataattacagcagggctcagcggattcctacaccagcaggccgtccgactccgatgtgtctctggaagaggaccgggaggcgattcggcaggagagggagcagcaggccgccatccagctggagagagccaagtccaagcccgtggcattcgctgtgaagacgaacgtgagctactgcggcgcgttggatgaggatgtgcccgtcccgagcacagccatttcctttgatgccaaggactttctccacattaaagagaaatacaacaatgattggtggataggaaggctggtgaaagagggg

SEQ ID NO: 4943 - DNA, 609 bp, Canis familiaris
  misc_feature (373)..(373): n comprises a, c, g, or t, or includes no nucleotide
  misc_feature (377)..(377): n comprises a, c, g, or t, or includes no nucleotide
  misc_feature (405)..(405): n comprises a, c, g, or t, or includes no nucleotide
  misc_feature (418)..(418): n comprises a, c, g, or t, or includes no nucleotide
  misc_feature (430)..(430): n comprises a, c, g, or t, or includes no nucleotide
  misc_feature (457)..(457): n comprises a, c, g, or t, or includes no nucleotide
  misc_feature (493)..(494): n comprises a, c, g, or t, or includes no nucleotide
  misc_feature (498)..(498): n comprises a, c, g, or t, or includes no nucleotide
  misc_feature (564)..(564): n comprises a, c, g, or t, or includes no nucleotide
  misc_feature (589)..(589): n comprises a, c, g, or t, or includes no nucleotide
  misc_feature (599)..(599): n comprises a, c, g, or t, or includes no nucleotide
ttatgtaggaactagaataggagaatactttaatgaatccttttgtttagttaatgtattctcctattctagttcctacataactaaacaaaaggattcattaaagtattgttggaaaaatagttacattaaggacttccggtgttttcaaggaacccgaaagcagtttggtttattgccatatttaaagtggacagagtaagtaatttacattttaaaccatttcatcccatctattgttaaataaaatatacgttccaaaaggggcatgaaacaagatgtatagttctgtgggatattacaaagcaatcatttgtatagatacccacccagttgaaggaagagaacattgttcgtacccacaaagcacctntctnctctctcctaactacttgccttgccttncaacaaaggaagncacaccatcttnattttgggaaaaaatcacttccttggntttcttttaaaatttaaaaaactaagggaactttgnnccanaattcgtttttcctgggttttttttttaacttgaatggaatcatcattggaattcgggatgggtgntcttactcaaattatgttgggaaanaggactcttntccaagttgt

SEQ ID NO: 4944 - DNA, 481 bp, Canis familiaris
  misc_feature (468)..(468): n comprises a, c, g, or t, or includes no nucleotide
ttcagtcattctgtgaagttaatgcaccgaacatggattatgttattttaaacatggtattgtaatgattcttaagttttgtcattaagtacttaaatgtaattctgaaatttgaccttagttgccattaatgtagtttctggttgaacatgtgataatctaataccttaaaaactaattagctgtcagtaatatctaatatttttcatcttgcacggacttattaatcatcatatgctagaatcttgtctatctcattcactacacaaataaaggaatattgtcttcagaagaatgcgcaaaacccacaatttagatatcatgatcttattttgaatgtacaaagtatactaaaagtgtatgtgtgtattcacacacaggtttgtcttccatttttatgatcattctatggataaatgattctatggattctagggataataagaggctatggatctatctatgggntaatggaatattt

SEQ ID NO: 4945 - DNA, 417 bp, Canis familiaris
ttgctgttgaaacatgggagctggctcactctaaggaatattccacttacatgccatggcctgagccatgtaccatgtctcacttgggtcttatttttaaatatatatatattttttgtccacatgggcagtcagcctgcgagttgatttttgaagaaattaccaaagtttctgggaaaacatgttcaaggctaaactgaagaatggatctaattttattatttgttttgtaaggaagaaatctttctttgaactggtctttcattctttcttcccaaactaggttatagattttcaactgcaaaattcaggttgcttagacactgttttccagcattctgcagggtagatcagttgtatggaagttggaatgttctttttccagaattgaaaagaaaaaggttttagattatggaa

SEQ ID NO: 4946 - DNA, 420 bp, Canis familiaris
  misc_feature (417)..(417): n comprises a, c, g, or t, or includes no nucleotide
agacccggtatccccagcagtaccagccctcacccctccctgtgcattatgagctgctcccagatggatatacccggcatcgaagcctggatgcagacctccgggtgcgggataggacccccccacacctcctgtactcagaccgggaccggacctttttggaaggggactggaccagccctagtaaaagctctgaccgccgaaacagcctggagggctacagccgctcagtgcgcagccggagtggggagcgctggggagatggggaccggggcctgcccaagccctgggaggagaggcggaagcggaggagcctctccagtgaccgcgggaggacaacccactccccttacgaggagaagagaaccaggtgacacctatcccgtgttttataaggaattttgtcagtctttgtgnaat

SEQ ID NO: 4947 - DNA, 572 bp, Canis familiaris
  misc_feature (430)..(430): n comprises a, c, g, or t, or includes no nucleotide
  misc_feature (479)..(479): n comprises a, c, g, or t, or includes no nucleotide
  misc_feature (545)..(545): n comprises a, c, g, or t, or includes no nucleotide
  misc_feature (559)..(559): n comprises a, c, g, or t, or includes no nucleotide
  misc_feature (566)..(566): n comprises a, c, g, or t, or includes no nucleotide
taggaacctcacaaaaatttttattatggtgccatggttgttagtttttagtgagtgctgtaagatccaagattcattttaaaatatacagaatttcctttctcccaaagtggcaaaatttagctacagtggtacaaatatcatttacctagatgtgaataccttgtcacacgttaatgtcaacacatacagcaatttctgtgaaaagtagctgatgaagcctctcgttttctgtaattttgaatactgctctggcaacaaaaccataatatgaaaccagttagattctgcaagaagagctcttacaacagaactcacagcctccccccctcaccttcctttggtatcttgagccattaatgatttttttttttaatccagaaggtatattaagaaaccttttcagatttttctcctgatatggtcatgngggtggaggtctatcaaaacactttatttaccttacagaccttcgttgnacaaggcagacactgctggatttagaaattctatttaagtcattaaaactgcaaaacaatctgttnatgtccaaactganttaaaanaaatct

SEQ ID NO: 4948 - DNA, 693 bp, Canis familiaris
  misc_feature (457)..(457): n comprises a, c, g, or t, or includes no nucleotide
  misc_feature (509)..(509): n comprises a, c, g, or t, or includes no nucleotide
  misc_feature (575)..(575): n comprises a, c, g, or t, or includes no nucleotide
  misc_feature (584)..(584): n comprises a, c, g, or t, or includes no nucleotide
  misc_feature (595)..(595): n comprises a, c, g, or t, or includes no nucleotide
  misc_feature (637)..(637): n comprises a, c, g, or t, or includes no nucleotide
  misc_feature (639)..(639): n comprises a, c, g, or t, or includes no nucleotide
  misc_feature (648)..(648): n comprises a, c, g, or t, or includes no nucleotide
  misc_feature (692)..(692): n comprises a, c, g, or t, or includes no nucleotide
aaccttaattgaaatatatgtatcaacacgattctttgtatttttatttagaaaatatgtttatttaatcatgagtgctataattctttgaactatgatttctatcctaaactgtattttgcctttgtattttttggatggaaattccacatatttttcccattaaaatttagccacaccaagctatctacaatatatacatataaagaacaacgagaagagtacacttaccaggatgagcactgagtaatgtatagaattgttgaatcactatattatacacctaaaactaatataacattagatgttcactagaattaaactgtaaaatttaattaaaaaaataacaatgagaagaaaacaggaatagataaaataaattgtccgttgcaggcaatccatacattttcttttaaaaaaaatatcactttggctttttcaggacaattcttctggngggggagtgggctggtaggccaaagataaaaggaaaggaaaggtaaaattgngggccatttataaaccgtaaagctgtagagagcaaaatgaacctgggttggctaccccgtccctgngtacctgcncacgttcagtnttagtaatgacccggaggcataggaaaggaaatctatttgangnttactgcangtgaggtagtttctacccaatcaacagttggaggggagctatgnt

SEQ ID NO: 4949 - DNA, 673 bp, Canis familiaris
  misc_feature (461)..(461): n comprises a, c, g, or t, or includes no nucleotide
  misc_feature (511)..(511): n comprises a, c, g, or t, or includes no nucleotide
  misc_feature (527)..(527): n comprises a, c, g, or t, or includes no nucleotide
  misc_feature (570)..(570): n comprises a, c, g, or t, or includes no nucleotide
  misc_feature (584)..(584): n comprises a, c, g, or t, or includes no nucleotide
  misc_feature (661)..(661): n comprises a, c, g, or t, or includes no nucleotide
  misc_feature (669)..(669): n comprises a, c, g, or t, or includes no nucleotide
taccgggcttcctgcagcagagccagagctccgggcccggccaggccgccgtgtggcaccgcctggaggagctttacacgaagaaattgtggcatcaactgacactccaggtgcttgattttgtgcaggacccatgctttgcccaaggagatggcctcattaagctttatgaaaacttcatcagtgaatttgaacacagggtgaatcctctgtccctggtagaaattattcttcacgtagttagacagatgactgatcctaatgtggctcttacttttctggaaaagactcgcgaaaaggtgaaaagtagcgatgaggcagtgatcctgtgtaaaactgcaattggagctctaaaattaaacatcggggacctacaggttacaaaggaaacaattgaagatgtcgaagagatgctcaacaacctcctggtgtgacctcggttacaagcggttctatgactnttcagtaaatctatcaacaatcggaaaccatcattctatacaaaatgctnttgcggttctggctgngtcgtataaggatttgccagtgcttgacagaagagagagtttncgcttggctagcangacttttggcgaggcggtttaactttgagaactctatgcccccggctggatactgagagcaccgaccgcagggttgntgaacctnttgc

SEQ ID NO: 4950 - DNA, 313 bp, Canis familiaris
  misc_feature (210)..(210): n comprises a, c, g, or t, or includes no nucleotide
gctcggccgcacctttcggggccgtcggcctccagccggttgctgagctgagcatgagtggggtgcgcgagcggccgagcaggtgtttctcccccgagcaccgcggacagcgggagctggtctgttcggagaactggtttacccccttgcagatgagggggagtttctccctttcctgactctttgatttggaagaccgccccccccctncacccccctgtcccccaccccacctttggtcagaatcagtcctttggtgaaagaaagaaccgcaggagttgagtctcggtttggtcctgccgagtcctggttg

SEQ ID NO: 4951 - DNA, 539 bp, Canis familiaris
  misc_feature (143)..(143): n comprises a, c, g, or t, or includes no nucleotide
  misc_feature (158)..(158): n comprises a, c, g, or t, or includes no nucleotide
  misc_feature (227)..(227): n comprises a, c, g, or t, or includes no nucleotide
  misc_feature (240)..(240): n comprises a, c, g, or t, or includes no nucleotide
  misc_feature (251)..(251): n comprises a, c, g, or t, or includes no nucleotide
  misc_feature (254)..(254): n comprises a, c, g, or t, or includes no nucleotide
  misc_feature (280)..(280): n comprises a, c, g, or t, or includes no nucleotide
  misc_feature (328)..(328): n comprises a, c, g, or t, or includes no nucleotide
  misc_feature (346)..(346): n comprises a, c, g, or t, or includes no nucleotide
  misc_feature (403)..(403): n comprises a, c, g, or t, or includes no nucleotide
  misc_feature (405)..(405): n comprises a, c, g, or t, or includes no nucleotide
  misc_feature (434)..(434): n comprises a, c, g, or t, or includes no nucleotide
  misc_feature (451)..(451): n comprises a, c, g, or t, or includes no nucleotide
  misc_feature (462)..(462): n comprises a, c, g, or t, or includes no nucleotide
  misc_feature (495)..(495): n comprises a, c, g, or t, or includes no nucleotide
  misc_feature (510)..(510): n comprises a, c, g, or t, or includes no nucleotide
  misc_feature (523)..(523): n comprises a, c, g, or t, or includes no nucleotide
  misc_feature (529)..(529): n comprises a, c, g, or t, or includes no nucleotide
  misc_feature (538)..(538): n comprises a, c, g, or t, or includes no nucleotide
gagacgatgccccgactgcccggccgcgcggggctgctgctcggcgtggggctgctggcggcgctgctggccgcgggccgggcgctccccctgaggaagccgcggccccggggccccgcgaggctggcggaggtaccagcctncccagatcgcagctnttctagggaagaagaggggatcccaccgctccccagaacccgctttcaggcagggccacgccggcacangcgtagggctctnagtgagccagnagncctgagcccagacaaggcgacccctnccaggaccctggaggatgctcccttgctgcttgagctgcagaagctgncaggattggccaacacanacttgagtgccccaaaccccaacatcaggtgaccatcgaggtggtggaggatcccangncaaggtggagatggactacccaacaatgnttggcacagaatgcctnaagttggttgncaccaaggagattttttggccctatttgggggnatttaaagggaaggngggagggattgtntaaggnagaccccang

SEQ ID NO: 4952 - DNA, 415 bp, Canis familiaris
  misc_feature (32)..(32): n comprises a, c, g, or t, or includes no nucleotide
  misc_feature (62)..(62): n comprises a, c, g, or t, or includes no nucleotide
  misc_feature (156)..(156): n comprises a, c, g, or t, or includes no nucleotide
  misc_feature (180)..(180): n comprises a, c, g, or t, or includes no nucleotide
  misc_feature (187)..(187): n comprises a, c, g, or t, or includes no nucleotide
  misc_feature (191)..(191): n comprises a, c, g, or t, or includes no nucleotide
  misc_feature (214)..(214): n comprises a, c, g, or t, or includes no nucleotide
  misc_feature (223)..(223): n comprises a, c, g, or t, or includes no nucleotide
  misc_feature (229)..(229): n comprises a, c, g, or t, or includes no nucleotide
  misc_feature (242)..(242): n comprises a, c, g, or t, or includes no nucleotide
  misc_feature (250)..(250): n comprises a, c, g, or t, or includes no nucleotide
  misc_feature (254)..(254): n comprises a, c, g, or t, or includes no nucleotide
  misc_feature (281)..(281): n comprises a, c, g, or t, or includes no nucleotide
  misc_feature (301)..(301): n comprises a, c, g, or t, or includes no nucleotide
  misc_feature (346)..(346): n comprises a, c, g, or t, or includes no nucleotide
  misc_feature (354)..(354): n comprises a, c, g, or t, or includes no nucleotide
  misc_feature (375)..(375): n comprises a, c, g, or t, or includes no nucleotide
  misc_feature (414)..(414): n comprises a, c, g, or t, or includes no nucleotide
gagacgatgccccgactgcccggccgcgcggngctgctgctcggcgtggggctgctggcggngctgctggccgcgtgccgggcgctccccctgaggaagccgcagccccggggccccgcgaggctggcggaggtaccagcctccccagatcgcagntctcctagggaagaagaggggatnccaccgntccncataacccgcttccaggcagggncacgccggnacaggngtcgggctctcantgagccancagncctgagcccagacaaggcgacccctcncaggaccctggaggatgctnccttgctgtttgagctgcaaaagctgccaggattggccaacacanacttgagngccccaaaccccaacatccangtgaccatcgaggtggtggaggatcctcagccaaggtgna

SEQ ID NO: 4953 - DNA, 653 bp, Canis familiaris
  misc_feature (290)..(290): n comprises a, c, g, or t, or includes no nucleotide
  misc_feature (466)..(466): n comprises a, c, g, or t, or includes no nucleotide
  misc_feature (508)..(508): n comprises a, c, g, or t, or includes no nucleotide
  misc_feature (549)..(549): n comprises a, c, g, or t, or includes no nucleotide
  misc_feature (584)..(584): n comprises a, c, g, or t, or includes no nucleotide
  misc_feature (594)..(594): n comprises a, c, g, or t, or includes no nucleotide
  misc_feature (628)..(628): n comprises a, c, g, or t, or includes no nucleotide
  misc_feature (636)..(636): n comprises a, c, g, or t, or includes no nucleotide
agacagcacgtcagttttattgaatatgtaaaggatgggctgaaacacatgcgtgtgaagttctacattgagggctccgagcctgggaaacaaggaacagtgcatcttgaagtgaaggagaacccagaaagtggcgaatatgaatttcgatacatatttgttgaacttgagccccaccctagaagaactatcatcatcgaagacaatcgatcctgagctgactgcaagacccccgcaagcacggtttccaagcacacgtggagtggtgcgggcacacagctccgcccttncccactctcctcccaaggctgtagaataagataggaaagagtgtgcagcacataaaagtgaatgtaactgggtagtagttgcatttagatacacgtaccgtggagaatttcttacagagggcaaatcatgaaaaagaacatactttatggtgtctctggaatcgatcatgggcagnatttctgtctaggtaatatctttcatgataagaaatttgttnttaaaaactataccatgtgaataagcaaaaagaggtcaatnttttatgctttcatgctggtaactggaaaatctgngaaataaagnccgaagtacagaaaaaaaaaaaaaaaaaaaaggngggcgttntagggatcaagttacta

SEQ ID NO: 4954 - DNA, 518 bp, Canis familiaris
  misc_feature (447)..(447): n comprises a, c, g, or t, or includes no nucleotide
  misc_feature (457)..(457): n comprises a, c, g, or t, or includes no nucleotide
  misc_feature (468)..(468): n comprises a, c, g, or t, or includes no nucleotide
  misc_feature (478)..(478): n comprises a, c, g, or t, or includes no nucleotide
gagctgcttccacaaccctcagtagacaaggtctttcttcttttaaagtgctaaaagccacacctgggtggctcaatggttgagcagctgtcttcagctcagggtgtgatcctggagtcgctggattgagtcccacattgggctccccataggaaacctgcttctgcctctgcctatgtctttgcctctctgtgtctcatgaataaataaaatctttaaaaataaaataaaggtctaagcacaaatttaaaacttaccatcacactctttccccacccccattcttagaatgggtgggacaaaaaaacaaacagaaaactatccatcttcactcacaacttctttccctgaaggagctacctccttcaaagtaattgacattgatattaattttcctttctaatttggggctaataagcaaggtcataaaagtatttgtgatatggnaaaatatatngaaaggaatanggaaacatcnatatttttacttcttctttttgggggaatcttttgcaggt

SEQ ID NO: 4955 - DNA, 391 bp, Canis familiaris
  misc_feature (21)..(21): n comprises a, c, g, or t, or includes no nucleotide
  misc_feature (57)..(57): n comprises a, c, g, or t, or includes no nucleotide
  misc_feature (108)..(108): n comprises a, c, g, or t, or includes no nucleotide
  misc_feature (117)..(117): n comprises a, c, g, or t, or includes no nucleotide
  misc_feature (185)..(185): n comprises a, c, g, or t, or includes no nucleotide
  misc_feature (187)..(187): n comprises a, c, g, or t, or includes no nucleotide
  misc_feature (205)..(205): n comprises a, c, g, or t, or includes no nucleotide
  misc_feature (217)..(217): n comprises a, c, g, or t, or includes no nucleotide
  misc_feature (300)..(300): n comprises a, c, g, or t, or includes no nucleotide
  misc_feature (345)..(345): n comprises a, c, g, or t, or includes no nucleotide
  misc_feature (353)..(353): n comprises a, c, g, or t, or includes no nucleotide
attcgccagctctatacgacnactatagggaaagctggtcgcctgcaggtccggccngaattccgggtcgcccacgcgccgggtttttagttctctatatcatttcantaatattgnctacaaaattaacccatacaagcacaatagacgcacaagaaggggaaacagtatgaaccattctaccngncattattctaatcctaancgctctaccttnccttccgaatcctttatattatggaccgaaattaataacccctctttaaccgtgaaaacaataggccaccaatgatacttgangctatgaatatactggctatgaagacttaaactttgactcctacntaatcccnacacaagaattaaaagccagggagaaccttcggctatt

SEQ ID NO: 4956 - DNA, 607 bp, Canis familiaris
  misc_feature (409)..(409): n comprises a, c, g, or t, or includes no nucleotide
  misc_feature (424)..(424): n comprises a, c, g, or t, or includes no nucleotide
  misc_feature (426)..(426): n comprises a, c, g, or t, or includes no nucleotide
  misc_feature (440)..(440): n comprises a, c, g, or t, or includes no nucleotide
  misc_feature (539)..(539): n comprises a, c, g, or t, or includes no nucleotide
  misc_feature (553)..(553): n comprises a, c, g, or t, or includes no nucleotide
  misc_feature (580)..(580): n comprises a, c, g, or t, or includes no nucleotide
  misc_feature (582)..(582): n comprises a, c, g, or t, or includes no nucleotide
  misc_feature (588)..(588): n comprises a, c, g, or t, or includes no nucleotide
ttggaagagaggatagattcctcaatcattttgcaaatactcgctggtttggtggtgtacctctcatttccttgggcaagaagactgtgaaacaaccagtatatgttgtagatgtatcaaaaggaattgttaatgcaattaaggatccagatgccaaagggaaatcttttgcctttgttgggcccaatcggtaccttctttttgacctggtgcaatatgtctttgctatggctcacagacccttcctgccgtaccctttgccacattttgcctatcggtgggtggcacgactcttcgaaatgagtccatttgaaccctggacaacaagggataaagtggagcggcttcacatcacagacatgatattgcctcacctgccaggcttggaagacctgggaattcaagcctnaccctggagcttaangncattgagggactgngggccaccgacttaccgttggttgttgtccgaaattgaaacgtgaagccggccaagactgcaacttttaacttgccctgtgatgccctggagttttggnggcaaacaagttgnctggctggtgactagcccacttttttnanggaatnctgttatagtgaataagaa

SEQ ID NO: 4957 - DNA, 475 bp, Canis familiaris
  misc_feature (363)..(363): n comprises a, c, g, or t, or includes no nucleotide
  misc_feature (388)..(388): n comprises a, c, g, or t, or includes no nucleotide
  misc_feature (414)..(414): n comprises a, c, g, or t, or includes no nucleotide
  misc_feature (428)..(428): n comprises a, c, g, or t, or includes no nucleotide
  misc_feature (438)..(438): n comprises a, c, g, or t, or includes no nucleotide
  misc_feature (440)..(440): n comprises a, c, g, or t, or includes no nucleotide
  misc_feature (454)..(454): n comprises a, c, g, or t, or includes no nucleotide
aagataaaaaataaaggcaagaaaaagaagccaaaagattcaaagcctatgttggtggggtctgggacaccttctgtaacaccaaataatgagactatcacttcgggtgaagaacataacagacgcaattcaaattctgcagggccatttgtggtacctgaccaccttcggcaagatgtagaagaatttgaagctatctatgagcagcacagtagtgaatatgttgtccgtaataaaaagctgtgggacattaacccaaaacaaaaatgttcaactctgtatgattatttctctcagttgttggaggagcatggtcccttggacatgagtaataaaatgttctctgaagaatatgaattcttnccagaagaaactagacagatactanaaaaagctggagggttgaaatttttncttctggggatggnctcggtttgntngggttggcaacttnattggttttgaagaaagttgt

SEQ ID NO: 4958 - DNA, 159 bp, Canis familiaris
cacatttgtgcgttttacctttgagcccagtggtttatatgatgacctttgctccgtttacagcagggtttgaagcagagctctctgtcaggaaccctgcccaaggcccttctgttcacacattcctgtgctgaataaagtgtgtttgactctaaaaaa

SEQ ID NO: 4959 - DNA, 423 bp, Canis familiaris
  misc_feature (246)..(246): n comprises a, c, g, or t, or includes no nucleotide
  misc_feature (253)..(253): n comprises a, c, g, or t, or includes no nucleotide
  misc_feature (277)..(277): n comprises a, c, g, or t, or includes no nucleotide
  misc_feature (322)..(322): n comprises a, c, g, or t, or includes no nucleotide
  misc_feature (328)..(328): n comprises a, c, g, or t, or includes no nucleotide
  misc_feature (363)..(363): n comprises a, c, g, or t, or includes no nucleotide
  misc_feature (377)..(378): n comprises a, c, g, or t, or includes no nucleotide
  misc_feature (397)..(397): n comprises a, c, g, or t, or includes no nucleotide
ttcgtgcccatctcgggctggcacggggacaacatgctggagccctcgcccaacatgccgtggttcaagggctggaaagtggagcgtaaggaggggaacgccagtggcgtgtccctgctggaggccctggacacaatcctgccccctacacgccccacagataagcccctgcgtctgccactgcaggacgtgtacaagattggtggcattggcaccgtgcccgtgggccgggtggagacgggcatncttcggncgggcatggtggtgaccttcgctnctgtaaacatcaccacggaggtgaagtcggtggagatgcaccacnaggctntgagcgaggccctgcctggtgacaacgtcggcttnaatgtgaagaacgnntcggtcaaggacattcctngaggcaacgtgttgtggggacagcaa

SEQ ID NO: 4960 - DNA, 491 bp, Canis familiaris
  misc_feature (198)..(198): n comprises a, c, g, or t, or includes no nucleotide
  misc_feature (212)..(212): n comprises a, c, g, or t, or includes no nucleotide
  misc_feature (234)..(234): n comprises a, c, g, or t, or includes no nucleotide
  misc_feature (313)..(313): n comprises a, c, g, or t, or includes no nucleotide
  misc_feature (368)..(368): n comprises a, c, g, or t, or includes no nucleotide
  misc_feature (417)..(417): n comprises a, c, g, or t, or includes no nucleotide
  misc_feature (421)..(421): n comprises a, c, g, or t, or includes no nucleotide
  misc_feature (426)..(426): n comprises a, c, g, or t, or includes no nucleotide
  misc_feature (455)..(455): n comprises a, c, g, or t, or includes no nucleotide
  misc_feature (460)..(460): n comprises a, c, g, or t, or includes no nucleotide
  misc_feature (466)..(466): n comprises a, c, g, or t, or includes no nucleotide
  misc_feature (483)..(483): n comprises a, c, g, or t, or includes no nucleotide
acgcgtggggaaaaagatcatttctctttatttgttactaggtgtaaaattttaatagttaatgcaaaattctgtaatcattgaatcattagtgattaatgtttgaaaaagctctctcaatcaagtatgtgatgtattaataatgccttatctatggtttgtagttattttaaatagcatgagccttgtccctgtagncagtagggggcagncttgctttattcatcctccatntcaaaatgaacttggaattaagtattttagtgtaagatatgtataatgctggccattttaaaggggttttctcaaaagntgaaacttttgttatgactgcatttctgcacataatccatacttgctgttgaaantaatctagaaatttattcatttgtactgtgaacacctggaagcaaaatnatantgcanaatacatttaaagtgtgttcaagaatatnttctnaaattngttaaataacaagcctnatttttta

SEQ ID NO: 4961 - DNA, 219 bp, Canis familiaris
  misc_feature (67)..(67): n comprises a, c, g, or t, or includes no nucleotide
  misc_feature (91)..(91): n comprises a, c, g, or t, or includes no nucleotide
  misc_feature (117)..(117): n comprises a, c, g, or t, or includes no nucleotide
  misc_feature (133)..(133): n comprises a, c, g, or t, or includes no nucleotide
  misc_feature (142)..(142): n comprises a, c, g, or t, or includes no nucleotide
  misc_feature (152)..(152): n comprises a, c, g, or t, or includes no nucleotide
  misc_feature (171)..(171): n comprises a, c, g, or t, or includes no nucleotide
  misc_feature (192)..(192): n comprises a, c, g, or t, or includes no nucleotide
gacaggctccctgacaggagcgggagctgcggaaaagggtcggcggccatggagttgggcgagctgntttacaacaagtccgagtacatcnagacggcgtctggaaacaaagttagncgccagtcggtgttgngcggaagtnagaacattgntctcaatggcaagacaatngtgatgaatgactgtattatncgaggggatctcgcaaatgtaagggtt

SEQ ID NO: 4962 - DNA, 509 bp, Canis familiaris
  misc_feature (426)..(426): n comprises a, c, g, or t, or includes no nucleotide
  misc_feature (436)..(436): n comprises a, c, g, or t, or includes no nucleotide
  misc_feature (474)..(474): n comprises a, c, g, or t, or includes no nucleotide
cagttgtcattcttcttcctgggaaataaatgtcagctctgccttaataagtatttgttttaaatttctaagaacttattttacaacaggagacccaaaatccttcatagacttttgttccacaaatgtttttcttaattaagaagtgttaccttattaaaatgaccaccattctaaaccatttttatgtggtctgaatagcaagtttacagtttcgtaccaactatctaaaaacctaatttacaaatagaccacagacctcctcctacttttatagacttgaatacttaagtaatttaaattagagttggttggtatttatttcattttttaaatctaaatctttcctggaataatacaagatcaatgttcagcaaaaaacacctgcttgagtttaagccattttcaaaagaaacttgccttctnaatcaatggnggttccagaaccattaaggggatatagggaattgggantaagggagggaaactttgggttggtctttatgaaa

SEQ ID NO: 4963 - DNA, 552 bp, Canis familiaris
  misc_feature (440)..(440): n comprises a, c, g, or t, or includes no nucleotide
  misc_feature (480)..(480): n comprises a, c, g, or t, or includes no nucleotide
  misc_feature (483)..(483): n comprises a, c, g, or t, or includes no nucleotide
  misc_feature (485)..(485): n comprises a, c, g, or t, or includes no nucleotide
  misc_feature (527)..(527): n comprises a, c, g, or t, or includes no nucleotide
gaacagcagttgttagttgctaatttctctccattccaaggagcttagaatggagagaaattagctcatatgaaaaaaagactggcctaaggaacagcagttgttagttgctaatggtgtaaactgacccagccctctggtagacacaggatagataactctttggatagcatgtcttttttctgttaattagttgtatactctggcctctgtcatatcttcacaatggtgctcttttcatggggtattagccattcagttacagaagatgatttgaagatcttgatttgtttcagaatgatgcatatttcacattttccagtttggttatcacttgtttggggttgtaccagaagggtctagagaatgattctttgattatgattctctaacaaaggaatattgaacggtaaacattgcaaataacaattaaaaatggntaggttccatccatctactaaaattttttccaaaatattntgntntttgaagaaacaaaattgatgaatttgaacctcaattggganaacctatttggatggacctttttaa

SEQ ID NO: 4964 - DNA, 522 bp, Canis familiaris
  misc_feature (161)..(161): n comprises a, c, g, or t, or includes no nucleotide
  misc_feature (250)..(250): n comprises a, c, g, or t, or includes no nucleotide
  misc_feature (446)..(446): n comprises a, c, g, or t, or includes no nucleotide
  misc_feature (450)..(450): n comprises a, c, g, or t, or includes no nucleotide
  misc_feature (481)..(481): n comprises a, c, g, or t, or includes no nucleotide
  misc_feature (494)..(494): n comprises a, c, g, or t, or includes no nucleotide
  misc_feature (505)..(505): n comprises a, c, g, or t, or includes no nucleotide
atttccttctaaatgcaaaccacattcttccttctgttcacctctacctgtgtcttttcatttttttttcagacatgaactggttatcttttggaatagtgataacacatgaaataacttttttttttaattaaccttttaatagatcagcagttgggggngaaacatcatactttttcaaagctaatatctgatctaaatattaaagtccacgttacaatgtatggggaactaactgtaaaactgactnttaagggaaaaaagaaaaaaaaaagaaagaaagaaaagcttcagaacatgataaccagaaatctggaatctaaactgaagccagcaacaaattcaaatctcatttggaagatcttgctgccattcagtacaaatgtgtgctctggttacctaaaaatacccgtattgggaaggtaaaactctagtaagcatggtantttnaaactcaacaattgggattttttatattttntggacggactcanaaaagcttggnttacttgaggaaaagag

SEQ ID NO: 4965 - DNA, 352 bp, Canis familiaris
  misc_feature (295)..(295): n comprises a, c, g, or t, or includes no nucleotide
  misc_feature (297)..(297): n comprises a, c, g, or t, or includes no nucleotide
  misc_feature (324)..(324): n comprises a, c, g, or t, or includes no nucleotide
  misc_feature (331)..(331): n comprises a, c, g, or t, or includes no nucleotide
  misc_feature (349)..(349): n comprises a, c, g, or t, or includes no nucleotide
ctcctaaattgtttcggtttgaaggtaagtactcatatgtgatttaaagtagttgtccagatgtgaatagattaattttaaatgtgcttaagtgtaaagttctacaactcatgtgatttctagtgaaaatggtttctaagagctttctcaaagttagaaaatgacattgttctagcagttcttcattgttagattttcatagttatgagtaaatttatagttcattataaaagagatgtgtgttttgcttgtttctaaaataagataaaatgtcatgttcctttttataatagcngngatattgcctgtagttacattaatatnttagttnactagcaccgactggagntgc

SEQ ID NO: 4966 - DNA, 651 bp, Canis familiaris
  misc_feature (479)..(479): n comprises a, c, g, or t, or includes no nucleotide
  misc_feature (506)..(506): n comprises a, c, g, or t, or includes no nucleotide
  misc_feature (532)..(532): n comprises a, c, g, or t, or includes no nucleotide
  misc_feature (542)..(542): n comprises a, c, g, or t, or includes no nucleotide
  misc_feature (559)..(559): n comprises a, c, g, or t, or includes no nucleotide
  misc_feature (578)..(578): n comprises a, c, g, or t, or includes no nucleotide
  misc_feature (580)..(580): n comprises a, c, g, or t, or includes no nucleotide
  misc_feature (645)..(645): n comprises a, c, g, or t, or includes no nucleotide
tggtttgccgaagaaaatcaaacgcaaagaccgtgggggaagaaccaataaagggcctaatatgttttcaggaatggatgactttcaagagtatagtaaaccaggaaaaaaatggaaggttatgactcaggaattcattaatcagcacacagtggaacacaaaggaaaacaaatctgtaaatactttttggaaggaagatgtattaagggagatcagtgtaaatttgatcatgatgcagagttggagaagagaaaagagatctgcaaattttatttacaaggatattgtaccaaaggagagaactgcatttatatgcataatgaatttccgtgtaagttctatcatagtggagcaaaatgttaccaaggagacaactgtaaattttcacatgatgatctgactaaagaaacaaagaaacttttggacaaagtgttgaacacttgaagaagaagccataatgaagatgaacgagaattanaagacttagaaacgggcataactcctnttccaacaccttcaggagttgtcttntgccaccccncagagcattttcctttntgtcctgaagacgattttnancagatctttttgtgatttaagaaaatccatcttttttgaatagttggaaaccactggggtttacnataaat

SEQ ID NO: 4967 - DNA, 684 bp, Canis familiaris
  misc_feature (459)..(459): n comprises a, c, g, or t, or includes no nucleotide
  misc_feature (470)..(470): n comprises a, c, g, or t, or includes no nucleotide
  misc_feature (499)..(499): n comprises a, c, g, or t, or includes no nucleotide
  misc_feature (502)..(502): n comprises a, c, g, or t, or includes no nucleotide
  misc_feature (600)..(600): n comprises a, c, g, or t, or includes no nucleotide
  misc_feature (615)..(615): n comprises a, c, g, or t, or includes no nucleotide
  misc_feature (620)..(620): n comprises a, c, g, or t, or includes no nucleotide
  misc_feature (678)..(678): n comprises a, c, g, or t, or includes no nucleotide
  misc_feature (682)..(682): n comprises a, c, g, or t, or includes no nucleotide
aataaaagaaattgaagacacaaataaatgaaaagctaccctatgcttgtcagtgggaagaacactgttaaaatatccatactacccaaagcaatgcacagactccgtgcagtctgtatggaaccacaaaagaccctgtatagccaaagcaatcttgagaaagaacaaagcatcgcactccctgatttcacactatatcacaaagagattgcaatttaaaaaacaaaacacatagatcaatgaaaccgagaacccagaataatcccacgtatatatggtcaattaatttatagcggaggagccaatatcagacagtggagaaatcagagtctctttaattaatagtgttgggaaaactgaagagccacatgcaaaagaatgaaactggagcagggtacttgggtggctcagtcagctaaacatcggactattgatcttcactcaggtcttgatctcaangtcatgagttnaagccccatgttgggctccaactgggtgnggngatactttttaaaaagtttacactaggccacttttttcaccatacacaaaaatcactcaaatggattaagacgaattaaagacctgaaacataccttnagaggaaacaaagcngaagntcttgcataagctggcttgaatttggttaacccaaagcaagcccaaggaaacaatggntctntc

SEQ ID NO: 4968 - DNA, 496 bp, Canis familiaris
  misc_feature (405)..(405): n comprises a, c, g, or t, or includes no nucleotide
tgatcaaagggagaagtgattgtgcacacgtgtatttaagagaaatgagagaacattgcaaagtgatttcccaaggcatttcccttttgtttacatggtcaaaaggaaaatcacaaacacttctaattacaacatgtgccatgtctctgtggtgtgggtaatcagattattgaagttgatgtctgtaccaaagatctggaatgggggcaacttttatattttaatactgaagtcctggctccttttggccactttacaagtcttccctcacctaggataaatagcagaaatattcagaaagcttgacagttttcatcctgaaggagcagaatcatgaccactcctttcctgagatgaaatttgggagtgtaaagtactttgaaaggagcatttaccccttaatgnattattttatggatgaaatagaaaacaaatggagaggcctaccctggatctagatattatgtaacatggcaacgactatgaaaacggaaga

SEQ ID NO: 4969 - DNA, 398 bp, Canis familiaris
ccaccaacaagggaaatggaggtagaactgcctctgagagggaaggggagagtagagcaagcgatagggtggggttgcctagcttggatagaagtagagttgcccaaagggggatgctttgtgtgtggatgggggaagggagtagtccgccagagggccagagcggctgggctgagagtgatgcagcagacaaagccaccaaccctggcttggtatttttaaactgtgcgtgggtgggaagtgggggcggggactggaaagggggctcttcttgggggaggagctgggaggctggcttcctgtgttcccccttgatttggcttctaagaaattggaggggcatggtagggtaggtggggcctgggagggggccagggatgagtgggggccggcagaac

SEQ ID NO: 4970 - DNA, 677 bp, Canis familiaris
  misc_feature (436)..(436): n comprises a, c, g, or t, or includes no nucleotide
  misc_feature (450)..(450): n comprises a, c, g, or t, or includes no nucleotide
  misc_feature (554)..(554): n comprises a, c, g, or t, or includes no nucleotide
  misc_feature (591)..(591): n comprises a, c, g, or t, or includes no nucleotide
  misc_feature (603)..(603): n comprises a, c, g, or t, or includes no nucleotide
  misc_feature (619)..(619): n comprises a, c, g, or t, or includes no nucleotide
  misc_feature (624)..(624): n comprises a, c, g, or t, or includes no nucleotide
  misc_feature (647)..(647): n comprises a, c, g, or t, or includes no nucleotide
  misc_feature (662)..(662): n comprises a, c, g, or t, or includes no nucleotide
tcactcatttttatgttctaatgatgctacctagcattctgatttttatatgatccagccaaagagtaccaatctatgcaacagatgttagtatacattagtaaacattaatgttagtaaacattaaccaatgtttctctgaacatcatttcatcaaagggaaatttcaagttggagtgcttcctttgcttacattcatgtcctgtttttgttacttgtttcaagactgtaaggcatgggttcaaataagattggtctctttggttggagactatctctgggttcattcaatcagttgagaaacattgggcaccttcattaccaggcattatgctagatactgaggatatgaaggtaagattcctgtatttcctgccctcacagagcttatggtctcatatggtttcatacagtcttatgtggtcttagagaaggngatttaaactaggnataataaaagaaaatgccctggctctttcacttaaaataagaatcttgatgggttttcataagaaacttctagttctcaccatttgaactgcaaccactgaagngatttacagctctcatttttgctggaaggggttgttntggggacatttntagtttgggggactgnttttncctggtacaatgtctaaatgggngaagggcaaaacggntaaacattttaggag

SEQ ID NO: 4971 - DNA, 277 bp, Canis familiaris
  misc_feature (34)..(34): n comprises a, c, g, or t, or includes no nucleotide
  misc_feature (54)..(54): n comprises a, c, g, or t, or includes no nucleotide
  misc_feature (81)..(81): n comprises a, c, g, or t, or includes no nucleotide
  misc_feature (104)..(104): n comprises a, c, g, or t, or includes no nucleotide
  misc_feature (107)..(107): n comprises a, c, g, or t, or includes no nucleotide
  misc_feature (139)..(139): n comprises a, c, g, or t, or includes no nucleotide
  misc_feature (150)..(150): n comprises a, c, g, or t, or includes no nucleotide
  misc_feature (152)..(152): n comprises a, c, g, or t, or includes no nucleotide
  misc_feature (179)..(179): n comprises a, c, g, or t, or includes no nucleotide
  misc_feature (185)..(186): n comprises a, c, g, or t, or includes no nucleotide
  misc_feature (206)..(206): n comprises a, c, g, or t, or includes no nucleotide
  misc_feature (252)..(252): n comprises a, c, g, or t, or includes no nucleotide
  misc_feature (262)..(262): n comprises a, c, g, or t, or includes no nucleotide
  misc_feature (271)..(271): n comprises a, c, g, or t, or includes no nucleotide
agacacaggcggagggaggggcggcttcatgcanggagcccaatgtggggcttnatccctggactccgggatcatgccctnaactgaaggcggacactcaactnttnagccacccagggatccccctgatacctgtgtntttctgttatntntttatctggcatggaggtgggaactgngctttnntttttacaatataatatggnaaaagcaaagagatttacaggtgtaattaaagtccttagtcagatnactttaagtnaacttaaanaaggat

SEQ ID NO: 4972 - DNA, 687 bp, Canis familiaris
  misc_feature (468)..(468): n comprises a, c, g, or t, or includes no nucleotide
  misc_feature (582)..(582): n comprises a, c, g, or t, or includes no nucleotide
  misc_feature (592)..(592): n comprises a, c, g, or t, or includes no nucleotide
  misc_feature (596)..(596): n comprises a, c, g, or t, or includes no nucleotide
  misc_feature (634)..(634): n comprises a, c, g, or t, or includes no nucleotide
  misc_feature (640)..(640): n comprises a, c, g, or t, or includes no nucleotide
  misc_feature (675)..(675): n comprises a, c, g, or t, or includes no nucleotide
gagctcctgcggaacgctgtgttattaaggtttcccctgatttgccagacaccatctatgttttagctcttacctatgacagtgcaagactctggtggtactttggctgttacttttgtttgcccacacttttcaccatcacctgctctttagtgactgcaaggaaaatccgcaaagctgagaaagcctgtacgcgagggaataaacgacagattcagctagaaagccagatgaactgtacagtagtggctctgaccattttatatggattttgcattattcctgaaaatatctgcaatattgttactgcctacatggcgacaggggtttctcagcagacaatggacctgctttatatcatcagccagttccttttgttctttaagtcctgtgttacccctgtcctccttttctgtctttgcaaacccttcagtcgggcttttatggaagtgctgttgctggtgctgngatgagtgcattcaaaaagtcttaacagtgaccagcgatgacaatgacaacgaatataccacagaacttgactttacctttaataccatacgccgggaaaggccacttttgttntgtggaactnatgntgaaagacagcctttgtggtacattactggtggatttnaatccnggaaggtttacttatattttcctctgggaaaaagncaaagagaaaaa

SEQ ID NO: 4973 - DNA, 580 bp, Canis familiaris
  misc_feature (450)..(450): n comprises a, c, g, or t, or includes no nucleotide
  misc_feature (567)..(567): n comprises a, c, g, or t, or includes no nucleotide
agcccgcctccactctgccacctgcccctcattcccctctttggtgcctgtcaactgcttgttagcagtggaccgtggggaaagagccatgctttggggtttagtaggattccattcccagttctgatcagacctgctgtgtgaccttgggcccatccttttcctgtctggccctgggtttttccaccagggggaactgagtggaggaccccaatgtcctgatttttaattgctgacatgcctcctatccactgtgtcccactccaagtgccagagaaatggaggcaggttcctaccccaggaggaaacagccccatgaagaaggacactcctgtgggtgggtgggtagtcaagccagtgtggaccacagggcaccagcatgatcctgaggcaagcacgcaagggaggctggcagacaaaagtggtcagggccaccccaccaagcagtgnaactttgttcttttaaaaacatcctgtagatgcaaaaaatcaaacctaaaacagacccagcttcagcatgcgaacacctctataggaacatgttcttccaggattggcacactgtangctaatcttgacc

SEQ ID NO: 4974 - DNA, 643 bp, Canis familiaris
  misc_feature (451)..(451): n comprises a, c, g, or t, or includes no nucleotide
  misc_feature (484)..(484): n comprises a, c, g, or t, or includes no nucleotide
  misc_feature (486)..(486): n comprises a, c, g, or t, or includes no nucleotide
  misc_feature (526)..(526): n comprises a, c, g, or t, or includes no nucleotide
  misc_feature (540)..(540): n comprises a, c, g, or t, or includes no nucleotide
  misc_feature (572)..(572): n comprises a, c, g, or t, or includes no nucleotide
  misc_feature (587)..(587): n comprises a, c, g, or t, or includes no nucleotide
  misc_feature (595)..(595): n comprises a, c, g, or t, or includes no nucleotide
  misc_feature (597)..(597): n comprises a, c, g, or t, or includes no nucleotide
  misc_feature (615)..(615): n comprises a, c, g, or t, or includes no nucleotide
  misc_feature (634)..(634): n comprises a, c, g, or t, or includes no nucleotide
ggagccctgcccttggcgaattgtggatgattgtggtggggcctttacgatgggtaccataggtggtggtatctttcaagcaatcaaaggttttcgcaattctccagtgggagtaaaccacagactacgagggagtttaacagctattaaaaccagggctccacagttgggaggtagctttgcagtttggggaggtttattttccatgattgactgcagtatggttcaagtcagagggaaagaagatccctggaactccatcacaagtggtgccttaacaggagccatactggcagcaagaaatggaccagtggctatggttgggtcagctgcgatgggtggcattctcctagctttaattgaaggagctggtatcttgttgacaagatttgcctctgcacaagtttcccaatggtcctcaatttgcttgaaaacccttttaagttgcttnaagcccagttaccatcttaccttttggggactntngcaattccaataggacttttttccaggatttttttaacanaatgagctgtgttnaaaaggaatttaaaaaataagttaaagtctgnttttaaaccataggngggacagntntagccaataggcttgaanaacacttactttttttttnttaaaaaac

SEQ ID NO: 4975 - DNA, 421 bp, Canis familiaris
  misc_feature (397)..(397): n comprises a, c, g, or t, or includes no nucleotide
gacttttcagttgttgactgtcttcttgcatctgtaaaagaggagaggatacaggataagctgctgcccccaggattggtgagacaggtgaatatggggagtatcggtttaccagagcagagactcatgagtggaagcagtttggggaaccagtgcctggataggaaatcctgaactataattgatgagttggttagaggctcagtgtggtcaactctgagagttaaaaagtacaaggggacccagtcacggagacaaggaggtacaatttatgtagtttacctccaagaggtcaactaggttctcatagcaaaatatcagaagaaaatccccttgttcttccagcaagggaggggaaaaggagccattttgaaatataccaaagcactttgttctnagttaaccagaacccaatctactg

SEQ ID NO: 4976 - DNA, 264 bp, Canis familiaris
atgacaaaagaaaataaaaattgagccttgggacgtgcccatttttactgtaaattatgattccataactgacccgtagtaagcagtgtttctggcccctaagtattgctgccttgtgtatttgatttagtgtacagtactataggtgcacaactctggtcatttttcaagccatgttttattgtatctgttttctactttatgtgagcaaggtttgctgtccaaggtgtaaatattcaatgggaataaaactggcatggtact

SEQ ID NO: 4977 - DNA, 367 bp, Canis familiaris
ggcggatggcttcaccttcgtggtctacgagttctgggagacggaggaggagtggaggaggcatctgcagagccccgtgtgcaaggccttccggcatgtcaaggtggacacgctgagtcagcctgaggccctctccaggatcttggtgccagctgtttggtgtaccgtgggccgtgactgaccgccttcctgaggcctttggagccacctgccaaccccgcccccttttctagaaactttggtacacaagtggtcttttcaatctacttccagataagaatgtattttccctgtttgaaatgaaagagcagggcccttcccccagccttccccggacccccacccctagtggcaaagcaatctgagc

SEQ ID NO: 4978 - DNA, 568 bp, Canis familiaris
  misc_feature (400)..(400): n comprises a, c, g, or t, or includes no nucleotide
  misc_feature (411)..(411): n comprises a, c, g, or t, or includes no nucleotide
  misc_feature (425)..(425): n comprises a, c, g, or t, or includes no nucleotide
  misc_feature (435)..(435): n comprises a, c, g, or t, or includes no nucleotide
  misc_feature (444)..(444): n comprises a, c, g, or t, or includes no nucleotide
  misc_feature (469)..(469): n comprises a, c, g, or t, or includes no nucleotide
  misc_feature (501)..(501): n comprises a, c, g, or t, or includes no nucleotide
  misc_feature (529)..(529): n comprises a, c, g, or t, or includes no nucleotide
  misc_feature (546)..(546): n comprises a, c, g, or t, or includes no nucleotide
  misc_feature (554)..(554): n comprises a, c, g, or t, or includes no nucleotide
gtctctgtcgccccatctgagaagcagagggcacgatcctctgacaggcctgtgatgcatcagcgtggctccatctaagggctccaagtccgatgcctcacgagctaccgattgtggggatatggccagggtcgtttcagggaactgagctgggctgggcccctgcagctgacagagagaaggtggccaggaagaaagcagcagcaccctgggcggaaaatgaaggcgcttctgctgctggtcctgccttggctcagccctgccaactacattgataacgtgggcaacctgcacttcctctactcagaactctgtaaaggtgcttcccactacggcctgaccaaagacaagaagaggcgctctcaagatggctgcccgatggctgcgtgagcctcacggnaacaagctctnttcccaaaagtctnttgccgctgncaccgctcnttggtgacaaaagagcttggcttanaaaccctgctacctgtcccccgggaggatggncagccacaaaaaagccattggacttggncggggcaaccgaactanggcacggncctttggcgatccc

SEQ ID NO: 4979 - DNA, 415 bp, Canis familiaris
gcgttttcttccttcggcagccgaggctgcgtcggggccggggctggggtcggggccaggaggaattttgttgtcagagaataaaaggaggttgtccataattgactttaagcagcaaacagtaaaacactgagctcttcagctccgcctttcttgctcagaattggaaaaccaagaaggttttgatgttttgtgtggcgccacctgaattagaaaccaagatgaacataaccaaaggaggtctggtgttgttttcagcaaattctaattcatcatgtatggagctctcaaagaagattgctgagcggctgggggtggagatgggcaaagtgcaggtttaccaggaacctaacagagaaacaagagtgcagattcaagaatcccttgaggggaaaagatgtttttatcatccaga

SEQ ID NO: 4980 - DNA, 620 bp, Canis familiaris
  misc_feature (424)..(424): n comprises a, c, g, or t, or includes no nucleotide
  misc_feature (483)..(483): n comprises a, c, g, or t, or includes no nucleotide
  misc_feature (531)..(531): n comprises a, c, g, or t, or includes no nucleotide
  misc_feature (557)..(557): n comprises a, c, g, or t, or includes no nucleotide
  misc_feature (568)..(568): n comprises a, c, g, or t, or includes no nucleotide
  misc_feature (599)..(599): n comprises a, c, g, or t, or includes no nucleotide
  misc_feature (602)..(602): n comprises a, c, g, or t, or includes no nucleotide
  misc_feature (605)..(605): n comprises a, c, g, or t, or includes no nucleotide
acaaggcgttcaccaaggagctggaccagtgggtcgagcagctcaacgagtgtaagcagctgaacgagaaccaggtgcggacgctgtgcgagaaggctaaggaaattttaacaaaagaatcaaatgtgcaagaggttcgttgtcctgtaaccgtatgcggagatgtgcatggtcaatttcatgatcttatggaactctttagaattggtggaaaatcaccagatacaaactatctgttcatgggcgactatgtagacagaggctattactcagtggagactgtgactcttcttgtggcattaaaggtgcgttatccagaacgcattacaatattgagaggaaaccatgaaagccgacaaattacccaagtatatggcttttacgatgaatgtctaccaaagtatggaaatgccaatggtttggnaatatttcacaaatctatttgattatcttcccttacaactttagtagatggacagaaanttttgcttcacgggggcctttttcattcatagatcactggatcatatnaaactttggatcgttacaagaagttncacatgaaggncccatgtgtgatcttgtgtggcagatccaangancgnggggggggggggttt

SEQ ID NO: 4981 - DNA, 477 bp, Canis familiaris
  misc_feature (134)..(134): n comprises a, c, g, or t, or includes no nucleotide
  misc_feature (327)..(327): n comprises a, c, g, or t, or includes no nucleotide
  misc_feature (441)..(441): n comprises a, c, g, or t, or includes no nucleotide
  misc_feature (469)..(469): n comprises a, c, g, or t, or includes no nucleotide
acgcgtgggtctgatttgaggaatgtgtgggaaaaaatggagaaaagttttgagaacactatgtgggcttcctaacaagttttattttgataacaactgaattcggaatttagtaacaaccaaaagggaagagngcttcagccatcttttaaaaagaagttaaaattctgcaacttgtatccatactatgtcctaactactgtaaaagaagaagtaatttattagagcccgtgaccttcctttgaaagtttttttaacgtaaggagggagaagaaaattaactatataactttgtaactggccaaattttgttagtgtttaatttgnctaaaataagcttggcttgcactggaaagaaaaggtcagtgaatttggtcaaagtaagctaagtacaattgacctagtaggagcataaaattatttctaatagaatcatactgnactcttaccaaataaacagaaatatatnttaaggat

SEQ ID NO: 4982 - DNA, 554 bp, Canis familiaris
  misc_feature (409)..(409): n comprises a, c, g, or t, or includes no nucleotide
  misc_feature (419)..(419): n comprises a, c, g, or t, or includes no nucleotide
  misc_feature (429)..(429): n comprises a, c, g, or t, or includes no nucleotide
  misc_feature (449)..(449): n comprises a, c, g, or t, or includes no nucleotide
  misc_feature (481)..(481): n comprises a, c, g, or t, or includes no nucleotide
  misc_feature (486)..(486): n comprises a, c, g, or t, or includes no nucleotide
  misc_feature (509)..(509): n comprises a, c, g, or t, or includes no nucleotide
  misc_feature (512)..(512): n comprises a, c, g, or t, or includes no nucleotide
agagtggcactagcacgctgtccagtgcggcctgtctccggcctcctgtgctggatgagtctctgatccgtgaacagaccaaagtggaccacttctggggtcttgacgacgatggagatcttaaaggtggaaataaagctgccactcagggaaatggggacctggcagcagaagccgccagaagcaatggctacacatgtagtgactgcctcttgctatccgagcgcaaggacacactcacagcacactctgccacccacgggccatcgccacggctctactcaagggatcagggtcagaaacgtcacctgttggtgcagatgctgcaaaggatcggagcttctggatggtctgtgtcgaaaacactgctgtgcgttctttggttggccatggtcgctccaaggaaagnaggctttggnatattcttgngggttcggaattggatgganccagttggttaccttgattcggggttgaatgngtttntttttacaaggggccttcgaaanatntgcaagtttttaatcttgctcattccactataactttactag

SEQ ID NO: 4983 - DNA, 695 bp, Canis familiaris
  misc_feature (595)..(595): n comprises a, c, g, or t, or includes no nucleotide
  misc_feature (599)..(599): n comprises a, c, g, or t, or includes no nucleotide
  misc_feature (601)..(601): n comprises a, c, g, or t, or includes no nucleotide
  misc_feature (635)..(635): n comprises a, c, g, or t, or includes no nucleotide
  misc_feature (645)..(645): n comprises a, c, g, or t, or includes no nucleotide
  misc_feature (647)..(647): n comprises a, c, g, or t, or includes no nucleotide
  misc_feature (677)..(677): n comprises a, c, g, or t, or includes no nucleotide
  misc_feature (686)..(686): n comprises a, c, g, or t, or includes no nucleotide
ggtatacattactatttgcttccaaagatctctctttggttagaaacccacacaaaaactaaaacttgtaatattgtatgtttatctatctccacatatttccagcatatgtagcgttaataggcctgtcctggtaactgtgtgtttgggatttcatttttggttccaccaaattaggaaaagaaatggctcagttgtgtatgactagttagagatttttggagccaaacacctgctgtttcgtagatacctagtacagagtctaaacttgtcatttgtttttcctcacagagtaaccacccattcattgctgtcttcccaacttccaatgatctttcaataactttcttgcctctagaatcatccgttccaagtatgcatacatgcctagcacatagtaggtgctcaaatattaatttccttcttacctccttatcatgtatctttccatttccaatatggattccaacccaatagtaaatgacattacatgtaatgaaacaccgattgggctaaattggatcttacctggataaagcaattttgattttatataagcttggtggatatgaaaaaaaaacagggagaaaaattntttntngaatattttaagttaggaagagagaaggcaatgngtacattgtnangtactttgctgaaaaaatgtttggtgattntttcttaanaacctaaaa

SEQ ID NO: 4984 - DNA, 512 bp, Canis familiaris
  misc_feature (292)..(292): n comprises a, c, g, or t, or includes no nucleotide
  misc_feature (389)..(389): n comprises a, c, g, or t, or includes no nucleotide
  misc_feature (394)..(394): n comprises a, c, g, or t, or includes no nucleotide
  misc_feature (417)..(417): n comprises a, c, g, or t, or includes no nucleotide
  misc_feature (429)..(429): n comprises a, c, g, or t, or includes no nucleotide
  misc_feature (474)..(474): n comprises a, c, g, or t, or includes no nucleotide
  misc_feature (484)..(484): n comprises a, c, g, or t, or includes no nucleotide
  misc_feature (498)..(498): n comprises a, c, g, or t, or includes no nucleotide
atacatttccttttctattaggtgaatgtctaggagtggaatggtctgattatatggttaaatgtctatttagccttttaagaattgttctcattttctgtgatacataaaaaatggtcacaaacttagcagtttcaaacaagacacatttattatctcacagatttgtgggtcagaagtccaagaattgcttagctagtcccctacttaggatcttacaaagttgcagttaaggtgttggccatggggatccctgggtggcgcagcggtttggcacctgcctttggcccanggcgtgatcctggagacccgggatcgaatcccacatggggctcccggtgcatggagcctgcttctccctctgcctgtgctctgcgcctctctctctntctgngactatcataaataaataaaaanttaaaaaaaaanttaaaaaaaaaaaaaaggggtgggccttgggtaggttttatgccnagggtcactnggaaagggtccctnccccttttggggtt

SEQ ID NO: 4985 - DNA, 621 bp, Canis familiaris
  misc_feature (463)..(463): n comprises a, c, g, or t, or includes no nucleotide
  misc_feature (500)..(500): n comprises a, c, g, or t, or includes no nucleotide
  misc_feature (523)..(523): n comprises a, c, g, or t, or includes no nucleotide
  misc_feature (527)..(527): n comprises a, c, g, or t, or includes no nucleotide
  misc_feature (559)..(559): n comprises a, c, g, or t, or includes no nucleotide
  misc_feature (598)..(598): n comprises a, c, g, or t, or includes no nucleotide
aaataaataaaaatttttaaaaatttttaaaaaaagacccattgataaattccttacacaagatggactttagacccaaagacccctcagtttcaaagtgagaggatggagatccatttatcatttaaatgaacattaaaagaaagctggagtagccatacttatattagacaaacaagattttaaaccaaagactgtaataagagatgaaaaataacactgtatcataatacaagcatcttatccaacaagatctaacaattgtaaatattgatgcccctgaacttcatgacaaatacataaagcaattggtaacaaacttaaagaaattcattgataataatacaatgacagtaggggattttaacaccccactcacagcaatggacagattatctaagcagaaaatcaacaaggaaacaagggctttgaatgaccactgggccagatgactttacatatntttagaacatttatacttaaagcactgatacacattnttttaagtttgcatagaacattntcanactagacggtactaggcacaaataagcctcanccatataagaggatgggacatacctgctttttttagacncacctttgacttggaataataca

SEQ ID NO: 4986 - DNA, 208 bp, Canis familiaris
  misc_feature (182)..(183): n comprises a, c, g, or t, or includes no nucleotide
  misc_feature (188)..(188): n comprises a, c, g, or t, or includes no nucleotide
tgttgaacagaattggaatattttctttagaattacttgaaaagacaaatgaaagcttattatagaatgcttgtattttcttttctctctctagaaccagtatattgctggcagctattgtattaaaaaaataaagtatattttcactatcaaaaaaaaaaaaaaaaaaaaaaaaaaaaaannaaaanaataaaaaaaaaaaaaaaaa

SEQ ID NO: 4987 - DNA, 694 bp, Canis familiaris
  misc_feature (457)..(457): n comprises a, c, g, or t, or includes no nucleotide
  misc_feature (461)..(461): n comprises a, c, g, or t, or includes no nucleotide
  misc_feature (480)..(480): n comprises a, c, g, or t, or includes no nucleotide
  misc_feature (521)..(521): n comprises a, c, g, or t, or includes no nucleotide
  misc_feature (534)..(534): n comprises a, c, g, or t, or includes no nucleotide
  misc_feature (589)..(590): n comprises a, c, g, or t, or includes no nucleotide
  misc_feature (624)..(624): n comprises a, c, g, or t, or includes no nucleotide
  misc_feature (634)..(634): n comprises a, c, g, or t, or includes no nucleotide
  misc_feature (645)..(645): n comprises a, c, g, or t, or includes no nucleotide
  misc_feature (661)..(661): n comprises a, c, g, or t, or includes no nucleotide
  misc_feature (665)..(665): n comprises a, c, g, or t, or includes no nucleotide
  misc_feature (670)..(670): n comprises a, c, g, or t, or includes no nucleotide
  misc_feature (688)..(688): n comprises a, c, g, or t, or includes no nucleotide
aaatttacctatatagggaataaaatggaatggggggtgggggttccatttctgacagctgacatttattaaactttggctcaaagatcatgtgattcttaacaattggctttttaaaaaaattaactgacttctctgttcttcaagtccaggacacattagtctcctgatccaatcagaaatctgtttttaaataatgctaaaaggagctactataaatctactacacctaccattgaagaagctggattctgattcattgacaagctttccaaaatcaattttataatagatttccttgaataaaatggcccagttgtcattcttcttcctgggaaataaatgtcagctctgccttaataagtatttgttttaaatttctaagaacttattttacaacaggagacccaaaatccttcatagacttttgttccacaaatggttttcttaattaaanaagnggtcccttatttaaaaganccccattctaaaccatttttttgtggtctggaatagcaagnttacagtttcgtnccccctttttaaaaacctaatttacaaatagaccacagacctccccctacttttnngacttgaatacttaagtatttaaataaagtgggnggggttattnttttttaaacnaaactttctggataancaanacaangtcacaaaaacactgttngttaag

SEQ ID NO: 4988 - DNA, 592 bp, Canis familiaris
  misc_feature (414)..(414): n comprises a, c, g, or t, or includes no nucleotide
  misc_feature (428)..(428): n comprises a, c, g, or t, or includes no nucleotide
  misc_feature (437)..(437): n comprises a, c, g, or t, or includes no nucleotide
  misc_feature (454)..(454): n comprises a, c, g, or t, or includes no nucleotide
  misc_feature (480)..(480): n comprises a, c, g, or t, or includes no nucleotide
  misc_feature (502)..(502): n comprises a, c, g, or t, or includes no nucleotide
  misc_feature (535)..(535): n comprises a, c, g, or t, or includes no nucleotide
  misc_feature (540)..(540): n comprises a, c, g, or t, or includes no nucleotide
  misc_feature (557)..(557): n comprises a, c, g, or t, or includes no nucleotide
  misc_feature (572)..(572): n comprises a, c, g, or t, or includes no nucleotide
  misc_feature (583)..(583): n comprises a, c, g, or t, or includes no nucleotide
agttgaatacacattatccctctctcaagaaagagtttaatgtttagtgtggagccaacataagtaaatcaacaattttaagtttagtctaataaggactaatactgagatgggtacatgattctataggagtgtgggggacaaaatgagtactaactgatgtccattcaacaagcatgtagtctaaattaatcacagaatcctattcccctttccagggatttttcattttcagtaatgggttgcctaagtaacattaagccaggggaggccccaagaaagcttactgagggatttgtgaagggaagttttgtcactcctaagagaaagtcataggaagttgatctctttccaatgaaaattaatgaggaaatgtgttcccccaaagaataccagcagtctttcatgaagccncactggagacttcngaggggagnattccaaattgaccggngggaatcctgggggggtcaaaggttnacacccgcctttggtccagggngggacctggggtcccgggatcaggtcccacatnagggncctgcatgggagcctgntttcctctgccgggncttgccctctnttgggcttt

SEQ ID NO: 4989 - DNA, 441 bp, Canis familiaris
  misc_feature (408)..(408): n comprises a, c, g, or t, or includes no nucleotide
gccagttaagaaaccagagcattcctttttattgaaaaaaaaaattgttatcaggttgtttcagttgtatcagatgccctatctgctcaagcaaacagaactaagctaagtgcattttcatcccagaagagagttgcatttgtattgatatggaaatttgtataccagcgcttccttcggctagtatcttatcacccgaagatttaagatacaccaaattccagtttgtttctaacattgttcattttcagtgcactttgttttatgtaataaagtatgcctgttatattaaataataaaaatatggcaattagtgatatagtgtaccaaaacaaagatgttctagatatattctctggcaaagacgatcccaaatttattttcatgaatcaaacatttttttcctgngaatatttttccatccttaaaaaatgacgtccc

SEQ ID NO: 4990 - DNA, 340 bp, Canis familiaris
agtgcggaagcctgaggaccgggtggaggcggtggggaccccagccttgcgccggggagcgctcccccgaatgagccgccccacccacccgaggctggtgccgctgcaccctgctgcccctccccaggccttggcaatgacgaccccccaaagagcccgtgtgcatcccggatccggggactcaggcctccagctcctggggtccgggagcccagccccagccccccaggatccccacgtactgctccccggcacctccctgtctcccctccgaagaagatcggttgccctgcacccttggagtctgtcttgagcttaataaatgtgcatttggttttta

SEQ ID NO: 4991 - DNA, 644 bp, Canis familiaris
  misc_feature (412)..(412): n comprises a, c, g, or t, or includes no nucleotide
  misc_feature (415)..(415): n comprises a, c, g, or t, or includes no nucleotide
  misc_feature (419)..(419): n comprises a, c, g, or t, or includes no nucleotide
  misc_feature (465)..(465): n comprises a, c, g, or t, or includes no nucleotide
  misc_feature (541)..(541): n comprises a, c, g, or t, or includes no nucleotide
  misc_feature (581)..(581): n comprises a, c, g, or t, or includes no nucleotide
  misc_feature (596)..(596): n comprises a, c, g, or t, or includes no nucleotide
  misc_feature (600)..(600): n comprises a, c, g, or t, or includes no nucleotide
atttgtggatagagctaatgcagtacttggaagaaaattatggcactaaaaaagaaagttcttaaatcaatgacctaagcatccactttaagaaactggaaaagtaagagcaaatgaaattcaaagtaagcagaagaaagaaacaataaaggatcaagcaataaaccgaaaagagaggaaaaaatagagaagattaataaagccaaaaccagttctctgaaaaggtaaataaaactgataaacttctagtcaagtttatcaaacaaaaaaatatgatatgatatatttccttatgatagataaggactattggggatattgggaatgagaaagatgacatcactacagattctcaaatatcaaaggactaataactggcggggaatttccacccattaggatcctgggtggnttnaatnggagagcatccaccccttttttttaaattcttttattattaagaanagccataaaaagagagggggagagagaggcaaaacccaggccgagggagaacaggcttcatgcccaggagcccganggggatcgaccctggctttaggatcggccctgggccaagnaggccccaaccctgngccncccaggatcctttttttttttactacactttggtctcaaattga

SEQ ID NO: 4992 - DNA, 677 bp, Canis familiaris
  misc_feature (128)..(128): n comprises a, c, g, or t, or includes no nucleotide
  misc_feature (476)..(476): n comprises a, c, g, or t, or includes no nucleotide
  misc_feature (536)..(536): n comprises a, c, g, or t, or includes no nucleotide
  misc_feature (584)..(584): n comprises a, c, g, or t, or includes no nucleotide
  misc_feature (600)..(600): n comprises a, c, g, or t, or includes no nucleotide
  misc_feature (629)..(629): n comprises a, c, g, or t, or includes no nucleotide
  misc_feature (634)..(634): n comprises a, c, g, or t, or includes no nucleotide
  misc_feature (672)..(672): n comprises a, c, g, or t, or includes no nucleotide
  misc_feature (675)..(675): n comprises a, c, g, or t, or includes no nucleotide
accagctgttctccatatgtgctaagaatagaacaggaggaaacaggcctagactggagtgtgaggggccatttcctggcagggacaattattaaattagaatcctttgtttaagaaaaaaaaaaagngaatctctgtctctctccctctctttctcttctgtctcactttctttgaggctttttaaaaaattagataaaaatctgtttatttaagatggctacagatgttcttatgtcaaggtggaataacagattacggaatcttccaaaagacgttttgatcctctaactacgtaatgaaaatcttcaaaactgagtcattcggatgaggccaaggtctaatttaggcatttaccccttggtccctaatggaggagaatcaaaaggggaaaaagcccccaaatgcagagctcactaaaagatctatggcaaacccagcaggattaaacaggaaacaaatctcatattcttaanaagatgatggacatgtattttaatatcttaaattgaaagggggtggggcatttttttttntggtatcccttcactgcttaggggaggggattcgggtttaaagagacntattaaaaacaaagtngagggttttgttgggcgtctttttcatgnggggnccttacatggccctgtgaaaagcctgtcaaacctttanggntt

SEQ ID NO: 4993 - DNA, 620 bp, Canis familiaris
  misc_feature (431)..(431): n comprises a, c, g, or t, or includes no nucleotide
  misc_feature (437)..(437): n comprises a, c, g, or t, or includes no nucleotide
  misc_feature (439)..(439): n comprises a, c, g, or t, or includes no nucleotide
  misc_feature (462)..(462): n comprises a, c, g, or t, or includes no nucleotide
  misc_feature (509)..(510): n comprises a, c, g, or t, or includes no nucleotide
  misc_feature (530)..(530): n comprises a, c, g, or t, or includes no nucleotide
  misc_feature (591)..(591): n comprises a, c, g, or t, or includes no nucleotide
ctggatcatgctgaattttggggtgagagagaaggaaacagaacttaaaatggataaagtaagatatgttaaaaatgtccctgttttgtcctgaaattttagtccattctggataaataggattttctagttcagatatgagaagttgtagctctgatatctagctttagccttggtctgctgattgcgttgttttgatttgcttttctggaaaagcatttttgctagcagccatacagacttcctccttcatacctagcagtactttatatcgtaaaactttgtgccatgcagcatttgaagactcagtttttaaaattgttagcctgttgctgactttattgtgttaattcctatttcaacagctatttcccttaattcaggatacaacttcttgtgtatgacagctttccttcacacaccatttttgngggtgngnatatatctgcttggggaggaatnggaaaaaacacaactttttaatttgtttaaaaaaacctttgcctgtnncatttgggctcttaccaatnaagaaccggggcattttaatttatatggggatggttccactagaaatctccatgatttgtngggcccttataactgcattttaaaatttt

SEQ ID NO: 4994 - DNA, 563 bp, Canis familiaris
  misc_feature (222)..(222): n comprises a, c, g, or t, or includes no nucleotide
  misc_feature (246)..(246): n comprises a, c, g, or t, or includes no nucleotide
  misc_feature (330)..(330): n comprises a, c, g, or t, or includes no nucleotide
  misc_feature (402)..(402): n comprises a, c, g, or t, or includes no nucleotide
  misc_feature (460)..(460): n comprises a, c, g, or t, or includes no nucleotide
  misc_feature (484)..(484): n comprises a, c, g, or t, or includes no nucleotide
  misc_feature (491)..(491): n comprises a, c, g, or t, or includes no nucleotide
  misc_feature (497)..(497): n comprises a, c, g, or t, or includes no nucleotide
  misc_feature (529)..(529): n comprises a, c, g, or t, or includes no nucleotide
  misc_feature (533)..(533): n comprises a, c, g, or t, or includes no nucleotide
  misc_feature (556)..(556): n comprises a, c, g, or t, or includes no nucleotide
cccataggtggtacctgtgagtctgcaggccctctgtagctcttgtgtcatgggacccccactgctttcagctgcttgcactcttatatctcaagtatgccattccagagataggcaagatagaaaatggtcctttgggaagatctcaaacaggtcagaatgttgcaagcaatttttattttttactttctatcctgagagaggagccaggaattggtcagnttcctctggaccacactgtgctgnaccaaggaggggggggtgaggcaagagtgagcaagaattccatgaaatttcttgcccttttgcgtttttgttttattagtgttngggtgctacagctccttaactggtttctagagttctcacaactcttgctttttatattcagaatcatttcanatgttctgctattgcttgctagatgggcattaggaaactcttttaaaagtaaaaaaanttttaactcctttataagttaaanggggggncataanggaattggccctccaaaatcctgattgggttntttntccacaaagccctaagcctaaanataaggt

SEQ ID NO: 4995 - DNA, 596 bp, Canis familiaris
  misc_feature (328)..(328): n comprises a, c, g, or t, or includes no nucleotide
  misc_feature (369)..(369): n comprises a, c, g, or t, or includes no nucleotide
  misc_feature (383)..(383): n comprises a, c, g, or t, or includes no nucleotide
  misc_feature (398)..(398): n comprises a, c, g, or t, or includes no nucleotide
  misc_feature (441)..(441): n comprises a, c, g, or t, or includes no nucleotide
  misc_feature (446)..(446): n comprises a, c, g, or t, or includes no nucleotide
  misc_feature (467)..(467): n comprises a, c, g, or t, or includes no nucleotide
  misc_feature (485)..(485): n comprises a, c, g, or t, or includes no nucleotide
  misc_feature (491)..(491): n comprises a, c, g, or t, or includes no nucleotide
  misc_feature (535)..(535): n comprises a, c, g, or t, or includes no nucleotide
  misc_feature (553)..(553): n comprises a, c, g, or t, or includes no nucleotide
agcagggcaaggcgggagtcacaggcgggaccctcggcatgggtccacggacctagagcggcggaagctaccggcccggtgccaagctggccgctgctccttcccatggcccccatggctgaggactggctggattgcccagccttgggccctggctggaagcgccgtgaggtctttcgaaaatcaggtgccacctgtggacgctcagacacctattaccagagccccacaggagacaggatccgaagcaaagttgagctgacccgatacctgggccctgcgtgtgacctcaccctcttcgacttcaaacaaggcattctgtgctatncagcccctaaggccccgtccttagatgtccctggcaggaancggaagaagccttnacgggcagcccaaanttaaaaacgtaaggttggaccccaaaagggtgaagtcaggaangaggncccaggagatgagaccaaagnttgttgctgaaaaaattntacttnacttccttgcactgggtgctgtgaaaactgtggaatagcttttnagaaatggtacccgaaanaagcggtttaaaaattatcaaggactgccaacgcaaaaattct

SEQ ID NO: 4996 - DNA, 615 bp, Canis familiaris
  misc_feature (444)..(444): n comprises a, c, g, or t, or includes no nucleotide
  misc_feature (457)..(457): n comprises a, c, g, or t, or includes no nucleotide
  misc_feature (526)..(526): n comprises a, c, g, or t, or includes no nucleotide
  misc_feature (529)..(529): n comprises a, c, g, or t, or includes no nucleotide
  misc_feature (532)..(532): n comprises a, c, g, or t, or includes no nucleotide
  misc_feature (562)..(562): n comprises a, c, g, or t, or includes no nucleotide
  misc_feature (587)..(587): n comprises a, c, g, or t, or includes no nucleotide
atcagctgattttttttttttacaaaggtgccaatgtatttaaaaaggaaaaggataatcttttcaacaaatggtattgaaataactataaaaaacatgaaaacaaaatcaaaaccttctctcctacttaaaagtctacagaaaaattaaatgtaactggtgaaatgaaaacaaatctaggagagaatctttgtaatccaggttagagaaatattttttttttcagataggacatgaaaagcaataatttaaaagaaaaagagaaattggacttcatcaaaataaaaactttttgttcatcaaaaacttccattaagtgaagaagcaagccacagattggaataaaatattcaaagtacccatatctgacaaaggattcttacccagaatatatgaagaactcctgtaaatcagtaataaaagaagccaggttaagaaacttcncagaaaaaaaatntccaaaggtaaatttttaaggtaacatcacttatcatcaaggaatgcccattaaaaccctaccaggatnccnctnaatgactaaaattccaaatatcccatcggntaaatgggtaaactgaaaaaactgncatatgggatatgtcagcatatgggatg

SEQ ID NO: 4997 - DNA, 447 bp, Canis familiaris
  misc_feature (420)..(420): n comprises a, c, g, or t, or includes no nucleotide
  misc_feature (424)..(424): n comprises a, c, g, or t, or includes no nucleotide
  misc_feature (428)..(428): n comprises a, c, g, or t, or includes no nucleotide
aatcagagaatggatgttttttatttgcaaccagaatgctctagttctacagatagtcctgtctggtacacatctacttcactggaccgaaacaccttggaaaatatgcttgtacgggttcttttagtaaaagatatttatgataaagacaattatgaactggatgaagacacagactaaaaaggaacatttcagaagcaatcgggataaaacagcattagatagtcatgctgctagatctttattatggaaaacatttcaagtttactccttctgttttgagttttgtagcagtgtacccacactgggtattaccatgtaaataatctgtgagtgaaagttgccattattctatgtagtggttttaggatacttaacaaatacattcaaattctttttttattatttatttgattaggnatgnttgnaactttttacattacaaaa

SEQ ID NO: 4998 - DNA, 483 bp, Canis familiaris
  misc_feature (25)..(25): n comprises a, c, g, or t, or includes no nucleotide
  misc_feature (457)..(457): n comprises a, c, g, or t, or includes no nucleotide
  misc_feature (468)..(468): n comprises a, c, g, or t, or includes no nucleotide
agaggagacgggtcgcctcggccgntcgccgctcctacgtctacgtctcctcgtgggacatggcggggggaggcccgggctccggccgccgtctggggccgggcccccgcccctccgtggctcggatgccgctgccgccaacccgggtggacttctcgctggccgcggcgctcaacgccggcttcaaggagacacgggccagcgagcgcgccgagatgatggagctcaacgaccgctttgccagctacatcgagaaggtgcgcttcctggaacagcagaacaaggctctggctgctgagctgaaccaactgcgggccaaggagcccaccaagctggccgacgtctaccaggccgagctgcgagagctaaggctgcggctagaccaactcactggcaacagcgcccggctggaggtcgagagaaacaatctggcacaaggacctgggcacccttaggnaaaaagttcangatgaaaccaacctg

SEQ ID NO: 4999 - DNA, 498 bp, Canis familiaris
  misc_feature (290)..(290): n comprises a, c, g, or t, or includes no nucleotide
  misc_feature (317)..(317): n comprises a, c, g, or t, or includes no nucleotide
  misc_feature (326)..(326): n comprises a, c, g, or t, or includes no nucleotide
  misc_feature (371)..(371): n comprises a, c, g, or t, or includes no nucleotide
  misc_feature (398)..(398): n comprises a, c, g, or t, or includes no nucleotide
  misc_feature (408)..(408): n comprises a, c, g, or t, or includes no nucleotide
  misc_feature (427)..(427): n comprises a, c, g, or t, or includes no nucleotide
  misc_feature (450)..(450): n comprises a, c, g, or t, or includes no nucleotide
  misc_feature (457)..(457): n comprises a, c, g, or t, or includes no nucleotide
  misc_feature (467)..(467): n comprises a, c, g, or t, or includes no nucleotide
  misc_feature (480)..(480): n comprises a, c, g, or t, or includes no nucleotide
  misc_feature (490)..(490): n comprises a, c, g, or t, or includes no nucleotide
ggaacccacaagacactcactgggactcagccgcaactcctcaacttcccagactgtggggtatggcctggaatatcagcagccattttttgaagaccctacgggggctggtgaccttctggatgaggatgaagacgaggatgaggacgatgggtggaatggggcctacttgccatccactgtggaacagacccgctcctcaggggtcgccaccagcacgtcaccttgcagcacatatgtctcctttttctccactccatcggagctggtggggcccgagaccctgcctncgtggacactgagcaactctgactctnacacctctncagcggggagccccagtgcagactttgtagctcacggagagtctntgggggacaggcattttcggacactgnagataaactntgaaacactggaaagaagnaaaatttaacttggaaaaaaagntacttgnggggcgaagnttttttggaactnaaccaaaaanggggggga

SEQ ID NO: 5000 - DNA, 482 bp, Canis familiaris
  misc_feature (253)..(253): n comprises a, c, g, or t, or includes no nucleotide
  misc_feature (420)..(421): n comprises a, c, g, or t, or includes no nucleotide
  misc_feature (427)..(427): n comprises a, c, g, or t, or includes no nucleotide
  misc_feature (447)..(448): n comprises a, c, g, or t, or includes no nucleotide
  misc_feature (468)..(468): n comprises a, c, g, or t, or includes no nucleotide
  misc_feature (474)..(474): n comprises a, c, g, or t, or includes no nucleotide
tttctctctgtgtgtctctcatgaataaataaataaaacctttaaaaaaaaaaaaaaaaaagaagaggggcacctgggtggctcagcgggtgggcatctgcctttggctcaggtcatgatcccggggtcctgggatcgagttccattcgggcttcccagagagagcctggttctccctctgtctatgtgtttgcctctctgtgtctttcatgaataaataaataaaatatttttaagaaaaaaaaggaatatnaaaagaaagagggagaaaaaagagagagagaaagaaagaagatgtagttttaagaaagattacataaaatttcctgggaattctgtgatcatcagaaaatcattaacaaaaaaatacaattgatatgtttaaagagacttattaagaaagattaatgtgaatagcanntatcanagtaggaactttaccttgcnnagtaaaaaattacttttaantccggnggcttttt

SEQ ID NO: 5001 - DNA, 593 bp, Canis familiaris
  misc_feature (424)..(424): n comprises a, c, g, or t, or includes no nucleotide
  misc_feature (469)..(471): n comprises a, c, g, or t, or includes no nucleotide
  misc_feature (485)..(485): n comprises a, c, g, or t, or includes no nucleotide
  misc_feature (517)..(518): n comprises a, c, g, or t, or includes no nucleotide
  misc_feature (569)..(569): n comprises a, c, g, or t, or includes no nucleotide
  misc_feature (572)..(572): n comprises a, c, g, or t, or includes no nucleotide
taattgcctgcattggggagaagctagatgagagggaagctggcatcactgagaaggttgttttcgagcaaaccaaggtcatcgcagataaccgtgaaggactggagcaaggttgtcctggcctatgagcctgtatgggccattgggactggcaagactgcaacaccccaacaggcccaggaagtacatgaaaagctccggggatggctcaagtccaacgtctctgatgcagtggctcagagcacccgtatcatttacggaggttctgtgactggagcaacctgcaaagagctggcaagccagcctgatgtggatggcttcctcgtgggtggggcttccctcaagcctgagtttgtggatatcatcaacgccaaacaataaagcccatcatcttccctatttcttgttaaccaagggcttaggnggttaaaaactcaataattgggttcttaccccaccccaccctgannnatgcttttgatggngtacctgcccctttgtgggcaaactatacctnnttcttacggttacaccttaccttgtatgggtgggaccaggcaatccttttncantactggaatgggtggaactaa

SEQ ID NO: 5002 - DNA, 545 bp, Canis familiaris
  misc_feature (427)..(427): n comprises a, c, g, or t, or includes no nucleotide
  misc_feature (476)..(476): n comprises a, c, g, or t, or includes no nucleotide
  misc_feature (507)..(507): n comprises a, c, g, or t, or includes no nucleotide
  misc_feature (525)..(525): n comprises a, c, g, or t, or includes no nucleotide
  misc_feature (530)..(530): n comprises a, c, g, or t, or includes no nucleotide
  misc_feature (540)..(540): n comprises a, c, g, or t, or includes no nucleotide
acttcatatagaaactctagaaaacagaatcaggaccttgtctttagaacctgaagaatcactacacgtgtcagaaacaaaaggtgaacacatcccaaaggtggagtcttccacatttgaggttgatcaagatgttttgcatgaagaatctggagctgatgataagccatgcttaagttttagtgaacctgaaaattctgtatcagacatagaagtagcagaagtggcatataatggagaagaagactaatacatgacaagcagttccttccatttatatgtttcagcaaatttagaatatttaaaatgaaaaaaagactgaagcatttccagaaaacagaaagattgcacatgtataaagtttacataaagaaaagttttttaagttatcgggataggaaatgtattcactgctgctttaaattgncttttatccaacccttgttttaatacactaaaaaaaaaaaatctagttngagttgtttcaagatggcattcttaaataanggcggaaataatttggtntttgncaatatgtgntccaa

SEQ ID NO: 5003 - DNA, 664 bp, Canis familiaris
  misc_feature (402)..(402): n comprises a, c, g, or t, or includes no nucleotide
  misc_feature (454)..(454): n comprises a, c, g, or t, or includes no nucleotide
  misc_feature (462)..(462): n comprises a, c, g, or t, or includes no nucleotide
  misc_feature (477)..(477): n comprises a, c, g, or t, or includes no nucleotide
  misc_feature (488)..(488): n comprises a, c, g, or t, or includes no nucleotide
  misc_feature (543)..(543): n comprises a, c, g, or t, or includes no nucleotide
  misc_feature (566)..(566): n comprises a, c, g, or t, or includes no nucleotide
  misc_feature (578)..(578): n comprises a, c, g, or t, or includes no nucleotide
  misc_feature (582)..(582): n comprises a, c, g, or t, or includes no nucleotide
  misc_feature (591)..(591): n comprises a, c, g, or t, or includes no nucleotide
  misc_feature (638)..(638): n comprises a, c, g, or t, or includes no nucleotide
  misc_feature (641)..(641): n comprises a, c, g, or t, or includes no nucleotide
  misc_feature (653)..(653): n comprises a, c, g, or t, or includes no nucleotide
tggtggacgatgaactggctaccaggtttcttgaaaattttaaggcaaacctggagaatcctatccgactggcctagtcctccaaaataagaagttggctttggcttagttaattgtatagctgttaccagaatctacactgtaggaaaacaattaggcatataagcgtgatgtgggtgagttgtttatttatttaaaaaaggtgaatgagtttggcccagattgtcttcattttcagtttgggtttaatggtgtagaaataaataaactgtgactaataaaaaagaacatttggttagtcagatccatttttaacctctggtgctgtactaaagtggaattaaacttgatgtaaattaaatgtttggctcatttgagcattttagacaatatgagaatgtntaataaattattaaatcaaaaaattggtagaacttaatatttttgaagttgnaagggacnttaaaggaaagcccnttatttaagcngggggacccacttttataagccctggtggggattacttgaacatttaatatttgnccggttatttgggtatagtaagnagggtcacatgntttngggtttggnaccattttgaattttttgttttaaagcctaggctaaaggggtttatnatnttttttaatttngcctggactta

SEQ ID NO: 5004 - DNA, 499 bp, Canis familiaris
  misc_feature (419)..(419): n comprises a, c, g, or t, or includes no nucleotide
  misc_feature (454)..(454): n comprises a, c, g, or t, or includes no nucleotide
  misc_feature (457)..(457): n comprises a, c, g, or t, or includes no nucleotide
  misc_feature (477)..(477): n comprises a, c, g, or t, or includes no nucleotide
  misc_feature (487)..(487): n comprises a, c, g, or t, or includes no nucleotide
ggcccagctccctccaactctttaaaccagcccggccgctcccaaccccgtgaggccgagggacaggaacgagcccagaggtgcctggaaacctccaccctctggctccctgctgatcccttcttttcttcaaaggacaaacagtcacattgtttgatcccaaattgcaaatgaacattcactatttttcggcctcccgtagatccttctctctccttctttcacgtggatacatggctgcagatgcacacagacgcatttacatgtgcgtgcatctacacattgttttagctccaatccaagcaggtttgaatttggacagaggtgaccttgccacgtttatggcttctgcagactgattttcctctttctcaaagtaaacttcacaaaacgtaaaaattggagcccgcatattccanggtccacccgtcgtctgtccgagccggcagtgcantanggagagcgccgcggctgganctggggcttntgtaccaacacc

SEQ ID NO: 5005 - DNA, 186 bp, Canis familiaris
  misc_feature (16)..(16): n comprises a, c, g, or t, or includes no nucleotide
  misc_feature (38)..(38): n comprises a, c, g, or t, or includes no nucleotide
  misc_feature (49)..(50): n comprises a, c, g, or t, or includes no nucleotide
  misc_feature (116)..(116): n comprises a, c, g, or t, or includes no nucleotide
  misc_feature (142)..(142): n comprises a, c, g, or t, or includes no nucleotide
  misc_feature (162)..(162): n comprises a, c, g, or t, or includes no nucleotide
cacctttttagacctngccacaccctcgatggagccangatgagggctnntgttcgcatgacccggtacctggagtcctggggagcggtcaagccctttgcacacctgcatcatcnagacagcatgaccacagtgaatggcnagatcagcacgacggatgtnccaatgggtcagcataatttccaa

SEQ ID NO: 5006 - DNA, 550 bp, Canis familiaris
  misc_feature (436)..(436): n comprises a, c, g, or t, or includes no nucleotide
  misc_feature (446)..(446): n comprises a, c, g, or t, or includes no nucleotide
  misc_feature (493)..(493): n comprises a, c, g, or t, or includes no nucleotide
  misc_feature (508)..(508): n comprises a, c, g, or t, or includes no nucleotide
  misc_feature (525)..(525): n comprises a, c, g, or t, or includes no nucleotide
  misc_feature (531)..(531): n comprises a, c, g, or t, or includes no nucleotide
  misc_feature (547)..(547): n comprises a, c, g, or t, or includes no nucleotide
agcagactttcagcagagactgtccagtgattctctgaagatttaccagaccctcgagttctggggatggttaaccaattacccacgtgaggctcttctggaaagagcttcctgcagtggaaggaaagaggagtcccgaagccaagccgtggcatggaccgtgtggaagatggccacgtcttacagattgccagccccctgtgtataggaatgcatttgtaagcatcccctaaattattgtgaaggtcctatgctgatggaggtatgatagatttctcacacagctaaggaggatttttgttttgttttgtctgtattgactatctgccacacagaatgtatgtcatgaaatacccggtgacatatgtcatcaaatgacaactggaaaaagctgctgaagaaattattattgtgtgtttagatgctttaatgtttncaaaaatctntcttgtgaatggactgtcagcttgttaatcttgttcctgttttaagngctattacctttctnagttaaccagaaatttncgttangttcgcaaggcatttnttg

SEQ ID NO: 5007 - DNA, 506 bp, Canis familiaris
  misc_feature (390)..(390): n comprises a, c, g, or t, or includes no nucleotide
  misc_feature (413)..(413): n comprises a, c, g, or t, or includes no nucleotide
  misc_feature (443)..(443): n comprises a, c, g, or t, or includes no nucleotide
  misc_feature (460)..(461): n comprises a, c, g, or t, or includes no nucleotide
tgtgtgggggtgactggacgtgattgacttcggtgtccttgcgttcgttagcaggtcaaaatgcagatcttcgtgaaaaccctaaccggcaagaccatcaccctggaggtggagcccagtgacaccatcgaaaatgtgaaggccaagatccaggataaagagggcatcccccctgaccagcagaggctcatctttgcaggcaagcagctggaagatggccgcactctttctgattacaacatccagaaagagtcaaccctgcacctggtcctgcgcctgaggggtggtatgcagatctttgtgaagaccctgaccggcaagaccatcaccctggaggtggagcccagtgacaccatcgaaaatgtgaaggccaagatccaggataaaganggcattccgcctgaccagcagangctcatttttcagggcaagcagcttggaanaatggcccacttttttnntgattacaacatccagaaagaggcaacttttcacctggtccttgc

SEQ ID NO: 5008 - DNA, 397 bp, Canis familiaris
  misc_feature (377)..(377): n comprises a, c, g, or t, or includes no nucleotide
ccacccagttcctcaagcagatcctggatggtgtccactacctgcactccaagcgcattgcccactttgacctcaagccagaaaacatcatgctgctagacaagaacgtgcccaacccacggatcaagctcatcgactttggcatcgcccacaagatcgaagcggggaatgagttcaagaacattttcggcacccctgaatttgtggctccagagattgtcaactatgaacccctgggtctggaagcagacatgtggagcattggagtcatcacctatatcctcctgagcggcgcctccccattcctgggtgagaccaagcaggagaccctgaccaacatctcggctgtgaactacgactttgacgaggagtatttnaacaacaccagcgagctggc

SEQ ID NO: 5009 - DNA, 632 bp, Canis familiaris
  misc_feature (297)..(297): n comprises a, c, g, or t, or includes no nucleotide
  misc_feature (436)..(436): n comprises a, c, g, or t, or includes no nucleotide
  misc_feature (478)..(478): n comprises a, c, g, or t, or includes no nucleotide
  misc_feature (506)..(506): n comprises a, c, g, or t, or includes no nucleotide
  misc_feature (533)..(533): n comprises a, c, g, or t, or includes no nucleotide
  misc_feature (562)..(562): n comprises a, c, g, or t, or includes no nucleotide
  misc_feature (592)..(592): n comprises a, c, g, or t, or includes no nucleotide
  misc_feature (594)..(594): n comprises a, c, g, or t, or includes no nucleotide
  misc_feature (617)..(617): n comprises a, c, g, or t, or includes no nucleotide
  misc_feature (630)..(630): n comprises a, c, g, or t, or includes no nucleotide
cataaactctgtaaagtggtttctccatgcctttgagaaacagtctgttcaatagaaggcttcttgataggttctattcagattctcaatatgttacatatctacattcagcaagaaggagaaggagattggtggcccgagcctctcttctccgccaaggtacatctgtccatttaaccatccaatctgttccttaaaaagcaagcactttctttagagagtttctgctaaccatatagtgcatgtgtttatgtttaggaaatggcaccactggtggatttcctattttcctattgntttcttttacgataaaatttgggagggcttgaccccctagaaaatacccacagtgagataaaacaacacatgccaaaagaagatcaaatggttacattcatttgaaacatgttgtgttatacttggcaaaaaagggggntgggcctgaaattttgaaagccacactgttctaatgagaganagagagagagagaaagagagagaggccntaatatttatttcacttaaaggtaaanggtctttttttaatgttcattcatagggncagggaatcaatggaaataatacctggggngngggtggaattcaatacactactntgcccctgccagngg

SEQ ID NO: 5010 - DNA, 596 bp, Canis familiaris
  misc_feature (418)..(418): n comprises a, c, g, or t, or includes no nucleotide
  misc_feature (473)..(473): n comprises a, c, g, or t, or includes no nucleotide
  misc_feature (517)..(517): n comprises a, c, g, or t, or includes no nucleotide
  misc_feature (555)..(555): n comprises a, c, g, or t, or includes no nucleotide
  misc_feature (560)..(560): n comprises a, c, g, or t, or includes no nucleotide
  misc_feature (572)..(572): n comprises a, c, g, or t, or includes no nucleotide
gcagtgaggatgctgtcaaggcccggctggctgccttagctgaccagtggcagttcctggtgcaaaagtcagccgaaaagagccagaaactaaaagaagccaacaagcagcagaacttcaacactggaatcaaggactttgacttctggctttctgaggtggaggcccttctggcatctgaggactacggcaaagacctggcttctgtgaacaacttgctgaagaaacatcaactgctagaggcggacatatctgcccacgaggatcgcctgaaggacctgaatagccaagcagacagcctgatgaccagcagtgccttcgacacctcccaagtgaaggataagcgggacaccatcaatggtcgtttccagaagatcaagaacatggcggcctcccggcgagccaggctgaatgaatnccatcgcttacaccagttctttcgggacatggatgatgaggagtcctggatcaangagaaaaagttgctggtgagctcggaggactattggccgagacntacaggagttcagaacctgaggaagaaacacaaccggntggangggggaactggnttgccatgagccacgatccagggg

SEQ ID NO: 5011 - DNA, 539 bp, Canis familiaris
  misc_feature (422)..(422): n comprises a, c, g, or t, or includes no nucleotide
aacatgggatgggaggaaggaaggaggagaaaagagaggatacagtggcagtggcagttcttagggcagaaggaagacttctctaagcacctaagaagatgatggggaatgtcccggagtcctagatggactctgtgagtttcctagatgcctaaggcttcccgtcttgctcaccattcacccagaccagcagacagacattctcttgtgtttttttgacacaactttctctgaaaatatttttatcaggcagttgatttagaggaccagtaaaaccaaatgctttgcatgactgggtttcaagttacaccctgagctctgctctgcctcacctgagctttggctctgctggtgaccagtttatgaagtttcaccttgcagggaaagagacaatttctagatgtgatctgaagggcttaganggtccagccttctactggctggaacaagtaaataaactttgtagcattaatgtgttatgtgatatggatgaataattggtgggcactttttcaaaaagacatattattttggtttta

SEQ ID NO: 5012 - DNA, 368 bp, Canis familiaris
  misc_feature (49)..(49): n comprises a, c, g, or t, or includes no nucleotide
tctcaccttcactcctcagtaaatcaggaaatgcagattaaaaaccagngaattgaaagctcatctgaaagatacagctcaccatggaactttccctctggccctcttttgtctaattttggaggtatttggtatgtgaggagattaaaagggaaccttaaagtaccaccattgcttatataaggaaccgatgtttgaaaggctgtcctttgcctcttgatgttatttctttaaaatacatagcatatgcagtatagtgctgcattaaggcatgatagggtcactgtggcccatttgagtgacaaccaatgatttgggaagcacatagatacattctgcaagttgagtggaattagcaacctgtattt

SEQ ID NO: 5013 - DNA, 374 bp, Canis familiaris
  misc_feature (196)..(196): n comprises a, c, g, or t, or includes no nucleotide
  misc_feature (207)..(207): n comprises a, c, g, or t, or includes no nucleotide
  misc_feature (296)..(296): n comprises a, c, g, or t, or includes no nucleotide
  misc_feature (330)..(330): n comprises a, c, g, or t, or includes no nucleotide
tatggcattatatatatatattatatatatataaatatatattatacatactactctcctttatttcagttaccatccccatagaatttgacaagaattgctatgactgaaaggtttttgagtcctaattaaaactttatttatgacagtattcataattagcctgaaatgcattctgtaggtaatctctttgagnttctggaatgntttcttacttagactttttggatgtgcagccgcttacatgtctgaagttacttgaaggcatcactttttaagaaagcttacagttgggncctgtgccatcccaagtcctctgtagctcccctnaaacatttttttttccataattactacagggcagttgaataaaa

SEQ ID NO: 5014 - DNA, 423 bp, Canis familiaris
  misc_feature (349)..(349): n comprises a, c, g, or t, or includes no nucleotide
  misc_feature (390)..(390): n comprises a, c, g, or t, or includes no nucleotide
  misc_feature (402)..(402): n comprises a, c, g, or t, or includes no nucleotide
gtgaggcatattatgttcacaatgggggagatttaaaaaaagactataaatagtttcacatctattaggtgaggctttgtctcctcaggagtgtgcaccaaacatagaaaaacttattcagagttttgtgagttttggagttatatgtaagggattgcggatctgattcaatcaaggcatcagtacctttttaaaatttttaacatttacactcttttcagtgcaatacctcttagcaaatatgcgtcggattttatgaaaataatatgttgtatttttgttacagaaatataaatatcttgctgaagatagcaatatgtctgtgccatctgaaccaagcagtccccanagcagtacctgtacacggtcaccctcttcaaatgacattcntggaaagggtancttgcttgatgttaaaagagt

SEQ ID NO: 5015 - DNA, 191 bp, Canis familiaris
  misc_feature (69)..(69): n comprises a, c, g, or t, or includes no nucleotide
  misc_feature (77)..(77): n comprises a, c, g, or t, or includes no nucleotide
  misc_feature (141)..(141): n comprises a, c, g, or t, or includes no nucleotide
  misc_feature (171)..(171): n comprises a, c, g, or t, or includes no nucleotide
  misc_feature (174)..(174): n comprises a, c, g, or t, or includes no nucleotide
agcaatgcctaaatcaaaggaacttgtttcttcaagctcttctggcagcgattctgacagtgaggttgncaaaaagntaaagaggaaaaagcaagttacgccagagaaacctgtgaagaagcaaaagactggcgaaacttnaagagccttgtcatcctctaagcagagcancancagcagagatgataaca

SEQ ID NO: 5016 - DNA, 478 bp, Canis familiaris
  misc_feature (23)..(23): n comprises a, c, g, or t, or includes no nucleotide
  misc_feature (200)..(200): n comprises a, c, g, or t, or includes no nucleotide
  misc_feature (292)..(292): n comprises a, c, g, or t, or includes no nucleotide
  misc_feature (374)..(374): n comprises a, c, g, or t, or includes no nucleotide
  misc_feature (389)..(389): n comprises a, c, g, or t, or includes no nucleotide
  misc_feature (401)..(401): n comprises a, c, g, or t, or includes no nucleotide
  misc_feature (403)..(403): n comprises a, c, g, or t, or includes no nucleotide
  misc_feature (438)..(439): n comprises a, c, g, or t, or includes no nucleotide
  misc_feature (454)..(454): n comprises a, c, g, or t, or includes no nucleotide
aaaaggatgaaaaacttattcgnctaatggaagagatcatgagtgagaaggagaataaaaccattgtttttgttgaaaccaaaagaagatgtgatgagcttactagaaaaatgaggagagacgggtggcccgccatgggtatccatggtgacaagagtcaacaggaacgtgactgggttctaaatgaattcaaacatggnaaagctcctattctgattgctacagatgtggcctccagagggctagatgtggaagatgtgaaatttgtcatcaattatgactaccctaactnctcagaggattatattcatcgaattggaagaactgctcgcagtaccaaaacaggcacagcatacactttctttacaccttantaacataaagcaagngagcgaccctantntcttgtgcttcgtggaagcttattcaagcaattannccaaagttgcttttnttgttcgaaaacaagaggtctatg

SEQ ID NO: 5017 - DNA, 582 bp, Canis familiaris
  misc_feature (415)..(415): n comprises a, c, g, or t, or includes no nucleotide
  misc_feature (505)..(505): n comprises a, c, g, or t, or includes no nucleotide
  misc_feature (547)..(547): n comprises a, c, g, or t, or includes no nucleotide
gcaagccgagaatcgactgatggcagcatgaacagctatagctcagaaggaaatctgattttccctggtgtccgcctggcctctgatagccaattcagcgatttcctggatggccttggccctgcccagctcgtggggcgtcagactctggctacacctgcaatgggtgacattcaggtaggaatgatggacaaaaagggacagttggaggtggaaatcattcgggctcgtggccttgttgtaaaaccaggttccaagacactgccagcaccatatgtaaaggtgtatctattggataatggagtctgcatagccaaaaagaaaacaaaggtggcaagaaaaacgctggaacccctttaccaacagcttttatctttcaaagaaaggcccccagggaaaagtttacagaacattntcttggggagaatattggccgcatggttcacaaaatcctttatgggagtggcccaatcttttagatgaactgggagctatccaatatggngattggatggttcaaacttttcccccttcctcctagtagatncaccttggccctctgacaagaaaaagcgtccaatc

SEQ ID NO: 5018 - DNA, 578 bp, Canis familiaris
  misc_feature (458)..(458): n comprises a, c, g, or t, or includes no nucleotide
  misc_feature (503)..(503): n comprises a, c, g, or t, or includes no nucleotide
  misc_feature (548)..(548): n comprises a, c, g, or t, or includes no nucleotide
cagagcaaaaatggcggcggcgatgcgcgtggtggcggctggagcaagactcagcgttgtggtgagcggtctccgcgctgcagtccgcggcctgtgtagccagcccgtctcggttcatgaacgcatcgagaacaagcgcagcgccgcgttggtgggaggaggccagcgccgcatcgatgcgcagcataaacgaggaaagctaactgccagagagcggatcagtctcttgctggaccctggcagttttgtggagagtgacatgtttgtggaacacagatgtgcagatttcggaatggctgctgagaagaataagtttcctggagacaagtgtggtcactggacggggccgaatcaatggaagattggtttatgtctttcagtcaggattttacggttttttggaggtagtctgtcccggggcacatgccccaaaaaatcttgcaaaatcattggaccangccattacaagtgggggctccagtgatttggactgaatgactctnggggagcaccggatccaaaaagggagtggagtctttggcttggtntgcagacatcttttttaggaacgtcctgcc

SEQ ID NO: 5019 - DNA, 357 bp, Canis familiaris
  misc_feature (12)..(12): n comprises a, c, g, or t, or includes no nucleotide
  misc_feature (14)..(14): n comprises a, c, g, or t, or includes no nucleotide
  misc_feature (22)..(22): n comprises a, c, g, or t, or includes no nucleotide
  misc_feature (60)..(60): n comprises a, c, g, or t, or includes no nucleotide
  misc_feature (69)..(69): n comprises a, c, g, or t, or includes no nucleotide
  misc_feature (83)..(83): n comprises a, c, g, or t, or includes no nucleotide
  misc_feature (92)..(92): n comprises a, c, g, or t, or includes no nucleotide
  misc_feature (115)..(115): n comprises a, c, g, or t, or includes no nucleotide
  misc_feature (174)..(174): n comprises a, c, g, or t, or includes no nucleotide
  misc_feature (202)..(202): n comprises a, c, g, or t, or includes no nucleotide
  misc_feature (205)..(205): n comprises a, c, g, or t, or includes no nucleotide
  misc_feature (229)..(229): n comprises a, c, g, or t, or includes no nucleotide
  misc_feature (252)..(252): n comprises a, c, g, or t, or includes no nucleotide
  misc_feature (258)..(258): n comprises a, c, g, or t, or includes no nucleotide
  misc_feature (278)..(278): n comprises a, c, g, or t, or includes no nucleotide
  misc_feature (317)..(318): n comprises a, c, g, or t, or includes no nucleotide
  misc_feature (346)..(346): n comprises a, c, g, or t, or includes no nucleotide
  misc_feature (349)..(349): n comprises a, c, g, or t, or includes no nucleotide
aagcagtggccncngaggtcancaactccaccttcttctctgtgtcctccttggacctgntgtctaagnggttgggggagagngagaagctngtcaagaacctgtttgagctggncaggcagcacaagcccttcatcatcttcatcgatgaggtggattccctctgcggttccngcaatgaaaatgagagtgaggccgcccnaangatcaaaaccggagttcttggttnatcatgcagggggtggtggaatnacaacnatgggactctggttcttggngccacaaacatcccatgggttgttggattcagccatttnnaaggaggtctcgaatagagggatttaanatnccacttgc

SEQ ID NO: 5020 - DNA, 586 bp, Canis familiaris
  misc_feature (396)..(396): n comprises a, c, g, or t, or includes no nucleotide
  misc_feature (419)..(419): n comprises a, c, g, or t, or includes no nucleotide
  misc_feature (427)..(427): n comprises a, c, g, or t, or includes no nucleotide
  misc_feature (438)..(438): n comprises a, c, g, or t, or includes no nucleotide
  misc_feature (449)..(449): n comprises a, c, g, or t, or includes no nucleotide
  misc_feature (459)..(459): n comprises a, c, g, or t, or includes no nucleotide
  misc_feature (542)..(542): n comprises a, c, g, or t, or includes no nucleotide
ggcactgagggggcacttgatgggatgagcactgggagttattctatatgttggcaaattgaacaccaataaaaaataaatttataaaaaaaaaagttggtgtgcgatgaaggaacaattaactttatagtgtaagggtgctattaaatggcagctttgagattagcccaggcctatggaatgagacagaaaaagtcacaactgcaaagaatatgtcttatatagaacaaccccgactcaacaccccaaacaaagaggatgtgatgatgtgtttattttccacagacaaattaggaaatccatgcacattaatccactctggagtgtgacatgtttgcatggcttgactctaaccatggacaatgaattttatatatatgttacggcctcacgttngttttggaataaaaggaacctgnaattaacntttttttgaanctggttaactntcttgatatncatcattgattatttaggtagaatttaggcggatttataatactaattttctaccttcccagatttttacaaattgcctcatntataccaaaccgaaggtcacagatacttgttcataggccaaatc

SEQ ID NO: 5021 - DNA, 183 bp, Canis familiaris
  misc_feature (79)..(79): n comprises a, c, g, or t, or includes no nucleotide
  misc_feature (97)..(97): n comprises a, c, g, or t, or includes no nucleotide
  misc_feature (161)..(161): n comprises a, c, g, or t, or includes no nucleotide
ttctagatcgcgagcggccgccctttttttttttttttttttttttttttaggagttagtccttgaccactagtttggnaccatctctattttgggngacctgtttcaccagcaggcctgttactctccatgactaactgtgtaagtgcttataatggaanaaattgcttttctacgtaaccc

SEQ ID NO: 5022 - DNA, 389 bp, Canis familiaris
cctgaaattatcccagattacagcataaaacaaaaatgactaattggacttcatcaaattgaaagtgtttgatctttcaaacagacaattaagaaaacaaaaaggacaaaccacaaaatggaagaaaatatttgcaaaatatgtatctgatgaaggacctgtatctggaacatgtttaaaaatatggctcagtagtaaaaagatcaagaacttgattttttaaataaggaaaagatcttatccaatatttcaccaaagaaggtatatggatggcaaacagccacataaaaacattctcagtggcattagtcattagagaaatgcaaactaaaaccacaatcagacaccactctacattccctagaaataaaaagactgacaagacccca

SEQ ID NO: 5023 - DNA, 589 bp, Canis familiaris
  misc_feature (455)..(455): n comprises a, c, g, or t, or includes no nucleotide
  misc_feature (578)..(578): n comprises a, c, g, or t, or includes no nucleotide
tcacaaattccctcccaagacagaaggatgacggttggttacattttggcaagatgctgtgcccttggcatcgctttaattatgacccagagaggcccgatgccttgcaccctgcctccaccctgttttccttatgtcgtgctgtgtcttgtgatcataggaccacttagggctcagcagtggtttcctggaaggcagagagagagagagagagattgagagagagagagagagaacatgcaggtggccacccctccatgctgtaccagtaggtttccattcggggttgaggagccggggaggtgggcagaccgggtgtcgcatgtcaccacacacacgctgtcagaaactcggacgtccccctacctctgagctctcgatgctgctaatgtctgcctagtgtcccgtgcgctctggcaccttctccgaggaccgatgcccgcccaacgctcctngcgaggttgtccaactgtgttcaccgcatgctctcttctgcattgcctcatcttctaacttgatggaattcaacaaaaagtctacttatgcctgtttgcattatgggtacaatattaaaaagnggagttgcttc

SEQ ID NO: 5024 - DNA, 520 bp, Canis familiaris
  misc_feature (294)..(294): n comprises a, c, g, or t, or includes no nucleotide
  misc_feature (337)..(337): n comprises a, c, g, or t, or includes no nucleotide
  misc_feature (380)..(380): n comprises a, c, g, or t, or includes no nucleotide
  misc_feature (404)..(404): n comprises a, c, g, or t, or includes no nucleotide
  misc_feature (410)..(410): n comprises a, c, g, or t, or includes no nucleotide
  misc_feature (428)..(428): n comprises a, c, g, or t, or includes no nucleotide
  misc_feature (438)..(438): n comprises a, c, g, or t, or includes no nucleotide
  misc_feature (441)..(441): n comprises a, c, g, or t, or includes no nucleotide
  misc_feature (479)..(479): n comprises a, c, g, or t, or includes no nucleotide
  misc_feature (501)..(501): n comprises a, c, g, or t, or includes no nucleotide
aaggccctgcactgtactttcaccctggagaggcacagcctggcctccacagagctcacctgcaagatctgtgtgcggcaggtggaaggggagggccagatcttccagctgcacaccactctggcagagacgcctgccggctccctggacaccttctgctctgcccctggcagcacagtcaccacccagctgggaccctatgccttcaagattccactgtccatccgccagaagatatgcaacagcctggatgcccctaactcacggggcaatgactggcggctcttggcgcanaagctctccatggaccggtacctgaactactttgccaccaaancgagccccacgggttgtcatcctggacctttgggaagctctgnagcaggacgacggggacctcaaanatcctngctgagtgcctggagganattgggccangantgagattgttggtggtcattggccacttgacgggggantgtttgacttccccggaaacanaaccttgggctgtgagggt

SEQ ID NO: 5025 - DNA, 625 bp, Canis familiaris
  misc_feature (620)..(620): n comprises a, c, g, or t, or includes no nucleotide
agatgataacaatgtatggcaatcgcatcctgacactaggagaggtcccaaaggatcaggtctatgcactgaagctcaagggcatctccatctgcttctccatgctgaaggctgccctcagtgggagttacgtcaattttggagtcttccgtctctatggagatgatgcgctggacaatgctctacagaccttcatcaagctgctcctctctattccccacagtgacctcctggactaccccaagctcagccagtcttactattcactactggaagtcctgacccaggaccacatgaactttattgcaagtctggaacctcatgtcatcatgtatattctctcttccatttctgaaggacttactgcacttgacaccatggtatgcacaggctgctgctcctgcctggaccacatcgtgacatacctctttaagcaactgtcacggagcaccaagaagaggacgacacccctaaacaggagagtgaccgttttctgcatatcatgcagcagcattcagagatgatccaccagatgctgtcaacggtgctgaacatcatcatctttgaaactgtaggaaccaatgggctatgtctcggccctacttggcttgaactacttnatgaa

SEQ ID NO: 5026 - DNA, 267 bp, Canis familiaris
  misc_feature (48)..(48): n comprises a, c, g, or t, or includes no nucleotide
  misc_feature (191)..(191): n comprises a, c, g, or t, or includes no nucleotide
  misc_feature (233)..(233): n comprises a, c, g, or t, or includes no nucleotide
gttctagatcgcgagcgccgcccttttttttttttttttttttttttngactattatctacaaatatttattgtaacacttgaatagaactacaggaagcccttggcactgatagaaaatattgattcactgttaggttacaaaaatttatacatagcaaaatttaatgctctttacataaaaaatattanacctccttaaacaaaactttcagaaattcctggtaatagctnccagaattagaaaagtaaaattaggcttgagaca

SEQ ID NO: 5027 - DNA, 588 bp, Canis familiaris
  misc_feature (324)..(324): n comprises a, c, g, or t, or includes no nucleotide
  misc_feature (502)..(502): n comprises a, c, g, or t, or includes no nucleotide
  misc_feature (573)..(573): n comprises a, c, g, or t, or includes no nucleotide
tgcagtggcatctatgagcatcagcagagatgcagtaggggtctgtttacttggtgataaattatatgctgttggaggctatgatggacaaacttatcttaatacagtggaggcttatgatccccagacaaatgagtggacccaggttgctccactgtgcctaggaagagctggggcttgcgttgtaactgtcaaattataacataatgctttgttttctaaatgaagatattgtcttccttatgaatttagtaaaattattctactaccaatggatacatttttagtaaatttgcaatggcccaattcctgggcccaaggggngcccaatctcaaagggaagatggtaaaacaagggaggaacaagtggatgaaccaggattaaatcctccatttcttaggaattcatttctcagcaaatcaaaactacagctggtggattgtgaacatatgttcctgatgtaacatatgaggacaaatgcattgctcctaaatgcaatgngggattagctggggaattcattattaataatcaccccatttactcacgtttccaaattctttattcaggcncatccccaatgacac

SEQ ID NO: 5028 - DNA, 291 bp, Canis familiaris
  misc_feature (13)..(13): n comprises a, c, g, or t, or includes no nucleotide
  misc_feature (31)..(31): n comprises a, c, g, or t, or includes no nucleotide
  misc_feature (48)..(48): n comprises a, c, g, or t, or includes no nucleotide
  misc_feature (59)..(59): n comprises a, c, g, or t, or includes no nucleotide
  misc_feature (73)..(73): n comprises a, c, g, or t, or includes no nucleotide
  misc_feature (75)..(75): n comprises a, c, g, or t, or includes no nucleotide
  misc_feature (105)..(105): n comprises a, c, g, or t, or includes no nucleotide
  misc_feature (173)..(173): n comprises a, c, g, or t, or includes no nucleotide
  misc_feature (198)..(198): n comprises a, c, g, or t, or includes no nucleotide
  misc_feature (204)..(204): n comprises a, c, g, or t, or includes no nucleotide
  misc_feature (218)..(218): n comprises a, c, g, or t, or includes no nucleotide
  misc_feature (233)..(233): n comprises a, c, g, or t, or includes no nucleotide
  misc_feature (242)..(242): n comprises a, c, g, or t, or includes no nucleotide
  misc_feature (244)..(244): n comprises a, c, g, or t, or includes no nucleotide
  misc_feature (269)..(269): n comprises a, c, g, or t, or includes no nucleotide
  misc_feature (280)..(280): n comprises a, c, g, or t, or includes no nucleotide
gccaacatgatgngtcatatttattgggctnttcacaggtcagctaanacacaaggggngaccagatgacatnanaatgtcaggaaacaaaatatttagcatttnttaagtttccaattttgcattccgttgcagctgagcgatataaatgggcaattcatgaacataactgngatttatttttagcaacaagaagcncatacntttatttaaccggngacttttaggacggnaagcaaacnanaaaactatagttccatgtcgctaanacaagaaaatngtttatacaaa

SEQ ID NO: 5029 - DNA, 670 bp, Canis familiaris
  misc_feature (420)..(420): n comprises a, c, g, or t, or includes no nucleotide
  misc_feature (433)..(433): n comprises a, c, g, or t, or includes no nucleotide
  misc_feature (440)..(440): n comprises a, c, g, or t, or includes no nucleotide
  misc_feature (457)..(457): n comprises a, c, g, or t, or includes no nucleotide
  misc_feature (522)..(522): n comprises a, c, g, or t, or includes no nucleotide
  misc_feature (568)..(568): n comprises a, c, g, or t, or includes no nucleotide
  misc_feature (593)..(593): n comprises a, c, g, or t, or includes no nucleotide
  misc_feature (623)..(623): n comprises a, c, g, or t, or includes no nucleotide
  misc_feature (625)..(625): n comprises a, c, g, or t, or includes no nucleotide
  misc_feature (646)..(646): n comprises a, c, g, or t, or includes no nucleotide
  misc_feature (652)..(652): n comprises a, c, g, or t, or includes no nucleotide
ataatctattgaatatttatgaaagggagagtctatatttatattcttagatagtttcataatttttcatttcaggcttccatatatatcaccctgaactttctgtcaccaccaataaggatatttttggctctgcaaataaaaagacaattccttattgtctgaatgtaatacagtcttcattgtactattcaaccctttgtttatttcttttttcattttgtgaaaaaaacccgggttaggccttcttagattattgcttatttatgtgtaacaaatcccacacattctaatagaaagttcttcagttcctcctggtcatataatatatttccatggtatcatatattattatttactgtttacaagactcaattttgaattcaagaataaagcactcttttattctttcaaacaganattttgccacttngaccctntaaaaggtttgtacttnttattttgcggacctatagattcattcttgatcatgcaagttttcaaaataaagctagggaaatnagggtctactgataaattaagtaaaagattgggcattatgacattnctattattaaacctctaaatattcnctggacacctatttctttttggatactganancccacaatttttacctacttnaaaccngggtgggtactgcatgga

SEQ ID NO: 5030 - DNA, 651 bp, Canis familiaris
  misc_feature (392)..(392): n comprises a, c, g, or t, or includes no nucleotide
  misc_feature (416)..(416): n comprises a, c, g, or t, or includes no nucleotide
  misc_feature (433)..(433): n comprises a, c, g, or t, or includes no nucleotide
  misc_feature (439)..(439): n comprises a, c, g, or t, or includes no nucleotide
  misc_feature (520)..(522): n comprises a, c, g, or t, or includes no nucleotide
  misc_feature (524)..(524): n comprises a, c, g, or t, or includes no nucleotide
  misc_feature (558)..(558): n comprises a, c, g, or t, or includes no nucleotide
  misc_feature (562)..(563): n comprises a, c, g, or t, or includes no nucleotide
  misc_feature (598)..(598): n comprises a, c, g, or t, or includes no nucleotide
  misc_feature (619)..(619): n comprises a, c, g, or t, or includes no nucleotide
  misc_feature (639)..(639): n comprises a, c, g, or t, or includes no nucleotide
  misc_feature (650)..(650): n comprises a, c, g, or t, or includes no nucleotide
aggacagcgcagccactcccgagggcctggatgtgatggcgtcacagaaaagaccctcccagaggcacggatccaagtacctggcctcagcaagcgccatggatcacgccaggcatggcttcctcccgaggcacagagacacgggcatccttgactccctcgggcgcttctttggcggtgacaggggtgtgcccaagcggggctcaggcaaggatggacatcacgcagcgagaactgcccactatggctccctgccccagaagtcccagcatggccggccccaagacgaaaaccccgtagtgcatttcttcaagaacattgtgacaccacaccgtagcggaattcatgcgtggcagagaggggacagggaggcgaggtcgggctgggccacngccccagcgggaaacaggagcttntcggaaattatgcgacngcagancgggagccttgggtgggcttcacgaaccacctgttttcccccagagcccaacaggagggggccagggagacgctttttttnnnanccgggaattggaggagttttttgggtgggcctcncaannggtaacctttcacacaatcccacgggagggcacanttgaagatactaacctttggnggacgggataacccccgtcngttggaattcnt

SEQ ID NO: 5031 - DNA, 469 bp, Canis familiaris
  misc_feature (390)..(390): n comprises a, c, g, or t, or includes no nucleotide
  misc_feature (408)..(408): n comprises a, c, g, or t, or includes no nucleotide
  misc_feature (430)..(430): n comprises a, c, g, or t, or includes no nucleotide
  misc_feature (448)..(448): n comprises a, c, g, or t, or includes no nucleotide
cccgggctgccctaatggtaacattttagcggcacctttggcccagcgcaggatcctcgagacccgggattgagtcccacgtcgggcttcctgcatggggcctgcttctccctctgcctgtgtctctgcctctctctgtctctcatgaatagataaataaaatctttttaaaaaataaaataaaatgttaccattaaaaaataaataaaataaaatgtcaccattaaatttgagcagtactgttggtgtagttctctcatcagcgggagggagagtcccatcaataaacccagctatgtaggcaggtttgcagtggtctgcggtgcctgcttgtatgtattgatgcacagaagggggctatgttcaggaaggcagtccactctttccccntggcaaaaggagggggcngcccttacatacctaaaaaggntggcctcaaatctgtttntgttgaagaggccttattaaa

SEQ ID NO: 5032 - DNA, 637 bp, Canis familiaris
  misc_feature (17)..(17): n comprises a, c, g, or t, or includes no nucleotide
  misc_feature (457)..(457): n comprises a, c, g, or t, or includes no nucleotide
  misc_feature (522)..(522): n comprises a, c, g, or t, or includes no nucleotide
  misc_feature (531)..(531): n comprises a, c, g, or t, or includes no nucleotide
  misc_feature (539)..(539): n comprises a, c, g, or t, or includes no nucleotide
  misc_feature (547)..(547): n comprises a, c, g, or t, or includes no nucleotide
  misc_feature (579)..(579): n comprises a, c, g, or t, or includes no nucleotide
  misc_feature (604)..(604): n comprises a, c, g, or t, or includes no nucleotide
  misc_feature (621)..(621): n comprises a, c, g, or t, or includes no nucleotide
  misc_feature (630)..(630): n comprises a, c, g, or t, or includes no nucleotide
aaaaaaaaaaaaaaaanggcggaaaacaaaagcaagctgacgtcagaagctctgaaaaaactagggaaaagcagcactaaaggaagtaagaccaggagaagcaataattcaagccaaacacaatgagaaactaggacctggtgactaaatccatgtgaaaataaaagaagaatctaggtttctgatgtgaacatcttgggacttaagaatataagcaacacttcaattggagactcacaaagttgacagtgtctttgtggcagccaattgcagatatcttttgagcatctatggaactcaggagagatgtgctgaaaactcagacttcctaggtagttttgatgaaaccgaagtgagttttcagaaaaaaaaaaaaaaaatgtgtataccagaatttgctaaaaactggcgattgccaaataattttaaagaaaacttgagatctggtttcattggnattgatttggaagtcattaacctaaacccactgggtaaatacatgggaacagaggaatatttganaatggaaangggcaaanggcagaanggtaattagggatgtcagcttttttaaaaggngaccagagagggagagacccagggnggttttttgcatgaaanggcccctgntcctgct

SEQ ID NO: 5033 - DNA, 389 bp, Canis familiaris
  misc_feature (46)..(46): n comprises a, c, g, or t, or includes no nucleotide
  misc_feature (95)..(95): n comprises a, c, g, or t, or includes no nucleotide
  misc_feature (170)..(170): n comprises a, c, g, or t, or includes no nucleotide
  misc_feature (190)..(190): n comprises a, c, g, or t, or includes no nucleotide
  misc_feature (302)..(302): n comprises a, c, g, or t, or includes no nucleotide
  misc_feature (305)..(305): n comprises a, c, g, or t, or includes no nucleotide
  misc_feature (308)..(308): n comprises a, c, g, or t, or includes no nucleotide
  misc_feature (359)..(359): n comprises a, c, g, or t, or includes no nucleotide
  misc_feature (381)..(381): n comprises a, c, g, or t, or includes no nucleotide
gaaataattaattcgaacagttatgaaattaatatttgctgtctgngtgtataagtacatcctttggggggtttttattttgtttttgtttttgnttttttttaaccaaagttgctgtctagtacattcaaaggtcactttttgttcttcacagattttctttttaatgntcttttccatgttgtattgnatttttttttttgggaagcaaattgactttaatgaaaaaaattgtggcaaaagatgctaagatgggaaaatttcaccacactgaggcaaaaaggtgaaaaattatcaacttntangcntgttattcttcagataatgaaaaaaaaaaaactgtatcccatacccaaagnttctgtgcatatagaaactttntagagatg

SEQ ID NO: 5034 - DNA, 424 bp, Canis familiaris
  misc_feature (398)..(398): n comprises a, c, g, or t, or includes no nucleotide
  misc_feature (401)..(401): n comprises a, c, g, or t, or includes no nucleotide
ttgctttgcctgagaaaattatagagaagggaattcaggggatcatgacttcatctccaggggatactttttatttaccttactgatgtcttttactctttcagaattctgatggatgaggaagagtaggtggcggcctaaggctctgtttgactatgtctcttcacactgattctcattttcctgatgtcaaatttcagaattttcaagcagacagtggattgtccaggttttccaaagtctcttattatccagtcatgtgagaaagttaggcttgaggctgaggccatgatctactaacctcacccaggtactgtgactttgctcagaattaaggaagtttgagccaaagaaagtggtcttttccagccaccgctgttcttttattgccgggtggnggngggggaattccaaagcaattccc

SEQ ID NO: 5035 - DNA, 643 bp, Canis familiaris
  misc_feature (533)..(533): n comprises a, c, g, or t, or includes no nucleotide
  misc_feature (563)..(563): n comprises a, c, g, or t, or includes no nucleotide
  misc_feature (567)..(567): n comprises a, c, g, or t, or includes no nucleotide
  misc_feature (574)..(574): n comprises a, c, g, or t, or includes no nucleotide
  misc_feature (592)..(592): n comprises a, c, g, or t, or includes no nucleotide
  misc_feature (595)..(595): n comprises a, c, g, or t, or includes no nucleotide
  misc_feature (611)..(611): n comprises a, c, g, or t, or includes no nucleotide
  misc_feature (624)..(624): n comprises a, c, g, or t, or includes no nucleotide
  misc_feature (638)..(638): n comprises a, c, g, or t, or includes no nucleotide
ctactgagttgtctatagagatgccctcttgttgcgcagggggaggtcaacaatcccagagcagcaatgtccaagtggcttgaattggtgaagtaggatttttgagtttttctccgggctctagatgagccagcccttgacaggacttgtgcacatgtgcccatgcgcctcagacccctaagatctagcctcaaatgcccagagatgtggaagagccctggcaggtctcagtaagagaacaagaacacccatggctagaagcctgctggccttagagttagccgtgacacttacccaagtttttggggaatcaggcccgtgtttctaaagggacattctggtttgggaccctagtgagtttcagtcatcgtgtaggcagcttggatagttttaacattcataggaaatctctctgagtggaccatgaatgaagctgttgggggtgaggaagaacaggacctggaaattggaaccagcagaagtcccctgttgacaagaaggagcattcactttcaaaggagtggttccccggnggtttttattggttaccaaggctaaccggntttnaggcctnaaaagcagcctaacttcntgnatatttgacaaggggntttttgagggagncccaaacccagggnctttt

SEQ ID NO: 5036 - DNA, 367 bp, Canis familiaris
  misc_feature (203)..(203): n comprises a, c, g, or t, or includes no nucleotide
  misc_feature (356)..(356): n comprises a, c, g, or t, or includes no nucleotide
caattattataacaaaataattatggtcgaaatgtctgtggttccttggaaatgctgcgctttttgtatttccaccattagtgcggtgtgagcggatgtgtatagttcaggggtcgtcgtgttcgcatcttgcaattaggtaaatgacctcattttcaggcttgaattcatttttaattttaattttattttatacgatgtgnagacagttccctgttctctgcatttagaagtataaacaatataaatctgttaattctgtaagtaatttttataattatgatgtaactctatcctatccttaaaacatttaaaataaaccctttatgtgcaacttctgactgtaaaattttgtnctcaatgagcc

SEQ ID NO: 5037 - DNA, 395 bp, Canis familiaris
  misc_feature (197)..(197): n comprises a, c, g, or t, or includes no nucleotide
  misc_feature (215)..(215): n comprises a, c, g, or t, or includes no nucleotide
  misc_feature (320)..(320): n comprises a, c, g, or t, or includes no nucleotide
  misc_feature (376)..(376): n comprises a, c, g, or t, or includes no nucleotide
gcagtggcagcagctcgggcagcggcagcagcggcgggggcggcggggcgggggcccggtgactggccgagagtccctgcagggaggtgtacggccggactgagggcctctcagacctgcggcggctgcgctaccagagcacccgcttctgagtcattctgtgcgccccgctgcttccggggcgggtcccgcggggntgtctcccgcgccccctnccgcagtcggcccacttcctgccctggcactttcctcgggggtggggggtagggggcaggactggtccctccccgccagatcttccaggggaaggctggggcggngtgggcaacacaatttggacagcccctttctttctgctgctctcccaacacccccnaaggggggcttaaagttcc

SEQ ID NO: 5038 - DNA, 518 bp, Canis familiaris
  misc_feature (397)..(397): n comprises a, c, g, or t, or includes no nucleotide
  misc_feature (404)..(404): n comprises a, c, g, or t, or includes no nucleotide
  misc_feature (440)..(440): n comprises a, c, g, or t, or includes no nucleotide
  misc_feature (456)..(456): n comprises a, c, g, or t, or includes no nucleotide
  misc_feature (478)..(478): n comprises a, c, g, or t, or includes no nucleotide
  misc_feature (489)..(489): n comprises a, c, g, or t, or includes no nucleotide
  misc_feature (499)..(499): n comprises a, c, g, or t, or includes no nucleotide
  misc_feature (506)..(506): n comprises a, c, g, or t, or includes no nucleotide
ttgttacttttggattaggaattactcgttataattctagaactttatttggtaatgcttctttgttttttatgtcccttctgttctcaggatgaagagaacacataaagctactatccatgtcaggatttcttctatttatatcgtattacaataaaattactggcactttattcataaatattcataagcctattaattattagttgtcttcctgtagtttaatcaacaagttattttcaacttgattttctgactagtgaaaaagcttttgccctaatgtgttgcatagcctttaaaggaatggagaaggactaaaactcaatttagattattttttgcagaattttctcagcaaatctgatttattctaaaatttaaatcccagactttttcntaaatgngcctttatttacaccgaaaagggaaaaaggggaatntttttgggaattttcntggtttcaattttcaaaaaggngtttaccaaanccgaatgggngaaaaantttttaaaaaca

SEQ ID NO: 5039 - DNA, 388 bp, Canis familiaris
  misc_feature (363)..(363): n comprises a, c, g, or t, or includes no nucleotide
  misc_feature (377)..(377): n comprises a, c, g, or t, or includes no nucleotide
aaaattacaggccaatatccctgaggaacatagttatgaaaatcctcaacaaaatattagcaaaccaagttcggcaatacattaaaaggaacatacattaaattatcaaatgggatttattctagggatgcatagatagtttgacatctgtaaatcaatcagcataatacaccacattagcaaaaaaaaaataggataaaaatcatatgacaatctcaatagattcagaaagagcatttgacaaaatccaacatccatttagataaacaacaacaaattcttaatcaacctacatacattgttaagaatttgttgttgtttatctaaatggatgttggattttgtcaaatgctctttctgaanctattgggagtggnatatgattttt

SEQ ID NO: 5040 - DNA, 392 bp, Canis familiaris
  misc_feature (386)..(386): n comprises a, c, g, or t, or includes no nucleotide
agagctggcactgtcactgctgcaggagacacccaggaattatgagctgggagatgtggtggaagctgtgaggcacagccaggaccgggccttcctgcgccgcttgcttgcccaggagtgtgccgtgtgtggctgggccctgccccgcaaccggatgcaggccctgacttcctgtgagtgcaccatctgtcccgactgcttccgccagcacttcaccatcgccctgaaggagaaacacatcacagacatggtgtgccccgcctgtggccgccctgacctcaccgatgacacgcagttgctcagctacttttctacacttgacatccagcttcgggagagcctggagccagatgcctatgcactgttttacaagaagctgactgganggtgtg

SEQ ID NO: 5041 - DNA, 239 bp, Canis familiaris
  misc_feature (46)..(46): n comprises a, c, g, or t, or includes no nucleotide
  misc_feature (87)..(87): n comprises a, c, g, or t, or includes no nucleotide
  misc_feature (159)..(159): n comprises a, c, g, or t, or includes no nucleotide
  misc_feature (179)..(179): n comprises a, c, g, or t, or includes no nucleotide
  misc_feature (211)..(211): n comprises a, c, g, or t, or includes no nucleotide
  misc_feature (224)..(224): n comprises a, c, g, or t, or includes no nucleotide
gcccgaggccagcgggcccggggccccagaggcccgaggccaaggnccggtccgggctgccgacgctccccagccccctggaccacnaggccagcagcgcggagtccggggactcggagatcgagctggtgtccgaggacccgctggccgccgaggacncgctgccctcgggctacgcnacctttggccacgtgggcggccgccgccgtcncccgctcgccgtncatccagtacagcat

SEQ ID NO: 5042 - DNA, 512 bp, Canis familiaris
  misc_feature (239)..(239): n comprises a, c, g, or t, or includes no nucleotide
  misc_feature (242)..(242): n comprises a, c, g, or t, or includes no nucleotide
  misc_feature (341)..(341): n comprises a, c, g, or t, or includes no nucleotide
  misc_feature (355)..(355): n comprises a, c, g, or t, or includes no nucleotide
  misc_feature (383)..(383): n comprises a, c, g, or t, or includes no nucleotide
  misc_feature (388)..(388): n comprises a, c, g, or t, or includes no nucleotide
  misc_feature (416)..(416): n comprises a, c, g, or t, or includes no nucleotide
  misc_feature (424)..(424): n comprises a, c, g, or t, or includes no nucleotide
  misc_feature (435)..(435): n comprises a, c, g, or t, or includes no nucleotide
  misc_feature (453)..(453): n comprises a, c, g, or t, or includes no nucleotide
  misc_feature (476)..(476): n comprises a, c, g, or t, or includes no nucleotide
cacagagagccggcttgcagttcccggtgggccgtattcatcgacacctgaaatctaggacgaccagtcatggacgtgtgggcgcgactgccgctgtgtacagcgcagccatcctggagtacctcaccgcagaggtacttgaattggcaggaaatgcatcgaaagacttgaaggtaaagcgtattacccctcgtcacttgcaacttgctattcgtggagatgaagaattggattccctnatnaaggctacaattgctggtggtggtgttattccacacatccacaaatctctgattgggaagaaaggacaacagaagactgtttaaaggatgcctggattncttattatcttcangacttctaaatactctttaacaagctgntccantgtttggtgattcccagtgggacttgtnttttttgnggaaaaaaaanaaattttgccttttttgntaatttttttttgaagcaagttnggaaggtttaatttaactttttccaaccaaccaaat

SEQ ID NO: 5043 - DNA, 482 bp, Canis familiaris
  misc_feature (385)..(385): n comprises a, c, g, or t, or includes no nucleotide
  misc_feature (403)..(403): n comprises a, c, g, or t, or includes no nucleotide
  misc_feature (421)..(421): n comprises a, c, g, or t, or includes no nucleotide
  misc_feature (423)..(423): n comprises a, c, g, or t, or includes no nucleotide
  misc_feature (433)..(433): n comprises a, c, g, or t, or includes no nucleotide
  misc_feature (460)..(460): n comprises a, c, g, or t, or includes no nucleotide
  misc_feature (464)..(464): n comprises a, c, g, or t, or includes no nucleotide
acgcgtgggcggacgcgtgggcggacgcgtgggcggacgcgtggggcagagatgacaaatgggtaacagacaaaaatgtgagaataaagtattagataaagcagttttttgtattcttctaaaatgatgttagagctgtgatttttgttttgtgccttaaagtgtagtagatgtttctcagaagcacgaaagaatttcagggcactgcagtgtggtggctctgatatagctgttttgtgaccattaaattcataaaatgacctgtaccccttactggctttttaccctgaacaaggtatttaccatcacaatgcctccatttgcatgtgtagaactgaggataagtgcacggttgtaaaaacctatgggattcacctaagttgangtgccttatcttttactnaagtacttggcaaggcantnttacccaaangaggaaaaagggttgttgggggaaatnaaangggcatgggttaataaac

SEQ ID NO: 5044 - DNA, 157 bp, Canis familiaris
  misc_feature (7)..(7): n comprises a, c, g, or t, or includes no nucleotide
  misc_feature (34)..(34): n comprises a, c, g, or t, or includes no nucleotide
  misc_feature (82)..(82): n comprises a, c, g, or t, or includes no nucleotide
  misc_feature (98)..(98): n comprises a, c, g, or t, or includes no nucleotide
tttacantttgaggttccaaaaagaaatggttgnttttccgtatgatctactgaactcaacctagtttccaactggaaagantctaaaatatgatacnaaaacaaattaaataatggtattttttaagcagtatatctatgaagcatgttgattggg

SEQ ID NO: 5045 - DNA, 387 bp, Canis familiaris
  misc_feature (293)..(293): n comprises a, c, g, or t, or includes no nucleotide
  misc_feature (347)..(347): n comprises a, c, g, or t, or includes no nucleotide
cgcgagtacgatgtcggagatgaacgagctgtccgagctgtatgaagagagcaatgacctgcagatggatgtgatgcccggcgagggtgaccttccgcagatggaggtaggcggcgggagccgggagccctccccgaacccctcccgccacggggcccagccgcagctggaggaggaaggcccgatggaggaggaggcggcccagccaatggcggagccgcagggggaacgaggccttgctcaccggcccagcccgggggagcagccgggccagctcgccggccctgacttcnagagcgaggacgagggtgaggagtttgatgactgggaggacgactacgattatncggaagagggagcaactgagtggtgccggctacagggtat

SEQ ID NO: 5046 - DNA, 145 bp, Canis familiaris
  misc_feature (49)..(49): n comprises a, c, g, or t, or includes no nucleotide
  misc_feature (91)..(91): n comprises a, c, g, or t, or includes no nucleotide
  misc_feature (94)..(94): n comprises a, c, g, or t, or includes no nucleotide
  misc_feature (99)..(99): n comprises a, c, g, or t, or includes no nucleotide
atctacacccataggggagaacctgagtgggctttctggggtcaatgtnccaggcaacgcgtctttgggctggtgcatcttcatatacaanctngggcnggacgccgatgaggggatcctctggcagatgtttggcccctttggg

SEQ ID NO: 5047 - DNA, 437 bp, Canis familiaris
  misc_feature (413)..(414): n comprises a, c, g, or t, or includes no nucleotide
agtgtatatatatatcaaaccaaatttctgataggaaaagtatagctttacggttgaggaggaagaggagctttgagaagtcaggcagtgttggcgtcgtagccgagcccgggccggctccagggctgcaccttctccgtgcaggcctgaggcttggcgctgggttcttgtcaccacctcaccacagtggaggcaggtggcccggagagggggccgccgctctctctgggtccccagcctccagggcatagatgagtgaggggggcagcaaatcagaatgactgaaattttccatcccattttgctttgaccacatgtattgagctgcagcctctgatactatatcacatttccaaaactgggatccattaggatggaaagagaacaagatctgtaagaaatgtttacctttnnactgcccatgaattcccggacat

SEQ ID NO: 5048 - DNA, 468 bp, Canis familiaris
  misc_feature (410)..(410): n comprises a, c, g, or t, or includes no nucleotide
  misc_feature (441)..(441): n comprises a, c, g, or t, or includes no nucleotide
  misc_feature (455)..(455): n comprises a, c, g, or t, or includes no nucleotide
tagtttcctcacagtaatgtcacatagtaactgccaaatttgttagtttcccatctctcttagaaaggctttaagattattttatagttttgagaactttgaagccacttttttttaactttgcatttgcataaaaatgtttagcttttaagtggagagcaaattatgatcatatattttgatattcatgagctatttgactatagcaattttttttaatgcactttggctataaaaccatggatgatttgatccataagatttaaatgtgccatcaatttagtattcctagacatgagcttgatgaatggtattctgtaattataatgtgccacacattatcgtgttttaattgccctttgcctgaattttaatgatcaatttgttattgttgcagatgtgaatattgngcataaacttactaaatttatgtaaaaatgnataaaatagaaatnggaaaaagttctt

SEQ ID NO: 5049 - DNA, 578 bp, Canis familiaris
  misc_feature (348)..(348): n comprises a, c, g, or t, or includes no nucleotide
  misc_feature (350)..(350): n comprises a, c, g, or t, or includes no nucleotide
  misc_feature (355)..(355): n comprises a, c, g, or t, or includes no nucleotide
  misc_feature (444)..(444): n comprises a, c, g, or t, or includes no nucleotide
  misc_feature (452)..(452): n comprises a, c, g, or t, or includes no nucleotide
  misc_feature (475)..(475): n comprises a, c, g, or t, or includes no nucleotide
  misc_feature (514)..(514): n comprises a, c, g, or t, or includes no nucleotide
  misc_feature (528)..(528): n comprises a, c, g, or t, or includes no nucleotide
  misc_feature (534)..(534): n comprises a, c, g, or t, or includes no nucleotide
ttcaaaaaccatcaaatgagaaaattgcaagtagtgtgacagagctgattgattttgttgctttcttgattttttgttttcaaaatgggtttactaagatgtagatgacttaactgcctcctccttcgtctgaaaaaatgccaatattcaatcatcatgcagcattataacaagccttataagtcctaaagcattaagttgcactttcttgaggaggggtagtgcagtatttctctggccagtatgaatgaagtttatacttaacatatttgatagatcaagctatggcacagcaactcatcagatagctagctttgacgtctgggcacaattgaaccaacttccatngngaatntttataatgattgactttggtgtataagtgcaggaaacaaaataagggctccttaagttaagtattttgtcaaccatcctttttggttnttaactcncttgctattttttacaagccacncaatttttggcttgttttaagagaaaaaaaaaatccctnttcaagtagttttncacctntcagccctgggtaaatgcccataaaatccatcgaaatgggccta

SEQ ID NO: 5050 - DNA, 420 bp, Canis familiaris
  misc_feature (209)..(209): n comprises a, c, g, or t, or includes no nucleotide
  misc_feature (222)..(222): n comprises a, c, g, or t, or includes no nucleotide
  misc_feature (258)..(258): n comprises a, c, g, or t, or includes no nucleotide
  misc_feature (362)..(362): n comprises a, c, g, or t, or includes no nucleotide
cccagaaactgaagaaattaacaaactgacggggataggccctaaatctatcactaaaaaaatgattgagggactttacaaatataattctgaccggaaacagtttagccacatacctgctaaaactttatctgccagtgttgatgcgactaccattcatagtcatttatggcagaccaagagaccagtaacacccaaaaaacttctgnccaataaagcatnggagttgggaaatacttgcttcagaacattcgtggnaaattttgcacttcatctttcctgcctatagaaaatctttctaattgccaacaagacttttattaattgaaactgaatgtaggctctgttgtcatgaacaactngaacgtcagccacagtatttttgtagtgcagaaaaattctcccacagggtgggtaaag

SEQ ID NO: 5051 - DNA, 263 bp, Canis familiaris
  misc_feature (44)..(44): n comprises a, c, g, or t, or includes no nucleotide
  misc_feature (120)..(120): n comprises a, c, g, or t, or includes no nucleotide
  misc_feature (239)..(239): n comprises a, c, g, or t, or includes no nucleotide
catagcattattatgacctgtgctgcttggggcctatagtgatnggtctggtggggacactggaaaggagggtgggatgaggtctctgcagcactaggagattttgtgctgacttgtgtncccacccctttgcagacacatttgacatgtcctttgaagagctgttggaattgcagagccaagtggggactaagacatacaaacggttaggtagctggaaacagtttctaagaaggaangctctatgaccacgtgtccaaaat

SEQ ID NO: 5052 - DNA, 344 bp, Canis familiaris
gattccttttcccctgagggatgtggtaagaacataaggatggctagacttccctagggaagtggcagaaggaaattatgtacatatggctggggctttcaagtcagcacatgtcagccaggagcctcttatggggcagtaaacacttcttgatgatcatgtcatatgaggaacagctgagggaatagaggactctagatagcccagaggtcaaaactgctgggaagggggatgtctgggtggctcagtcgcttgggcagcggactcctgatctcagctcagatcttgatctccaggtcgtgagttcaagccctaccttgaactccacggagctgagcgtagcc

SEQ ID NO: 5053 - DNA, 392 bp, Canis familiaris
  misc_feature (292)..(292): n comprises a, c, g, or t, or includes no nucleotide
  misc_feature (310)..(310): n comprises a, c, g, or t, or includes no nucleotide
aactgatgtgttggaagtgaccaaaaaattcatgagagatccaattcgaattctggtgaagaaggaagaattgacccttgaaggaatcaaacagttttatattaatgttgaaagagaggaatggaagttggatactctttgtgacttgtacgagacactgacgattactcaggctgttatttttctcaatacaaggcgcaaggtggactggctcactgagaaaatgcatgccagggacttcacagtttctgccctgcatggtgacatggaccagaaggaaagagatgttatnatgagggaattccgatcngggtcaagccgtgttttgatcactactgacttggttggcttcgtgggaattgaatgttcaacaaaggtgttatttggttatt

SEQ ID NO: 5054 - DNA, 372 bp, Canis familiaris
ttttatttttccttttttcttttatatcatgtgaactaaaaacagtcttctgttaggggatgggggcaagggggatacctgatgacattaacaatttaataacattaacattgttgccaaagaggtggtctctttgctgaaaatgggtttcaagaaaaatctatttttataaaatataaagaatttttacaagagaatctggatttgagaaaaaaatattttgactggctaatttaggggaaattgacaactttgtcgcgttcatactgcactggtaactttttagagatcaagatgtgtgttttaaactggattcgtagactgttttttgaaggatgggctataaacagatgatcttcatatcttttcata

SEQ ID NO: 5055 - DNA, 426 bp, Canis familiaris
  misc_feature (262)..(262): n comprises a, c, g, or t, or includes no nucleotide
  misc_feature (390)..(391): n comprises a, c, g, or t, or includes no nucleotide
actgcccacacattccctttcttttctccatatcatttgttggctaaaatctctccaggtatccctaattgttcacccttaatacatatctgtttacatatttgattctctgaggccaaaacatcaataaataaggagtaaaacaattttatgtgtctatatttacgattcactctaatattatatggccttgtgtcaccttcaattaactaggttgcagaattattaataatgttgataaaaaaggccattgattcctttnttcagcaaacatcgattgagtgcctggcatggcaaacactgctaataagtattggggatacagagattggtgagactcatttgcttccctgaagaggttcatattttggttgggtaggagaaacagcnnaacacattcgattgtgtaaagaaagtgcaagtgat

SEQ ID NO: 5056 - DNA, 627 bp, Canis familiaris
  misc_feature (235)..(235): n comprises a, c, g, or t, or includes no nucleotide
  misc_feature (256)..(256): n comprises a, c, g, or t, or includes no nucleotide
  misc_feature (398)..(398): n comprises a, c, g, or t, or includes no nucleotide
  misc_feature (401)..(401): n comprises a, c, g, or t, or includes no nucleotide
  misc_feature (411)..(411): n comprises a, c, g, or t, or includes no nucleotide
  misc_feature (439)..(439): n comprises a, c, g, or t, or includes no nucleotide
  misc_feature (447)..(447): n comprises a, c, g, or t, or includes no nucleotide
  misc_feature (451)..(451): n comprises a, c, g, or t, or includes no nucleotide
  misc_feature (489)..(489): n comprises a, c, g, or t, or includes no nucleotide
  misc_feature (515)..(515): n comprises a, c, g, or t, or includes no nucleotide
  misc_feature (534)..(534): n comprises a, c, g, or t, or includes no nucleotide
  misc_feature (600)..(600): n comprises a, c, g, or t, or includes no nucleotide
gcgcagggtcacgtacaggtgctgagccgcgaccccggacaccagaaaccgacagcacacctcgtccacaccagcaccaagcgatgaagcgaccgtctcacaaaactctcttcaagtcactcaccctgcccggggtgacgaggttgtctacaccgaccaagtcccgctgcagctccgtcagcttctggaggttctccagccgggcgaggctgtgctggagtgcggacgtcacctntgtgatggcctggagggcgtntgtggggagaggcccctcagcacaggcgcgggcaggtgggcacgggcaaccccacccacgcctctgtgacaggaactgtcctcttacttattcaaaggttttatcttgagagagcgagtgaacctgggcaggggtgaggganaanagttaccccnaccgaggccgggagccccaacacggggnttcgaccncagnacccggaaaacttttaacctaagcccgaaggcagatgnttcaccacgggagccagccagctggnttttggaaccggcgttttnaaaaggcagtttagggatccctgggtggtgcagcggtttggcgcctgcttttggccaggggcgggntcctggagacccaggatcgaatcccac

SEQ ID NO: 5057 - DNA, 487 bp, Canis familiaris
  misc_feature (309)..(309): n comprises a, c, g, or t, or includes no nucleotide
  misc_feature (404)..(404): n comprises a, c, g, or t, or includes no nucleotide
  misc_feature (417)..(417): n comprises a, c, g, or t, or includes no nucleotide
  misc_feature (436)..(436): n comprises a, c, g, or t, or includes no nucleotide
  misc_feature (466)..(466): n comprises a, c, g, or t, or includes no nucleotide
  misc_feature (486)..(486): n comprises a, c, g, or t, or includes no nucleotide
tacaacatctagtctttctagatgttaaagaggttgccagtgtatgacaaaagtagtaaacaaatacatagtgtacactttgtgtttaaattcataggaaagactattctgaaaactagaagtgaaattgttaaatcccctctaagtattacagatgcttatacttttcactaggttgatatagatgagaagaggaagggttaggccagaatgttttttcagtgctactatgtatgtagtgggcaaattttaaatacttaacttgaaacatctagtattctggatgtttgaaagtgaacaacatgttangagtagagagttaaagtaacaacaccctttaagtattaatttacaggaatggttgtactttgggaatgggaattgttaaacctgatgtcttgganaaaatgctgactntttactgggggacaagggncatgggaaaaatggagaaagaagggtcctnggccctcgagtctttaactna

SEQ ID NO: 5058 - DNA, 360 bp, Canis familiaris
  misc_feature (152)..(152): n comprises a, c, g, or t, or includes no nucleotide
  misc_feature (168)..(168): n comprises a, c, g, or t, or includes no nucleotide
  misc_feature (178)..(178): n comprises a, c, g, or t, or includes no nucleotide
  misc_feature (209)..(209): n comprises a, c, g, or t, or includes no nucleotide
  misc_feature (227)..(227): n comprises a, c, g, or t, or includes no nucleotide
  misc_feature (233)..(233): n comprises a, c, g, or t, or includes no nucleotide
  misc_feature (269)..(269): n comprises a, c, g, or t, or includes no nucleotide
  misc_feature (285)..(285): n comprises a, c, g, or t, or includes no nucleotide
  misc_feature (348)..(348): n comprises a, c, g, or t, or includes no nucleotide
aaatggcgtccacggattacagtacctacagccaagctgcagcccagcagggctacagtgcatacaccgcccaaccaactcaaggatatgcacagaccacccaggcatatgggcagcagagttatggaacctatggacagcccactgatgtnagttatacccaggctnagaccactgngacctatgggcagaccgcctattgcaacttnttatggacagcctcccgntggttntactactccaactgtcccccaggcatacagtcagcntgttcaggggtacggnactggtgcttatgataccaccactgttacggtcactaccacccaggcctcctatgcaagtcantcttgcatatgg

SEQ ID NO: 5059 - DNA, 531 bp, Canis familiaris
  misc_feature (214)..(214): n comprises a, c, g, or t, or includes no nucleotide
  misc_feature (398)..(398): n comprises a, c, g, or t, or includes no nucleotide
  misc_feature (416)..(416): n comprises a, c, g, or t, or includes no nucleotide
  misc_feature (439)..(439): n comprises a, c, g, or t, or includes no nucleotide
  misc_feature (459)..(459): n comprises a, c, g, or t, or includes no nucleotide
  misc_feature (473)..(473): n comprises a, c, g, or t, or includes no nucleotide
  misc_feature (481)..(481): n comprises a, c, g, or t, or includes no nucleotide
  misc_feature (500)..(500): n comprises a, c, g, or t, or includes no nucleotide
  misc_feature (508)..(508): n comprises a, c, g, or t, or includes no nucleotide
ttgaaccacttaaataatgaagcggcaacaccgggtgttttgaggtgttggcattcttcgctgatttggctgttcccaatgtttacattatttaatcttgcaaaaatggttctgtgcacttggatgtgaaatgctgtccggttttatttttttatgttgttatccttggatgtacaaaaaaaaaaaatcagcaaatgatctctatagatattgntttattttggtcctcttttgaagttatcgggaatgtgtttaaaacaagcagagaacttttctaaggaatgatacaaaggaagaatccctgttttactttaaaatgacttgtaaagcttgtgtttctttgttgctgcaagctatttgcccaagttaatgcaaatggacacattttatattgtcangaaaaaaaacccccccanaaccaaagaaaaaaatgcttggncctttttttaacctttttcntgccagtctgttgngtgagcanccctgtttttttctctaanattgggtnagtttattttttttaatgggctg

SEQ ID NO: 5060 - DNA, 660 bp, Canis familiaris
  misc_feature (100)..(100): n comprises a, c, g, or t, or includes no nucleotide
  misc_feature (347)..(347): n comprises a, c, g, or t, or includes no nucleotide
  misc_feature (378)..(378): n comprises a, c, g, or t, or includes no nucleotide
  misc_feature (426)..(426): n comprises a, c, g, or t, or includes no nucleotide
  misc_feature (436)..(436): n comprises a, c, g, or t, or includes no nucleotide
  misc_feature (443)..(443): n comprises a, c, g, or t, or includes no nucleotide
  misc_feature (455)..(455): n comprises a, c, g, or t, or includes no nucleotide
  misc_feature (473)..(473): n comprises a, c, g, or t, or includes no nucleotide
  misc_feature (478)..(478): n comprises a, c, g, or t, or includes no nucleotide
  misc_feature (490)..(490): n comprises a, c, g, or t, or includes no nucleotide
  misc_feature (506)..(506): n comprises a, c, g, or t, or includes no nucleotide
  misc_feature (569)..(570): n comprises a, c, g, or t, or includes no nucleotide
  misc_feature (575)..(575): n comprises a, c, g, or t, or includes no nucleotide
  misc_feature (594)..(594): n comprises a, c, g, or t, or includes no nucleotide
  misc_feature (612)..(612): n comprises a, c, g, or t, or includes no nucleotide
  misc_feature (642)..(642): n comprises a, c, g, or t, or includes no nucleotide
ctccacctccagctggcccccaggtcctgtggcgatggctccccatggcagccgcccgctgacctgtcgggactctccatagaagaagtgtccaagtcgntacggtttattggtttgtctgaagatgtcatatcgttcttcgttactgaaaagattgatgggaatttgctcgttcagctgaccgaagaaatcctctccgaggatttcaaattgagcaaactgcaggtgaagaaaatcatgcaattcattaatggctggaggcccaagatatagccaaataaccccagctagcagtgaacaaaactgacagattggtgtgctaggaagggtgggctgggacacaattncatgttttttgcactaaaaaccttctctgtnaatagggataagagaaactcttactatgcagatacatttttgaatggngaacagcttnttttgancatcaataaaangctgtacagaacacttanagggngccttgtacatnactcacactcaacagntggtaaaagacaaaaggcatgttcagagaaataattctacccaagtaggttatgtgagaaggnntgatntttattacaaaataaccangcttgaaaaccctttgantcaaaaccaaacaaacatactaacaccccnccaaacaaccaaaaacaa

SEQ ID NO: 5061 - DNA, 524 bp, Canis familiaris
  misc_feature (460)..(460): n comprises a, c, g, or t, or includes no nucleotide
  misc_feature (466)..(466): n comprises a, c, g, or t, or includes no nucleotide
acccgtccgcgcgtgtcccgcagccgcccgccacacgcaccgagcatgagggagatcgtgcacatccaggccggccagtgcggcaaccagatcggagccaagttctgggaagtcatcagtgatgagcacggtatagaccccagtggcaactatgtgggcgactcagacctgcagctggaacgcatcagcgtctactacaacgaggcctcttctcataagtatgtgcctcgggccattctggtggaccttgagcccggaaccatggacagcgtccggtctggggcctttgggcatcttttcaggcctgacaacttcatctttggtcagagtggggctggcaacaattgggccaaaggtcactacacggagggcgcagagctggtggactcagtcctggatgtggtgcggaaggagtgtgaaaaattcgactggcttgaagggtttcaagttgacccactcnttcggngggggcacaaggtccgggatgggcacactgttcataacaaagggcgcgaggagtaccc

SEQ ID NO: 5062 - DNA, 379 bp, Canis familiaris
tttgcaggcgaagttgcagctgcgctaccaggagatcgccaagcgaactcagcctcctcccaagctccctgtgggccccagccacaagctctccagcaactactactgcactcgcgatggccgccgggaagctgtgccgccttcagtcatcatgtcctcgaagaaggtattggcgccaggcaagcctgcagagagccctgctgcagctgccactgagaagaaggccgtgtcgccagctcctccaataaagaggtgggagctgtccaaggaccagccttacctgtgactgcaccctgggggcacctggccaggccctcagggccatctgggtgcttcccctcctcgtattccttccgggagaccatgacttaattatgac

SEQ ID NO: 5063 - DNA, 461 bp, Canis familiaris
  misc_feature (376)..(376): n comprises a, c, g, or t, or includes no nucleotide
  misc_feature (387)..(387): n comprises a, c, g, or t, or includes no nucleotide
  misc_feature (414)..(414): n comprises a, c, g, or t, or includes no nucleotide
  misc_feature (446)..(447): n comprises a, c, g, or t, or includes no nucleotide
attcctgaacaaattctaggaaaagttagcatcgctgtaataaaaggtctgacatacctgagagagaagcacaagattatgcacagagatgtcaagccttccaacatcctcgtgaactcccgtggggagatcaagctctgtgactttggggtcagcgggcagctcattgactccatggccaactccttcgtgggcacaaggtcctacatgtcgccagaaagactccaggggactcattactccgtgcagtcggacatctggagcatggggctctctctggtggagatgggcaagttgggaggtatcccatccctcctccggatgccaaggagctggagctgatgtttgggtgccaagtggagggagacgtggctgnaccccacccanaccaaggaccccgggaagaccccttantcttatggaatggacagccgaccgcccatggnnaatttttgagctgt

SEQ ID NO: 5064 - DNA, 307 bp, Canis familiaris
aaataaaatatcttaaaaataataaaataaaaaataaaactttatctgtaaatcagactggctacgttggtcaatagagttagttttattcttgctgggaaggaagcctcaccttaatgtctctgtttatttcagatgatttggaaaaagccaaggaaatgttaacaaagatgagatacttttcaaatgtagaagaaaaaatcaagttaaagaagatttccctctaatgattactagtttaaaagtttcaaaaataaagttcttgtctaaaaaaaaaaaaaaaaaaaaaaaaaaaaaaaaaaaaaaa

SEQ ID NO: 5065 - DNA, 404 bp, Canis familiaris
  misc_feature (395)..(395): n comprises a, c, g, or t, or includes no nucleotide
agccaaggcgccccttccttggaagccgagcggcttcgctcgcttttcgccgccgccgcctctcgcagtattgcaatataggggaaaagcagaccatggtgaatccgggcagcagctcacagccgccccccgtgacggccggctccctctcctggaagcggtgtgcaggctgcggaggcaagatcgcggaccgctttctgctctatgccatggacagctactggcacagccggtgcctcaagtgctcctgctgccaggcgcagctgggcgacatcggcacgtcctgttacaccaagagcggcatgatcctttgcagaaatgactacattaggttatttgggaatagcggtgcttgcagcgcttgcggacagtcgattcctgcgagcgaactcttnatgaggggc

SEQ ID NO: 5066 - DNA, 399 bp, Canis familiaris
gtggcagggaactgggtatccttgggaccagctgatccaggctcagtcccccaaagaccaaccaaagagccagccagagcgagctgggcctgcaacccgcctgagccccgcagcctgtctcccagctctgcggccaccccctgccctccccagcttcctgcccaaagagccccacgttccagcccgcctgaggggagggggcatctcgccagctggtccctgccagggagctttgatgtgcaatattagagaggagacatgaaaaaggagaaaaggaaagaaagaagtatatatattttatttaaacaaacacaaagaaggtgcattactattttttttttcacctgggaaagaggtgagagaaggagcggcccagagggtgggatgctgtggaggccc

SEQ ID NO: 5067 - DNA, 439 bp, Canis familiaris
aaccagatgtgtatttactgtgttttaaggagtagctgcagcatatatgacattggcagtggtgcctccgatattacgttaaccaatttaggactacaaaacacagtaaatacacatctggtttaaggagtagctgcagcatatatgacattggcagtggtgcctccgatattacgttaaccaatttaggactacacaagacaggtctcatccagcatcaggacatagctgcagggttttgtgaaccattcctatgtgtaactttaggaaactgatgtttttttcttaggccattttaatattacgacttgagtaacaggtcagataataaggacaacatacacaacctccaattaaaatctttgttgtagtctaaacagtgacatggtacattagaaaaattttaaaactgcaggcttcttttgggtcccccaaaagg

SEQ ID NO: 5068 - DNA, 568 bp, Canis familiaris
  misc_feature (394)..(394): n comprises a, c, g, or t, or includes no nucleotide
  misc_feature (422)..(422): n comprises a, c, g, or t, or includes no nucleotide
  misc_feature (440)..(440): n comprises a, c, g, or t, or includes no nucleotide
  misc_feature (445)..(445): n comprises a, c, g, or t, or includes no nucleotide
  misc_feature (471)..(472): n comprises a, c, g, or t, or includes no nucleotide
  misc_feature (510)..(510): n comprises a, c, g, or t, or includes no nucleotide
  misc_feature (521)..(521): n comprises a, c, g, or t, or includes no nucleotide
  misc_feature (535)..(535): n comprises a, c, g, or t, or includes no nucleotide
  misc_feature (540)..(540): n comprises a, c, g, or t, or includes no nucleotide
aaatcacagccctggacttcgagcaggagatggccacggccgcgtcctcgtcctccctggagaagagctacgagctgcccgacgggcaggtgatcaccattggcaacgagcggttccgctgcccagaggcactcttccagccttccttcctgggtatggagtcctgcggcatccacgagaccactttcaactccatcatgaagtgtgacgtggacatccggaaggacctttacgccaacacggtgctgtctggcgggaccaccatgtaccccggcatcgccgacaggatgcagaaggaaatcacagccctggcccccagcacgatgaagatcaagatcattgctcctccggaacgcaagtactctgtgtggatcggaggctccatcctggcctngcttgccaacctttcagcaaaatgtggntcagcaagcaaggaattncaacnaagtcgggcccctccatcgtccaccnnaaaatgcttctaaatggactgcgagccagatgcgttancatttgctgcntgaagtgaattccnaagtntaaatttgccctggcaaaatgtatacac

SEQ ID NO: 5069 - DNA, 232 bp, Canis familiaris
  misc_feature (165)..(165): n comprises a, c, g, or t, or includes no nucleotide
gtctgcgttggcactatggctaaacatcatccggatttgattttttgccgcaagcaggctggtgttgccatcggaagactgtgtgaaaaatgtgatggcaaatgtgtgatctgtgactcgtacgtgcgttcctgcactctggtgcgcatatgtgatgagtgtaantatggctcttaccagggggcgctgtgtgatctgcggaggccctggaagtctctgatgcctattattt

SEQ ID NO: 5070 - DNA, 408 bp, Canis familiaris
ttgtagcctgaccaaaagtgagttgggaaggagggcttacctagccaaaagctctttttaactctcttaaatgaaacgtgctcactaagaagttccatctaacaaatgactttctaccttaatgattccacttgtctctacctgaaccctttactccacaaatgataaggtaacattgacatttcccacccccaccccagccccaggtgccctatgaaaaagcaactggaatacagcaaagatcgcagggccgggcttggtcttcctgcttccatgtccacccctgccccccaaaccctattcctctggagcgctgcagctgaggtgctaggagggctagacaggagacccccctcccttacttgacccttaaaggcagaaccctcaagatttactcaacaagtttcg

SEQ ID NO: 5071 - DNA, 650 bp, Canis familiaris
  misc_feature (350)..(350): n comprises a, c, g, or t, or includes no nucleotide
  misc_feature (371)..(372): n comprises a, c, g, or t, or includes no nucleotide
  misc_feature (432)..(432): n comprises a, c, g, or t, or includes no nucleotide
  misc_feature (446)..(446): n comprises a, c, g, or t, or includes no nucleotide
  misc_feature (450)..(450): n comprises a, c, g, or t, or includes no nucleotide
  misc_feature (464)..(464): n comprises a, c, g, or t, or includes no nucleotide
  misc_feature (481)..(481): n comprises a, c, g, or t, or includes no nucleotide
  misc_feature (523)..(523): n comprises a, c, g, or t, or includes no nucleotide
  misc_feature (531)..(531): n comprises a, c, g, or t, or includes no nucleotide
  misc_feature (569)..(569): n comprises a, c, g, or t, or includes no nucleotide
  misc_feature (586)..(586): n comprises a, c, g, or t, or includes no nucleotide
  misc_feature (594)..(594): n comprises a, c, g, or t, or includes no nucleotide
  misc_feature (617)..(617): n comprises a, c, g, or t, or includes no nucleotide
  misc_feature (642)..(642): n comprises a, c, g, or t, or includes no nucleotide
tgttttgccagcatgagatactgtcccctctggaggattttaggggaggaagagccacatccccagggatttggaggaggcgctggatcccccgaacctctggggagtcctgggtgttggctggaggactggtggggatgttcgatccggggctgagttttccctggtcctgagatgtctgctgctgccctggggacaggtgaggcaggctgtgctggggctgcaggccaggaaagaggctgcctgggcttccagctctccagactggttgatcaccggcctctatccttggcacacaccctgctgccgaggcccaggggcaggaacttggccctggccccggtccaaangggctttccagcgaagcccanngatcccagcgttccaacaagcaaaaacttgccttcttcctttgcgagcttgccaaggggnccccacaagaattncccnaacccaaaggtganggtgcgggccttcacangggatgcttgaatttccacaccaaagttttggtcccattttnagccttcntttttcccatcaagttaaaggggttaaatatttcttgnccaatctatgtttgcanggctgatngggggatcaaaccgggaaaagtnaagtgaaagcccaaatttaccttgngaagaacg

SEQ ID NO: 5072 - DNA, 307 bp, Canis familiaris
  misc_feature (32)..(33): n comprises a, c, g, or t, or includes no nucleotide
  misc_feature (38)..(38): n comprises a, c, g, or t, or includes no nucleotide
  misc_feature (41)..(41): n comprises a, c, g, or t, or includes no nucleotide
  misc_feature (70)..(70): n comprises a, c, g, or t, or includes no nucleotide
  misc_feature (98)..(98): n comprises a, c, g, or t, or includes no nucleotide
  misc_feature (122)..(122): n comprises a, c, g, or t, or includes no nucleotide
  misc_feature (126)..(126): n comprises a, c, g, or t, or includes no nucleotide
  misc_feature (142)..(142): n comprises a, c, g, or t, or includes no nucleotide
  misc_feature (155)..(155): n comprises a, c, g, or t, or includes no nucleotide
  misc_feature (159)..(159): n comprises a, c, g, or t, or includes no nucleotide
  misc_feature (168)..(168): n comprises a, c, g, or t, or includes no nucleotide
  misc_feature (214)..(214): n comprises a, c, g, or t, or includes no nucleotide
  misc_feature (234)..(234): n comprises a, c, g, or t, or includes no nucleotide
  misc_feature (244)..(244): n comprises a, c, g, or t, or includes no nucleotide
  misc_feature (251)..(251): n comprises a, c, g, or t, or includes no nucleotide
ttttttgcagactaaaaccccccacttacttnnagggnaanaatggcccgcctgcaggtaccggtccggnaattcccgggtcgacccacgcgtccggntttgagtgtgatcaggaaccagantgtnagtaatcaccatgtgnaccatttacctgntagnggtcctggnagaggtcaagacattctgcatgtgccatttcctacagagttgtccnaacagacccctataattttntaccctgggnaatccangctgccgggatcaccctatgtacctgtgggaagaggagtcatgctgatgattctaa

SEQ ID NO: 5073 - DNA, 697 bp, Canis familiaris
  misc_feature (12)..(12): n comprises a, c, g, or t, or includes no nucleotide
  misc_feature (22)..(22): n comprises a, c, g, or t, or includes no nucleotide
  misc_feature (29)..(29): n comprises a, c, g, or t, or includes no nucleotide
  misc_feature (34)..(34): n comprises a, c, g, or t, or includes no nucleotide
  misc_feature (66)..(66): n comprises a, c, g, or t, or includes no nucleotide
  misc_feature (639)..(640): n comprises a, c, g, or t, or includes no nucleotide
  misc_feature (661)..(661): n comprises a, c, g, or t, or includes no nucleotide
  misc_feature (678)..(678): n comprises a, c, g, or t, or includes no nucleotide
  misc_feature (682)..(682): n comprises a, c, g, or t, or includes no nucleotide
  misc_feature (694)..(694): n comprises a, c, g, or t, or includes no nucleotide
cgccagactctnatacgcactncactctnagggnaagtctggtacgcctgcaggtaccggtccggnaattcccgggtcgacccacgcgtccgagtaactcttaaaaagcagagatcacagaaatggccaatgctgaaagaaagaaagcatgaaaataaaattaatcagacagtttattgtaaggagcattgcccctataaaaagaaaaagccttagcgccacctggagcgcatgctggatttgtggtcttttgtggtttccattaaaacaagccaatcaggtcagaaggctgttgatttggtagggaatttttggaaaaaaaaaaactaaaaagcagtagttcccaaaccggaagcatacaacagcatgctgacaggaatgcttttctccaggcctttttgctaggtggcagcttttgaaactctctgctgcgttacacagtgtgtatgcagatagctagggacacatttccgaaaatcagaaatctgacgagtgctaacaaggccaacagtcaaagggatcacacctgcagtttcaaaaataaaaatacatatcttccgtattcagcaacgatctctataaatggcttacctccaaatatgaaatcctctaacaacctatggttgaaggaatgctcannttcatttgccaataaattggnttctcataacttgcatnaagnttaattttaagnaaa

SEQ ID NO: 5074 - DNA, 569 bp, Canis familiaris
agtgtagaggagaagattctggccgcagccaagtacaagctcaacgtcgaccagaaggtgatccaagctggcatgtttgaccaaaagtcctccagccacgagaggcgcgccttcctgcaggccatcctcgagcatgaggagcaggatgagagcagacactgcagcacgggcagcggcagtgccagcttcgcccacactgcccctccgccagcgggcgtcaaccccgacttggaggagccacctctaaaggaagaagacgaagtgcctgacgatgagacggtgaaccagatgattgcccggcacgaggaggaatttgacctgttcatgcgcatggacctagaccgcaggcgcgaggaggcccgaaatcccaagcggaagccacgcctgatggaggaggatgagcttccttcatggatcatcaaggacgatgctgaggtggagcggctgacctgtgaggaagaagaagagaaaatgtttggccgtggctcccgccatcgcaaggaggtggactacagcgactcgctgactgagaagcagtggctcaaggccatcgaggagggcacgctgga

SEQ ID NO: 5075 - DNA, 814 bp, Canis familiaris
  misc_feature (603)..(603): n comprises a, c, g, or t, or includes no nucleotide
  misc_feature (606)..(606): n comprises a, c, g, or t, or includes no nucleotide
  misc_feature (649)..(649): n comprises a, c, g, or t, or includes no nucleotide
  misc_feature (674)..(674): n comprises a, c, g, or t, or includes no nucleotide
  misc_feature (678)..(678): n comprises a, c, g, or t, or includes no nucleotide
  misc_feature (773)..(773): n comprises a, c, g, or t, or includes no nucleotide
  misc_feature (782)..(782): n comprises a, c, g, or t, or includes no nucleotide
  misc_feature (784)..(784): n comprises a, c, g, or t, or includes no nucleotide
tttagtgacgctgctcctgctgcccctctgtcctgttcaagggtgactactggcccagtttctaacaatacagataactttttaagatgttgcttttacaatgtatctgcaaggtgactctggaaaacaatatggaggttcctcagaaagttaaaaatagaactgcccttcaatccagcagtctcactgttaggtatttactcaaagaatgcacaaatactaattcaaagggatacatgccccctgatgttgataacagcattacctacaataaccaagttatggaagtagcccaagtgtccatccatacatgaatagataaagaaaatgtggggtatacacaaaagatttcagctataaaaaaagaatgaaatcttgcctttaacaccacctgtatggaactagagaggattatgctaagcgaaataagtctaagagaaatacaaataccatgtgatttcattcatgtggaattcaagaaacaaaacaaatgagtaaaggggaaaaaaagacaaatcaagaaacagacttaactatagaaaatagattgatgttatcagagggaaggtgggggagggttaggttaaataggtgatgggattnaanggggtgcacttatgatgaacaccaggttgattcactgtattgnacacctgaaactaatactacactgnatgntaactgactagaatttaaataaaaacttaaaaaaataaaatgtatctgcaaagacattttaagatctagacttcttttagagatcatagaagatnttaatggtngngggatccctgggggctcaaggggtttcccg

SEQ ID NO: 5076 - DNA, 750 bp, Canis familiaris
  misc_feature (5)..(5): n comprises a, c, g, or t, or includes no nucleotide
  misc_feature (704)..(704): n comprises a, c, g, or t, or includes no nucleotide
ccagnaccctaccacacctgactacttgacctccctgttggcctgtggagacctgcaggtcacaggtagcggccactgtccctacagcactgcccagaaagcagtgggcaaggataacttcactctgatcccagagggggtcaatgggatagaagagcggatgactgttgtctgggacaaagcagtggctactggcaaaatggacgagaaccagtttgttgctatcaccagcaccaacgcagccaagatctttaacctgtaccccaggaaagggcggattgcagtgggctcagatgctgatgtagtcatctgggaccctgataaggtgaagaccataacagccaagagtcacaagtcggcggtggagtacaacatcttcgagggcatggagtgccacggctccccgctggtggtcatcagccagggcaagatcgtctttgaggacggcaacattaatgtcaacaagggcatgggccgcttcatcccccggaagcctttccccgagtatctctaccagcgtgtcaggatcaggagcaaggtttcggggttgcaaggtgttcccaggggcatgtacgacggtcctgtgtacgaggtgccagccacacccaaatatgcaactcctgctccctctgccaagtcctcgcctttcaaacaccagcccccgcccatcagaaaccttcaccagtccaacttcagtttatcangtgcccagatagatgacaacaatcccagacgcactggccaccgcat

SEQ ID NO: 5077 - DNA, 372 bp, Canis familiaris
  misc_feature (2)..(2): n comprises a, c, g, or t, or includes no nucleotide
gnacaggaagctgtgcttgatgagctgaggggaaacaactgcaatgatgtaggtcattataacatcttgttgaatgtaagcaaaactgagttctttagaacaccgtttgactaaagatcagatgctcaggctcagtctgggaaaaagaataatatcgatgggtacagacctatgaagtctaatgaaagaaagatcaaaagaaatcattacagctggattatgaaggttggggaaagatagtattaatgtgtataaagtgttttaataacagcaagctaaagattggtgattagaattcattattctagagattgttactacccttaaaagaatggtctttttttagactcccctcacctcaaaaaaaaaaaa

SEQ ID NO: 5078 - DNA, 711 bp, Canis familiaris
  misc_feature (517)..(517): n comprises a, c, g, or t, or includes no nucleotide
  misc_feature (605)..(605): n comprises a, c, g, or t, or includes no nucleotide
  misc_feature (621)..(621): n comprises a, c, g, or t, or includes no nucleotide
  misc_feature (682)..(682): n comprises a, c, g, or t, or includes no nucleotide
  misc_feature (694)..(694): n comprises a, c, g, or t, or includes no nucleotide
  misc_feature (700)..(700): n comprises a, c, g, or t, or includes no nucleotide
gtaccaggtaagagtaatgaaatattatgcaaccattaaaatagttttgtgacaagagcttcaatgcaagtccaaccacctggtttgaatcttagcaatgctttaaattaactacttaatcttcaataagttacttaaactttttccttaaacttatagattttttttttataatctataaaatgaggataatagaagtacctatcttacaggcttggtgcgaagattaaatgagctgacatagcaagtgtcttacacacagtgctgttagggttagcatatttaacaatgaaaactgttattacactgatattcgttagttatgtattacaacatagaaaatgttcaggagagagctttaaatgaaagatactatgtataagatgacataggattacagctataaaaacaagcacttaagtattcttaaaaggactgtgataaatagatcaaactactcactgtggtttgttttagaaccattgcttcctattaattcttagttattggtttttangggtttttttgggtggtaaattttgaggtacttaccacagtacacagttgttttattgatctggttactggatttttgattgtctctncctctagaagggaagntttctgagaaagaacacatgggtgggttttttttttttttttatgggggggtttttttaancattggatatcntggggncaaggacctac

SEQ ID NO: 5079 - DNA, 642 bp, Canis familiaris
  misc_feature (426)..(426): n comprises a, c, g, or t, or includes no nucleotide
  misc_feature (475)..(475): n comprises a, c, g, or t, or includes no nucleotide
  misc_feature (520)..(520): n comprises a, c, g, or t, or includes no nucleotide
  misc_feature (556)..(556): n comprises a, c, g, or t, or includes no nucleotide
  misc_feature (582)..(582): n comprises a, c, g, or t, or includes no nucleotide
  misc_feature (602)..(602): n comprises a, c, g, or t, or includes no nucleotide
  misc_feature (607)..(607): n comprises a, c, g, or t, or includes no nucleotide
  misc_feature (617)..(617): n comprises a, c, g, or t, or includes no nucleotide
  misc_feature (633)..(633): n comprises a, c, g, or t, or includes no nucleotide
aagaaagaaaactaaaaatatggtttagttctatttacttccttattcttcttgcttttttttttccaatggaaggctgtatttggaaaatgccagagctttgatatgataaaaacccagaaatagttttattgtggtattggataagtggccttaaataagtcatgtaggtagcatcagtaggcttcagttccgtagctgtaaaatggtcattataatgtacacatacctggtgcatcatagacttatttttctctcccaggagttagttttttggggagaatgttatgggttttggcatgttttagcgactctttatcttctttcctacccctctcattccttcctcaaagaggagaaattagcatatttcactatgacatttatgcaggcaataaacatttatgaagtttaagtagtgggaanggaatctctttcttccacaaagaagaaggatttttctccatacatttcnttgggtatcattgggccacaagtctcttagtctgaattatatagnatattttgctctgcattcaaagctggcccgtaaagngaatatataaagcctgggattccaanataatctgggaatggatcanggggnaaattttctncctttggggcctaaanaacccaatg

SEQ ID NO: 5080 - DNA, 832 bp, Canis familiaris
  misc_feature (668)..(668): n comprises a, c, g, or t, or includes no nucleotide
  misc_feature (750)..(750): n comprises a, c, g, or t, or includes no nucleotide
  misc_feature (771)..(771): n comprises a, c, g, or t, or includes no nucleotide
  misc_feature (778)..(778): n comprises a, c, g, or t, or includes no nucleotide
  misc_feature (791)..(791): n comprises a, c, g, or t, or includes no nucleotide
  misc_feature (825)..(825): n comprises a, c, g, or t, or includes no nucleotide
  misc_feature (827)..(827): n comprises a, c, g, or t, or includes no nucleotide
aaaataagtatgtatataaactttttaataatacacatttgtgtatatgttgaaaaatacataaatatacacacatatgttatatactatgtattacatatgatatcatttattttatacatatttatatgtatacatttgaaatctggttatattataaaattatacacatacacctaatatatattagatgtgatatatatataaattggggatctggttatattttaaaaagaatactccctcttattgggagatcagtgatggtgtgaactaagttagctgcttttctacttaattttccttctgaattcacttatttcactgataatgaataataccaattaagtatagggttatagaatggtatcagcaaagagaggaaactttcatctatccctgttctctgcccatctgcaccaataaaatgataagatagaaatagagggtagggtgataaatttatcctttcaaatgaagacttagggatctctgtagactttaggttttgattccatggctcttccccagtgaccaaaatgaactataccatctgtcttataaatgtcagttggtgatctaggacccatatctcaacacaaatgagccatcctattccttaagtgaatcctattatgggaagggaggaagtgtgggtgagtaccaangatgtcatctcaagggcattccccaaagtagtggctcttaaacctgcacatgcatcagaatcagttgggaggctttattcangtacaggttcgctgggcccancaacagntttctgattcagnggacctgggggggagtcccgagtagttgcatttntnacagg

SEQ ID NO: 5081 - DNA, 815 bp, Canis familiaris
  misc_feature (720)..(720): n comprises a, c, g, or t, or includes no nucleotide
aattgtggagaaggaattggctggtttctgggtcaaagtcccatgtgtggaagaacttggtagctgcacctatgaagacatctgccaagtacttgacacttttattccccctggacagccctgcccggagcctctgcacacctatgggcttccctgccactgtcccatcaaggcaggcatctactcgctgcctcggactgatttcatcctgcccaacatggagctgccctcctggctcagttttgggcactaccgcatccagggcatcctcagcagcggtgggaagcgtctgggctgtgtcaagatctctgcctctctgatgggcaaataatgtggcaccagcaatagcagaaagaaggggcctgagaaaggtatccctcttcttctgtcttgcatttgctgaggtcaaatcctgactctctgtaccccttcaagccctttctgcaatgatgccacttccctcactgagaatcattttgtgccacctgcatggcatgggtgggcagccctgacctaggggtgcggcttggcagctctgatagcccacagcagctgccaggctggccgcttcatttccctccttgactctataactttctctctaagagcttaattcattttctaaacaatcaaggaatgggaccaatgtattttgtgatccttgagttcagaccaacccagttgtagttttcagaagttacctttggtaattttctttanaaaaatttttttgggtcactgacttaaaagcagaatgggaagtattaataacactttttgctttacttttgtcccccttatgaggaaggggctga

SEQ ID NO: 5082 - DNA, 739 bp, Canis familiaris
  misc_feature (525)..(525): n comprises a, c, g, or t, or includes no nucleotide
  misc_feature (595)..(595): n comprises a, c, g, or t, or includes no nucleotide
  misc_feature (653)..(653): n comprises a, c, g, or t, or includes no nucleotide
  misc_feature (661)..(661): n comprises a, c, g, or t, or includes no nucleotide
  misc_feature (679)..(679): n comprises a, c, g, or t, or includes no nucleotide
  misc_feature (684)..(684): n comprises a, c, g, or t, or includes no nucleotide
  misc_feature (706)..(706): n comprises a, c, g, or t, or includes no nucleotide
  misc_feature (729)..(729): n comprises a, c, g, or t, or includes no nucleotide
gaattgcacacattcaaaggccttgctgatgaaagctttttctttcactaaaatcaattgtaaacaatttttgtagattgtagattattttttgtatgttttagtgtaagtagaggataaactttttattcataaaccaggaagcaatgttctttatagtgattctcttgtgtacatgcttgtgaattaaatttatgtaaaacaccttggcatttgggtcttttaatataggaccaaattaaaacattttgctgaaaatgtgtaatttttcacaatttcattaggtaaataatggcttggtgatcatacaggagaattgcacacattcaaaggccttgctgatgacttgcacaatgctgaacgtacctttaagcatcatttaaattttagaggaattgattcttgtcaacaaatggcagcatctaggctttcagagtcaagttttagcaaactgtgatctgtcaaggtgataaagtgtctcttttgatgtttacacgcacaagctttgggttctgaccagaggangtgagaacagatcgatgccagattcctgtttgtgcattgtcatggggatctgcaagtgaacctttcttgntcatatgccccatgtagccgtgacagcacatcatcagcttgcagtttggtggtgactnaagcattncagtattcctcgttctanattgncagtccatgacatgggggcttnttaagattcacctaagtaagagngaaaataaag

SEQ ID NO: 5083 - DNA, 629 bp, Canis familiaris
tttagttttctattaattaaaacacatgtgtgcacatgtgcacatatacacacacattagcagaagggattcattttaatatgccttccctctggccttcttacaaagtctgttggtcccttttcttctgtcagcgtgttgaattgcaaactgtgtacggctgtaaatactttgtttacttcaagctgaatgtttgcaaacagttgatatgagtattagtagaaaactcctggtaattaatgagcccgggtgtgcgaggcttcctgcaaatagctccacctggagtgctgacgacctgggacacctccagtcctgtggcacccaccagcagattgcaatggcagagtgtacatggacagtcaggaagtcctgcttgatggaaacgaaagggaaaggatgaggatgtggggctaatatcacgaggcacagatgatcttttcttctgtggtgttgctggttcttataataatataagcatgccctcccatgagtcttgattcaaaataaaagaatgtactaagtaagcaaagccaatgaagagtatttcagaaaaatactttgtaaatgagatgtcagtagtgttcaaagttgtatttttaaaagataaatattccttttttatacctcaa

SEQ ID NO: 5084 - DNA, 817 bp, Canis familiaris
  misc_feature (7)..(7): n comprises a, c, g, or t, or includes no nucleotide
  misc_feature (689)..(689): n comprises a, c, g, or t, or includes no nucleotide
  misc_feature (721)..(721): n comprises a, c, g, or t, or includes no nucleotide
  misc_feature (725)..(725): n comprises a, c, g, or t, or includes no nucleotide
  misc_feature (746)..(746): n comprises a, c, g, or t, or includes no nucleotide
  misc_feature (757)..(757): n comprises a, c, g, or t, or includes no nucleotide
  misc_feature (786)..(786): n comprises a, c, g, or t, or includes no nucleotide
  misc_feature (814)..(814): n comprises a, c, g, or t, or includes no nucleotide
ctcccgngggcctggatgtgatggcgtcacagaaaagaccctcccagaggcacggatccaagtacctggcctcagcaagcgccatggatcacgccaggcatggcttcctcccgaggcacagagacacgggcatccttgactccctcgggcgcttctttggcggtgacaggggtgtgcccaagcggggctcaggcaaggtgccctggctcaagcagagaaggagccctgtgccctctcatgcccgcagccagcccgggctgtgcaacatgtaccaggatggacatcacgcagcgttcagccacccgagattgagcaatttagctggggagccgagggccagaagccgggatttggctacggaggccgcgctccagctcacaaggggctcaagggcaccgacgcccagggcacgctttccaaaatcttcaaactgggaggaagagatagtcgttccgggtcacccatggctagacgctgaagcccgcctcgtggccgcagaaccctgtcctcagcttcttaatatcaccgccttcgacgttaacaccgccccgtacctccccacccgtagcgagcaccctcctgcctaacgcccgtccagttgtgcccgcagcaggggtcaggcgcgcccaggcccaccggcggtttccggccacgagcttcgatgggaggaaacacagacccgggtattncacagccacgctgagcctggagacgacgcgtncccnggggccttagcccccggcagngcagccccggnccgacgcgcgccttcgttcttcgaccggnttcgttgaaccggatccttgggttttgnagg

SEQ ID NO: 5085 - DNA, 396 bp, Canis familiaris
ccttagacgaggatgaggcacagccggaggaacagtgacccacatcatgcctggtggcggcatgtgtctccctgctgctgctgggggcagagcctctgtgcccaagtgcgggctggaggcttccggcagagctccaaagcctagagggctcctgggagcactcactcctccgttgtgtgttttgcatgaaagtgtttggagaggaggcaggggccaggctgggggcgcatgtcctgcccccactcctggggtttgccgggggttgcccggggcccctggggcatggctacagctgtggcagacagtgatgttcatgttcttaaatcaaaaacgccacatacacatttcctccttggatgatgtgaaccccgaagggggtggttgtgactgggcctt

SEQ ID NO: 5086 - DNA, 690 bp, Canis familiaris
  misc_feature (334)..(334): n comprises a, c, g, or t, or includes no nucleotide
  misc_feature (347)..(347): n comprises a, c, g, or t, or includes no nucleotide
  misc_feature (471)..(471): n comprises a, c, g, or t, or includes no nucleotide
  misc_feature (482)..(482): n comprises a, c, g, or t, or includes no nucleotide
  misc_feature (537)..(538): n comprises a, c, g, or t, or includes no nucleotide
  misc_feature (563)..(563): n comprises a, c, g, or t, or includes no nucleotide
  misc_feature (603)..(603): n comprises a, c, g, or t, or includes no nucleotide
  misc_feature (627)..(627): n comprises a, c, g, or t, or includes no nucleotide
  misc_feature (645)..(645): n comprises a, c, g, or t, or includes no nucleotide
  misc_feature (663)..(663): n comprises a, c, g, or t, or includes no nucleotide
  misc_feature (683)..(683): n comprises a, c, g, or t, or includes no nucleotide
aaggccagtcctattcaacttagctttcgaatgctgatgtctggttagtatgtcatttttgaagttggcacataacttttttttttttttttaaagcagtttttgtcctttgcttcttctttatggatgtcttatggaaatatatgacgggtatgaaacaaattaactatattgatcatatcaacactgtaacttctgaaatggcattctaatgtttgctttttgttgggtcaggccatatgatgcatagaggcctcttttcatgtgaaatgcattctattgctttaaatgtttatgctgtggctgataatattatattgacatatgatgctgnatacgtgtgcccntttgtgtgaagaaagggattacaagatgtatgaatataatgacttgctaaccttgcaagatttagaggtacaaaacgatgaagaaagaccaaatttaaataaaacacttcattatttttcatgngtccgggtggnaaggcttaaagaaccatctttttggaggggggggtcatgtattcaatttattcanntacaggttctttggacaaggtttanctttatttttcaaagggacaagaaaaatgcttacccttgnctaggcataaataaattaatgggncaatgtctggaaaagggncaaatgggccctcagggnggggaaaatttaaaaaatcntttttcc

SEQ ID NO: 5087 - DNA, 702 bp, Canis familiaris
  misc_feature (489)..(489): n comprises a, c, g, or t, or includes no nucleotide
  misc_feature (498)..(498): n comprises a, c, g, or t, or includes no nucleotide
  misc_feature (556)..(556): n comprises a, c, g, or t, or includes no nucleotide
  misc_feature (645)..(645): n comprises a, c, g, or t, or includes no nucleotide
  misc_feature (673)..(673): n comprises a, c, g, or t, or includes no nucleotide
  misc_feature (681)..(681): n comprises a, c, g, or t, or includes no nucleotide
  misc_feature (686)..(686): n comprises a, c, g, or t, or includes no nucleotide
acggcattgtcagaaacacaggatcctgaagaggtctcagtcactgtcaaagccttcatgacagctgatctgcctaatgaactgattgagctgctggagaagattgttctggataactcggtcttcagtgagcacaggaatctccagaatctgctgatcctaaccgccattaaggcagaccgcacacgggtcatggagtacatcagccgcctggacaactacgatgccccagacattgcaaacatcgccgtaagcagcgcactgtatgaggaggcctttgccattttccgcaagtttgatgtaaacgcctcagcaatccaggtcctgattgagcacattggaaacctggaccgagcatacgagtttgcagagagatgtaatgagcctgctgtatggagtcagctggcccgcgcccagctccagaaagacttggtgaaagaatccatcgactcctacatcagagcggacgacccttcctcttacttagangtcgttcangcagccagcaagagcaacaattgggaggatctggttaaatttctacagatggccaggnaaaaagggccgagaatcctatgtagagactgaacttatttttttgccctggctaaaaccagcccgtctgtctgaactagaaaaattgtnttaatgggacccaacaatggcccacatncaacaggntgganaccgctgttaccagga

SEQ ID NO: 5088 - DNA, 500 bp, Canis familiaris
  misc_feature (262)..(262): n comprises a, c, g, or t, or includes no nucleotide
  misc_feature (316)..(316): n comprises a, c, g, or t, or includes no nucleotide
  misc_feature (414)..(414): n comprises a, c, g, or t, or includes no nucleotide
  misc_feature (417)..(417): n comprises a, c, g, or t, or includes no nucleotide
  misc_feature (443)..(443): n comprises a, c, g, or t, or includes no nucleotide
  misc_feature (457)..(457): n comprises a, c, g, or t, or includes no nucleotide
  misc_feature (476)..(476): n comprises a, c, g, or t, or includes no nucleotide
  misc_feature (481)..(481): n comprises a, c, g, or t, or includes no nucleotide
  misc_feature (483)..(483): n comprises a, c, g, or t, or includes no nucleotide
ggtgtcttctgatgtccgtgttcgtgaggagctgctcccaggaagagaagctcttccagcagaagttcaaagagcggatcgccgacgtcaggcctcccgcccagcccatcacgagagctccgggccccgggggagaccaagatcccggtcactctgtccagggtgcacagtgtccagcccgtgtcggcctcctgaagcgctgggggtcccggtgcccacgcggcgtgggcgggccggggtcggggtcggggcgtgagctcanggcggccgggctcggggggctcggggggctcggggggctcgggggcgcggcggngcggagaccccaaggatgcgccgcaccgcttttggggcgctcggggccggcaggtgccctcgggagctccccccgcagacgccgtgatgctctgctgnttnccgcgcaccccggggagagcacccancagttttaaaccangtgaccgacggcttgacgngctgngntttacttttctcatgtt

SEQ ID NO: 5089 - DNA, 806 bp, Canis familiaris
  misc_feature (638)..(638): n comprises a, c, g, or t, or includes no nucleotide
  misc_feature (662)..(662): n comprises a, c, g, or t, or includes no nucleotide
  misc_feature (685)..(685): n comprises a, c, g, or t, or includes no nucleotide
  misc_feature (701)..(701): n comprises a, c, g, or t, or includes no nucleotide
  misc_feature (712)..(712): n comprises a, c, g, or t, or includes no nucleotide
  misc_feature (742)..(742): n comprises a, c, g, or t, or includes no nucleotide
  misc_feature (763)..(763): n comprises a, c, g, or t, or includes no nucleotide
  misc_feature (789)..(789): n comprises a, c, g, or t, or includes no nucleotide
ggcggcggcggcggcggcggcagcagcagcgggggctgcgggcggtcggggctccgggccggggcggcggcgccatcttgtgcccggggccggtggggaggccggggagggggccccggggggcgcaggggactacgggaacggcctggagtctgaggaactggagcctgaggagctgctgctggagcccgagccggagcccgagcccgaagaggagccgccccggccccgcgcccccccgggagctccgggccctgggcctggctcgggagcccccggcagccaggaggaggaggaggagccgggactggtcgagggtgacccgggggacggcgccattgaggacccggagctggaagcgatcaaagctcgagtcagggagatggaggaagaagctgagaagttaaaggagctacagaacgaggtagagaaacagatgaatatgagtccacctccaggcaatgctggcccagtgatcatgtccattgaagagaagatggaggctgatgcccgttccatttatgttggcaatgtggactatggtgcaacagcagaagagttggaagcacactttcatggctgtggttcagtcaaccgtgttaccatactctgtgacaaatttagtggccatcctaaangttttgcgtatatagagttctcanaccaaagagtcagtgaggacttncttggccttagatgantcactatttanaggaaaacaaattaaggtgatcccaaaacnaaccaacagaccaggcattancacaacagaccggggtttcccacganccccgataccgtgcccg

SEQ ID NO: 5090 - DNA, 469 bp, Canis familiaris
  misc_feature (418)..(418): n comprises a, c, g, or t, or includes no nucleotide
  misc_feature (430)..(430): n comprises a, c, g, or t, or includes no nucleotide
aataataccacacttcttttcctcctgagttttgagccagttgtgtgatagacataggcgctaggcaatggggatgaaaatattggttttattattgacaacagctgcgttgaggggtgtggcttacagtttgctgtcctggacttctgttctctcttggttgtgttcttccagaatccaaccctgagaatggagtgcagataatatatttggaatgtgattccagaaatattggagaggaatggagaagtgagacagaagaaggcaaccaatgaaaggtgcattatcaagccagttatcacagtgggcagtgggctctatactcagtggggtatagatcaccagcttcccatctgtcatgggggcagttttcatggggcattgaccgtttagcactactgtcttctttgtgtgtggncacgtgccctgncatcaaagaagccctgagtggagagtagcggagaatcaa

SEQ ID NO: 5091 - DNA, 780 bp, Canis familiaris
  misc_feature (318)..(318): n comprises a, c, g, or t, or includes no nucleotide
  misc_feature (387)..(387): n comprises a, c, g, or t, or includes no nucleotide
  misc_feature (472)..(472): n comprises a, c, g, or t, or includes no nucleotide
  misc_feature (495)..(495): n comprises a, c, g, or t, or includes no nucleotide
  misc_feature (542)..(542): n comprises a, c, g, or t, or includes no nucleotide
  misc_feature (552)..(552): n comprises a, c, g, or t, or includes no nucleotide
  misc_feature (607)..(607): n comprises a, c, g, or t, or includes no nucleotide
  misc_feature (625)..(625): n comprises a, c, g, or t, or includes no nucleotide
  misc_feature (659)..(659): n comprises a, c, g, or t, or includes no nucleotide
  misc_feature (662)..(662): n comprises a, c, g, or t, or includes no nucleotide
  misc_feature (690)..(690): n comprises a, c, g, or t, or includes no nucleotide
  misc_feature (702)..(702): n comprises a, c, g, or t, or includes no nucleotide
  misc_feature (715)..(715): n comprises a, c, g, or t, or includes no nucleotide
  misc_feature (722)..(722): n comprises a, c, g, or t, or includes no nucleotide
  misc_feature (739)..(739): n comprises a, c, g, or t, or includes no nucleotide
  misc_feature (749)..(749): n comprises a, c, g, or t, or includes no nucleotide
tatttggtttggttttgtttgcaaacaagatactgtatagacccctcttaagactgaggagggctttcatgcaccacgtgtgtctacccctcacgttgtctttggttctgtcctcgccgaggccctccctccctatcccctccatctggctgggaaccctccaactgcctctgcccccccggagctccccaggaaagcaggtcctgccccctggcacccccatccctggcacccctggcacaccatctctcctccatccctccctcccacttgcttctcctcccctgctccccaccctttccccccaaaaagccttangtttctcctttttgaaatgtggccttacaattctttctggaaagctgactgccctcttccttcgacttncaccaacatccgagaagaaagagcattctgcagctcttgtgggcaccttctcagccaagggctggcaatctgtagcttggagccncgacagaaagagaaggaactctnctggtggtcctctggggcaacgaaagcttgggtgcttccatcagcanctcgggcggnacgctgtcagcgcacactggcgaggctcgggtccctggggggggtaagaacccanttttccacccggcctttnccaccaggctgggtgacttgatgcgcttattcanganagtctctcgagctctctcttcatctttnctgcctggaaanggagagaactttncatattnccagcggatggggttgngttctcaaanggatcacacttccaatttcttcggttcaagt

SEQ ID NO: 5092 - DNA, 120 bp, Canis familiaris
  misc_feature (3)..(3): n comprises a, c, g, or t, or includes no nucleotide
  misc_feature (15)..(15): n comprises a, c, g, or t, or includes no nucleotide
  misc_feature (43)..(43): n comprises a, c, g, or t, or includes no nucleotide
  misc_feature (116)..(116): n comprises a, c, g, or t, or includes no nucleotide
aangcccagactctnattacgaacttcactattagggggaaangctggtacgcctgcaggtaccgggtcccggaattcccgggtcgacccacgcgttcgggcaaacttcccttttntaga

SEQ ID NO: 5093 - DNA, 640 bp, Canis familiaris
  misc_feature (3)..(3): n comprises a, c, g, or t, or includes no nucleotide
  misc_feature (18)..(18): n comprises a, c, g, or t, or includes no nucleotide
  misc_feature (30)..(30): n comprises a, c, g, or t, or includes no nucleotide
  misc_feature (32)..(32): n comprises a, c, g, or t, or includes no nucleotide
  misc_feature (37)..(37): n comprises a, c, g, or t, or includes no nucleotide
  misc_feature (41)..(41): n comprises a, c, g, or t, or includes no nucleotide
  misc_feature (69)..(69): n comprises a, c, g, or t, or includes no nucleotide
  misc_feature (508)..(508): n comprises a, c, g, or t, or includes no nucleotide
  misc_feature (527)..(527): n comprises a, c, g, or t, or includes no nucleotide
  misc_feature (534)..(534): n comprises a, c, g, or t, or includes no nucleotide
  misc_feature (555)..(556): n comprises a, c, g, or t, or includes no nucleotide
  misc_feature (566)..(566): n comprises a, c, g, or t, or includes no nucleotide
  misc_feature (616)..(616): n comprises a, c, g, or t, or includes no nucleotide
ttngccagactctaatcncgcacttcactntnagggnaaanctggtacgcctgcaggtaccggtccggnaattcccgggtcgacccacgcgtccgatgcatgtgacacacacatgacactaactccttaaagccttaactctggagtcatagaatgttctgcggtggtacacccatccagctgctcagataccaccgctccctagtgtggtgggatggacacagcaggggaagaaccagacccaggtccagccgggtgcagactacgatctgatgcacaaaatgccctcccccagccccccccacgccgtgtcgtctgctgcccttccatctgacccagttcagagggctggctggcccctgccctgcacaccacccactcagccccatgacccgtcagagggaaagacagtgctacggagagaacccgcagacgttgctcctgtctcctggatccaggaagaggacccattggtgcctccaaagttagtacctgcggggcccacccnggatagcacatcacatccnccggcangcacctggcagtcacctgtannaccaagattntaccacctccagggtcttttctggctacaaagggatcacctggttgttanagacaaaaccatttttctgagtcg

SEQ ID NO: 5094 - DNA, 833 bp, Canis familiaris
  misc_feature (740)..(740): n comprises a, c, g, or t, or includes no nucleotide
  misc_feature (764)..(764): n comprises a, c, g, or t, or includes no nucleotide
  misc_feature (782)..(782): n comprises a, c, g, or t, or includes no nucleotide
  misc_feature (812)..(812): n comprises a, c, g, or t, or includes no nucleotide
  misc_feature (825)..(825): n comprises a, c, g, or t, or includes no nucleotide
cttaagttaatactgcttgtcttttgttttgttttgtttctccagtgtttagttgcaattaccagctttcaaactatagtttgttttcaaaaaaggaaaaaaacaaaatagttttttactggattaaaaatgcatattagaattctccccttttgaggttacctctgggctttttggtaataattgcttttttccagcccagctgtggttttctgtttgtttttttctatgtttgtggtttttttcatctgtacaagaaattttgttatgcactactactttttgtattctagacagttttcaaaagttggctgaagatttttttgtttgtttgtttttaaggaaaaaggcatgctttctgactgacatgatcttttgcaatacctcaattttgaaatataggaaagaaaatgatattttctaagtaagtttattcagaaaaatatatattaatttaattctgcaagaaaaaatgatttaacagatgggtaactttatttttttcatgcttatttgtgttttttgaaaatgaagaagttagagctttataactataatattaaagatcatatctaacctacagaaatctacctaattatgtgaaagaagcaaaactttttgaagaagcacccctctttcatgtactaaaacaacactgagatttaaaaaaaaaaaaaaaaagctggaagctttgtacagcgggaagctgatgtgggaggtgaaaaccattgtcatggaanaataggttaccaaagaataaactncctttgggggctgaaagnttgggggatagatggggggagactaccttncccttcatttggnatatttat

SEQ ID NO: 5095 - DNA, 662 bp, Canis familiaris
  misc_feature (624)..(624): n comprises a, c, g, or t, or includes no nucleotide
  misc_feature (649)..(649): n comprises a, c, g, or t, or includes no nucleotide
  misc_feature (656)..(656): n comprises a, c, g, or t, or includes no nucleotide
gtaggtgcgggtgaagatggcggcagccgaggccgcgaactgcatcatggaggtctcctgtggccaggcagaaagcagcgagaagcccaatgctgaggacatgacgtccaaagattactactttgattcctatgctcacttcggcattcacgaggagatgctgaaagatgaggtgcgcaccctcacctaccgaaactccatgtttcacaaccggcacctcttcaaagacaaggtggtgttggatgtgggctcgggcacagggatcctctgtatgtttgctgccaaggctggagcccgcaaggtcattgggatcgagtgttccagtatctctgattatgcggtgaagatcgtcaaagccaacaagttagaccatgtggtgaccatcatcaagggcaaggtggaggaagtagagcttccggtggagaaggtggacatcattatcagcgagtggatgggctactgccttttctacgagtcaatgctcaacaccgtgctctatgcccgagacaagtggctggcacctgatggcctcatcttcccggaccgagccacgctgtatgtgacagccatcgaagaccggcagtacaaagactacaagattcactggtgggaagaacgtgtacngctttgacatgtcctgcatcaaaanacgtggncatcaa

SEQ ID NO: 5096 - DNA, 214 bp, Canis familiaris
  misc_feature (172)..(172): n comprises a, c, g, or t, or includes no nucleotide
  misc_feature (197)..(197): n comprises a, c, g, or t, or includes no nucleotide
gcggctgtgcagccggcagggcggcgtacagtattctcttcaaacaagaacaagcccatgatgatgccatttggtcagttgcctgggggactaacaagaaagaaaactctgagacggtggttacggggtccctggatgacctggtgaaagtctggaagtggtgtgatgagangctggacctacagtggagtctaganggacatcaactgggcgt

SEQ ID NO: 5097 - DNA, 660 bp, Canis familiaris
  misc_feature (456)..(456): n comprises a, c, g, or t, or includes no nucleotide
  misc_feature (460)..(460): n comprises a, c, g, or t, or includes no nucleotide
  misc_feature (519)..(519): n comprises a, c, g, or t, or includes no nucleotide
  misc_feature (535)..(535): n comprises a, c, g, or t, or includes no nucleotide
  misc_feature (559)..(559): n comprises a, c, g, or t, or includes no nucleotide
  misc_feature (626)..(626): n comprises a, c, g, or t, or includes no nucleotide
  misc_feature (640)..(640): n comprises a, c, g, or t, or includes no nucleotide
  misc_feature (650)..(650): n comprises a, c, g, or t, or includes no nucleotide
actcactcatcagacagcgaggaggaggaggaggaggaggaggaggaggccgtcttccctggagagccgggctgggacagcctgctggggcctggcgctgagaggctgccattgcacagtacccccaaggatgggggctcagggccggggaaggccccctggccgggagactttgggaccacagcaaaggagagtagtggcaatggggcctccgaggagcgcccgtgggagaatggagatgccctgcctcgggaggggtcccttggccccctcccaggcccctctgcccaacctcacaaaggcatcctcaagaagaagtgtctgcccaccatcagtgagaagagcagccttttacggctacccctggagcaaggcacagggtcttctaggggctcctcagccagcgagggcagccggggcgggccccctccccgccctccaccccggcagagtctncagnagcagctgaatggggtcatgcccatcgccatgagcatcaaggcgggcacggtggatgangactcatcgggctccnaattttttttcttttaacttcctntattaaccctgggccggtggttcctacacccctgaggctccctttactttcccagctgcactcatgncccctactcctgtnttgtgccttnatcctgcccc

SEQ ID NO: 5098 - DNA, 801 bp, Canis familiaris
  misc_feature (725)..(725): n comprises a, c, g, or t, or includes no nucleotide
  misc_feature (785)..(785): n comprises a, c, g, or t, or includes no nucleotide
  misc_feature (794)..(794): n comprises a, c, g, or t, or includes no nucleotide
tcccaggcctggggaccctggggctcctcctttgccaccagagctgcagttagaagatggaggaacttgtggaaactctagtgagatgtttcttcccttgaggtcacgtgctgtttcgcatcaatgacagtttgcagcctcttaatttttttttttaataatgacaaaaaatatttgaaagattatcagtctttttataaaattactgtaatgacttaacatttgatatatgttttttaaaatgcagtggaagcctactttataaaaaagacttttttagaaccaaagaattgcatacttttagatagctaaagaacatcatgttgatcatgtacttttcagtgttttccattctttccatttttaaagtattgagtgttttcacattttttaagactaatagggaacatttctctatttgagaatagagtgttagggtaggaatgatgtctcagtgtatttgtactagaattttcatagtctaatagtcctttccgactattcagtaaattttcagactaagctatatctatatggtaataaatccagtcactgacaggaaaactacgagtgtactgaaaagaacctcccactcacttgggctaaacacttacagagtccccttctgatgtggaggagcacctaagggagtctgagccacctaagatctcaatttgccaaaatacgtttcttattaaccttattaattaataccactttcttangattttcacaatcttatcattttcattcctacagaaaaaaatctcagcaaaaacctgctnttacacgtnattttgg

SEQ ID NO: 5099 - DNA, 853 bp, Canis familiaris
  misc_feature (694)..(694): n comprises a, c, g, or t, or includes no nucleotide
  misc_feature (696)..(696): n comprises a, c, g, or t, or includes no nucleotide
  misc_feature (730)..(730): n comprises a, c, g, or t, or includes no nucleotide
  misc_feature (762)..(762): n comprises a, c, g, or t, or includes no nucleotide
  misc_feature (779)..(779): n comprises a, c, g, or t, or includes no nucleotide
  misc_feature (798)..(798): n comprises a, c, g, or t, or includes no nucleotide
  misc_feature (812)..(812): n comprises a, c, g, or t, or includes no nucleotide
  misc_feature (825)..(826): n comprises a, c, g, or t, or includes no nucleotide
  misc_feature (847)..(847): n comprises a, c, g, or t, or includes no nucleotide
  misc_feature (852)..(852): n comprises a, c, g, or t, or includes no nucleotide
agcggactgagtgtgctgagcccccccgggacgagcccccggctgatggcgctctgaagcgggcagaggagctcaagacgcaggccaacgactacttcaaagccaaggactacgagaacgcgatcaagttctacagccaggccattgagctgaaccctagcaatgccatctactatggcaaccgcagcctggcctacctgcgcactgagtgctatggctacgcactggctgatgccacgcgggccatcgagatcgacaagaagtacattaaaggctactaccgccgggccgccagcaacatggcactgggcaagttccgggccgccctgcgtgactatgagacggtggtgaaggtaaagccccacgacaaggatgccaaaatgaagtaccaggagtgcaacaaaatcgtgaagcagaaagccttcgagcgggccattgcaggcgatgagcacaagcgctccgttgtggactcgctggacattgagagcatgaccattgaggatgagtacagtgggcccaagctcgaggatggcaaagtgacaatcaccttcatgaaggagctcatgcagtggtacaaggaccagaagaaactgcaccggaaatgcgcctaccagatcctggtacaggtcaaagaggccctctccaagctgagcacgctcgtagagaccacactcaaagagacagagaagatacngngtgcggggacactcatggccagttctatgacctncttaacatatttgagctcaatggtttaccctnggagaccaacccttatntatttaatggcgactttgnggaccgcggcttcnttttccgtaaaanngatccttaaccttgtttgggntttanc

SEQ ID NO: 5100 - DNA, 235 bp, Canis familiaris
cagcaagtacgcaaaaaattggaagaagccctgatggcagacatcttgtcgcgagctgctgatacggaagagatggacattgaaatggacagtggagatgaggcctaagagtatgatcaggtaactttcgaccaactttccccaagagcaaatttctagaattgaacaaaagcgtttccactgggttttgcctgtaagaaaaaaaaaaaaaaaaaaaaaaaaaaaaaaaaaaaaa

SEQ ID NO: 5101 - DNA, 280 bp, Canis familiaris
  misc_feature (4)..(4): n comprises a, c, g, or t, or includes no nucleotide
  misc_feature (24)..(24): n comprises a, c, g, or t, or includes no nucleotide
  misc_feature (53)..(53): n comprises a, c, g, or t, or includes no nucleotide
  misc_feature (90)..(90): n comprises a, c, g, or t, or includes no nucleotide
  misc_feature (137)..(137): n comprises a, c, g, or t, or includes no nucleotide
  misc_feature (145)..(145): n comprises a, c, g, or t, or includes no nucleotide
  misc_feature (149)..(149): n comprises a, c, g, or t, or includes no nucleotide
  misc_feature (172)..(172): n comprises a, c, g, or t, or includes no nucleotide
  misc_feature (176)..(176): n comprises a, c, g, or t, or includes no nucleotide
  misc_feature (231)..(231): n comprises a, c, g, or t, or includes no nucleotide
  misc_feature (241)..(241): n comprises a, c, g, or t, or includes no nucleotide
acgnacttactgatcagggcaaanctggtaacgcctgcaggtaccggtccggnaattcccgggtcgacccacgcgtccggcgacggcagnagcgggagcctgggtggcgctccacgaaccacctgtttccccccagnagcccagnaggnaggggccagggtagacgcttgtntcanagcgggactggaggagttttttgggtggcctcgcagtgtcaccctgtcacacatnccacggcagngcacattgcagatactaacccttggtggacggatgaccc

SEQ ID NO: 5102 - DNA, 873 bp, Canis familiaris
  misc_feature (678)..(678): n comprises a, c, g, or t, or includes no nucleotide
  misc_feature (728)..(728): n comprises a, c, g, or t, or includes no nucleotide
  misc_feature (792)..(792): n comprises a, c, g, or t, or includes no nucleotide
  misc_feature (798)..(798): n comprises a, c, g, or t, or includes no nucleotide
  misc_feature (825)..(825): n comprises a, c, g, or t, or includes no nucleotide
gatctcggtagctcacgggccatgttagaaatccagtatgaaaatgaggttggtacaggtcttgggcctacactggagttttatgcacttgtatctcaggaacttcagagagctgacttgggtctctggagaggtgaagaagtgactctcagcaatccaaaaggaagccaagaagggaccaagtatattcaaaacctccagggcctgtttgcacttccctttggtaggacagctaagccagcccatatcgcaaaggttaaaatgaagtttcgcttcttaggaaaattaatggccaaggctatcatggatttcagattggtggaccttccccttggtttacccttttataagtggatgctaaggcaagaaacttcactgacatcgcatgatttgtttgacattgacccagttgtagccagatcagtgtatcacctagaagacattgtcagacagaagaaaagacttgagcaagataaatcccagaccaaagagagtctacaatatgcattagaaaccctgactatgaatggctgctcagttgaagatctaggattggatttcacgctgccagggtttcccaacattgaactgaagaaagggaggaaaggatataccagttaccatccacaatttagaggagtatctaagactggttatattctgggcactaaatggaangcgtttccaggcaatttgattccttcagagatggatttgaatccgtcttnccacttagtcattcttcagtacttctaccccggaagaactgggatcagctcttgggcggcagtnaagcanacacgtgggatgcgaaaaccctggatngagtgctgcaggccggaccccggtttactcatggacagtcgggcttgg

SEQ ID NO: 5103 - DNA, 596 bp, Canis familiaris
  misc_feature (16)..(16): n comprises a, c, g, or t, or includes no nucleotide
  misc_feature (25)..(25): n comprises a, c, g, or t, or includes no nucleotide
  misc_feature (30)..(30): n comprises a, c, g, or t, or includes no nucleotide
  misc_feature (32)..(32): n comprises a, c, g, or t, or includes no nucleotide
  misc_feature (37)..(37): n comprises a, c, g, or t, or includes no nucleotide
  misc_feature (40)..(40): n comprises a, c, g, or t, or includes no nucleotide
  misc_feature (68)..(68): n comprises a, c, g, or t, or includes no nucleotide
taaccgccagactctnatacgactncactntnagggnaanctggtacgcctgcaggtaccggtccggnaattcccgggtcgacccacgcgtccgcaatttaaaaattaagtgccctattctaatttggtggctttttgacattttaaagcagaatggccaaattgtatttccccagttaaacttagattgaggtgatattgctcaagtcaaataatgctatcctaaagtttacatagtacttcatgtacatttgtgaatttcaagcatgaaattaaaaaataaaattgcctctttccccccccagtggcttgtttgtattttataaaagattgttatgactatctttactattttagaatgcacataattaactgaactgaaaaatgaaagtactgttgtttaagaggtaaccaatttgctgataaagacatttgggtcagttctacaacagctccccacccaagtaggcttaacagtaaaaggccacagaacactttagaaactaagcttctgattcattggcaagtcaaataaagcaggttcaatcaccaaaaaaaaaaaaaaaaaaaaaaaaaaaaaaaaaaaaaaaaaaaaa

SEQ ID NO: 5104 - DNA, 845 bp, Canis familiaris
  misc_feature (752)..(752): n comprises a, c, g, or t, or includes no nucleotide
  misc_feature (795)..(795): n comprises a, c, g, or t, or includes no nucleotide
  misc_feature (798)..(798): n comprises a, c, g, or t, or includes no nucleotide
  misc_feature (810)..(810): n comprises a, c, g, or t, or includes no nucleotide
  misc_feature (829)..(829): n comprises a, c, g, or t, or includes no nucleotide
  misc_feature (831)..(831): n comprises a, c, g, or t, or includes no nucleotide
aaatatacatttggcacccagtggacccacttgagtgcctcatggtacgtatttgcctagttactttggtaattgaatgtatgcaacaattccagattgagaaggacatgatgaccagggctcagatgaccagggatgaaggtctggattacacgaccaggtaagctagtgacaccagcaggcatggtaatggagggttagaagaaacctaaaatgggcagtacagagggagataatgatgattagttttaaccctgaaacctgtttcagtagtaggggcggtaggtcattgcattaaactttctcttctaagtttccacccaggaagaggcccctcagaaccatcaaggggttacctcccgaataaacatgaagaggatcttagtggcacagcaggtggactgtaagtacatggagatacaccacccagcttcccctccaaagaaggacttgtttggggtgccaggagccatagtggctatccttcagctgtcacacccatccttcggtaagccacatccaataactggtcaaagtggaagtagaaagacctggctaatgcaatctaaaacgaacaactctgaagggccattttaacttcagagctccccacttctctgtctcctgaatcttgcctccatcacctcagtcctacaggtattaataccaaagaactccttaggaaacaccctacactctaagtttatctcaaagtctgctttttagagatcccaacttaagtaacacagctnctggtttgcttttgggccatggtagaaactgaacccctgcctntgnaaatactaagtnaacatgtggatctggcttntnactaactagggatc

SEQ ID NO: 5105 - DNA, 312 bp, Canis familiaris
  misc_feature (62)..(62): n comprises a, c, g, or t, or includes no nucleotide
  misc_feature (90)..(90): n comprises a, c, g, or t, or includes no nucleotide
  misc_feature (174)..(174): n comprises a, c, g, or t, or includes no nucleotide
  misc_feature (213)..(213): n comprises a, c, g, or t, or includes no nucleotide
  misc_feature (286)..(286): n comprises a, c, g, or t, or includes no nucleotide
ttttttttttttttttttttttttcatgtttgaaaccttttattgaacaggcaatgcattgngcaatggttaaggacacagatgccttgnggaaaagtttaaaaattatttttggaaacagtctgtgaattgctgaacctggctatgttccttccactcctgagagtgactatnttcaggaaaactgttttatagctgctcttggaaacggcntccctgttttaccaaaaatgtcatgcctaatagtaaacatgaaaggagaagacggggtccacaggcaagacangaaccagagacacaggttgatctcag

SEQ ID NO: 5106 - DNA, 293 bp, Canis familiaris
  misc_feature (242)..(242): n comprises a, c, g, or t, or includes no nucleotide
  misc_feature (250)..(250): n comprises a, c, g, or t, or includes no nucleotide
  misc_feature (266)..(266): n comprises a, c, g, or t, or includes no nucleotide
  misc_feature (281)..(281): n comprises a, c, g, or t, or includes no nucleotide
tatgggggggacctgtgggggggcattgggtcttctgcttcctcagctggaaaggaggggggatttgagaggggaaggggtggacggggggctgcccgcccagccacgtccccacactggccacctgcagtccccagggcccccacaccctggccctcacaaccccgtctctgcttccaccccgcccccccagtattctccaagcatgacgatgagcgtgtgatcccctcctcttctccganacgctganagagccggcattgcangcaggaagatgccanaaattatgcaag

SEQ ID NO: 5107 - DNA, 539 bp, Canis familiaris
  misc_feature (16)..(16): n comprises a, c, g, or t, or includes no nucleotide
  misc_feature (25)..(25): n comprises a, c, g, or t, or includes no nucleotide
  misc_feature (32)..(32): n comprises a, c, g, or t, or includes no nucleotide
  misc_feature (37)..(37): n comprises a, c, g, or t, or includes no nucleotide
  misc_feature (41)..(41): n comprises a, c, g, or t, or includes no nucleotide
  misc_feature (69)..(69): n comprises a, c, g, or t, or includes no nucleotide
  misc_feature (506)..(506): n comprises a, c, g, or t, or includes no nucleotide
tatcgccaactctaancacgcactncactatnagggnaaanctggtacgcctgcaggtaccggtccggnaattcccgggtcgacccacgcgtccggcgccgcggcggcaccatggcgtcggtcgggaccctcgccttcgatgaatatgggcgtccttttctcatcatcaaggatcaggatcgcaagtctcgtcttatggggctcgaggccctcaagtctcatatcatggcagcaaaagctgtagcaaatacaatgagaacatcacttggaccaaatggacttgataaaatgatggtggacaaggatggcgatgtgacagtaacgaatgacggtgccaccattctaagcatgatggacgtcgatcaccagattgccaagctgatggttgaactgtccaaatcacaggatgatgaaattggagatgggaccacaggggtggctgctctggctggtgccctgctggaggaagccgagcagctgctagaccgaggcattcacccgatcangatcgccgacggctacgaacaggccgcccgcat

SEQ ID NO: 5108 - DNA, 849 bp, Canis familiaris
  misc_feature (785)..(785): n comprises a, c, g, or t, or includes no nucleotide
  misc_feature (816)..(816): n comprises a, c, g, or t, or includes no nucleotide
attatatgatctcactcatctgtggaatttaagaaacagaggagcatagggaaagggaaagaaaaataaaaaagatgaaatcaaagagggagacaaaccataagagactcttaatcaaagaaacaaactgagggttgctagagggaagggggtgagggtaattgagtaactgggtgatggacattatggagggcataggatgtaatgagcactgggtgttatataagactgataaatcactgaactctaccctctgaaactaatagtatactgtatgttaattgaatttaaattttaaaaatagtaaaaaaaaaatagtctccacttatatgtgttcagtgattaagatatcactttggagactttctgatctagttagtacatacacaattttgagttttaaaattctgaattttggggtattaaaaagaaaatgaacacttttggttcaagatggcagactaaattcagcatttatctgctttccctccaataaaatcccattggcaataaagaaatgttttaaaaatggaataagttgctaaaaccacaaaaacaggagtgggacaatcagaggattgaaggttttgaaaagagaatggaagttggattggaaagcagaatggatcataccaaagactaatccttaacagaggaagccaaacacctcaaaagcattttgaaataagagaaggttgtagcacagatgggaaccctttttggtttggtttggtttacaatgaagtcccctgtgattggctgatatggagagcaagagtgagaangggaagaaaaatcaagatatttgactggaanaattaacctgtaggtgggctgcagggatagggg

SEQ ID NO: 5109 - DNA, 416 bp, Canis familiaris
caacagtactgctagggcctgaagaaagaaggatcattcccagcaaggagatgagatcactgggttcagataaccctttatttcagggctcagattgtctctgcacacatgctccaaatgaaaatgacaatatctgttctgtacccaaaacagcatcacttaagctcctttgtgtttgagatgatgtcagatttgtaaaagatattgaggatacctgagaatatagagtaagaaatatatgggtaggggctagtgggtggcttggctgattgggtatcggcctttggctcaggtcatgatctcagggtcctgggacccagtccctcatcgggctctctgcttagcaaaaagccttctccctctccctctgctggtgttatttctctctttctctcaaatacataaataaaatttaa

SEQ ID NO: 5110 - DNA, 303 bp, Canis familiaris
  misc_feature (14)..(14): n comprises a, c, g, or t, or includes no nucleotide
  misc_feature (30)..(30): n comprises a, c, g, or t, or includes no nucleotide
  misc_feature (39)..(39): n comprises a, c, g, or t, or includes no nucleotide
  misc_feature (54)..(54): n comprises a, c, g, or t, or includes no nucleotide
  misc_feature (59)..(59): n comprises a, c, g, or t, or includes no nucleotide
  misc_feature (73)..(73): n comprises a, c, g, or t, or includes no nucleotide
  misc_feature (94)..(94): n comprises a, c, g, or t, or includes no nucleotide
  misc_feature (163)..(163): n comprises a, c, g, or t, or includes no nucleotide
  misc_feature (174)..(174): n comprises a, c, g, or t, or includes no nucleotide
  misc_feature (208)..(208): n comprises a, c, g, or t, or includes no nucleotide
  misc_feature (234)..(234): n comprises a, c, g, or t, or includes no nucleotide
  misc_feature (242)..(242): n comprises a, c, g, or t, or includes no nucleotide
  misc_feature (268)..(268): n comprises a, c, g, or t, or includes no nucleotide
agccagactctaancacgaactacactatnaggggaaanctggtacgtcctgcnaggtnccggtccggcaatntccgggtcgacccacgcgtcncgatagatcgcagcgagggagctgctctgctacgtacgaaaccccgacccagaagcaggtcgtactacnaatggtttatncaccaggttccccacgaacgtgcgttgcgtgacnggcgagggggcggccccctttccggncgcgcccngtttcccgggacgaggggctctccgnaccggaccccggtcccgacgcgcggaggggcacgc

SEQ ID NO: 5111 - DNA, 692 bp, Canis familiaris
  misc_feature (389)..(389): n comprises a, c, g, or t, or includes no nucleotide
  misc_feature (411)..(411): n comprises a, c, g, or t, or includes no nucleotide
  misc_feature (430)..(430): n comprises a, c, g, or t, or includes no nucleotide
  misc_feature (436)..(436): n comprises a, c, g, or t, or includes no nucleotide
  misc_feature (441)..(441): n comprises a, c, g, or t, or includes no nucleotide
  misc_feature (484)..(484): n comprises a, c, g, or t, or includes no nucleotide
  misc_feature (503)..(503): n comprises a, c, g, or t, or includes no nucleotide
  misc_feature (538)..(538): n comprises a, c, g, or t, or includes no nucleotide
  misc_feature (647)..(647): n comprises a, c, g, or t, or includes no nucleotide
  misc_feature (653)..(653): n comprises a, c, g, or t, or includes no nucleotide
  misc_feature (682)..(682): n comprises a, c, g, or t, or includes no nucleotide
  misc_feature (691)..(691): n comprises a, c, g, or t, or includes no nucleotide
aataaaaattattaaaaaaataaaaaaataaacatttatagtaggggcacctgggttgagcacccagttcttggtttcggctcaggttgtgatctcatggtcgtgaaatcaagccctgcatcaggctctacactcagtgtggagtctgcttgggattctcattccttctctctctgcccatcctgcttatgcgttctctctctctctctctctctaaaataaataaatcttaaaaaaataaacatttattgtactgatttattttttatatttcagtgggttgatttcagtgctcaatcaataggaaaataaaaatgtagtcaggctttgaaatttacaatgcatggaaactcagtcaagttttgaattcaagggttaaacccatttgntattgggaaggcagtttttttnaggaccaaagggttttgcnttgaanaaatnaaggcccaaatccctcttggaatgttcattctgaattcatcanatgaagatccattaattgnaaattattttccagtttcagggatgcatcaaaganaacaaacccatcttaaagctaaggatccctatgcagcacttaccaataaatggatttaacatctttcttctatgttattccttttctggaccaaaattgggtatgtaanaatttncataacttcaaaaatatttacaagaaganaccaaaaang

SEQ ID NO: 5112 - DNA, 462 bp, Canis familiaris
  misc_feature (365)..(365): n comprises a, c, g, or t, or includes no nucleotide
  misc_feature (421)..(421): n comprises a, c, g, or t, or includes no nucleotide
tgggcagaagttggtcaccacagtgacagaaattgctggataagcgaagtgccactgggttctttgccctccccctcacaccatgggataaatctatcaggacggttcttttctagatttcctttacctttctgctcttaaactgcttctctgctctgagaagcccagctacctgccttcactgaaatatacctcaggctgagatttggggcgggagagcaggtcagctgatcttctgtaggaaggtacggcttttccctatcaccccaaccacaccgccagtccattcttagggaaccgcacaccaggactggtgtgttttagctttcagcctttggggttatttgaccaacaaacagtctttncggaagaataaaagcaagtccccaaggattaacaaatcaaaatggttcacaccacnttattttttttttacacttgaccttgaaggtacaaaaggct

SEQ ID NO: 5113 - DNA, 552 bp, Canis familiaris
  misc_feature (315)..(315): n comprises a, c, g, or t, or includes no nucleotide
  misc_feature (321)..(321): n comprises a, c, g, or t, or includes no nucleotide
  misc_feature (383)..(383): n comprises a, c, g, or t, or includes no nucleotide
  misc_feature (394)..(394): n comprises a, c, g, or t, or includes no nucleotide
  misc_feature (396)..(396): n comprises a, c, g, or t, or includes no nucleotide
  misc_feature (414)..(414): n comprises a, c, g, or t, or includes no nucleotide
  misc_feature (490)..(490): n comprises a, c, g, or t, or includes no nucleotide
  misc_feature (505)..(505): n comprises a, c, g, or t, or includes no nucleotide
  misc_feature (535)..(535): n comprises a, c, g, or t, or includes no nucleotide
acgcgtgggcggacgcgtgggttttttcattataaggaaaaatagtataacatactttaaaaaaaaaaaccctcatcttcacttgtataggttcggagctggcattctctaagcagctggtataaaaggttacatttctttcaaaaacagaccatgttagctttcattttggtttgtgacactttgttatcatactccacattattacgcaaaagaggtttgaaataaaatgcatctctttaattatttctaacaaatatatttcttgttaaagcatctaacttcttcccaaataacagtataatcatctactgntgctgntgttctcaaaattggggattatcaaagatgcacttaacatatcagaataccatgataaccgnactattatttntnaataggcccataataccngaaaaaattaaataccatttcccatattaaattagactttaatatccttacaaatagaaaacccataaatattttntggactccgacctanatgacttgctggggggctcattttctttanaaatcgggagggagctg

SEQ ID NO: 5114 - DNA, 519 bp, Canis familiaris
  misc_feature (363)..(363): n comprises a, c, g, or t, or includes no nucleotide
  misc_feature (417)..(417): n comprises a, c, g, or t, or includes no nucleotide
  misc_feature (420)..(420): n comprises a, c, g, or t, or includes no nucleotide
  misc_feature (428)..(428): n comprises a, c, g, or t, or includes no nucleotide
  misc_feature (486)..(486): n comprises a, c, g, or t, or includes no nucleotide
  misc_feature (492)..(492): n comprises a, c, g, or t, or includes no nucleotide
  misc_feature (510)..(510): n comprises a, c, g, or t, or includes no nucleotide
ccgccatggcccggccgctggtgcccagctcgcagaaggcgctgctgctggagctcaaggggctgcaggaggagccggtggagggcttccgggtgaccctggtggacgagggcgacctgtacaactgggaggtggccatcttcgggccgcccaacacctactacgagggcggctacttcaaggcacgcctcaagttccccatcgactatccctactccccgccggctttccggttcctgaccaagatgtggcaccccaacatctacgagacgggggacgtgtgcatctccattctccaccccccagtcgatgacccccagagtggggagctgcctcagagcggtggaaccccaccagaacggnaggaccattcttctgggggggaatttggttcttaaacgaaccgaaaaccttttnccngccaacgnggacgccttttgggatgtacaggaaatggaaagagagcaaaggcaaggaccgggagtncacggncattatcaggaagaggtnctggggaca

SEQ ID NO: 5115 - DNA, 680 bp, Canis familiaris
  misc_feature (395)..(395): n comprises a, c, g, or t, or includes no nucleotide
  misc_feature (410)..(410): n comprises a, c, g, or t, or includes no nucleotide
  misc_feature (428)..(428): n comprises a, c, g, or t, or includes no nucleotide
  misc_feature (434)..(434): n comprises a, c, g, or t, or includes no nucleotide
  misc_feature (477)..(477): n comprises a, c, g, or t, or includes no nucleotide
  misc_feature (545)..(545): n comprises a, c, g, or t, or includes no nucleotide
  misc_feature (567)..(567): n comprises a, c, g, or t, or includes no nucleotide
  misc_feature (582)..(582): n comprises a, c, g, or t, or includes no nucleotide
  misc_feature (587)..(587): n comprises a, c, g, or t, or includes no nucleotide
  misc_feature (613)..(613): n comprises a, c, g, or t, or includes no nucleotide
  misc_feature (644)..(644): n comprises a, c, g, or t, or includes no nucleotide
  misc_feature (651)..(651): n comprises a, c, g, or t, or includes no nucleotide
  misc_feature (677)..(677): n comprises a, c, g, or t, or includes no nucleotide
aatcagcacaagtgacacaactgaaaacttcataggtcatatgggtaaatttgatcactcaaaaaaaaaaagaaaagaaaaagatgagaaaaaatcaagatatagtaaacaaaagaaagaaaaagaaaaaaaaaatgaattatacgtgtgccatcccaaagaaaacagaaaaagaagacttgagatttcctgaactaacccaaagagctgagtttatttactgatagtttttattgggtctgtactaaattaatggaaattattagtaataagacatatcctttaaaattttttattttattctttttcatttttttaaaatttttatttatttatgatagtcagagagagagagaggcggagacacaagcagagggagaaacaagcttccttgnccgggggcctgccgngggatttgattccgggtntccagnatcgcgccctggccaaaggcaggcgccaaccgttggcccccanggatcccctttaaaaattttaaagtccccaaatcttggaaggggcgtcacaaaatatttcaggcaganccaagatgcagaaaaaaatggnagactctaagttcanaaggnggttattgcccacaaatttccaaggnttattttaacctgtggtcagttgaaacaaanggagaangtcttttccataaagcttttccactnaag

SEQ ID NO: 5116 - DNA, 654 bp, Canis familiaris
  misc_feature (321)..(321): n comprises a, c, g, or t, or includes no nucleotide
  misc_feature (375)..(375): n comprises a, c, g, or t, or includes no nucleotide
  misc_feature (410)..(410): n comprises a, c, g, or t, or includes no nucleotide
  misc_feature (415)..(415): n comprises a, c, g, or t, or includes no nucleotide
  misc_feature (421)..(421): n comprises a, c, g, or t, or includes no nucleotide
  misc_feature (492)..(492): n comprises a, c, g, or t, or includes no nucleotide
  misc_feature (511)..(511): n comprises a, c, g, or t, or includes no nucleotide
  misc_feature (578)..(578): n comprises a, c, g, or t, or includes no nucleotide
  misc_feature (640)..(640): n comprises a, c, g, or t, or includes no nucleotide
  misc_feature (652)..(652): n comprises a, c, g, or t, or includes no nucleotide
agtggctgcaacctggagcctggggctcaaaaactggggtgggtggggggtgctgccgccaacagtagtgaggcggggagagcagaatgctcaggtagacgtgtctgtttttctaagccatggggctgcctcctaatggcttcccaaagagcaagtgcccgagtggaggcacctgcagtttgcccaccccaccccacaggccccttccttgggccccctggggtgcccggagcaccaagggagcccatccttcatgtttcaatagctgttgttttgtttttcatttgggatggagtgggggaagggccgagcggaccccanggacccccgagttcttgcagacaagcccgtgtggtgtgcgcaaactgtacttancttgacccccaaacttcggccgaaggataattaangaggnttgaanccacaagggctgacccgtcctttgccttgggaaccagttaagggactttaattgaatttcctttttgtggnggctttttgtggtttttgnggtggtggttttctctttaaggaattatgaactaaaaaagtttttgctttggggttgatggaaaaantttactgataactatggctaacttattgatatgggttttccccctttaaattgacttggganaaaatatttganct

SEQ ID NO: 5117 - DNA, 666 bp, Canis familiaris
  misc_feature (426)..(426): n comprises a, c, g, or t, or includes no nucleotide
  misc_feature (432)..(432): n comprises a, c, g, or t, or includes no nucleotide
  misc_feature (446)..(446): n comprises a, c, g, or t, or includes no nucleotide
  misc_feature (455)..(455): n comprises a, c, g, or t, or includes no nucleotide
  misc_feature (505)..(505): n comprises a, c, g, or t, or includes no nucleotide
  misc_feature (508)..(508): n comprises a, c, g, or t, or includes no nucleotide
  misc_feature (514)..(514): n comprises a, c, g, or t, or includes no nucleotide
  misc_feature (538)..(538): n comprises a, c, g, or t, or includes no nucleotide
  misc_feature (564)..(564): n comprises a, c, g, or t, or includes no nucleotide
  misc_feature (567)..(567): n comprises a, c, g, or t, or includes no nucleotide
  misc_feature (588)..(588): n comprises a, c, g, or t, or includes no nucleotide
  misc_feature (590)..(590): n comprises a, c, g, or t, or includes no nucleotide
  misc_feature (636)..(637): n comprises a, c, g, or t, or includes no nucleotide
  misc_feature (662)..(662): n comprises a, c, g, or t, or includes no nucleotide
tgggccagaaggactcctacgtgggcgacgaggcccagagcaagcggggcatcctgaccctcaagtaccccatcgagcacggcatcgtcaccaactgggacgacatggagaagatctggcaccacaccttctacaacgagctgcgcgtggcccccgaggagcaccccgtgctgctgaccgaggcccccctgaaccccaaagccaaccgtgagaagatgactcagatcatgttcgagacgttcaacaccccagccatgtatgtggccatccaggctgtgctgtccctgtacgcctctggccgcaccactggtattgtcatggactctggggatggcgtcacccacactgtgcccatctacgaggggtacgccttgcccacccattcttgcggtttgaacttgcttggccggacctgattgactactnatgaanatcctacggagcgngggtacagnttaccaccactgttgacggggagatcgtgcgtgacatcaaggagaagctntgntacgtngcctggatttcaacaggaaatggncacggccgggtcttgtcttcctgganaanagtacaacttgcccacggcangngatacaattggaacagcggttccgttgcaaaggactttcagctttnnttctggttggagtctgggatcaaanaaca

SEQ ID NO: 5118 - DNA, 623 bp, Canis familiaris
  misc_feature (411)..(411): n comprises a, c, g, or t, or includes no nucleotide
  misc_feature (466)..(466): n comprises a, c, g, or t, or includes no nucleotide
  misc_feature (493)..(493): n comprises a, c, g, or t, or includes no nucleotide
  misc_feature (504)..(504): n comprises a, c, g, or t, or includes no nucleotide
  misc_feature (525)..(525): n comprises a, c, g, or t, or includes no nucleotide
  misc_feature (549)..(549): n comprises a, c, g, or t, or includes no nucleotide
  misc_feature (590)..(590): n comprises a, c, g, or t, or includes no nucleotide
  misc_feature (595)..(595): n comprises a, c, g, or t, or includes no nucleotide
acccaccagcatctattgagcagtgtttactgagcacactccctcctcctctcactgaagtgtagagacctagaaagtgtgctcagttaacccaccagcatctattgagcagtgtttactgtagtaattttgcatacatttttctttgtttaagggaacaaatttaagtaggtagtgtgaaatattttgctaatcctatagagaaggggaaaactattaaaaggaaaagaaatgtaacagttaccttttttcttaatgtcagggcagatgttacagttgaaagaagaaaagtgaaaggctcttaatctagtaaagttagttctggggtgggcaaatgtgtgtgaggcacaagaaatgctgatgactttttcaatggctggaaacttgttcaaagggtttttagccttattntaaaacaggaggaggctgttttgcaagactaggatgggaacagactctgaaaaangtttgggttaaccccaaaacgaatganaaacttgttgncaggggcccaggtcctcattntgtttacagaaaggagtcttggtntaatgggtgaaggaaaggtaacaaaaaacctaaaagctctnctatncatgaaagggcttgcagaaaaagaaact

SEQ ID NO: 5119 - DNA, 634 bp, Canis familiaris
  misc_feature (446)..(446): n comprises a, c, g, or t, or includes no nucleotide
  misc_feature (482)..(482): n comprises a, c, g, or t, or includes no nucleotide
  misc_feature (543)..(543): n comprises a, c, g, or t, or includes no nucleotide
  misc_feature (569)..(569): n comprises a, c, g, or t, or includes no nucleotide
  misc_feature (589)..(589): n comprises a, c, g, or t, or includes no nucleotide
  misc_feature (592)..(592): n comprises a, c, g, or t, or includes no nucleotide
  misc_feature (607)..(607): n comprises a, c, g, or t, or includes no nucleotide
  misc_feature (624)..(624): n comprises a, c, g, or t, or includes no nucleotide
  misc_feature (632)..(632): n comprises a, c, g, or t, or includes no nucleotide
accttagccaaagaagaaattggacagattctcagctatgtctgcaaacatgcagaggaaaaatacactaatggaagcagcatgattcttcattatggacccctccaggtcttgaaaatcatccaaggagctatctcatcaaaagttgaaaatcttccaaggatcccttcacacacaccctttttaagtgattgggccatgaactgaggcactgtggtaaagcaaatcgtctaagatgacacatcgcttaccttgtggttccaggattcattgacattttgactccagaactcatgtagttaaacacatcattgtctttttactcaacatataatacaaagaaattcctctattaatgttttaatcattgaagtaatatacaaaacataatgggaacattacacatctattggggattggaaataataaaacttttaatattacanggaatattgaactagttttggtcaaagccaagtttntttccaatacccactgttgtctaatctacatccataaagagttcctagtcacagcaaaggngtatccaaagcttaatgggacataangtctcagggttacttaaganttnttcataataccactnctgtaaaattaccttanggtttatngg

SEQ ID NO: 5120 - DNA, 664 bp, Canis familiaris
  misc_feature (399)..(399): n comprises a, c, g, or t, or includes no nucleotide
  misc_feature (410)..(410): n comprises a, c, g, or t, or includes no nucleotide
  misc_feature (420)..(420): n comprises a, c, g, or t, or includes no nucleotide
  misc_feature (464)..(464): n comprises a, c, g, or t, or includes no nucleotide
  misc_feature (511)..(511): n comprises a, c, g, or t, or includes no nucleotide
  misc_feature (569)..(569): n comprises a, c, g, or t, or includes no nucleotide
  misc_feature (575)..(575): n comprises a, c, g, or t, or includes no nucleotide
  misc_feature (603)..(603): n comprises a, c, g, or t, or includes no nucleotide
  misc_feature (605)..(605): n comprises a, c, g, or t, or includes no nucleotide
  misc_feature (618)..(618): n comprises a, c, g, or t, or includes no nucleotide
  misc_feature (649)..(649): n comprises a, c, g, or t, or includes no nucleotide
aagatgaccccacagctgacgatagtagtgctgcggtgagtgaggagatgccgcccctcgaaggtgatgatgacacgtcacgcatggaagaagtcgattaagtgctgccctgagaattacttgtatatgtattcaatactttatcttcattccctctgataatatattttcaaggatgtttttctttatttttgttaacattttaagaatctgtaaggcatgacaatatagctacttaaggggaagataagatttctttttgtttgagtgtgatactgtgacgtgtaggaactaaagctcagctagtttttctttcctagtcccatgctggcttattttaaccggacaaggtaacctatgttgtaaggtgtaccgtaacctaatggtagcccgtgtggnctcaaagtggnggattccgantaagaccaagggtttttttgcacttgaggggttcttgagctgtnccttgatgtgtaaaaaaaaaaaactggttaaaacaactttcaccttntaggactactttttaaatctttgtcccttgtggttttaactgatgtaccagcctttanaactantagtgaactgaccactggatgggagtancntggatagggttgntttcaaaaaaacgtgttaagacgagattaanctttagggggtggaa

SEQ ID NO: 5121 - DNA, 664 bp, Canis familiaris
  misc_feature (237)..(237): n comprises a, c, g, or t, or includes no nucleotide
  misc_feature (411)..(411): n comprises a, c, g, or t, or includes no nucleotide
  misc_feature (552)..(552): n comprises a, c, g, or t, or includes no nucleotide
  misc_feature (564)..(564): n comprises a, c, g, or t, or includes no nucleotide
  misc_feature (580)..(580): n comprises a, c, g, or t, or includes no nucleotide
  misc_feature (597)..(597): n comprises a, c, g, or t, or includes no nucleotide
  misc_feature (619)..(619): n comprises a, c, g, or t, or includes no nucleotide
  misc_feature (623)..(623): n comprises a, c, g, or t, or includes no nucleotide
  misc_feature (634)..(634): n comprises a, c, g, or t, or includes no nucleotide
  misc_feature (656)..(656): n comprises a, c, g, or t, or includes no nucleotide
gatgtgtatctggtgacccatcttatgggagcagatctgaacaacattgtgaaatgtcagaagcttacggatgaccatgttcagttccttatctaccaaattctccgaggtctcaagtatatacattcagctgacataattcacagggacctaaaacctagcaatctagctgtgaatgaagactgtgagctgaagatcttggactttggactggcccgacatacagatgatgaaatnacaggctatgtggctaccaggtggtacagggctcctgagataatgctgaactggatgcattacaaccagacagttgatatttggtcagtgggatgcataatggccgaactgttgactggaagaacgttgtttctggtacagaccatattaaccagctttagcagaatatgcgtntgaccggggaccccccctgcttatttaattacaggatgccaagccatgaggcaagaaactacattcagctttgacccaaatgccgaaaagaactttgcaaatgtattatggtgccaatcccttgctgtcgacttgctgganaaaaagcttgtnttggctcaaacaaganaatacaggaggccaagncctcgacatgcctactttggtnaatnccatgaccaangatgaccagggtgatcctacancagccttg

SEQ ID NO: 5122 - DNA, 660 bp, Canis familiaris
  misc_feature (410)..(410): n comprises a, c, g, or t, or includes no nucleotide
  misc_feature (416)..(416): n comprises a, c, g, or t, or includes no nucleotide
  misc_feature (447)..(447): n comprises a, c, g, or t, or includes no nucleotide
  misc_feature (521)..(521): n comprises a, c, g, or t, or includes no nucleotide
  misc_feature (523)..(523): n comprises a, c, g, or t, or includes no nucleotide
  misc_feature (543)..(543): n comprises a, c, g, or t, or includes no nucleotide
  misc_feature (572)..(572): n comprises a, c, g, or t, or includes no nucleotide
  misc_feature (587)..(587): n comprises a, c, g, or t, or includes no nucleotide
  misc_feature (625)..(625): n comprises a, c, g, or t, or includes no nucleotide
  misc_feature (641)..(641): n comprises a, c, g, or t, or includes no nucleotide
caaagatggcgtgacttacctgcgcagatttggaagccttgaacttaaagtgcggctctgctatatggtacaactaatgctagacctacagtttatgtatacagttgagtttgatgtatttataaaagctttttttttttctagatttgacatttttcctgtatcattttactgtatttttgcatggttccttgtattgcatttctttgcacatattatgggcttgtgaccctaaacttgcaggcaagattagctgctttagtaagtagaattttgtggtctttttgttttttacatagtaccaggtcttgagaattatgaatttttttatccattactaacctttaatttaatcaatcatgtactttagtttaatgtataaagaacctctaaaaaatggataaaattgnggattnaaaacattcctaaataaggacaaaagggtgntggatattacaaaatggagtctgagttaaaaccatccttaaactggaacagaatacaaccatattcaatcagancngggggtttccatcacccggngatcaatagaaatttttggggatcctttnctttaacacaagcanatgaggggaatatggtatcatacattaaaccgggggcngatggattatcttttnctacatcgtaaaacttatt

SEQ ID NO: 5123 - DNA, 536 bp, Canis familiaris
  misc_feature (404)..(404): n comprises a, c, g, or t, or includes no nucleotide
  misc_feature (421)..(421): n comprises a, c, g, or t, or includes no nucleotide
gcaccattttccgtctctgtgaccggccggtgccccctgcccgggccctcctgaagaggcggcgctcgaacagcactttgttttctacagtggacactgatgaaataccagccaaaagaccaagattagattatttcattcaccaagtcaaaaccagtctctacaatgctgccagcttatttggattcccattccagctgaccacaaagcccatggtaacctctgcttgtaatggaacacggaatgtggccccttcaggagaggtattttcgaactcatcgtcttgtgaactgacaggttctggaccctggaacaacatgctgaaactgggtaataaatcccctaatggaataagtgactattccaagatcaaaagtgacagtaccccgagataagccccgaanagcctgccttccttggntttactttgactcaaaggggtacaacaaaagaccagggggccgtcgtcatacaaaggcacttcaaagagttccttacctggaagcctcaggaacaggttgtaacaaaaatgattt

SEQ ID NO: 5124 - DNA, 679 bp, Canis familiaris
  misc_feature (404)..(404): n comprises a, c, g, or t, or includes no nucleotide
  misc_feature (410)..(410): n comprises a, c, g, or t, or includes no nucleotide
  misc_feature (504)..(504): n comprises a, c, g, or t, or includes no nucleotide
  misc_feature (560)..(560): n comprises a, c, g, or t, or includes no nucleotide
  misc_feature (657)..(657): n comprises a, c, g, or t, or includes no nucleotide
  misc_feature (675)..(675): n comprises a, c, g, or t, or includes no nucleotide
tatgtagggaactgttggtggtgaaccgaagcttgagtggcatagcttgcataggcaaggtgccgaggagagaccaaagggtggtgcgattgcaccctgggaatcagagaaccagggtagtggaggagagagaagagtctgtttcaggataacagagcagtaatggatgagtgcttgctagaaacctggtgctgtgcacattatcctggcctccagccttggcttaagaagtagatttgatcatcaccaaagtgggcagagagcaagagtaaggataatctacacaacacatcttttggcaaattcagggcctggatatacatttgcaatgagtaatatgagacaatgcagctgcatcaacagaactttgaggggaaatggtagaatctacatatttgattttnaactgnctttaatgtgtgaaagcaacagaaagacaattttcagatataaaaaggttctggaaatatctcactggtgaaagagttatttgaagatgttctncatctgattgagagaagatccaatattagaaacttaacaccaaagaagttatggtntagagaaactgggatgaacacatcaagcaattaaatataatattaaatccaaataatcctttaaaccttgttttaaaatagatggatattgtcatanttgtacaaaagtacattntatg

SEQ ID NO: 5125 - DNA, 664 bp, Canis familiaris
  misc_feature (388)..(388): n comprises a, c, g, or t, or includes no nucleotide
  misc_feature (472)..(472): n comprises a, c, g, or t, or includes no nucleotide
  misc_feature (476)..(476): n comprises a, c, g, or t, or includes no nucleotide
  misc_feature (532)..(532): n comprises a, c, g, or t, or includes no nucleotide
  misc_feature (574)..(574): n comprises a, c, g, or t, or includes no nucleotide
  misc_feature (613)..(613): n comprises a, c, g, or t, or includes no nucleotide
  misc_feature (615)..(615): n comprises a, c, g, or t, or includes no nucleotide
gggtctccaggatcgcgccctgggccaaaggcaggcgccaaaccgctgagccacccagggatcccctgggcaaataacttaagagaaaaagtggaaagaagacatcttgggatctgctgacactgaggatatttactgtcaacagactttttgccaaaagaactatagaaccttatggatcaactagaaggaacttgaacccagatgcaagtgtgagaggcaagaatccatgtgagcagagaaatgggcaactattttggtatatctaaataagcattaattgtaaaaaaaagtgagtattaaaatgtcacactgtatgtttaaatatatctactaaacgacactgtgacgggtttggagcatgtgctttactcttacagaatggttnaggttgccggctttggcttttaggacgagtgaggacaaaaagcccccaaactcctgccccttaagctgccttggtgattgccgnttanagattgtgggtgtggtgccccccggatcgcagtatggaaaattggaagggacaaangtcagagatatgtgacgtacctttcaggtttctaacattttnaaacccacaggcatgcccaggcttccgggtgttgcgcananctggaagacgccctcttgggtcggaagccggcattggcactccttaacc

SEQ ID NO: 5126 - DNA, 408 bp, Canis familiaris
  misc_feature (363)..(363): n comprises a, c, g, or t, or includes no nucleotide
  misc_feature (392)..(392): n comprises a, c, g, or t, or includes no nucleotide
tgctggttctgtacgacgagctgaaggcgccccccatgccccttaggacgttggggggcgccttcgtgctggttctgtacgacgagctgaagaaagtcatctagacattcctcctccagacacgggggccaagggaatcacgtagaatccttttaactgttacggaccattgatcttcgagaaattccagtgtccttgtcccggccagatcacgtagacagggctggggaaggttccaaagggggctcattgtgatcgatcatcggcaccaggttccatgttttgattccggggggagggcaatcatgacgtcttcgtgggtccacgggctggcagctccgccgctcaaaccataaagtccangtgcttgtgggaccccggttgtggttaantattttatttaaaaaa

SEQ ID NO: 5127 - DNA, 563 bp, Canis familiaris
  misc_feature (375)..(375): n comprises a, c, g, or t, or includes no nucleotide
  misc_feature (392)..(392): n comprises a, c, g, or t, or includes no nucleotide
  misc_feature (415)..(415): n comprises a, c, g, or t, or includes no nucleotide
  misc_feature (439)..(439): n comprises a, c, g, or t, or includes no nucleotide
  misc_feature (441)..(441): n comprises a, c, g, or t, or includes no nucleotide
  misc_feature (462)..(462): n comprises a, c, g, or t, or includes no nucleotide
ttctgatgcctcacaaaggacagaaatctccaccaaggaagtccctattgtccaaactgagaccaaaaccatcacatatgagtctccacagattgacggcggggctggtggtgactccgggacattactgacggcgcaaaccatcacatctgagtccgtgtcgacaacgaccacaacgcacatcaccaagactgtgaaaggtggcacatctgaaacaagaattgagaaacgcatcgtgatcacgggagatgcagacatcgatcatgaccaggcgctggcgcaggccatccgggaagcccgggagcagcaccccgacatgtcggtgacgagagtggtggtgcacaaggagacggagcttgaccaaagggaggagtnggcaaaaaaaaccattnttttaaaaaaacttgactttggnaacctgaggagcttcggccctcgnanatgtccggccgcccctactgncgcagtccgtgctcccggtaacccgccaggagcctgaagaattaaaatgcgcaccaaacttacttaacaagcctggtctatctgttccccgatttaataca

SEQ ID NO: 5128 - DNA, 659 bp, Canis familiaris
  misc_feature (392)..(392): n comprises a, c, g, or t, or includes no nucleotide
  misc_feature (406)..(406): n comprises a, c, g, or t, or includes no nucleotide
  misc_feature (416)..(416): n comprises a, c, g, or t, or includes no nucleotide
  misc_feature (441)..(441): n comprises a, c, g, or t, or includes no nucleotide
  misc_feature (492)..(492): n comprises a, c, g, or t, or includes no nucleotide
  misc_feature (523)..(523): n comprises a, c, g, or t, or includes no nucleotide
  misc_feature (596)..(596): n comprises a, c, g, or t, or includes no nucleotide
  misc_feature (608)..(608): n comprises a, c, g, or t, or includes no nucleotide
  misc_feature (622)..(622): n comprises a, c, g, or t, or includes no nucleotide
  misc_feature (634)..(634): n comprises a, c, g, or t, or includes no nucleotide
  misc_feature (648)..(648): n comprises a, c, g, or t, or includes no nucleotide
gatgttagttaactatcaccttttattctttcagctgtgggctacaaagcatgacccagagatggtccgcccaaccctggagaagacacttagtgtcctccagctagattatgtggatctttacatcattgaaatacccatggctttcaaggtgagctcagatgcctaaagataggtctctgctcttagacaaccatgagccagcagttgtgtgtgaagctatgaagctagttcattatttatcaccatagaggtgataaaggtgttaaggtgttctgttattataaatcagatagtactgaccaatcccaacaaatgcctgtagagattatatataacagactcagacctggaaccctagtttttgattcataatccaatggacctgctantatatcttggcttnactatagttnaaactcttccccaccaaaccaacgngtagtcccccactatctctacatttagttacctggcattagaccatctttnttctgtttacaaagcatgaaaatgtcctgcngacatatgcaacataatatatgcactgaaacttgttatcttcacccctccaaaaagaaaaacccaaagaaaancaggtttttggncttgatccaagggnggggttatgaanactactccttagtnaaatactactt

SEQ ID NO: 5129 - DNA, 567 bp, Canis familiaris
  misc_feature (379)..(380): n comprises a, c, g, or t, or includes no nucleotide
  misc_feature (456)..(456): n comprises a, c, g, or t, or includes no nucleotide
  misc_feature (475)..(475): n comprises a, c, g, or t, or includes no nucleotide
  misc_feature (479)..(479): n comprises a, c, g, or t, or includes no nucleotide
  misc_feature (521)..(521): n comprises a, c, g, or t, or includes no nucleotide
  misc_feature (523)..(523): n comprises a, c, g, or t, or includes no nucleotide
acacggtgatgatccttttgagactgaatccattattaacttgttgcctaggttttcctcccagtagtgagggattttgagtcagttgcacttacatgattattgttatttaaaactaaaaataaacaaaggctgcattttcaaagataaatttggagatccctgctggagaaatacagccaaaatattgaatctgatgtacatataggtttctacaggatgagatagaataatttagaatttggggatttaataaccagggcaacccaggaaaagtgacttgaaaacatggtgtaccaataagcaagggatgctctctcggtttgcttttgccactttcaagattttaacttctcaggttattaatcaaaattattgnntaagttagcttataaaaaccttaggttaaacaacaaacggggggttgggggagggttaatgcatgggcatttttantacctaggcccttgttttnatcnaagttcatatattttgtcccagtaattttcctcccaagttgntnttaaatcaatgcctgatgacatttttagagttgacatatttttg

SEQ ID NO: 5130 - DNA, 627 bp, Canis familiaris
  misc_feature (511)..(511): n comprises a, c, g, or t, or includes no nucleotide
  misc_feature (568)..(568): n comprises a, c, g, or t, or includes no nucleotide
  misc_feature (578)..(578): n comprises a, c, g, or t, or includes no nucleotide
  misc_feature (581)..(581): n comprises a, c, g, or t, or includes no nucleotide
caaacttgctttaaaggaaccaaaggcattgccaagtatttgccaaaaggaggcactttttatttaaaatttgagactaacgagatctcaacaatcagtcccaaaaaggtattatccacttaaggttataattttcacaaagatgtagatatttctctattgttttcatgtaaaatagtatagatttgttttgttggtttaagaataatacatatttagtagtaatacggagtttcttcctaagtgcagattcgtttccttctctcttgcttgcagtagaaacacagcgtgataggtgtttctcttcttattttcatggtcacattatgtcttagcatctcactttatgaaaacaaggagaaagataccaacctacagagccccgcttactaaaagcgctagctttaaaaaaaaaaaaatttggcaatcggggggccattcgggattgcctttaatgtggtttttaaaatgaaaccatgatgccttgtattgctgttgcacccctgaaatnaattccgatatgtttgaagccatcattttgccatgactggcataggaggcatacggntttttatggngcncattatataaactttgtcataaggcagatggaacccccggaaacgt

SEQ ID NO: 5131 - DNA, 377 bp, Canis familiaris
  misc_feature (354)..(354): n comprises a, c, g, or t, or includes no nucleotide
gagtatcaaggcccagggggccaccggcgaggtgtactgccccagcggagagaaatgccccctggttgggtcgaatgtaccttgggccttcatgcagggcgaaatcgcgacgatcttagctggagatgttaaagtgaaaaaggagagagacccttgaaccacaagacggccacctcctctgcccctgaccagctcctctccgatccagagggcccctcccccacccacagcgaccctccctccccttgcccctaagatgtagaattgtgaatataacaaactgcaaaaagttagtcttatgtatagacattattttcgtcgtatgtttctatattttgaaacaaaaggtatgtnacttcttcatttgaaggataaac

SEQ ID NO: 5132 - DNA, 359 bp, Canis familiaris
aaaggaactctgtaaagaaaccatcagatttgttaaggacatacttcataatatataagtgtgcactgtaaaaccatccagccatttgacaccctttatgatgtcacacctttaacttaaggagacgggtaaaggatcttaaatttttttctaatagaaagatgtgctacactgtattctaataagtatacctgttataatattcagtaaagttaaatccaaattcaaaattacccattaaagttacatcttcacgtatcacagtttttaaagttgaaagcatcccagttaaactagatgtgatagttaaaccagatgaaagcatgatgatccatctgtgtaatgtggttttagtgttg

SEQ ID NO: 5133 - DNA, 666 bp, Canis familiaris
  misc_feature (399)..(399): n comprises a, c, g, or t, or includes no nucleotide
  misc_feature (412)..(412): n comprises a, c, g, or t, or includes no nucleotide
  misc_feature (424)..(424): n comprises a, c, g, or t, or includes no nucleotide
  misc_feature (435)..(435): n comprises a, c, g, or t, or includes no nucleotide
  misc_feature (444)..(444): n comprises a, c, g, or t, or includes no nucleotide
  misc_feature (452)..(452): n comprises a, c, g, or t, or includes no nucleotide
  misc_feature (462)..(462): n comprises a, c, g, or t, or includes no nucleotide
  misc_feature (518)..(518): n comprises a, c, g, or t, or includes no nucleotide
  misc_feature (569)..(569): n comprises a, c, g, or t, or includes no nucleotide
  misc_feature (572)..(572): n comprises a, c, g, or t, or includes no nucleotide
  misc_feature (601)..(601): n comprises a, c, g, or t, or includes no nucleotide
  misc_feature (614)..(614): n comprises a, c, g, or t, or includes no nucleotide
  misc_feature (624)..(624): n comprises a, c, g, or t, or includes no nucleotide
  misc_feature (637)..(637): n comprises a, c, g, or t, or includes no nucleotide
  misc_feature (654)..(655): n comprises a, c, g, or t, or includes no nucleotide
acgcgtgggtgaggccgcagaagcacaaggtgaagatgccgtgtcaagtccaggtggctaggacctctgcccccaaggccagcatcagcctgtgggctgccccctgcccccaccttggccacccatctgggctgtctctgcggggcggagccatccagacctgggagggggaagctgctggcatcatccccacccccgaggctggggcaggcagtgttccgttgaagcagaactccagcctggcttgcccccactccgggcccttcatcacaccccggtgcccctctggactcatggggagcaaggtgggaggggaggtttgagatatctcagtgcgtacagagcctaccgtggaggcagtgaagatgtgaaaatggtggaatgaacacttggcttggnaatcctaatcctnggcttccaattnggtttttgttntgtgaccgnggcaagtnattgtccctntttgggcacctttgttgcaaatggacgaaaatatttaagaggtcgctgaaaatggngattcatgccctgccccaaatgggagggtttcttctaagggggcccattgncanccttgtttttggttcctgggctggcttangggctggacttgntttcccgtanccctggggacctnaattacaaaactgccanncttttattgtt

SEQ ID NO: 5134 - DNA, 563 bp, Canis familiaris
  misc_feature (338)..(338): n comprises a, c, g, or t, or includes no nucleotide
  misc_feature (443)..(443): n comprises a, c, g, or t, or includes no nucleotide
  misc_feature (447)..(447): n comprises a, c, g, or t, or includes no nucleotide
  misc_feature (457)..(457): n comprises a, c, g, or t, or includes no nucleotide
  misc_feature (521)..(521): n comprises a, c, g, or t, or includes no nucleotide
  misc_feature (551)..(551): n comprises a, c, g, or t, or includes no nucleotide
aaagctaaaacactatgcatagccaactgcccgtgctgggcactccattgatgtttgttgagtacgtgtgggtggatgtgtggcttgctgaatgaccagggaggtgatcctggcctggagggtggttgcgcaggtgcttggccctgtgtatgggtcactccaccatgcagtgcccactttggcctccccacagccccaagcccagatcttacgtggcctttctggtctattccaggagtgttcatcacctacgtgatgctgaagaaccagaaggggaccaaaaaagctcagtgaaggcccagtggggctgaggctgtggcacccctctgccacccctncaagggtgggggtgcacaggacccatccaggcacctcggttccttaagccagggcttccttttggacatcccggggatggagctgttgaggactaccacatgggnctgnttctttctgntcaaattttcagaaaccaggaaggaggattacttgggaagccttcctctacccctttttggttnagggcctgaaaaaactggttgtttcctttnacttaaaattcc

SEQ ID NO: 5135 - DNA, 664 bp, Canis familiaris
  misc_feature (468)..(468): n comprises a, c, g, or t, or includes no nucleotide
  misc_feature (486)..(486): n comprises a, c, g, or t, or includes no nucleotide
  misc_feature (508)..(508): n comprises a, c, g, or t, or includes no nucleotide
  misc_feature (602)..(603): n comprises a, c, g, or t, or includes no nucleotide
  misc_feature (631)..(631): n comprises a, c, g, or t, or includes no nucleotide
  misc_feature (662)..(662): n comprises a, c, g, or t, or includes no nucleotide
agcaatcttagtcacaaatttgaggaaattgcccgataatgtgtttccatgtgtttgaactgaaaaattgttaaccacgcttttgctccaggatgtgtgagggccattcaggggctgcagggccgtagatagtcacacaaacaagcgtgtgtatatctggagccccacacattgtaataaacacagctgcatttatttgagtatgtgatcccatgtacatgtaaaaacattcaaacaaacacactcaacagatttatttgattgtgcaatggggcaattattcaaataaacatgctcggtgcaattatttgaatctcacattgcatgttcatcaatcaacagcactaaaaaaactaaaaaaaggggggggtgtggaaacaccaaagaatttatgtggggaaaaaaaatatatgtgaaaacaccttattatagattttataggggtagcccaaagttatggctccttcntaactgtactaactattntgtatttaatgacatttgtttntaatgatggtcgattcaattattccttggtcatacattgggatggccccaaccttcaaatcatttaataatgactttccaacctgattgggttnnaaagtgaatttttttttgaaggccgaanaatttttctaggtttttactcaagggacctntt

SEQ ID NO: 5136 - DNA, 668 bp, Canis familiaris
  misc_feature (359)..(359): n comprises a, c, g, or t, or includes no nucleotide
  misc_feature (398)..(398): n comprises a, c, g, or t, or includes no nucleotide
  misc_feature (421)..(421): n comprises a, c, g, or t, or includes no nucleotide
  misc_feature (425)..(425): n comprises a, c, g, or t, or includes no nucleotide
  misc_feature (435)..(435): n comprises a, c, g, or t, or includes no nucleotide
  misc_feature (450)..(450): n comprises a, c, g, or t, or includes no nucleotide
  misc_feature (467)..(467): n comprises a, c, g, or t, or includes no nucleotide
  misc_feature (478)..(478): n comprises a, c, g, or t, or includes no nucleotide
  misc_feature (481)..(481): n comprises a, c, g, or t, or includes no nucleotide
  misc_feature (519)..(519): n comprises a, c, g, or t, or includes no nucleotide
  misc_feature (535)..(535): n comprises a, c, g, or t, or includes no nucleotide
  misc_feature (543)..(543): n comprises a, c, g, or t, or includes no nucleotide
  misc_feature (571)..(571): n comprises a, c, g, or t, or includes no nucleotide
  misc_feature (631)..(631): n comprises a, c, g, or t, or includes no nucleotide
  misc_feature (633)..(633): n comprises a, c, g, or t, or includes no nucleotide
  misc_feature (645)..(645): n comprises a, c, g, or t, or includes no nucleotide
agcattcttgacatgagcccttttacagtgacagatcacacaccgatggagatcgtggtggatattttccgaaagctgggtctgaggcagtgccttgtaactcacaatgggcgcctccttggcattataacaaaaaaagatatcctccgtcatatggcccagacggcaaaccaagaccccgcttcaataatgttcaactgaatcctatagatgagagagaggaaacagaagaggaagttcatttgttgaatagcacaactctttaacttgagggagtcgtctacttttttttctccttaaaaaatctaaaagccgggctttttgcaacatagtttgcaaatactgctggtggaatgaangagttgtttggggagggaaaggagcgagaaagaaatgantgaggggttttccccatttactngaancacctggccngtaattccactttgnaaaaaccaattaccagnccttatttttnggngggataactttgaattgggcccttttttaaaactgcangggcttgccctttttntaaaaacngtctggttaattcatgaattatttagtnaagattggcttttacattccaaaaaagcttttttttttttttccctcctttttttttttntntttgggctgaanaaaccttttaatgggggcccttt

SEQ ID NO: 5137 - DNA, 412 bp, Canis familiaris
tttgcttgcatacatgtttattaagatgtagccaagtgaaatgtgtctgctcctcctcttgagtacaatcttctttattgatgtgtaacgacgcccaagggctgggtgaactacataatcaaaatcaaatgccagttttttacatacttggccaaaggagtgcagcccaaaacaccatgttaagctgcaagaaatctgaggacatttcattcatagccttgctttttactgttgttgatatatacactttaatttcaatgcccatcgcagatccacatttaaaaagaaaaaggctcttattctaatttagtagaaagcagagctgtcagtggaaaggacaatgcaacatcaaacacagctgcttttcatccatactagtctaaattagaaacatgctggcattcacaagggc

SEQ ID NO: 5138 - DNA, 557 bp, Canis familiaris
  misc_feature (506)..(506): n comprises a, c, g, or t, or includes no nucleotide
  misc_feature (520)..(520): n comprises a, c, g, or t, or includes no nucleotide
  misc_feature (527)..(527): n comprises a, c, g, or t, or includes no nucleotide
aagcagcattgacctaagccaaccactatgtgaagtgctttgcagcttatccttacgggaaatcagttattttggatgctaagggcagctgcaatctgaaaaataatccagtaaatgtatttcatattttgtagcaggcagttaccaaccaggaaataatatctttgatatttgcagttgttgcatacggagtatttttgttaaaaggtgattagctcttgcctttattttacagtgcttcatgtaataaactcaccgggtttcctgtaaaagaaaccagttagtatatgtacataaaccatagaaataatataccaaactatttaaaaattagtgtttctacttaaaatgttgtttagcttaaaacttcttaggacatttgtaaaagcaacttcaatgagggttttgattattttttgtaacccggagatgggttttacaaatgaaataacgtttcaattaaacaaaacattgcaaaatatttgatctttgataaaaagtttacntgtataatttctgnaaaaatnatcttgttctaaaaaaaaggggtaccgccc

SEQ ID NO: 5139 - DNA, 499 bp, Canis familiaris
  misc_feature (190)..(190): n comprises a, c, g, or t, or includes no nucleotide
  misc_feature (227)..(227): n comprises a, c, g, or t, or includes no nucleotide
  misc_feature (328)..(328): n comprises a, c, g, or t, or includes no nucleotide
  misc_feature (428)..(428): n comprises a, c, g, or t, or includes no nucleotide
  misc_feature (495)..(495): n comprises a, c, g, or t, or includes no nucleotide
gatgctgcagtccctggccggcagctcgtgcgtgcgcctggtggagcggcaccgctcggcctggtgcttcggcttcctggtgctcggctacctgctctacctggtgttcggcgccgtagtcttctcgtcggtggagctgccctacgaggacctgctgcgccaggagctgcgcaagctgaagcggcgcttnctggaggagcacgagtgcctgtcggagcagcagctcnagcagttcttgggccgcgtgctggaggccagcaactacggcgtgtcggtgctcagcaacgcctcgggcaactggaactgggacttcacctccgcgctcttnttcgccagcaccgtgctgtccaccacaggttatggccacaccgtgcccttgtcagatggaggtaaggccttctgcatcatctactcggtcatcgggattncattccccttctattcctgaaacagtggtcagcgtgtaacatcacgtaacccgcaggctgtctttantttc

SEQ ID NO: 5140 - DNA, 689 bp, Canis familiaris
  misc_feature (372)..(372): n comprises a, c, g, or t, or includes no nucleotide
  misc_feature (379)..(379): n comprises a, c, g, or t, or includes no nucleotide
  misc_feature (401)..(401): n comprises a, c, g, or t, or includes no nucleotide
  misc_feature (412)..(412): n comprises a, c, g, or t, or includes no nucleotide
  misc_feature (426)..(426): n comprises a, c, g, or t, or includes no nucleotide
  misc_feature (447)..(447): n comprises a, c, g, or t, or includes no nucleotide
  misc_feature (510)..(510): n comprises a, c, g, or t, or includes no nucleotide
  misc_feature (527)..(527): n comprises a, c, g, or t, or includes no nucleotide
  misc_feature (542)..(542): n comprises a, c, g, or t, or includes no nucleotide
  misc_feature (547)..(547): n comprises a, c, g, or t, or includes no nucleotide
  misc_feature (606)..(606): n comprises a, c, g, or t, or includes no nucleotide
  misc_feature (637)..(637): n comprises a, c, g, or t, or includes no nucleotide
  misc_feature (642)..(642): n comprises a, c, g, or t, or includes no nucleotide
  misc_feature (652)..(652): n comprises a, c, g, or t, or includes no nucleotide
  misc_feature (686)..(686): n comprises a, c, g, or t, or includes no nucleotide
  misc_feature (688)..(688): n comprises a, c, g, or t, or includes no nucleotide
catcgacatggctgatgaggactacgagttctaaccagtcttgaggggcagggttctgtgaaaaggaacagtgtggtttggggaagatggataaactgtgagccttgcttaccctcacacctgagggagagaggcggcaagtcttaacaaaccaacatctttgagaaaagataaacctggagatattataagaaagagctgagccagttgtcctatggacaacttatttaaaaatatttcagatatcaaaattctagctgtatgatttgttttgaattttgtttttattttcaagagagcaagtggatgggaatttgtcagagttctgccaggcaaattcactgtttcactgaagcatttggattctcttanctactgnatccaaagtccattttatttgngcggtttttcnagtaagggtttggnaataacttttttttttaatanaaagaattcctaaattccttcccttttccccatttaggaatttaaaattaagtggaacaaaanccccccgccctgttagngagagttgcactatntatgncatgggatcaattttctttaacttgaagcaatcgtgacatcggcagtgtttggttaaanactgtcacagaaacatgatgggaaaaattcngctgngggtcttttnaaagggaattttatttttttaatatttaaaaatnanc

SEQ ID NO: 5141 - DNA, 538 bp, Canis familiaris
  misc_feature (392)..(392): n comprises a, c, g, or t, or includes no nucleotide
  misc_feature (467)..(467): n comprises a, c, g, or t, or includes no nucleotide
  misc_feature (485)..(485): n comprises a, c, g, or t, or includes no nucleotide
  misc_feature (518)..(518): n comprises a, c, g, or t, or includes no nucleotide
attatttttccttttttaatatacacatatggatatataaatatatatatttactgttaccagcagcatatgacagagtttcagcatcaaaaatctatttgggggcttgctttctcttttttgctttttaataaagaaaccccattccttccttgtagtatacaaggagttagccttcattctccatcctagcctgaccagattttccatgttgttttgttcaaatagataattatatgtcctttgtgtgttggaacttgtccctgtcttttgggaaacttggtcttactatttctgtggtggctgttttgttttgtttttgtatgtgaatgtttgaaactatggtgctgtgtccactttcctcctattgtgttctttattcttgttaaggngttaggtaagctgtatggaaatgtttattagaaggggactaattatttttaaaagaaaaaaaaaaacctaaaagnagggggtgggctttaccntttttgggggccctaattttggtaaaaaaattnggggttggactaaataaaaa

SEQ ID NO: 5142 - DNA, 466 bp, Canis familiaris
  misc_feature (61)..(61): n comprises a, c, g, or t, or includes no nucleotide
  misc_feature (344)..(344): n comprises a, c, g, or t, or includes no nucleotide
  misc_feature (426)..(426): n comprises a, c, g, or t, or includes no nucleotide
  misc_feature (452)..(452): n comprises a, c, g, or t, or includes no nucleotide
atggggttaggtggctcaggggagctgggagaaaagagagagaagagggggtgtggattanaagccaggaggtaaccccggggagaagcaggaggcagagagaggagtaggaagatccagaggtagagggagattggaaggttggggaaaccaggagcgaaaggaggaaaggcacagagagcagatctgggggggtctccgtccccactgcttcagtgtttggggaacgggactccctgtagggaggagaggcaggctggaagtcctggaaggagagggtcccacagagggggttaggaggagctgagacgggggggccaggacattgggaaggagtcgctcanacctccccaggatgggggctgccgctcgtctgaacgcccctcgagcgctggtactctgggccgcacttggggccggcagctnacatttgacctgcacctgacccccangactggtggagcta

SEQ ID NO: 5143 - DNA, 615 bp, Canis familiaris
  misc_feature (454)..(454): n comprises a, c, g, or t, or includes no nucleotide
  misc_feature (472)..(472): n comprises a, c, g, or t, or includes no nucleotide
  misc_feature (510)..(510): n comprises a, c, g, or t, or includes no nucleotide
  misc_feature (513)..(513): n comprises a, c, g, or t, or includes no nucleotide
  misc_feature (589)..(589): n comprises a, c, g, or t, or includes no nucleotide
  misc_feature (598)..(598): n comprises a, c, g, or t, or includes no nucleotide
catgctgcccatgcccggagacccgacccaagggaccggcaactataacatcgaggacttcgcggacctcggcatgttcccgccgttctctgagtagcggcaggcagagtgcagccggcgctgggcagggctgtgacgcgtgctgtgacggcgccacccgccccgctggcagaaggcaccgcacccccgcgctgcccccggcgcagcatcgtgcagcccacaaccagggctgctcggccaccaacgaggagccctggtagacattgggggggccgttgtatttattgtacttttttctgtgtacgcagggaggtgagcccgtggggcccatgaggtctggttgtgaataatctcctagtagacgacgttcacctataaaaagtccagttacggtcccgagtgcccagacctgcctgggacacgggaatcgggtttcttcttgcctttacgcttnggacgggtaagggcttcnggtgcttggaaaggggggcgaacaaggacgtgctcttncancaagaggacacggggacccaaagtggaccttggttttcttggcccaactaaacaaaattttgtgtttgtacctctnctgtggganatgtttcttttttgaat

SEQ ID NO: 5144 - DNA, 422 bp, Canis familiaris
  misc_feature (380)..(380): n comprises a, c, g, or t, or includes no nucleotide
  misc_feature (387)..(387): n comprises a, c, g, or t, or includes no nucleotide
  misc_feature (411)..(411): n comprises a, c, g, or t, or includes no nucleotide
cggcggcggcgcggagaagcgcagcggaggttttctggtttcggaccccagcggccggatggtgaaatcctccctgcagcggatcctcaacagccactgcttcgccagagagaaggaaggggataaacccagcgccaccgtccacgccgcccgcgccatgccgctcctcagcctgcacagccgcggaggccgcagcagctagagttccagggtgtctcctcactgctgtagtaacctgggtccagggcctcggtggtgctcctgatgtccctcacccacccctgaagatcccaggtgggcgagggaatagtcagagggatcacaatctttcagctaatttattttactctgataatcggctgaatgtaacaaaggaactnaacgttntacaaccaagaacaaggaattttnaccgtccaaaa

SEQ ID NO: 5145 - DNA, 617 bp, Canis familiaris
  misc_feature (235)..(235): n comprises a, c, g, or t, or includes no nucleotide
  misc_feature (293)..(293): n comprises a, c, g, or t, or includes no nucleotide
  misc_feature (399)..(399): n comprises a, c, g, or t, or includes no nucleotide
  misc_feature (438)..(438): n comprises a, c, g, or t, or includes no nucleotide
  misc_feature (460)..(461): n comprises a, c, g, or t, or includes no nucleotide
  misc_feature (492)..(492): n comprises a, c, g, or t, or includes no nucleotide
  misc_feature (504)..(504): n comprises a, c, g, or t, or includes no nucleotide
  misc_feature (509)..(509): n comprises a, c, g, or t, or includes no nucleotide
  misc_feature (562)..(562): n comprises a, c, g, or t, or includes no nucleotide
  misc_feature (591)..(591): n comprises a, c, g, or t, or includes no nucleotide
cgcgtccgcaccttcttctctgtgtcctcctcggacctgatgtctaagtggttgggggagagtgagaagctagtcaagaacctgtttgagctggccaggcagcacaagccctccatcatcttcatcgatgaggtggattccctctgcgggtcccgcaatgaaaatgagagtgaggccgcccgaaggatcaaaacggagttcttggttcagatgcagggggtggggaataacaacnatgggactctggttcttggtgccacaaacatcccatgggtgttggattcagccattanaaggaggtttgaaaagaggatttacatcccactgcccgaggaggctgcccgtgcccagatgttccggttgcatctggggagcactccccacaatctcacggatgcnaacattcatgaagctggccccggaaagaacggaaggctnctcaagtgcccacatcagcatnnattgtgcggggacttccttcatgcagccctntaaaaaaaattnatttngcaaacacaactttaaaaaagggttgtgggccttcccgaccaaccctacgttntgaacgaagaacttcctgaccccttcctnaccaagggaacccggggccttggaaa

SEQ ID NO: 5146 - DNA, 644 bp, Canis familiaris
  misc_feature (492)..(492): n comprises a, c, g, or t, or includes no nucleotide
  misc_feature (560)..(560): n comprises a, c, g, or t, or includes no nucleotide
  misc_feature (598)..(598): n comprises a, c, g, or t, or includes no nucleotide
  misc_feature (606)..(606): n comprises a, c, g, or t, or includes no nucleotide
  misc_feature (608)..(609): n comprises a, c, g, or t, or includes no nucleotide
cacatagaaagagagcactgaccctgatggtgatggactatttaagccctaactcagcctactttatagcataagggaccatagtgtctgtgtagaccaagggggcagctggccttacaccttattaaagaagagaagcagggtattgtcagcatcttctcactcccttctccttgataacagctaccatgacaaccctgtggtttccaaggagcttagaatggagagaaattagctcatatgaaaaaaagactggcctaaggaacagcagttgttagttgctaatggtgtaaactgacccagccctctggtagacacaggatagataactctttggatagcatgtcttttttctgttaattagttgtatactctggcctctgtcatatcttcacaatggtgctcttttcatggggtattagccattcagttacagaaagatgatttgaagatcttgatttggtttcaaaatgatgcatatttcacattttncaagtttgggtatcacttggttgggggtgaccaaaagggctaaaaaaatgatcttttgatatgatctntacaaaggaaattgaccgttaaaattgcaaaaacattnaaaatggnannttctacattactaaatttttccaatatttggtttt

SEQ ID NO: 5147 - DNA, 630 bp, Canis familiaris
  misc_feature (375)..(375): n comprises a, c, g, or t, or includes no nucleotide
  misc_feature (400)..(400): n comprises a, c, g, or t, or includes no nucleotide
  misc_feature (409)..(409): n comprises a, c, g, or t, or includes no nucleotide
  misc_feature (428)..(428): n comprises a, c, g, or t, or includes no nucleotide
  misc_feature (431)..(431): n comprises a, c, g, or t, or includes no nucleotide
  misc_feature (444)..(444): n comprises a, c, g, or t, or includes no nucleotide
  misc_feature (495)..(495): n comprises a, c, g, or t, or includes no nucleotide
  misc_feature (512)..(512): n comprises a, c, g, or t, or includes no nucleotide
  misc_feature (515)..(515): n comprises a, c, g, or t, or includes no nucleotide
  misc_feature (520)..(520): n comprises a, c, g, or t, or includes no nucleotide
  misc_feature (551)..(551): n comprises a, c, g, or t, or includes no nucleotide
  misc_feature (613)..(613): n comprises a, c, g, or t, or includes no nucleotide
  misc_feature (615)..(615): n comprises a, c, g, or t, or includes no nucleotide
aaccatctgtacatttgtcacacttgccaaattgaggcggagaaaattgaaaaaagaagaaaaactgaattggaaatttttattcggctcaacagagcattccaagaggaggattctccagctactttttattgtatcagtatgcagtggtttagagaatgggaaagctttgtaaagggtaaagatggagatcctccaggtcctattgataacactaaaattgcagtcactaaatgtggcagtgtgatactcaggcaaggagcagattctggtcagatttctgaagaaacatggaattttctacagtctatatatggtggagggcctgaagttatctttcgacctccagttgttcatgttgaccctgatatactncagtcagaagaaaaaattggagganaaacctcgncctttgtaatttggggggnganagagtctaatganaaaaattttatttcctctcatatacacatgcaaaaacattcctaaaagcangttatttcttgattttnaanatttnatccttcttactgggcattatggaaaaaagngttaaaatgtgtcatatactacaggtgggatattaatgctagataactacctaaagcttcangnaatattttgaaagaa

SEQ ID NO: 5148 - DNA, 635 bp, Canis familiaris
  misc_feature (447)..(447): n comprises a, c, g, or t, or includes no nucleotide
  misc_feature (453)..(453): n comprises a, c, g, or t, or includes no nucleotide
  misc_feature (509)..(509): n comprises a, c, g, or t, or includes no nucleotide
  misc_feature (518)..(518): n comprises a, c, g, or t, or includes no nucleotide
  misc_feature (529)..(529): n comprises a, c, g, or t, or includes no nucleotide
  misc_feature (556)..(556): n comprises a, c, g, or t, or includes no nucleotide
  misc_feature (575)..(575): n comprises a, c, g, or t, or includes no nucleotide
  misc_feature (604)..(604): n comprises a, c, g, or t, or includes no nucleotide
  misc_feature (607)..(607): n comprises a, c, g, or t, or includes no nucleotide
  misc_feature (633)..(634): n comprises a, c, g, or t, or includes no nucleotide
tgtgcatggtttgcaggaaaaacctggacagcacgacggtggcgattcacgacgaggagatctactgccggtcctgctacgggaagaagtacgggcccaagggctacggctacgggcagggcgcgggcacgctgagcaccgaccgcggagagaggctgggcatcaagcccgagagtgcaccacctcacaggcccacgacgaaccccaacacttctaagtttgctcagaaattcggaggcgctgagaagtgctcccgctgcggggacgccgtgtatgcagccgagaagatcatcggagccgggaagccctggcacaaaaactgtttccggtgtgccaagtgtgggaagagtctcgaatcaacaactttgactgagaaagaaggtgaaatctattgtaaaggatgctatgcaaagaactttgggcccaagggatttggctacggccaangagcangagcccttgttcaccccagtgaaggtgtaaacccagaaccgagatcacacaccggngaatcgttnatcacctagcncagatgacccacccttaacttctgtgnaatctgccccccttgagtnccgctgttgtccctacccgacaggctggntgnttgcagaggagaaaactttttccttnnt

SEQ ID NO: 5149 - DNA, 379 bp, Canis familiaris
tggagctgtcagacgatgacacggagagtaagaccagtgacgtcaacgagacacagccgccgcagtcggagtagagccccaggaagccaggggaggcgacacagcgggacatgcaggtactcggctggcgccggcctgccctgggggcctccaacatttaggaactgggcaagctttgggcttcctgacagatcaaccgtgtcttacggctttccagcccacacataccgtatcctgcttcagatttaagtacaactgctcccctttttctatatatacacacagaacacacacctactcagcagagtctcctccttgcatctattttccatatactcattgagagaccattttataatccatgttaagagaacccctt

SEQ ID NO: 5150 - DNA, 445 bp, Canis familiaris
gcctatgagcctgtatgggccattgggactggcaagactgcaacaccccaacaggcccaggaagtacatgaaaagctccggggatggctcaagtccaacgtctctgatgcagtggctcagagcacccgtatcatttacggaggttctgtgactggagcaacctgcaaagagctggcaagccagcctgatgtggatggcttcctcgtgggtggggcttccctcaagcctgagtttgtggatatcatcaacgccaaacaataagcccatccatctcccctattcctgctaagccagggactaggtagctcagaagctcagtaactgtgcttctaccccacccccaccctgcacatgcttttgatggtgtcacctgccccttggggccaaactataccttttcttaccgttacaaccttaccttgtaatggttgggaaccaggccaat

SEQ ID NO: 5151 - DNA, 380 bp, Canis familiaris
  misc_feature (272)..(272): n comprises a, c, g, or t, or includes no nucleotide
  misc_feature (348)..(348): n comprises a, c, g, or t, or includes no nucleotide
  misc_feature (359)..(359): n comprises a, c, g, or t, or includes no nucleotide
agacagtgcagagacgtttaataacaataaaaaggcctgctgagagcccaggctcagaaccaccccgccgccgcacacccagcacagaaaaggttgctgtaaagttaccatgttttagtaagaagcagtagaaagggttgaggcccctgagactagcccggcggaccaggaaggcatgaccgccgccaaggacgggtgaggcatcctccggaggcccaggccggaggcggccacagcagtgcagggggctcccgccgggacccagggctaancgcgtcaccccgggagcacgctccgggccccgggccggcccctgagtaagacttttgccgtccgcaaagtgccaangtgttcctgtncacagccccaagttaccgtga

SEQ ID NO: 5152 - DNA, 377 bp, Canis familiaris
  misc_feature (344)..(344): n comprises a, c, g, or t, or includes no nucleotide
  misc_feature (349)..(349): n comprises a, c, g, or t, or includes no nucleotide
  misc_feature (373)..(373): n comprises a, c, g, or t, or includes no nucleotide
gttttgcaggttagccttttgcccccatgtccattgccccctggttgcatgtcccacgaagatatgcaaaaacacatatatgcatcctgtaatcctcctgactctggggtcagacctgctccgccagcctctatttgtctgtgaaatgagggggacgacgtatcctgaccaaaattctaaactcccatccagctttaatagcctgagggctcaaaatgtgaccatttcctcattccacaaacttggaaggtatgtttcaaaataattgccttttatagagaaatctttcttttccagcattaatgaagctatctcatgagtgtatacccatgcataaaataatntttancaggttcacctctagaaacaactncttt

SEQ ID NO: 5153 - DNA, 624 bp, Canis familiaris
  misc_feature (260)..(260): n comprises a, c, g, or t, or includes no nucleotide
  misc_feature (275)..(275): n comprises a, c, g, or t, or includes no nucleotide
  misc_feature (486)..(486): n comprises a, c, g, or t, or includes no nucleotide
  misc_feature (494)..(494): n comprises a, c, g, or t, or includes no nucleotide
  misc_feature (514)..(514): n comprises a, c, g, or t, or includes no nucleotide
  misc_feature (578)..(578): n comprises a, c, g, or t, or includes no nucleotide
  misc_feature (587)..(587): n comprises a, c, g, or t, or includes no nucleotide
  misc_feature (607)..(607): n comprises a, c, g, or t, or includes no nucleotide
  misc_feature (621)..(621): n comprises a, c, g, or t, or includes no nucleotide
aggcggtggcatttttaaaaagcaagcacattagagagaaagaaaaaaagaaaaacaaaagcaaaacaaaacccgggcaccagccagacagcaccttttttttttttttttttttcccacccttcctgaaaacaaacaaccaaacaaccatcaaaacagtcatcaccaccatcatcaaaactgttaacatagcggcggcggcggcggcggcggcaaacgtcaccctccggccacggcgtccgcctaaagggatggttttntcggcggagcagctntttgccgaccaccttcttcactcgtgctgagcaggatttttgggctctccggggttcgggctgggagcagcttcatgactacgcggagcgggagagcggccacaccatgcgagagatctgagagaggaagccttcccccagctcttcagctccatcagtggaatcaaccccacctgcagaaggatgacagagatacagccagcttcccatnatttgggnggaataaacagaaaccttgnaagcgggtctttaaaattgcaagtcagcatggggccctaactattttgtgcaatggcgaaaaantaagtaggnatttaactctaaaaacttgnttactttggctttnaaa

SEQ ID NO: 5154 - DNA, 370 bp, Canis familiaris
cgacggccgcccttttttttttttttttttagagatgacaagttttaatgacacagccaacactcacaatcacagttggctcttcagacaacttgatctttggggcaagattttgtgcagagtcaagcaatacacaaaagcacatgagcaagagaggcagcattccggcttctagtgagggagcgagatatctaggtgtcatgatcaaagtcctttttattcttaaataaaaaccttaatttgctctggcctcctaaggggctctgatcctaggcccccgtttctttacgagggatgttcttcttgtagggggccagcttgaacagaggccacctcaccagagcagcgttctagtcctccggagtctctt

SEQ ID NO: 5155 - DNA, 558 bp, Canis familiaris
  misc_feature (499)..(499): n comprises a, c, g, or t, or includes no nucleotide
cgcgtccgcccacgcgtccgtgttttaccattttgatttttaaagtatgctgtagcatttcttgataacacggttgtaatgttcttaaggcagaccttttcatcataaaaaggacattaatggcaaatttatctcctgtggaaatcccaattgcctgaattactgatattttagaaataggctgtttttaaaatgccatatgtaattttatgcaagttgactatatatcttggacttaataaattataggcacttttactgtccactagtttaaaataatttgtttaataataaatatgtttttagaggaaatattgttacttggaattaattttccaattacacagtcttctataacttactcatcatatgctatatgtatcttatgcaatttccctataaagaataaactaccattatggtgttaaaccaaaatatggggaaaataaacactaactgctgcttatgaatgacgctactacttggtatgcatataaanatttactttttcatatgtatagaatgcatttcttaaggggtttaattttttaatatatt

SEQ ID NO: 5156 - DNA, 581 bp, Canis familiaris
  misc_feature (411)..(411): n comprises a, c, g, or t, or includes no nucleotide
  misc_feature (435)..(435): n comprises a, c, g, or t, or includes no nucleotide
  misc_feature (445)..(445): n comprises a, c, g, or t, or includes no nucleotide
  misc_feature (497)..(497): n comprises a, c, g, or t, or includes no nucleotide
  misc_feature (519)..(519): n comprises a, c, g, or t, or includes no nucleotide
  misc_feature (521)..(521): n comprises a, c, g, or t, or includes no nucleotide
  misc_feature (554)..(554): n comprises a, c, g, or t, or includes no nucleotide
  misc_feature (566)..(566): n comprises a, c, g, or t, or includes no nucleotide
  misc_feature (568)..(568): n comprises a, c, g, or t, or includes no nucleotide
cgcgtccggtttatctgcagaatagaactttcttctgtgaaaactgaatctctttcctctcagggcttcccaagccagctgcatttctgacctgtgttctgtgcagggttggcagctgtggcggcaatcaatgctgctatccagaagggtgttgctgagaagactgttctggagctcatgaatcctgaggcccagctgccccaggtgtatccctttgctgctgatctttatcagaaaagagctggctaccctgcagcaacagagtcctgaagtaaagtcagctgaacctctcctgtttgtgaccaaaatggggcagaagtgaactcaacacctacttcttggtgtgcttggcaagagcctttttaaaaaaacaaacaaccaaaaaacagaaacttagacttcttatggctnactgaagtcctgacctcacttggnattcccgganggcctcacttttttttctctcttctggcagatagctcacccatctgactttntgtgccgggagagttgtattgngnctataaaagcctggagtagggaatgaaacaggngaacagtgacantntggaaggctacaa

SEQ ID NO: 5157 - DNA, 682 bp, Canis familiaris
  misc_feature (404)..(404): n comprises a, c, g, or t, or includes no nucleotide
  misc_feature (438)..(438): n comprises a, c, g, or t, or includes no nucleotide
  misc_feature (472)..(472): n comprises a, c, g, or t, or includes no nucleotide
  misc_feature (494)..(494): n comprises a, c, g, or t, or includes no nucleotide
  misc_feature (521)..(521): n comprises a, c, g, or t, or includes no nucleotide
  misc_feature (617)..(617): n comprises a, c, g, or t, or includes no nucleotide
  misc_feature (632)..(632): n comprises a, c, g, or t, or includes no nucleotide
  misc_feature (639)..(639): n comprises a, c, g, or t, or includes no nucleotide
acttacctggcacggctgccctgggctgggcagctgacaaaggacttgcccctctcgcctgcttactttggcgaggatggcatcttccgccatgaccgtctccgcttccgggacttcgtggatgccttggaggacagcctggaagaggtggctgtgagacagactggtgatgacgatgaggtggatgattttgagggcttcatcttcagccacttctttggagacaaatcactgaagaagaggtcaggaaagaaggacagacagttgcagagcccagggaggggctgaggcctggtgtcccctcaccccgggaaccactgaatggtcctctcctctggctcctatgagagcagaatctcttcagtgatgcactgatgcccgcttttgctagagaaaggccttancttggatcttgccttgcttggttactgcatgcangctctgatccttgtcctttgcgggtgggaattgngattcttcagcctacaagcttncatccttcttgtgtgtgtgccccacantgccccctggtttcatgcactgacccatgcccctgggaatgagctaaaacttcttgctggatgcccagaaccaacgcttttccaagggttttttanatttggacacacccncccccangggggaaggcccctttacccttgttttcaaggccccctctttt

SEQ ID NO: 5158 - DNA, 357 bp, Canis familiaris
  misc_feature (350)..(350): n comprises a, c, g, or t, or includes no nucleotide
agttccctccccccttgggccgagggccccttcccttggtgctctgtcccgtacacctccttccaactgctcctgggtctctgctctgccccaggccagccaggctctactgggaagctaaggaacaggggataagggagaagcaagcagtgtctgagcctcaggagcttcccccccacccttgtttccgccccctcccccgcttgagccatgagcatccattgggagctgagaggagttgcaactgttgccatgaaacctccttctccctgatctggggaggcgaggaccagcagataatcccacccttccctgagctgttgctgttccctgacgctcccagccagctnagatttt

SEQ ID NO: 5159 - DNA, 377 bp, Canis familiaris
cctcccacacttcatcagcccttacctggaaggggtcctgtctcaggtggttcatttggagaaaatcactagtgaaatgggttctgcctcacaagctaatgtccgtgtcacatcccttaagaagacactggctaccacactctcacccagagtcttactgccagcaatcaataaaacgtacaagcaaattgagaagaactggaagaaccacatgggtccatttatgagcatcttgcaagagcacattgggatcatgaagaaggaagagctcacctcccatcagtctcagctaaccatatttttcttgtaagccctggacttccgagcacagcattctgaaagtgatctggaagaaattggaaaaacagaaaaattta

SEQ ID NO: 5160 - DNA, 226 bp, Canis familiaris
ggactcttctgttccccagggacccacactcccactttcctgcctttgccgtgatgtctgtgtctgtgactgacgtggcctcctctcgtgccgtgcttggcatatgtggtcttcgttcatcgtgccgcctgtggtgatgcgtgcagtggcgctgtttgtgtggtccgcattcccccccacccaccactccttgcctggactcactcccacccttcagcggctctga

SEQ ID NO: 5161 - DNA, 607 bp, Canis familiaris
  misc_feature (111)..(111): n comprises a, c, g, or t, or includes no nucleotide
  misc_feature (344)..(344): n comprises a, c, g, or t, or includes no nucleotide
  misc_feature (356)..(356): n comprises a, c, g, or t, or includes no nucleotide
  misc_feature (381)..(381): n comprises a, c, g, or t, or includes no nucleotide
  misc_feature (388)..(388): n comprises a, c, g, or t, or includes no nucleotide
  misc_feature (397)..(397): n comprises a, c, g, or t, or includes no nucleotide
  misc_feature (410)..(410): n comprises a, c, g, or t, or includes no nucleotide
  misc_feature (425)..(425): n comprises a, c, g, or t, or includes no nucleotide
  misc_feature (430)..(430): n comprises a, c, g, or t, or includes no nucleotide
  misc_feature (439)..(439): n comprises a, c, g, or t, or includes no nucleotide
  misc_feature (456)..(456): n comprises a, c, g, or t, or includes no nucleotide
  misc_feature (459)..(459): n comprises a, c, g, or t, or includes no nucleotide
  misc_feature (499)..(499): n comprises a, c, g, or t, or includes no nucleotide
  misc_feature (515)..(515): n comprises a, c, g, or t, or includes no nucleotide
  misc_feature (531)..(531): n comprises a, c, g, or t, or includes no nucleotide
  misc_feature (547)..(547): n comprises a, c, g, or t, or includes no nucleotide
  misc_feature (572)..(572): n comprises a, c, g, or t, or includes no nucleotide
  misc_feature (585)..(585): n comprises a, c, g, or t, or includes no nucleotide
  misc_feature (590)..(590): n comprises a, c, g, or t, or includes no nucleotide
accccatcatcgaggaccggcacggcggctacaagcccagcgacgagcacaagaccgacctcaaccccgacaacctgcagggcggcgacgacctggaccccaactatgtgnttgagctcgcgggtgcgcacgggtcgcagcatccgcggcttctgcctccccccgcactgcagccgcggggagcgccgtgccatcgagaagctcgccgtggaagctctgtcgagcctggacggcgacctggccggccggtactacgcgctcaagagcatgaccgaggcggagcagcagcagctcatcgacgaccacttctcttcgataaagcccgtgtcgcccctgctcctggnctcgggcatggnccgcgactgggcggacgcccgcggnattttgnacaatgacnataaaaccttctngggggggtcaacganggaanacccctggngggcaatttcattgcanaangggggcacattgaaggaaggggttaactcggttttgaaanggcttaccaaaattgnaaacactttttaagtnaaaaaataccaattcntgggaaaccctaactggggtaaatnttacttgccatcnaactngggaaagcttggggagg

SEQ ID NO: 5162 - DNA, 457 bp, Canis familiaris
  misc_feature (381)..(382): n comprises a, c, g, or t, or includes no nucleotide
  misc_feature (443)..(443): n comprises a, c, g, or t, or includes no nucleotide
aaacctatggtggctgtgaaggccctgatgccatgtatgtcaaattgatatcttcggatggtcatgagttcattgtaaaaagagaacatgcactaacatccggaacaataaaagccatgttgagtggcccaggtcagtttgctgagaacgaaactaatgaagtcaattttagagagatcccttcacatgtgctatcaaaagtatgcatgtattttacctacaaggttcgctacactaacagctccacagagattcctgaattcccaattgcacctgaaattgcactggaactgctgatggctgcgaacttcctagattgttaaataaaataaattataataaactgttaacttttttcagtatttaatacctgtagttcanntagtaaattttttatatataacatggtggcttgggggcagttgaactttaaagttcattgnaaagcaaatatttt

SEQ ID NO: 5163 - DNA, 611 bp, Canis familiaris
  misc_feature (186)..(186): n comprises a, c, g, or t, or includes no nucleotide
  misc_feature (392)..(392): n comprises a, c, g, or t, or includes no nucleotide
  misc_feature (396)..(396): n comprises a, c, g, or t, or includes no nucleotide
  misc_feature (403)..(403): n comprises a, c, g, or t, or includes no nucleotide
  misc_feature (422)..(422): n comprises a, c, g, or t, or includes no nucleotide
  misc_feature (427)..(427): n comprises a, c, g, or t, or includes no nucleotide
  misc_feature (438)..(438): n comprises a, c, g, or t, or includes no nucleotide
  misc_feature (479)..(479): n comprises a, c, g, or t, or includes no nucleotide
  misc_feature (484)..(484): n comprises a, c, g, or t, or includes no nucleotide
  misc_feature (502)..(502): n comprises a, c, g, or t, or includes no nucleotide
  misc_feature (553)..(553): n comprises a, c, g, or t, or includes no nucleotide
  misc_feature (559)..(559): n comprises a, c, g, or t, or includes no nucleotide
  misc_feature (563)..(563): n comprises a, c, g, or t, or includes no nucleotide
acaagtaatagcaagaaaattaatgtatattttaatgatacattattattccctttaaatcttaatagtagttaactgtccttactgcttaacatacatttggtttaacattgatcagcataacatgttctaatttagctgatcaagttgtactatatttaaatcatcaacagttatcttgaatgnggtctaatgaggtcagttcacaatacaaaaagttacataaactttacatcttaattttctgtcaatttaaatgcaatgtgtaagaagcttatcttgttattgtgaaaaaactaaatgtaaatgaaaccaccttcttccatgcaggtgcgtaatcttgaaaaggaaaaatgctttcatgttggagccagaatttctgtagtaaaacntttnaacggtnttttaaagaaaaatggttntaaanaaaatttattnttggaaaggatcctaagcttgggctaggaccatacctgggnaaggnggggagaccatgaagggnctgaaaagggaaaaagaagagccttaatttaaagggcccctaataactttnaagctnttanatggggactcctttccaaaacattccttaaggggggaaaaacttactt

SEQ ID NO: 5164 - DNA, 394 bp, Canis familiaris
  misc_feature (390)..(390): n comprises a, c, g, or t, or includes no nucleotide
cgggtcctgtggagcagagcaatcttgagccatgaagctgctgaggagagccgggtccctctcgagattttattccctgaaagttgctcccaaagtgaaagccacagctgcccctgcaggagtgcctttacatcctcaggaccttgagtttaccaaattaccaaatggcttagtgattgcttctctggaaaactatgctcctgcatcaagaattggtttgtttattaaagcaggcagtagatatgaggactccaaccacttaggaacctctcatttgcttcgtcttgcatccagtttgactacaaaaggagcttcatctttcaagataacccgtggaattgaagcagttggtggtaaattaagtgtgacttcaaccaggggaaatatggnctac

SEQ ID NO: 5165 - DNA, 470 bp, Canis familiaris
  misc_feature (331)..(331): n comprises a, c, g, or t, or includes no nucleotide
  misc_feature (360)..(360): n comprises a, c, g, or t, or includes no nucleotide
  misc_feature (380)..(380): n comprises a, c, g, or t, or includes no nucleotide
  misc_feature (386)..(386): n comprises a, c, g, or t, or includes no nucleotide
  misc_feature (441)..(441): n comprises a, c, g, or t, or includes no nucleotide
  misc_feature (444)..(444): n comprises a, c, g, or t, or includes no nucleotide
cctttccacgcggtggcccagtgccacagctgcctcctccaggctgccttccatgaactcaaagagatggagagctgggatattaaagccggagagcaagtacttcctgcccgggagctcctccacgatcatcagatcatcgcttgtgctgtgggaggccagggtgttcctggcaatggtttcagcctcaccggggcccacccggacagtccctgcctccgggtgcaacggcgctcccgccgtagccaggtgggcttccagcaggttggcgtggagacctctgctgtgggatctggagcacccggtccgacggggacctgaccttgactgnacgcgtccttgtcaagtgccctccctcangccggctggggtcaagcggntggggnacgtgcaccgggccaattttcccaatccccacttggcaatccttttgccgggaanggnaacaagaactttggcccccagggagt

SEQ ID NO: 5166 - DNA, 377 bp, Canis familiaris
  misc_feature (336)..(336): n comprises a, c, g, or t, or includes no nucleotide
  misc_feature (356)..(356): n comprises a, c, g, or t, or includes no nucleotide
aggcaatacacaaatttaaaatgatttgtgagtcacttgtttctgaagtgttttggtagttctaataagaaatagttaaatattgtgctttccagagcctcagaaaaggggaattgggggcggggggtggggatctatcctggattgggccagcctaaataatactggcaaccaagattctgttaggatttctgtgcatatagtgtagtaaagaggtatcattcaggggtgaaaaacaaagagccgttttaacaatgttgagtacatttggctgttctacagcctttttcttccctccccaaagaagttctgtttgcctaactctcaaactgttgnggtgtggtacattcctttangaccaattaaaacacaacttt

SEQ ID NO: 5167 - DNA, 339 bp, Canis familiaris
cttctccaaggagaaggagtctccagatgggaacaatgtggcctgcatcctgaccctgcctccataccagcggcgcggctatggaaaatttctcattgccttcagctatgagctctccaagctcgagagcacagtcggctccccggagaagccgctgtccgacctgggcaagcttagctaccgcagctactggtcttgggtcctgctggagattctgcgagatttccggggcacactgtccatcaaggacctgagccagatgaccagcatcacccagaatgacatcatcagcaccctgcagtccctcaacatggtcaagtactggaagggccagcatgt

SEQ ID NO: 5168 - DNA, 638 bp, Canis familiaris
  misc_feature (374)..(374): n comprises a, c, g, or t, or includes no nucleotide
  misc_feature (453)..(453): n comprises a, c, g, or t, or includes no nucleotide
  misc_feature (458)..(458): n comprises a, c, g, or t, or includes no nucleotide
  misc_feature (514)..(514): n comprises a, c, g, or t, or includes no nucleotide
  misc_feature (522)..(522): n comprises a, c, g, or t, or includes no nucleotide
  misc_feature (547)..(547): n comprises a, c, g, or t, or includes no nucleotide
  misc_feature (554)..(554): n comprises a, c, g, or t, or includes no nucleotide
  misc_feature (566)..(566): n comprises a, c, g, or t, or includes no nucleotide
  misc_feature (608)..(608): n comprises a, c, g, or t, or includes no nucleotide
  misc_feature (624)..(624): n comprises a, c, g, or t, or includes no nucleotide
  misc_feature (635)..(635): n comprises a, c, g, or t, or includes no nucleotide
agcacagaaatctgcacagaccttcttgtcggagattcgatgggaaaaaaacatcacattgggagaaccgcctgggtttttgcactcgtggtggtgtgtattttgggacctttactgtgcagctcctgaaaggcgagacacttgtgaacattcgagtgaagcaaaagcctttcatgattacagtgcagcagccgccccgagccctgtgcttggcaacattccccccaacgatgggatgccgggaggccccatccctccgggtttctttcagcctccgggaggagttcctgggacccagccattgctgcccaattctatggatcccacccgacaacaagggcaccccaacatgggaggatcgatgcaaaaaatgnacccttcttcaaggcatgggcccatgggcctggcccaaaaattatggcagcggatgagaccaccacccaattccttggncccgncatgcccgggattaacatggcccgggagctggcaggccctggcaaatcctaacagngctaactnaattcatactcctctcatacctggnactacgngggacctctggnggggggggccccaggaacacccatatgctatccgagattaanaaattcagggcacatntaccaatgatnatc

SEQ ID NO: 5169 - DNA, 586 bp, Canis familiaris
  misc_feature (410)..(410): n comprises a, c, g, or t, or includes no nucleotide
  misc_feature (412)..(412): n comprises a, c, g, or t, or includes no nucleotide
  misc_feature (457)..(457): n comprises a, c, g, or t, or includes no nucleotide
  misc_feature (461)..(461): n comprises a, c, g, or t, or includes no nucleotide
  misc_feature (490)..(490): n comprises a, c, g, or t, or includes no nucleotide
  misc_feature (505)..(505): n comprises a, c, g, or t, or includes no nucleotide
  misc_feature (511)..(511): n comprises a, c, g, or t, or includes no nucleotide
  misc_feature (527)..(527): n comprises a, c, g, or t, or includes no nucleotide
  misc_feature (576)..(576): n comprises a, c, g, or t, or includes no nucleotide
ggccttcggcgtcgccccgggcacagcgccgctcacaccatggcttgggttccgactgcgccacagcgtctcgtgagacgtgggacctcagagcctctttagtgccgcagcttcggctgtaggcagccccgcggcagcggaagaacagaacctctgaaatggatggactctcctcaagcagctttgctaatttgcagccgctggacaatgttcctcattaatacctgtctgtcagcataatcatcatttcactctggtggcagggactcagctccgaattctatatagaaaacatctggatcccaagtcttttaatggctttcgagacaaccagaagtgcctgctcttgagcctagtgggcctctaggcaagatgtcctgcctattgggatgtaccggccgggccttaantntgatgatgcccttgaggaccctaaacccatgaattcttcttcatngggnaatgggcaagatccctgggaagccagtgntttcaaaaccaagtntaacanccttgccaaggggganggaaggaaaaaacaaaggtttcttccttgccttgaccattgtaattggncactggcaag

SEQ ID NO: 5170 - DNA, 625 bp, Canis familiaris
  misc_feature (403)..(403): n comprises a, c, g, or t, or includes no nucleotide
  misc_feature (417)..(417): n comprises a, c, g, or t, or includes no nucleotide
  misc_feature (473)..(473): n comprises a, c, g, or t, or includes no nucleotide
  misc_feature (506)..(506): n comprises a, c, g, or t, or includes no nucleotide
  misc_feature (518)..(518): n comprises a, c, g, or t, or includes no nucleotide
  misc_feature (583)..(583): n comprises a, c, g, or t, or includes no nucleotide
  misc_feature (613)..(613): n comprises a, c, g, or t, or includes no nucleotide
  misc_feature (621)..(621): n comprises a, c, g, or t, or includes no nucleotide
ccttttgtgtcgtttctgcgccccctccccctccccaaggcccaatcctgacgttgctgtttgcttcccaacttgacctgagaggtgtctggaaaccatgcatgaatatttggtattctccaaccttttctccctaattcagacagctgtccgcccccagcacgcacacttatctatcctataggttgcgcctcagagctgctagtatgtgaacagcagtgcagtgccagtctgtgtcagctgtgaccgcaggacttgggagtctgaccgtttggtttctagcaaacagggggtgagcacccaattccccatcacattctcctttctcaccccgagatttacatgctgttgcctgaagggccttaataaggaggggcaggcctgggcatcgcaactaggtggntatgtcctcaagtntatcccttacaatagcttggagccagaaaactgggttgagaactgtgataaacttnttaaatgtgaaacttgtaagaaaaatacaaggngaagtgttaagnttttccagaaaggaaactacactatcgcaatgacattgtcattatttaggaagtggtattggaanctgcataaggtaaaaaaaaatggtaaatgntaactaanctta

SEQ ID NO: 5171 - DNA, 655 bp, Canis familiaris
  misc_feature (356)..(356): n comprises a, c, g, or t, or includes no nucleotide
  misc_feature (423)..(423): n comprises a, c, g, or t, or includes no nucleotide
  misc_feature (428)..(428): n comprises a, c, g, or t, or includes no nucleotide
  misc_feature (464)..(464): n comprises a, c, g, or t, or includes no nucleotide
  misc_feature (506)..(506): n comprises a, c, g, or t, or includes no nucleotide
  misc_feature (510)..(510): n comprises a, c, g, or t, or includes no nucleotide
  misc_feature (558)..(558): n comprises a, c, g, or t, or includes no nucleotide
  misc_feature (561)..(561): n comprises a, c, g, or t, or includes no nucleotide
  misc_feature (588)..(588): n comprises a, c, g, or t, or includes no nucleotide
  misc_feature (600)..(600): n comprises a, c, g, or t, or includes no nucleotide
  misc_feature (610)..(610): n comprises a, c, g, or t, or includes no nucleotide
  misc_feature (634)..(634): n comprises a, c, g, or t, or includes no nucleotide
gcactcgccatggccgacgaaaagcccaaggaaggagtgaagactgagaacaacgatcatattaatttgaaggtggcggggcaggatggttctgtggtgcagtttaagattaagaggcatacaccacttagtaaactaatgaaagcctattgtgaacgacagggtttgtcaatgaggcagatcagattccgatttgatgggcagccaatcaatgaaacagacacacctgcacagttggaaatggaggatgaagatacaattgatgtgttccagcagcagacaggaggtgtctactaaaaagggaacctgctactttactccagaactctgttcctccagaccaagaagacattctnaaatagaaagcccgtaatttgggttcaccacattctgactactacagaaaagtttctctattctttnatttncccttcccattcctttattgtacataaagaactgtntatgtgcacaagcatattgcattttttttttaactaaatggncaanggattgtttgatcgacatcaaatggagatgggatgggggaaaaactgnttntgtgaaaaacccctctttcattattgnatgctagtcagntttatttttnttcagaagtatttgtttcctgttncaaaaaaaagacccctttaat

SEQ ID NO: 5172 - DNA, 600 bp, Canis familiaris
  misc_feature (374)..(374): n comprises a, c, g, or t, or includes no nucleotide
  misc_feature (408)..(408): n comprises a, c, g, or t, or includes no nucleotide
  misc_feature (527)..(527): n comprises a, c, g, or t, or includes no nucleotide
  misc_feature (538)..(538): n comprises a, c, g, or t, or includes no nucleotide
  misc_feature (542)..(542): n comprises a, c, g, or t, or includes no nucleotide
  misc_feature (560)..(560): n comprises a, c, g, or t, or includes no nucleotide
  misc_feature (566)..(566): n comprises a, c, g, or t, or includes no nucleotide
  misc_feature (568)..(568): n comprises a, c, g, or t, or includes no nucleotide
  misc_feature (586)..(586): n comprises a, c, g, or t, or includes no nucleotide
tgaagccgagctctggagcatggggtctttcgtttcccggtctcaggagccgatccaggtcgctgcgcttccggaggccacccacgccgccgagcccctgcccctcgccgcacctggagcgccgacctctccagcggaagcccgtctgtttaatgactgctggagctgtcgcgtgctgtccgggtcggggctggtaggggcgggcgggtacgtgtactgggtggcgcggaagcccatgaagctgggatacgccccgggtccgggcacgattacgcagatggtcatcggcatcagcattgcttgttggggtgtaatcatcctaacagaccccaaggggaaggccttccgtgtggattgaaaagtactgcctttgnaattgtcatttattcattgtccccagaaaagaanaacaagcattgggacttatggattgttttggaaaaacaaatggacgttgagagacttcagtcctgaggatactacaaaaactgaaatgtgggccggtattttttggtcatgaatgtcgntgcctttttangttncacggggaccaataaatncctaananaagaaaaaagtttttgtnttactggggaagga

SEQ ID NO: 5173 - DNA, 479 bp, Canis familiaris
  misc_feature (390)..(390): n comprises a, c, g, or t, or includes no nucleotide
  misc_feature (396)..(396): n comprises a, c, g, or t, or includes no nucleotide
  misc_feature (433)..(433): n comprises a, c, g, or t, or includes no nucleotide
  misc_feature (451)..(451): n comprises a, c, g, or t, or includes no nucleotide
  misc_feature (463)..(463): n comprises a, c, g, or t, or includes no nucleotide
ctagttggtgaagggtaagaagaagctggctgatttgaattgtttcattagttaagttccaagactttttaataaaggagtttccagagataggttgagacctggtagtatccatgtaaattagcttttatgatctggagaaaacccctaaaagcagtggaagaggcaagaggatttacttgccatggttgtggtgtgctacttcagttttggtagtaacacactgaagtttttattgttcagtaatctgaagaagtttcctgttatttatgtgtactaaacgaactataaattggtggaatctgctaaggggaaacttaattttaactgtactgtatttaggaacctttttacagctgggtgaagttttcatgatttggaagtatttgnattttnaaaaatctggtatcataagaaataagacatgggattnttcctggtctcaaggganaattccttttgnggttcaaaagaaaaaa

SEQ ID NO: 5174 - DNA, 620 bp, Canis familiaris
  misc_feature (363)..(363): n comprises a, c, g, or t, or includes no nucleotide
  misc_feature (378)..(378): n comprises a, c, g, or t, or includes no nucleotide
  misc_feature (402)..(402): n comprises a, c, g, or t, or includes no nucleotide
  misc_feature (412)..(412): n comprises a, c, g, or t, or includes no nucleotide
  misc_feature (439)..(439): n comprises a, c, g, or t, or includes no nucleotide
  misc_feature (458)..(458): n comprises a, c, g, or t, or includes no nucleotide
  misc_feature (491)..(491): n comprises a, c, g, or t, or includes no nucleotide
  misc_feature (499)..(499): n comprises a, c, g, or t, or includes no nucleotide
  misc_feature (533)..(533): n comprises a, c, g, or t, or includes no nucleotide
  misc_feature (536)..(536): n comprises a, c, g, or t, or includes no nucleotide
  misc_feature (578)..(578): n comprises a, c, g, or t, or includes no nucleotide
  misc_feature (593)..(593): n comprises a, c, g, or t, or includes no nucleotide
  misc_feature (601)..(601): n comprises a, c, g, or t, or includes no nucleotide
tagagaaccttctgcccgatacccaatactttgtcgaagtcagggcctgcaatagtgcagggtgtggacctcccagtgacatgattgagaccttcaccaagaaagcacctccaagccagccaccaagaattatcagttccataagatctggttcacgctacataattacctgggatcatgtggttgcgctatcaaatgaatcaacagtgacaggatataaggtactctatagacctgatggccagcatgatggcaagctatattcaactcacaaacactccatagaagtcccaatccccagggatggagagtatgttgtagaggttcgtgcacacagtgatggaggagatggagtagtgtctnaagtcaaaaattcangtggttccccctattaaccaactntttttggttnattgttgcctgccctggcatcgttggntacttggcaatctgaatgngatgtgacagctgttgttccaacccacccaaangacacttnatcctatgatgactacagttcctttcaattctgnggntccgccgaagcccaataaatacctttacaactatccactggnttacaatacacgttntgatgagnattcaggaccctttatcca

SEQ ID NO: 5175 - DNA, 240 bp, Canis familiaris
  misc_feature (7)..(7): n comprises a, c, g, or t, or includes no nucleotide
  misc_feature (24)..(24): n comprises a, c, g, or t, or includes no nucleotide
  misc_feature (117)..(117): n comprises a, c, g, or t, or includes no nucleotide
  misc_feature (119)..(119): n comprises a, c, g, or t, or includes no nucleotide
  misc_feature (128)..(128): n comprises a, c, g, or t, or includes no nucleotide
  misc_feature (146)..(146): n comprises a, c, g, or t, or includes no nucleotide
  misc_feature (150)..(150): n comprises a, c, g, or t, or includes no nucleotide
  misc_feature (157)..(157): n comprises a, c, g, or t, or includes no nucleotide
  misc_feature (173)..(173): n comprises a, c, g, or t, or includes no nucleotide
  misc_feature (183)..(183): n comprises a, c, g, or t, or includes no nucleotide
  misc_feature (185)..(185): n comprises a, c, g, or t, or includes no nucleotide
  misc_feature (220)..(220): n comprises a, c, g, or t, or includes no nucleotide
  misc_feature (222)..(222): n comprises a, c, g, or t, or includes no nucleotide
taaaacnccaagctcttattacgnacttaacttttaggggaaaagctggtacgcctgcaggtaccggtccggaattcccgggtcgacccacgcgttcgcccacgcgtacgcccacgntnttaggaagnacctgtattggaccttancatnggcacgnatccaagttcctggcntcatcaaagngncatggatcacaccaggcatggttttcttccgaggnanaataaacactgggcattc

SEQ ID NO: 5176 - DNA, 595 bp, Canis familiaris
  misc_feature (371)..(371): n comprises a, c, g, or t, or includes no nucleotide
  misc_feature (383)..(383): n comprises a, c, g, or t, or includes no nucleotide
  misc_feature (388)..(388): n comprises a, c, g, or t, or includes no nucleotide
  misc_feature (397)..(397): n comprises a, c, g, or t, or includes no nucleotide
  misc_feature (425)..(425): n comprises a, c, g, or t, or includes no nucleotide
  misc_feature (458)..(458): n comprises a, c, g, or t, or includes no nucleotide
  misc_feature (461)..(461): n comprises a, c, g, or t, or includes no nucleotide
  misc_feature (484)..(484): n comprises a, c, g, or t, or includes no nucleotide
  misc_feature (523)..(523): n comprises a, c, g, or t, or includes no nucleotide
  misc_feature (531)..(531): n comprises a, c, g, or t, or includes no nucleotide
  misc_feature (547)..(547): n comprises a, c, g, or t, or includes no nucleotide
  misc_feature (584)..(584): n comprises a, c, g, or t, or includes no nucleotide
gcagcagcagcagcagcagcagcagcagcagcaggaagcgtggggaagaccagaggccagaactatggaagaccagcgcgacctcatctccaaccatgagcagctgcccatactgggccagcgccctggtgccccagagagcaaatgcagccgaggagctctgtacacaggcttttctgtcctggtggctctgctcctggctggccaggccaccacggcctacttcctgtaccagcagcagggccggctggacaagctgacagtcacctcccaaaacctgcagctggagagcctgcgcatgaagcttccaagcctcccaagcctttgagcaagatgagggtggccactcccatgatgatgcaagcgcttgnccatttaaaagncttgncccaggggnccacacaagaatggccaccgagtccggnacattgaacaagaaccacgtggatgcaccttgnttntggaggggggaccccctgaaggngtaccccaaagcttgaaggggagctttccaaaaaacctngaacaacnttaaaacaccatgggnaaccctggattggaagggttttggaaatgggtggttnaagggttctgg

SEQ ID NO: 5177 - DNA, 656 bp, Canis familiaris
  misc_feature (374)..(374): n comprises a, c, g, or t, or includes no nucleotide
  misc_feature (415)..(415): n comprises a, c, g, or t, or includes no nucleotide
  misc_feature (438)..(438): n comprises a, c, g, or t, or includes no nucleotide
  misc_feature (467)..(467): n comprises a, c, g, or t, or includes no nucleotide
  misc_feature (470)..(470): n comprises a, c, g, or t, or includes no nucleotide
  misc_feature (519)..(519): n comprises a, c, g, or t, or includes no nucleotide
  misc_feature (557)..(557): n comprises a, c, g, or t, or includes no nucleotide
  misc_feature (586)..(586): n comprises a, c, g, or t, or includes no nucleotide
  misc_feature (594)..(594): n comprises a, c, g, or t, or includes no nucleotide
  misc_feature (610)..(610): n comprises a, c, g, or t, or includes no nucleotide
  misc_feature (653)..(653): n comprises a, c, g, or t, or includes no nucleotide
gactggcggggagggccgggcagtgagtgcatccctccgctcgggctgcagggagatggctcagcgacttctcctgaggaggttcctggcctccgtcatctccaggaagccccctcagggtcgatgggcacctctcacctgcagggccctgccgtgcagccctggtcacctgacagcaacacccacccaagcccggtcaatatacaccaccagagtctgcacaacgaccttcaacatccaggatggacctgactttcaagaccgagttgtcaacagcgaaacaccagtggttgtggacttccatgcacagtggtgtggcccgtgcaagatcctggggcccaggttagagaaagtggtgggcaaacagcatgggnaaagtggtgatggccaaggtggatattgatgaccaaaaaanaccttgcccttggaatataaggngtccgttgggcccactggtgctggccatnaanaatggggacgtgggtggacaaattctggggtattaaggacgaggaccanctggaggccttctgaaaaactgattggctgacaagcanggaaaaggctggttgccttgccacaaggnccctgaanttgaggaggggcccgngagaactttaacccttcgggtgggccttctgctcttcctttgnccg

SEQ ID NO: 5178 - DNA, 663 bp, Canis familiaris
  misc_feature (399)..(399): n comprises a, c, g, or t, or includes no nucleotide
  misc_feature (413)..(413): n comprises a, c, g, or t, or includes no nucleotide
  misc_feature (545)..(545): n comprises a, c, g, or t, or includes no nucleotide
  misc_feature (605)..(605): n comprises a, c, g, or t, or includes no nucleotide
  misc_feature (610)..(610): n comprises a, c, g, or t, or includes no nucleotide
  misc_feature (614)..(614): n comprises a, c, g, or t, or includes no nucleotide
  misc_feature (633)..(633): n comprises a, c, g, or t, or includes no nucleotide
agaggacgaagaggaggaggaggaggacttgtcttctccccaagggctgcccgagcccccggagagtgtggaggtgccccccagaccccaggcccttgcagacggtccccgagaacacagcaagagtgccagcctcctgtttggcatgcggaacagtgcagccagtgatgaggactccagctgggctaccttatcccagggcagcccctcctacggctccccagaggacacagattccttctggaaccccaacgccttcgagacggattccgacctgccagctggatggatgagggtccaggatacctcagggacctactactggcacatcccaacagggaccacccagtgggagcccccaagccgggccttttccttaaaagggaagaagcccccaanaggagtttaagttnacttggacaggctttgcccataaaaaagctttgaggatggagaattttggaaggatgaacccagtgaggaggttctatggatttgggatgaaggacactgaggagggggcattgcctttccagttaaagctnagccagagcattccccaaaagaggagaagttgccccacggaatgcaacccagggataagnggttngccngccttcttagctggtgganataccaggaggaattgccctgacccaaatg

SEQ ID NO: 5179 - DNA, 248 bp, Canis familiaris
tcagcattggcttgatttaaaagtttgtagttttgctgaaggattctaagtgttaatcctgtggttttcagtgtatggctctggatacacatagagagttgttttatataaatatattgtcttgcctcactttgtgctgggatcgtggatgcccatcttatggttaagtgtcatttcttttggatttctaccttcagccatagcttagtcatcagagatatgcacaagtcagtaaggcaagagcagag

SEQ ID NO: 5180 - DNA, 494 bp, Canis familiaris
  misc_feature (309)..(309): n comprises a, c, g, or t, or includes no nucleotide
  misc_feature (312)..(312): n comprises a, c, g, or t, or includes no nucleotide
  misc_feature (347)..(347): n comprises a, c, g, or t, or includes no nucleotide
  misc_feature (385)..(385): n comprises a, c, g, or t, or includes no nucleotide
  misc_feature (399)..(399): n comprises a, c, g, or t, or includes no nucleotide
  misc_feature (418)..(418): n comprises a, c, g, or t, or includes no nucleotide
  misc_feature (445)..(445): n comprises a, c, g, or t, or includes no nucleotide
  misc_feature (449)..(449): n comprises a, c, g, or t, or includes no nucleotide
  misc_feature (478)..(478): n comprises a, c, g, or t, or includes no nucleotide
  misc_feature (488)..(488): n comprises a, c, g, or t, or includes no nucleotide
cttttgaggggatccgagaagcggcggcgtgccaggggatacagagaaggaggaggaaaagcagagcaaggggacagagctcgcgctgtctccggttgtttccagggcaacgggagtaggagaccccgcgagaggccgcccacaagaccctcgcgcgcagccatgagccccgccccccactggtgttcggagaggggcgggacctggagcgaggtttctccgtgactccaccatgtccacccccaccaccagttctctggacacgcccttgcctggaaatggcccgcctcaagccagcgccccatcttnttnaccagcgataaaggaggagggtcctgaactgtggnctttggggtccagatcctgattgttccaagcaaggaantggggcccctcccnttgaagggggttggttcanaccctgttgaggaacctgacgcaagcnaaanaaaggccaaccccaaaatgttgggccatnactttgccgngtttgc

SEQ ID NO: 5181 - DNA, 489 bp, Canis familiaris
  misc_feature (337)..(337): n comprises a, c, g, or t, or includes no nucleotide
  misc_feature (378)..(378): n comprises a, c, g, or t, or includes no nucleotide
  misc_feature (420)..(420): n comprises a, c, g, or t, or includes no nucleotide
  misc_feature (433)..(433): n comprises a, c, g, or t, or includes no nucleotide
  misc_feature (456)..(456): n comprises a, c, g, or t, or includes no nucleotide
taataataatgtctcacatggaaacaagagaaaacgctgggtcagcagcaagatgtagtttttaaaaatgtttttagttaaatgttgaggagaaaaaaaaaaggcttttcccccaaagtatcatgtgtgaacctacaacaccctgacctctttctctcctccttgattgtatgaataaccctgagatcacctcttagaactggttttaacctttagctgcagcggctgcgctgccacgtgtgtatatatatgacgttgtacattgcacatacccttggatccccacagtttggtccccctcccagctgcccctttatagtatgacgagttaacaagntggtgacctgcacaaaagcgagacacaagctatttaatctnttggcagaaattgccccttttggtgggaagcttgacaaggtntttttaaaaaggnctttgttgtttaacaggccaatnacttatagttaattttttttggggttttggttt

SEQ ID NO: 5182 - DNA, 675 bp, Canis familiaris
  misc_feature (382)..(382): n comprises a, c, g, or t, or includes no nucleotide
  misc_feature (426)..(426): n comprises a, c, g, or t, or includes no nucleotide
  misc_feature (464)..(464): n comprises a, c, g, or t, or includes no nucleotide
  misc_feature (547)..(547): n comprises a, c, g, or t, or includes no nucleotide
  misc_feature (563)..(563): n comprises a, c, g, or t, or includes no nucleotide
  misc_feature (598)..(598): n comprises a, c, g, or t, or includes no nucleotide
  misc_feature (629)..(629): n comprises a, c, g, or t, or includes no nucleotide
  misc_feature (631)..(631): n comprises a, c, g, or t, or includes no nucleotide
  misc_feature (647)..(647): n comprises a, c, g, or t, or includes no nucleotide
  misc_feature (659)..(659): n comprises a, c, g, or t, or includes no nucleotide
aaatcaaacctcatgatgtctctctttgagcctggcccagaacctctcccatggctagggaaaatggcacaattgggtcctatttcagatgctaaagaaaatccttatggagaggatgacaataagagcccattccccctgcagcccaaaaacaaacgcagttatgcccagaatgtgactgtctggatcaaacccagtggcctgcagacagatgtacagaagattttaagaaatgcaaggaaactacctgaaaaaacacagacattctataaggagctaaaccgtttacgaaaggctgccctggcatttggtttcctggatctgctaaaaggggtggctgacatgttggaaagggagtgcacgcttgttgcccaaacaaggnaacccagacgccgaattccagttgacccatgccggcagaagttnaagctggccagtactggcacctccgagtatgccggctntgagcacaacatcacaccgttgcacacaaacttttttgggagcacgttgaaaggatgtgaccttactatgggaacctgccttntttttttatgacaggngaaaatgacttgggggtaaaaacttttcaattcgntcaccttttaagaaccactaaaaacccttgngnttgcttaaaagactgnttttgggtttanggctggtcaacctgag

SEQ ID NO: 5183 - DNA, 341 bp, Canis familiaris
cgcgtccgaacgactactacatctccgtgtactccgtggagaagcgtgccagatagcaggcgcccccccacccccccaccaggcctccgtgtacatactggatccaccgcaccaccctgaacactggtcctgacctgctgccaggggctcccggaggcccctcgctgtctgtctgtccgtccgtctgtggtcactgtcatgcccaggagcccagggaaggggcctctggtggagtcctgctgtgtgacaagcccaaggaccgtcgcagacatcccaacacccttcccgtcctgttttgcttctgagatttttaaagggggaaacgcactggttctgttttg

SEQ ID NO: 5184 - DNA, 656 bp, Canis familiaris
  misc_feature (364)..(364): n comprises a, c, g, or t, or includes no nucleotide
  misc_feature (374)..(374): n comprises a, c, g, or t, or includes no nucleotide
  misc_feature (409)..(409): n comprises a, c, g, or t, or includes no nucleotide
  misc_feature (480)..(480): n comprises a, c, g, or t, or includes no nucleotide
  misc_feature (520)..(520): n comprises a, c, g, or t, or includes no nucleotide
  misc_feature (536)..(536): n comprises a, c, g, or t, or includes no nucleotide
  misc_feature (551)..(551): n comprises a, c, g, or t, or includes no nucleotide
  misc_feature (596)..(596): n comprises a, c, g, or t, or includes no nucleotide
  misc_feature (634)..(634): n comprises a, c, g, or t, or includes no nucleotide
  misc_feature (655)..(655): n comprises a, c, g, or t, or includes no nucleotide
ccgtcgcggcgccaggaggacgctatggctggccccgcgtggatctccaaggtctctcggctgctgggggcattccacaaccaaaaacaggtgaccagagcttttgctggtggtgttcagacagtcactttaattccaggagatggtatcggccctgagatctcagctgcagttatgaagatttttgatgctgccaaagcgcccattcagtgggaggagcggaatgtcactgccattcaaggaccggggggaaagtggatgatccctcctgaagccaaagagtccatggataagaacaagatgggcctgaaaggccctctgaagaccccaatagcagcaggccacccatctatgaatttactgntgcgtaaganaattgacccttattcaaatgtccgaccggtgtttnaatcgagggttacaaaaccccttacaccgacgtgaacattgtaccatccgggagaacacaaaaggagagtncagggcataaaacatatcgggatggggtcgtcaaagcatnaactcatcactgagangcgacagcgcattgntgattttgccttcgagtatgcccccaacaccaccggagtaacgtncagttgggcacaaagccaatatattgcgaatgtaaatnggctttttttacaaaaaggang

SEQ ID NO: 5185 - DNA, 659 bp, Canis familiaris
  misc_feature (361)..(361): n comprises a, c, g, or t, or includes no nucleotide
  misc_feature (369)..(369): n comprises a, c, g, or t, or includes no nucleotide
  misc_feature (400)..(400): n comprises a, c, g, or t, or includes no nucleotide
  misc_feature (475)..(475): n comprises a, c, g, or t, or includes no nucleotide
  misc_feature (488)..(488): n comprises a, c, g, or t, or includes no nucleotide
  misc_feature (503)..(503): n comprises a, c, g, or t, or includes no nucleotide
  misc_feature (537)..(537): n comprises a, c, g, or t, or includes no nucleotide
  misc_feature (549)..(549): n comprises a, c, g, or t, or includes no nucleotide
  misc_feature (562)..(562): n comprises a, c, g, or t, or includes no nucleotide
  misc_feature (573)..(573): n comprises a, c, g, or t, or includes no nucleotide
  misc_feature (589)..(589): n comprises a, c, g, or t, or includes no nucleotide
  misc_feature (607)..(607): n comprises a, c, g, or t, or includes no nucleotide
  misc_feature (624)..(624): n comprises a, c, g, or t, or includes no nucleotide
  misc_feature (641)..(642): n comprises a, c, g, or t, or includes no nucleotide
ctgggatcttcctcatcttcatcgagatcgcctacaagcggcacaaggacgctcgccggaagcagatgcagctagcctttgcggcagtgaacgtgtggagaaagaatctgcagcagtaccatcccactgatatcacgggcacgctcaacctctcagatccctcggtcagcaccgtggtgtgaggcccccggaggcgcccacctgcccagttagcccggccaaggacactgatgggtcctgctgctcgggaaggcctgagggaagcccgcccacccaagactgcccaccctgggcctcccgtctgtctgtccgccctgctgcctggcgggcagcccctgctggaccgaggcttggaccaaancaactgangacaaggcaaaaacttaacttggttgggcangggccacaagggacttccggcaaaaggaagggccctggggtctttaaacaatgggggaaggggggttgacctggncccaaggccggangggcttggaacaaanttaaaacccattttttcccaaacacaaatttggnccaatggggggngcaagggccccanttggggggggnaagccctttttcaaangccggttttgggaagctngggttcaatccctttcntttttttaccttcaaannccttttcggttggacta

SEQ ID NO: 5186 - DNA, 358 bp, Canis familiaris
  misc_feature (350)..(350): n comprises a, c, g, or t, or includes no nucleotide
tgaaggtggtaaagaaggagctggtgcacgatgatgaggatattgactgggtacagacagagaagcatgtgtttgagcaggcatctagcaaccctttcctggtcggcttacactcctgcttccagacaacaagtcggctgttcctggtcatagagtacgtcaatggcggggacctcatgttccacatgcagagacagaggaagcttccggaggagcatgccagattctatgctgctgagatctgtatcgctctcaacttcttacatgagagagggatcatctaccgggatctgaagctggacaatgttctccttgacgccgacggccacatcaagttaacggactacggnatgtgcaa

SEQ ID NO: 5187 - DNA, 341 bp, Canis familiaris
  misc_feature (216)..(216): n comprises a, c, g, or t, or includes no nucleotide
tatggaggtgaaactaggagagctgccaggctggatactgatgcgggatttcacccctaagggcattgctggagcttttcaaagaggttactaccggtattacaacaagtatatcaatgtgaagaaagggggcgttgctgggatttctatggtgctggctgcttatgtgcttttcaactactggtcggtcttacaaggagctcaaacatgaacggntacgcaagtaccactgaagagggcccagtgtggaagcacatttggcattcctgaccatgacttttgcctggcatccttgaatccttccattgcttaattcacgattaatatccaataaaagttga

SEQ ID NO: 5188 - DNA, 577 bp, Canis familiaris
  misc_feature (359)..(359): n comprises a, c, g, or t, or includes no nucleotide
  misc_feature (370)..(370): n comprises a, c, g, or t, or includes no nucleotide
  misc_feature (378)..(378): n comprises a, c, g, or t, or includes no nucleotide
  misc_feature (405)..(405): n comprises a, c, g, or t, or includes no nucleotide
  misc_feature (440)..(440): n comprises a, c, g, or t, or includes no nucleotide
  misc_feature (447)..(447): n comprises a, c, g, or t, or includes no nucleotide
  misc_feature (500)..(500): n comprises a, c, g, or t, or includes no nucleotide
  misc_feature (519)..(519): n comprises a, c, g, or t, or includes no nucleotide
caagttccactgcattacatgcaaatatgattcactcatacctagctgtttgtggattcaaactcataaatgaaccattttttaaattaagctaatagtatactgacatctttctgtgttttctgatatttacagattcgagtggtgaatgcatttcgtagttctttatatgaagggttagaaaaaccggaatcaagaagttcgattcacaactttatgacacatcctgagtttaggatagaagattcagagcctcatatccccctaattgatgacactgatgctgaagatgatgctcctacaaaacgtaacttcaggcctcacccttttccaacaaaaataacaatgctggtggcagngggaatcaccntacaatanaaaggacaaggctggtaccttttcatnccaaggaggccaatacatagtttggaacataactntgattgnaggtgaaggtaacaactacttgattggaaaaacaaaatgaactgggcttttanatttgggtggcaagacgantttggtttggcttaacaaaaaaatggccaaggaattatttttaaaaaaaaaaaaaatt

SEQ ID NO: 5189 - DNA, 412 bp, Canis familiaris
  misc_feature (372)..(372): n comprises a, c, g, or t, or includes no nucleotide
gatggcgctcaccagctttttacctgcacctactcagctatctcaggaccagcttgaggctgaagaaaaagcaagatcccagagatcaagacagacctcactggtctcatcccgaagagaacctcccccatatgggtacaggaaaggctggatacctcgattattagaggattttggagatggaggtgcttttccagagatccatgtggcccagtatccactggatatgggacgaaagaaaaaaatgtcaaatgcactggccattcaggtggatgctgaaggaaaaattaaatatgatgcaattgctcggcaaggacagtcaaaagacaaggtcatttatagcaagtatactgacctggtttccaagggagncatgaatgcagatgatccaatttgcaaagacctggtgaag

SEQ ID NO: 5190 - DNA, 632 bp, Canis familiaris
  misc_feature (378)..(378): n comprises a, c, g, or t, or includes no nucleotide
  misc_feature (391)..(391): n comprises a, c, g, or t, or includes no nucleotide
  misc_feature (399)..(399): n comprises a, c, g, or t, or includes no nucleotide
  misc_feature (404)..(404): n comprises a, c, g, or t, or includes no nucleotide
  misc_feature (425)..(425): n comprises a, c, g, or t, or includes no nucleotide
  misc_feature (442)..(442): n comprises a, c, g, or t, or includes no nucleotide
  misc_feature (457)..(457): n comprises a, c, g, or t, or includes no nucleotide
  misc_feature (612)..(612): n comprises a, c, g, or t, or includes no nucleotide
  misc_feature (626)..(626): n comprises a, c, g, or t, or includes no nucleotide
gatgctgtggaggagaatggggagacgtgtctgcaccaggcggcagccctgggccagcgcaccatctgccactacatcgtggaggctggggcctctctcatgaagacagaccagcagggcgacactccccggcagcgggccgagaaggctcaggacacggagctggccgcctacctggagaaccggcagcactaccagatgatccagcgggaggaccaagagacggccgtgtagctgtgaggccagcgccgggcagcaggagggacagggccagccggaggaggagccccctcatcgcccactgcactgccacattccagtcggactgccacggggggacccaggccccaaggaaggagccccgtgcttgcccctgangaagccgcccggnccaagggntgggntttgaggagctgggggacctnacctgcccccctgaggncccagcctgacccanggctgacaggggaacaggaaactggactggcccggcaggcctttggggcctggggctggacaagccttcccctctgggaggggtgccctcctggggttaggggggggggcccaaaaggttggggcctatgggacttcggaaaggttctaacattngtccttaggcctgntttagg

SEQ ID NO: 5191 - DNA, 648 bp, Canis familiaris
  misc_feature (436)..(436): n comprises a, c, g, or t, or includes no nucleotide
  misc_feature (453)..(453): n comprises a, c, g, or t, or includes no nucleotide
  misc_feature (524)..(524): n comprises a, c, g, or t, or includes no nucleotide
  misc_feature (543)..(543): n comprises a, c, g, or t, or includes no nucleotide
  misc_feature (546)..(546): n comprises a, c, g, or t, or includes no nucleotide
  misc_feature (590)..(590): n comprises a, c, g, or t, or includes no nucleotide
  misc_feature (635)..(635): n comprises a, c, g, or t, or includes no nucleotide
  misc_feature (637)..(637): n comprises a, c, g, or t, or includes no nucleotide
tacaaaatgtcatcttgtcctttaaaaggctttaagaagagtatactagcaatctacacctttatgttaattttgattgagaaaaaaaacaacagtattttttaaatgctaactagtccaatatagtccaatgcatatgccaaagaaatgttagatctagtgtcacggttagactttaaaattgatcacctacatattcttactgtcacacttccaatactatgtcattattacattcacatttactggttattttatgttgcaaaggtaagctactgcttccaagcatatgtgacttcaagatatcctactttatattcattggtagtaacagaaattaacacagtatagtcatcatttgagtttatttgggcatcataactttttatttattggtgggccaagaaattttatttcaaaacatagttaagccagnctgcccagcctggcttnattaccccatggtaagcatcaaaacatcaaatttaaatcttgggtaaaaataacaactatgtgaaaattgnggctattttaaaaagttcnggntataaatggcttcctaacataggggaacttttttttagtactgnttaactaaggcaaattggttagacgcagattagtttaacggcttntntaaataaaagg

SEQ ID NO: 5192 - DNA, 399 bp, Canis familiaris
  misc_feature (318)..(318): n comprises a, c, g, or t, or includes no nucleotide
  misc_feature (347)..(347): n comprises a, c, g, or t, or includes no nucleotide
  misc_feature (393)..(393): n comprises a, c, g, or t, or includes no nucleotide
gaggtgacctgggaggacctgaaggcttggagggtgaggggtgggatccagagagaagcaccccccacacccttgcccaccccggtagtcagaggacagagccaacgggtctgtggggccggcccacccctcccccgcttcccttgcctcctccctccctccacacccgcaccgtcccagggtggttggaggcccggtctgaagtccctatcctgcaccctctgctgtgtctatgacgtcggtagtgcctgtgattgtgtgttgccattttgtctggctgtggtccctccccctctcctccagacgcccacccttttnctagcccgtcggtattgtttgaagacctncccgaggaagaacaaataggattaaatttctcccttaataaaattnaaccac

SEQ ID NO: 5193 - DNA, 467 bp, Canis familiaris
  misc_feature (331)..(331): n comprises a, c, g, or t, or includes no nucleotide
  misc_feature (365)..(365): n comprises a, c, g, or t, or includes no nucleotide
  misc_feature (408)..(408): n comprises a, c, g, or t, or includes no nucleotide
  misc_feature (423)..(423): n comprises a, c, g, or t, or includes no nucleotide
  misc_feature (433)..(433): n comprises a, c, g, or t, or includes no nucleotide
  misc_feature (446)..(446): n comprises a, c, g, or t, or includes no nucleotide
  misc_feature (453)..(453): n comprises a, c, g, or t, or includes no nucleotide
acatgaagctgctcacccacaacctgctgagctcgcatgtgcggggggtggggccccgtggcttccctctgcgcctccaggccaccgaggtccgcatcaaccccgtggagttcaatcccgacttcgtggcgcgtatgatacccaaggtggagtgggcggcgcttctggaggcggcggagaccttgcatctggtcgaggtacccaaagggccgattgaagggtatgagcatgatgagaaattcctgaggcagatgcaccacgtgctgctggaggtggatgtgttggagggcaccctgcagtgcccagagtctggacgtctgttccccatcantcgcgggatccccaacatgctgctgagtgatgangaaacccggaattaattgtgccgatcctaattttgaaggtggnaccggggatggttcnggttaaatcnaaccatttgttgngcatcgngtttcccacccgtg

SEQ ID NO: 5194 - DNA, 441 bp, Canis familiaris
  misc_feature (380)..(380): n comprises a, c, g, or t, or includes no nucleotide
  misc_feature (382)..(382): n comprises a, c, g, or t, or includes no nucleotide
gctgtccccgggggccaagagtccctctgaccgaggaggtgcctttaccttggagccaggcgatctcctgatggacttcacagaagctactcctctgataaaaacattcccggctgatacagtgaccccatttcctgatgctttcaatacagggccacagttcaccgcggactttagagacagtaaattaccgtgctgtcctggccagtcttccccactgattccagcagtgaccctgaggcctttgacagagaccatctccacagtgcagaccatctacaccactcggaagcctgtttctctggcagccagcgcagagacgctccggcaggaactggagagagagaaaatgatgaaaagactgttgatgacccaactgngnaaattttccctttgttgcctggaaggatggcatggggcctttgtccgttttcctttttg

SEQ ID NO: 5195 - DNA, 510 bp, Canis familiaris
  misc_feature (345)..(345): n comprises a, c, g, or t, or includes no nucleotide
  misc_feature (384)..(384): n comprises a, c, g, or t, or includes no nucleotide
  misc_feature (392)..(392): n comprises a, c, g, or t, or includes no nucleotide
  misc_feature (402)..(402): n comprises a, c, g, or t, or includes no nucleotide
  misc_feature (410)..(410): n comprises a, c, g, or t, or includes no nucleotide
  misc_feature (424)..(424): n comprises a, c, g, or t, or includes no nucleotide
  misc_feature (440)..(440): n comprises a, c, g, or t, or includes no nucleotide
  misc_feature (483)..(483): n comprises a, c, g, or t, or includes no nucleotide
gccaatggcagcgccaaggacctggccatccttcagtgccatggggagctggaccccatggttccagtacggtttggggccctgacggctgagaagctccggtccgttgtcacacctgccagggtccagttcaagacttacccaggtgtcatgcacagctcctgtcctcaggagatggcagcggtgaaggagtttcttgagaagctgctgcctcctgtctaaccagagtcgctggcctccagcgcactcccccagctcctggggacccagcacgcacggcaccatcttggatctgagccggtcgagcccctgtccccaccatccctgacctgtcctcttccatancctctggggcaagcgggccaaaggctgacaagccttaanccccttgnttgtttgaanaagggggngggccgcccttttnccgtgtccctggaggnggggcccccctggaacaatatttggagggctgtagcaaccggnagaaaggggccaaaccgttgacccact

SEQ ID NO: 5196 - DNA, 362 bp, Canis familiaris
  misc_feature (319)..(319): n comprises a, c, g, or t, or includes no nucleotide
  misc_feature (357)..(357): n comprises a, c, g, or t, or includes no nucleotide
tttgtcttttaacctagatgctagagttcaaagcgatttgattagagtattttgaatttgactatatatttatctttaccagtgaattttatagtctatgctttaatttactaattagcatcctttagttttagttttagtttgaacttcttttagcatttcttataaggcaggtctagtggtgatgaattccctcagcttttgtgtatctgggaaagtctttatttcttatttccttctgaaggacaactttgctgggcaaaacatttttggttggcagttttttttcttcatcccattttctcctggtctgcaaggnttctgcagagaaatctgctgataggcttctgaaggttncttgg

SEQ ID NO: 5197 - DNA, 631 bp, Canis familiaris
  misc_feature (355)..(355): n comprises a, c, g, or t, or includes no nucleotide
  misc_feature (382)..(382): n comprises a, c, g, or t, or includes no nucleotide
  misc_feature (389)..(389): n comprises a, c, g, or t, or includes no nucleotide
  misc_feature (403)..(403): n comprises a, c, g, or t, or includes no nucleotide
  misc_feature (430)..(430): n comprises a, c, g, or t, or includes no nucleotide
  misc_feature (438)..(438): n comprises a, c, g, or t, or includes no nucleotide
  misc_feature (450)..(450): n comprises a, c, g, or t, or includes no nucleotide
  misc_feature (501)..(501): n comprises a, c, g, or t, or includes no nucleotide
  misc_feature (512)..(512): n comprises a, c, g, or t, or includes no nucleotide
  misc_feature (524)..(524): n comprises a, c, g, or t, or includes no nucleotide
  misc_feature (542)..(542): n comprises a, c, g, or t, or includes no nucleotide
  misc_feature (550)..(550): n comprises a, c, g, or t, or includes no nucleotide
  misc_feature (564)..(564): n comprises a, c, g, or t, or includes no nucleotide
  misc_feature (576)..(576): n comprises a, c, g, or t, or includes no nucleotide
  misc_feature (619)..(619): n comprises a, c, g, or t, or includes no nucleotide
  misc_feature (627)..(627): n comprises a, c, g, or t, or includes no nucleotide
aaagcagtgcctcatcttgccatctcctagccaggttgggacaggcactgagtggtctcctctaggatggaggtccgtgggagttcatgccagcagtttccattttaaataagtgcttctagctctactgttacattcctctcacttctatgctgacatgttaccgttctggattccaggtctgaggaataaatagtattgatagtatgatgtatggttcaagggcacatgccctagtttctcctttggttgctggcagattctgaggctacagagaaatgcactgagtgtgagtgttctcatctgtgatccctcccttagatggtgatggtgatcgatctgttgtaaatatatncatatatgcatttatgcactttcaagnggagtgnattaaaaataaggnccttaatacctcccatctgttgaaaanggtggaanggataaagcacnttttccaaaatggaggaaacaatttattttggattttaatttttggccaanggggaactganggggggtgcttntttgatggtataaggggnaaaatagngcttttatgggaanttggagcccaanaccaaatggcatttgaataatcagctccaaaggggtagccaanttttaggngggg

SEQ ID NO: 5198 - DNA, 472 bp, Canis familiaris
  misc_feature (364)..(364): n comprises a, c, g, or t, or includes no nucleotide
  misc_feature (378)..(378): n comprises a, c, g, or t, or includes no nucleotide
  misc_feature (443)..(443): n comprises a, c, g, or t, or includes no nucleotide
  misc_feature (449)..(449): n comprises a, c, g, or t, or includes no nucleotide
  misc_feature (464)..(464): n comprises a, c, g, or t, or includes no nucleotide
agtaggaacccatccattcttcacttaccgaagccttacaccgtacgtgctgggttactcgagttttaggacaccgcagcgtatttacctttttctttggaaaacgattccggaaacgaaccccttgagaacaggatgtgattaatagtgagcgagcagctggatgtcaggcaggcctgggcgggtcagcttcggaatggaaaggagtgtgcgaagttaagagacgcggagccccacagtctgtaaagagaagcccgctggaatcagaggagtggggaacctgggcggtttttcggtagaagttttgaggtgcattttcattggttaaaaaaatgactactcttggaaggttagatccaaagtnaccctttcttcaancccaatccaggagcaggaaatggatggaactgagggggcacctaaattgttgaagttaccttggngtccanccctaaaggattacntcttttaa

SEQ ID NO: 5199 - DNA, 587 bp, Canis familiaris
  misc_feature (410)..(410): n comprises a, c, g, or t, or includes no nucleotide
  misc_feature (465)..(465): n comprises a, c, g, or t, or includes no nucleotide
  misc_feature (522)..(522): n comprises a, c, g, or t, or includes no nucleotide
  misc_feature (529)..(529): n comprises a, c, g, or t, or includes no nucleotide
  misc_feature (554)..(554): n comprises a, c, g, or t, or includes no nucleotide
agattgaatctggtcgcaccagcagcgtgggcaacgacattctgggctttgacagtgaaggtaatgtggtgaacaagccagacagccatggtggcagcctggaatggacaaagatttgtgagaaatccactaaggtgattaccttcatcgacttggctggccatgagaaatacctgaagaccactgtctttggcatgacaggtcatttgcctgacttctgcatgctcatggtgggcagcaatgctggcatcgtggggatgaccaaggaacatttgggcttggcattggcactcaatgttcctgtctttgtggtggtcaccaagattgacatgtgtcctgccaacattctgcaagaaaccctgaagctgtacagcgcctgcttgaagtcttccaggcttggccggaaaganccctgtgttggtacagagcaaaggatgatgtgatcgttacggcctccaacttcanttctgagaggatgtgcccgatatttccaaatcttcaacgttacaggtgagaacctanatcttgntgaagatgttcctaaactctttccncccgaccacttccgggaggaagacctgcggagt

SEQ ID NO: 5200 - DNA, 382 bp, Canis familiaris
taccaagaacaatgtagttcagccagtttcagaagagggaagaaaatctaaacccaaaacagataagcagcttatccagtacactgcctttccacttcttgcattcctcgatgggaaccctgcttctactgttgaacagggaagtacagcatcatcagaagttatgtcctctgtagataaacccatagaagttgatgagcttctggatagcagcctagatccagagccaacccaaagtaagcttgttcgcctggagccattgactgaagccgaagctagtgaagccacactgttttatttatgtgaacttgctcctgcacctctggatagtgatatgccacttttagatagttaaatccccaagaaggggactttacatgta

SEQ ID NO: 5201 - DNA, 645 bp, Canis familiaris
  misc_feature (430)..(431): n comprises a, c, g, or t, or includes no nucleotide
  misc_feature (472)..(472): n comprises a, c, g, or t, or includes no nucleotide
  misc_feature (525)..(525): n comprises a, c, g, or t, or includes no nucleotide
  misc_feature (572)..(572): n comprises a, c, g, or t, or includes no nucleotide
  misc_feature (600)..(600): n comprises a, c, g, or t, or includes no nucleotide
  misc_feature (642)..(642): n comprises a, c, g, or t, or includes no nucleotide
aagcatctgaagcgtgtagcagctccaaagcactggatgctggataaactgaccggcgtgtttgcccctcgcccatctactggcccccataagctgagagaatgtcttcctctcatcattttcctaaggaacagacttaagtatgccctaacaggggatgaagtgaagaagatctgtatgcagcgttttattaagattgatggcaaggtccgaactgatatcacctaccctgctggttttatggatgtcatcagcattgacaagactggggagaatttccgtctaatctatgacaccaagggtcgctttgctgttcatcggattacacctgaggaggccaagtataagttgtgcaaagtgagaaaagatctttttgggaacaaaaaggaatccttcaccctgggggactcatgatgctcgcaccatccgnntatcctgatcccctcatcaaaggggaatgataccattcaanattgatttggagactggaaagaattaccggatttcatcaagtttgatctgggnaatctgtgtatggggactggaggtgccaacctgggaagaattggtgnggtcaccaccgagagaaacacctgggtnttttgatgtagttcacgtgaaaaagccaatggcaacactttncct

SEQ ID NO: 5202 - DNA, 565 bp, Canis familiaris
  misc_feature (450)..(450): n comprises a, c, g, or t, or includes no nucleotide
  misc_feature (498)..(498): n comprises a, c, g, or t, or includes no nucleotide
  misc_feature (521)..(521): n comprises a, c, g, or t, or includes no nucleotide
  misc_feature (539)..(539): n comprises a, c, g, or t, or includes no nucleotide
  misc_feature (545)..(545): n comprises a, c, g, or t, or includes no nucleotide
cggctcccctaggaggtgtgacatcatcatcatctctggccggaaagaaaagtgtgaggccgccaaggaagcccttgaggcgctggttcctgtcaccatcgaagtggaggtgccctttgaccttcaccggtacatcattgggcagaaggggagcgggatccgaaagatgatggacgagttcgaggtgaacatccacgtgccggcgccggaactgcagtccgacatcatcgccatcaccggcctcgccgccaatttggaccgggccaaggctgggttgctggagcgcgtgaaggagctgcaggccgagcaggaagaccgggctttaaggagctttaaactgagcgtcacggtggaccccaaataccatcccaaaattatttgggaagaaaaaggggcggggattacacaaaatccctttggagcattgacgtgaacattccagtttcccgntaaggacgatgggagccagccccaggaccaaattacgatcacagggtntgaaaaagaaaaacggaaccggncccgggaccccctttttnaaaatnggggtgaacttgaacaagat

SEQ ID NO: 5203 - DNA, 595 bp, Canis familiaris
  misc_feature (381)..(381): n comprises a, c, g, or t, or includes no nucleotide
  misc_feature (392)..(392): n comprises a, c, g, or t, or includes no nucleotide
  misc_feature (404)..(404): n comprises a, c, g, or t, or includes no nucleotide
  misc_feature (487)..(487): n comprises a, c, g, or t, or includes no nucleotide
  misc_feature (565)..(566): n comprises a, c, g, or t, or includes no nucleotide
tgatacttttgaccttcaaagaattggatttgctgctgaacaactagcaaagtggattgctgacagaacggatgttcatattcgagtcttcagaccacccaactattctggcaccattgctttggccctgttagtgtcacttgttggcggtttgctctacttaagaaggaacaacttggaattcatctataataagactggttgggccatggtatctctgtgtatagtctttgctatgacttctggccagatgtggaatcatatccgtggacctccatatgctcataagaacccacacaatggacaagtgagctacattcacggaagcagccaggctcaattcgtggcagagtcccacatcattctggtactaaatgctgntatcaaccatnggggatgggttnttttaaatgaagcagcaccatccaagggagatgttggtaaaagacggagtaagtctggttgctatttttggagtttgctttantcttaagattcatttaagtaaaatgggaaatatataagtccttagtaaacataaattttaaaagaaatgtttgatatnnaaaggtggcagttggttttgtttactttt

SEQ ID NO: 5204 - DNA, 625 bp, Canis familiaris
  misc_feature (373)..(373): n comprises a, c, g, or t, or includes no nucleotide
  misc_feature (386)..(386): n comprises a, c, g, or t, or includes no nucleotide
  misc_feature (392)..(392): n comprises a, c, g, or t, or includes no nucleotide
  misc_feature (418)..(418): n comprises a, c, g, or t, or includes no nucleotide
  misc_feature (438)..(438): n comprises a, c, g, or t, or includes no nucleotide
  misc_feature (446)..(446): n comprises a, c, g, or t, or includes no nucleotide
  misc_feature (456)..(456): n comprises a, c, g, or t, or includes no nucleotide
  misc_feature (470)..(470): n comprises a, c, g, or t, or includes no nucleotide
  misc_feature (479)..(479): n comprises a, c, g, or t, or includes no nucleotide
  misc_feature (489)..(489): n comprises a, c, g, or t, or includes no nucleotide
  misc_feature (514)..(514): n comprises a, c, g, or t, or includes no nucleotide
  misc_feature (520)..(520): n comprises a, c, g, or t, or includes no nucleotide
  misc_feature (541)..(541): n comprises a, c, g, or t, or includes no nucleotide
  misc_feature (545)..(545): n comprises a, c, g, or t, or includes no nucleotide
  misc_feature (577)..(577): n comprises a, c, g, or t, or includes no nucleotide
  misc_feature (593)..(593): n comprises a, c, g, or t, or includes no nucleotide
  misc_feature (614)..(615): n comprises a, c, g, or t, or includes no nucleotide
  misc_feature (619)..(619): n comprises a, c, g, or t, or includes no nucleotide
cccggactctacgtgagacccaccgcccggacgcaccatgcgcgaatgcatctcagtccacgtggggcaggcaggtgtccagatgggcaatgcctgctgggagctctactgtctggaacatgggatccagcctgatgggcagatgcccagtgacaagaccatcggtggaggggacgactcctttaccaccttcttctgtgaaaccggcgctggaaagcatgtgccccgggcagtgtttgtggatctggagcccactgtgattgatgagatccgaaatggcccctaccggcagctcttccacccagagcagctcatcactgggaaggaggatgctgctacaactacgccccgtggtcactataccattgggaangaaaacatttgancccgtnttggacccggaatccccaaggttttnttaaccaatggaccgggaanttaagggntttcttgggnttccacaacttttngaagggggnacccgggttngggttttaaccttaattttttgatnggaacngggtttttggtgactaacggnaaanaaatcaaacttggagtttttcattttaccccncccccaaggggtcaangcgggggggggccttaaattnntttnacaacc

SEQ ID NO: 5205 - DNA, 372 bp, Canis familiaris
  misc_feature (366)..(366): n comprises a, c, g, or t, or includes no nucleotide
ccatcattcccctccctatcctgacaccaggaagaggcacttgtgtaattagacaatcttgaggtgtccttgtttcactggttccgtgtttgacatttgtgtgaagtaatgcatgcactcttgtactgtggtgtgagaacaaaactaactgcattagaatctgttaaaatattagatatctttagtgacttgtagactgtggcaaatatagaaacatgaattctgaacacattccatagtctctcagacatcaaaaaatgtttttcatcgtgttctttgttcccctggaagttcacagtcccaagttcgtgagttaatttggttgccttcctcagccttggttccttgtgagttttgatgtcttantgactt

SEQ ID NO: 5206 - DNA, 440 bp, Canis familiaris
  misc_feature (353)..(353): n comprises a, c, g, or t, or includes no nucleotide
  misc_feature (375)..(375): n comprises a, c, g, or t, or includes no nucleotide
  misc_feature (383)..(384): n comprises a, c, g, or t, or includes no nucleotide
  misc_feature (405)..(405): n comprises a, c, g, or t, or includes no nucleotide
  misc_feature (410)..(410): n comprises a, c, g, or t, or includes no nucleotide
  misc_feature (419)..(419): n comprises a, c, g, or t, or includes no nucleotide
gcctctagaattggtagaaaagctcgttccagaagctgccgagataacagcaagtgttaaagatcctccaggacttaagacaccagtaggcagaggaagagcctggcttcgtttggcattgatgcaaaagaaactctcagaatatatgaaagctttgatcaataagaaggaacttctcagtgaattctatgaacccaatgccctcatgatggaagaagaaggagccataattgctggtctcttggtgggtctgaatgtcattgatgccaatttttgtatgaaaggagaagacttggactctcaggttggagttatagatttttcaatgtatctcaaggatgggaacagcagtnaaggtagtgaaagagatggccnaaatactnnaattcttggtcaaaagaactnttttnaaaaaaccnaacaaacattttaaatgcttc

SEQ ID NO: 5207 - DNA, 557 bp, Canis familiaris
  misc_feature (391)..(391): n comprises a, c, g, or t, or includes no nucleotide
  misc_feature (401)..(401): n comprises a, c, g, or t, or includes no nucleotide
  misc_feature (407)..(407): n comprises a, c, g, or t, or includes no nucleotide
  misc_feature (437)..(437): n comprises a, c, g, or t, or includes no nucleotide
  misc_feature (457)..(457): n comprises a, c, g, or t, or includes no nucleotide
  misc_feature (487)..(487): n comprises a, c, g, or t, or includes no nucleotide
  misc_feature (489)..(489): n comprises a, c, g, or t, or includes no nucleotide
  misc_feature (504)..(504): n comprises a, c, g, or t, or includes no nucleotide
  misc_feature (520)..(520): n comprises a, c, g, or t, or includes no nucleotide
gctcgttgtgctgcgccttgttcccgcctgcgtcagggaccttcccgactcagtggccaccatggcatcagatgaaggcaagctcttcgttggagggctcagttttgataccaatgagcagtcgctggagcaggttttctcaaaatacggacagatctctgaagtggtggtcgtgaaagacagggagacccagcgatcacggggcttcgggttcgtcacctttgagaacatcgacgacgccaaggatgccatgatggccatgaacgggaagtctgtggacgggcgacagatccgggtagaccaggctgggaagtcgtctgacaaccgatcccgtgggtatcgaggcggcttcttctgggggcccgtggctttttttccaagggggccgggnccgggccctngatttnttcaaaagaagaaggggacccaaggctttngggggaggccggttttaatncaagaagtgggggcttttggaaggcttcananaactacttacacaanccggagtcaaggcggngggttttggtgaccggaacttcgggcggggtcctaca

SEQ ID NO: 5208 - DNA, 640 bp, Canis familiaris
  misc_feature (367)..(367): n comprises a, c, g, or t, or includes no nucleotide
  misc_feature (542)..(542): n comprises a, c, g, or t, or includes no nucleotide
  misc_feature (578)..(578): n comprises a, c, g, or t, or includes no nucleotide
  misc_feature (595)..(595): n comprises a, c, g, or t, or includes no nucleotide
  misc_feature (608)..(608): n comprises a, c, g, or t, or includes no nucleotide
  misc_feature (613)..(613): n comprises a, c, g, or t, or includes no nucleotide
  misc_feature (627)..(627): n comprises a, c, g, or t, or includes no nucleotide
  misc_feature (638)..(638): n comprises a, c, g, or t, or includes no nucleotide
tctgaaaaaaaataaaagtatctaactgctctccccttaactaagtgaggtgcgctggcttttattttcttgaccaaagaaggaatttatttaagatttcctgaaataccctgcttttactctatttttaaaaattgcaaagtaatattaaatgtgaacaaggccccatgccatcaatgttggccttatgtgtcatccacatcttgaaatgtcaaggaagcttctttgtaagccatacctccctcttcaccacacaccaaggaatccttcccagtactcattagacatttcttatattaatagtccaaatttaggatctatgtttaatttgtcacattaacaaaatggtcaaattttgaaatgtatncattatctcaaactgaaaggttctttgtgctactaaaatgggaaaaggatatatttattttttaaacaatcccagaatattgtgtgtagactcttggtgggctctattgaatggttacctatcctacaaagcacaaatctgaatggaaccctgtgataaaagttatacgtggtgnacctactgtgcaaactaatcaataaatttttgtggncgaaaaaaaaaaaaaanggcggccgtttanaggancaagcttacgtacncggctgcgacnta

SEQ ID NO: 5209 - DNA, 453 bp, Canis familiaris
  misc_feature (374)..(374): n comprises a, c, g, or t, or includes no nucleotide
  misc_feature (422)..(422): n comprises a, c, g, or t, or includes no nucleotide
  misc_feature (432)..(432): n comprises a, c, g, or t, or includes no nucleotide
  misc_feature (443)..(443): n comprises a, c, g, or t, or includes no nucleotide
atgctcgtcatcagtggaggagagggctacattgacttccgaatgggtgatgaaggtggagaatcagaacttcttggagaggatcttccacttgaaccttctgtcgccaaagcagaaaggagtcacctgatagtatggcaagtgatgtatggcagtgagtgagcacataggaacaggtggagacggggaagctgtctcttctgcatggtttattttccctctgcccctttatttaatgctctctatgtgaaattagtttcaccacattatgtgtgagcatttctttttcctgttaactttatattacagaacctgtcctactgtaacaatacaggaactagctgttttactgcaccagtgttataggcaatttnagtatgttatgaacaaatcaaagaatggtttctttctgcaaactggtnaaattacccnaaagcatccanatgtgggctt

SEQ ID NO: 5210 - DNA, 523 bp, Canis familiaris
  misc_feature (330)..(330): n comprises a, c, g, or t, or includes no nucleotide
  misc_feature (348)..(348): n comprises a, c, g, or t, or includes no nucleotide
  misc_feature (359)..(359): n comprises a, c, g, or t, or includes no nucleotide
  misc_feature (391)..(391): n comprises a, c, g, or t, or includes no nucleotide
  misc_feature (401)..(401): n comprises a, c, g, or t, or includes no nucleotide
  misc_feature (411)..(411): n comprises a, c, g, or t, or includes no nucleotide
  misc_feature (436)..(436): n comprises a, c, g, or t, or includes no nucleotide
  misc_feature (446)..(446): n comprises a, c, g, or t, or includes no nucleotide
  misc_feature (488)..(488): n comprises a, c, g, or t, or includes no nucleotide
  misc_feature (505)..(505): n comprises a, c, g, or t, or includes no nucleotide
  misc_feature (518)..(518): n comprises a, c, g, or t, or includes no nucleotide
agagtcgcgctgtaagaagcaacaacctctcctcttctccgccatccgcccggcagccgccaagcagcaaccatgcgtgagtgtatctcgatccacgttggccaggcaggtgtccagatcggcaatgcctgctgggagctctattgcctggaacacggcattcagcccgatggccagatgccaagtgacaagaccattgggggaggagatgactccttcaacaccttcttcagtgagacgggcgctggcaagcatgtgcccagggcagtgtttgtagacctggagcccacagtcattgatgaagttcgcactggcacctaccgccagctntttcaccctgagcagctnatcacaaggcnaaggaagaatgcttgccaataactatgccganggcacttcancattgggaanggaaataattgaccttgttttgganccaaattcgnaacttggttgaccaagtgcccgggtctttaagggtttttggntttcccaacttttgganggggaaccggttntgggt

SEQ ID NO: 5211 - DNA, 653 bp, Canis familiaris
  misc_feature (366)..(366): n comprises a, c, g, or t, or includes no nucleotide
  misc_feature (476)..(476): n comprises a, c, g, or t, or includes no nucleotide
  misc_feature (564)..(564): n comprises a, c, g, or t, or includes no nucleotide
  misc_feature (600)..(601): n comprises a, c, g, or t, or includes no nucleotide
  misc_feature (617)..(617): n comprises a, c, g, or t, or includes no nucleotide
aaatggggattaagtgaggtaatgtgtgcaagcacagggcctggcatgtaataagcaataggcagagataattcttaaggcttttaggattggggacctaaataatttattcctctaagctgagttctagttgcgacagaagaaactgagaccctcagaggtgcagtgatatgcccacctgggaccagaagccatggctcctattttactcactagtgtatttttccacctctggttatatggagctctcaggcacacaccataaatcttggctttagaaggcaccagcccagaaccacaacccttcctggattccttttattttctctccagttctgcctttggacaggccatctagcacctctnccctgagaaatcaactggaggggaaaaagaggtggattaaggggaggagcaatgtggttggtggcttggcctgtatggagttccaggtttccattctggatctgcttgangggggtaaagatagcaagtttggcataagcatggatgggggaagatccccttcccatactgttggccaaggataggttggcaagaatnggtttgggttgctgtgggctgggttatttttttaannatggccctgtgagganaacttactgttcctaagatttccaacagggctgact

SEQ ID NO: 5212 - DNA, 630 bp, Canis familiaris
  misc_feature (371)..(371): n comprises a, c, g, or t, or includes no nucleotide
  misc_feature (396)..(396): n comprises a, c, g, or t, or includes no nucleotide
  misc_feature (443)..(443): n comprises a, c, g, or t, or includes no nucleotide
  misc_feature (519)..(519): n comprises a, c, g, or t, or includes no nucleotide
  misc_feature (522)..(522): n comprises a, c, g, or t, or includes no nucleotide
  misc_feature (564)..(564): n comprises a, c, g, or t, or includes no nucleotide
  misc_feature (585)..(585): n comprises a, c, g, or t, or includes no nucleotide
  misc_feature (591)..(591): n comprises a, c, g, or t, or includes no nucleotide
  misc_feature (596)..(596): n comprises a, c, g, or t, or includes no nucleotide
ataccaagagcagataagaaactctgctggaactctcaaccaaagaaaagaagtacagaagggcaccaggagccccttgggtctccaggctctggataagctaagaaggaagacttcacctgtactacatcctcccagaggtaaatacaaatacggtactttgaggccttgggaaactgccagaaagttactttattttttatttttgcaaatcagctaagtgacttcagattgtgactacatttcgattccattagctcatcaagggtttcttaatgaggctaattagccccaaacagctcccaccgcctcagactccactgagagctgggttgtctataaacccgagagcctgtgacctcatcagtggntgaaaaaactaagttcttggcattnaagcttcatcaaaagcttaatgcttaaatacttttcacagttaatgnggggttttcgggtttgcggggccctggatccctgggagccactgagtggccgaaccccacttttgcagccaggaangangctgccctgtggaggcccatgtacaaatgagatcaaatctgnggacactatttgttgccaggnaaactnttgcnggagaagtactcaaaaaattaaagtggttatgag

SEQ ID NO: 5213 - DNA, 607 bp, Canis familiaris
  misc_feature (241)..(241): n comprises a, c, g, or t, or includes no nucleotide
  misc_feature (247)..(247): n comprises a, c, g, or t, or includes no nucleotide
  misc_feature (399)..(399): n comprises a, c, g, or t, or includes no nucleotide
  misc_feature (410)..(410): n comprises a, c, g, or t, or includes no nucleotide
  misc_feature (421)..(421): n comprises a, c, g, or t, or includes no nucleotide
  misc_feature (435)..(435): n comprises a, c, g, or t, or includes no nucleotide
  misc_feature (466)..(466): n comprises a, c, g, or t, or includes no nucleotide
  misc_feature (512)..(512): n comprises a, c, g, or t, or includes no nucleotide
  misc_feature (530)..(530): n comprises a, c, g, or t, or includes no nucleotide
  misc_feature (572)..(573): n comprises a, c, g, or t, or includes no nucleotide
  misc_feature (582)..(582): n comprises a, c, g, or t, or includes no nucleotide
  misc_feature (597)..(597): n comprises a, c, g, or t, or includes no nucleotide
aggaggagctgcccgcgtcgccaggtgccgcgccgggggacagcgtgaacagctacgggagccagtactacaacgggcccagcagtgacagcggtgtcccagagcccgccgcgtgcgtagtcaccaccgctgccatcgacgtccaccagcccaacatctcctccgacctcttctcaggcgacacgcccctgcagctcagcagcaatggcacctgcgccagcgccaccttcgacggcgcctnccgctncacgcacagcttcgtcccccaggcccagagccacagcagccggacgctgggctcctgcacggactgcagcacggcccgggaggaggaggaggaaggaggagccctcctttgagcccgggccccgggccccggcgcccccggttggaacgganaaggcaacggngcaagaactgntgttcttccccgtngaagggcccttgccccccccaaagggccttngaccaagccccgtttttccgggccgggccaacggggttaaacccancaagccccaactggaagngaagctaagttttttaacaaaaaaaaccggaggggtttgcgnnttttaaaanaaaaccggggttcantttaaaccgt

SEQ ID NO: 5214 - DNA, 520 bp, Canis familiaris
  misc_feature (363)..(363): n comprises a, c, g, or t, or includes no nucleotide
  misc_feature (464)..(464): n comprises a, c, g, or t, or includes no nucleotide
  misc_feature (492)..(492): n comprises a, c, g, or t, or includes no nucleotide
  misc_feature (498)..(498): n comprises a, c, g, or t, or includes no nucleotide
  misc_feature (506)..(506): n comprises a, c, g, or t, or includes no nucleotide
cagtttgccctggaggccggcgggtaccaggcgggcgccgcgaggctcgaggaggagctgcgacagctaaaggaggagatggcccggcacctgcgcgagtaccaggagctcctcaacgtcaagatggccctggacatcgagatcgccacctaccgcaagctgctggagggcgaggagagcaggatctctgtgcccgtccactccttcgcgtccttaagtatgaagacgagcgtgcctgaggtggagcctccgcaggacagccacagcaggaagatggttctgatcaagaccattgagacccgggatggggaggtggtgactgagtcccagaaggagcaacgcagtgacctggacaaagtcttntattacaactactgacccatttgtcttggggttccttgaaacccgccctagggcttgttcaagcccaaaaccctaaaccaagtacttgaataagtcctctnttgttctgattgtgtccaggggatgacncaagtnaccccttncttggctttgggca

SEQ ID NO: 5215 - DNA, 763 bp, Canis familiaris
  misc_feature (2)..(2): n comprises a, c, g, or t, or includes no nucleotide
  misc_feature (12)..(12): n comprises a, c, g, or t, or includes no nucleotide
  misc_feature (486)..(486): n comprises a, c, g, or t, or includes no nucleotide
  misc_feature (534)..(534): n comprises a, c, g, or t, or includes no nucleotide
  misc_feature (550)..(550): n comprises a, c, g, or t, or includes no nucleotide
  misc_feature (604)..(604): n comprises a, c, g, or t, or includes no nucleotide
  misc_feature (679)..(679): n comprises a, c, g, or t, or includes no nucleotide
  misc_feature (694)..(694): n comprises a, c, g, or t, or includes no nucleotide
  misc_feature (707)..(707): n comprises a, c, g, or t, or includes no nucleotide
  misc_feature (730)..(730): n comprises a, c, g, or t, or includes no nucleotide
  misc_feature (749)..(749): n comprises a, c, g, or t, or includes no nucleotide
gnggggggtttnatcgcctgctctaatacgactcactatagggaaagctggtacgcctgcaggtaccggtccggaattcccgggtcgacccacgcgtccgatgaagtttactgtggtgactgctgaaaggtgaacccatttcctgattttcccgccacagtgttgtgataagattcaaagaaaccctattccctgcacagaaatgtttcttatcacattgtatcttagtatggaaaggaatatggtcccttttctgcaattgctactgtacacacacgcacgcacgcgcgcacacacacacacatgcacatattcattcgtccaagtggtattttcaacgtctgtgtgggtgtcactgttcatgcagtatctatttcccagcgaactttgaatggagggcaacttttctaaccagattgtcttttcagaccgaagacctgggaactggggaaagagtttggaaagaagggaaggcaatggaaagantgagctttaaatttgaaagatattttcccaacaaggaacttgggctcnatgactgcagaaactntaaccctccgatcttttgcagggggggcatggaacactgcttgtatcaatctgngtaccctattaaacccatgtttacacacacacatccttccttccatcagtatatacgtggtttgggatgagcagncaatagttttgaganggagtttggtccnttttttttttcctcattatactnttaaaatggtggcagtttnaaacaacaaaaaat

SEQ ID NO: 5216 - DNA, 650 bp, Canis familiaris
  misc_feature (503)..(503): n comprises a, c, g, or t, or includes no nucleotide
  misc_feature (534)..(534): n comprises a, c, g, or t, or includes no nucleotide
  misc_feature (605)..(605): n comprises a, c, g, or t, or includes no nucleotide
  misc_feature (621)..(621): n comprises a, c, g, or t, or includes no nucleotide
  misc_feature (630)..(630): n comprises a, c, g, or t, or includes no nucleotide
  misc_feature (644)..(644): n comprises a, c, g, or t, or includes no nucleotide
aacttaacatttcagatcgacaagagaataatctttcttcacttgcctcaatagtattattgagcaatgaatttttttatttccgcatggaaagttattgatctctatggctgtaaaatatttctttatagcattattaaagtgtgtcttaatacaattaaatttgggatacaaagtatttattttacaatgggtggggggaagctttttccagaaagtttccaatatgacgttttcataagttcaaaaaaaaaaaagtttccttcgtgcttactttctaagttaaaacttcatctgcgactttaaaatggaaaggattcttttaattgtggacgataggcataatactgtttgcatctgaatgttctgtaagtgaatgaaattttaatcgatggactcatgacttctggttacccgaatgctttcaaccggagtatggaagtggacaccattcaagcatggcatcaggtcattccgttcaagttcttgtgccagctcacccnctcgttgaaattccagttctgggataagggngggagccctaaaggcttctgcagtttaaatgggttaaacctgggatacttaacaatttattgtcaattgcnctggtttaattggtgntaaaaaaanaccccctgctttantacaat

SEQ ID NO: 5217 - DNA, 630 bp, Canis familiaris
  misc_feature (394)..(394): n comprises a, c, g, or t, or includes no nucleotide
  misc_feature (414)..(414): n comprises a, c, g, or t, or includes no nucleotide
  misc_feature (477)..(477): n comprises a, c, g, or t, or includes no nucleotide
  misc_feature (508)..(508): n comprises a, c, g, or t, or includes no nucleotide
  misc_feature (513)..(513): n comprises a, c, g, or t, or includes no nucleotide
  misc_feature (535)..(535): n comprises a, c, g, or t, or includes no nucleotide
  misc_feature (547)..(547): n comprises a, c, g, or t, or includes no nucleotide
  misc_feature (596)..(596): n comprises a, c, g, or t, or includes no nucleotide
attttcagattcccaaaataagaatgaatataccatactaagaaaatagtgactattttgaattgtgctagttttccttcaaaaatgtagggtgcatatttctgttactaaaatctttggtggctcactcaaattatgtggcattataatatcctctacaattctgttgtttgtattaaatcttattaaccacatgcagctgttataaaaagctgtactgtttcacactgagctattacattagcttgggataaatgttaggcgctctgaccacatccaagaataaaattgaagacactgctgggatactcctgaaagagccatttctggctttttatttccagtaatgagcttctttttctttgcttggaagaatgtgattataaccaggccntcatggtcaaaaaaagtacntttaatttggtggagaacggcattcctattggaataattggcctatcgctcttaaaatatctngataatttatttatacctacctttataaaanatagngcaactacttttgggtaaaaangctttaaattancattcggatcagcacatctgttatgttaaatgttcacgtctgtgtaaanagcttcaataaatttttttcccttgtaaaaaaaa

SEQ ID NO: 5218 - DNA, 642 bp, Canis familiaris
  misc_feature (397)..(397): n comprises a, c, g, or t, or includes no nucleotide
  misc_feature (409)..(409): n comprises a, c, g, or t, or includes no nucleotide
  misc_feature (419)..(419): n comprises a, c, g, or t, or includes no nucleotide
  misc_feature (423)..(423): n comprises a, c, g, or t, or includes no nucleotide
  misc_feature (442)..(442): n comprises a, c, g, or t, or includes no nucleotide
  misc_feature (483)..(483): n comprises a, c, g, or t, or includes no nucleotide
  misc_feature (527)..(527): n comprises a, c, g, or t, or includes no nucleotide
  misc_feature (529)..(529): n comprises a, c, g, or t, or includes no nucleotide
  misc_feature (589)..(589): n comprises a, c, g, or t, or includes no nucleotide
  misc_feature (591)..(591): n comprises a, c, g, or t, or includes no nucleotide
  misc_feature (622)..(623): n comprises a, c, g, or t, or includes no nucleotide
tagcggggctgtggtggggccccacttagtgttgggaattttcgcggcggtcacctgggctcctgaggctctggggagtactcggcggttgccttcgcgccggacaggctggcggtgttggggccgtgtggcgccgagaaggggaaccgctcgcgggcacgttcggactcgtgaagctacgtcgcgctgagcactctgggatttgtagttctcgagatggagcgcgctgtgccacacgcggtacctctgggtcagatggaagtgtttcaggctctgcagcggctccacatgaccattttttcccagagtgtctccccctgcgggaagttcctggcagctggcaacaattacgggcagataagccatcttcaacttgtctggtggtcttagttctganggccaaagaaanaagtaagaanccantggtgacattccaagcccntgatggaccggtctacaacatggtttcacaagatcgacatntgtttaatgctggggatggggaaagtgaaagcctgctttggcananatcctcaaaaaaggaaagagtgtggaaattgggggatggcttggggtgccttgttcccananagcctttgaccttattgtagcatttccttcnncaaaggttgtaaggagctg

SEQ ID NO: 5219 - DNA, 395 bp, Canis familiaris
  misc_feature (327)..(327): n comprises a, c, g, or t, or includes no nucleotide
  misc_feature (332)..(332): n comprises a, c, g, or t, or includes no nucleotide
  misc_feature (385)..(385): n comprises a, c, g, or t, or includes no nucleotide
tttttttttttttaagagacaaatgtggagcaggccgggtggctcagtgatttatcaccaccttcggcccagggtgtgatctcggagtcccgggatcgagtcccacgtcgggctccccgcatggagcccgcctctccctctgcccgcgtctctgcccctctctctctctgtgtcccgcatgaacaaataaataaaatatttttaaaaaaagagaaaaatgtagggaaaggggaattcatgtaggaattcgagcaaggcaaggatgtagaagtgagaaacaagtgcattatggaacagatttcttttttttttttttttttggaacanatttntttaccttaaaaaaggctaacatcaaaatcggcgagtgacaaaggcggatttnaaccttggtc

SEQ ID NO: 5220 - DNA, 613 bp, Canis familiaris
  misc_feature (360)..(360): n comprises a, c, g, or t, or includes no nucleotide
  misc_feature (413)..(413): n comprises a, c, g, or t, or includes no nucleotide
  misc_feature (416)..(416): n comprises a, c, g, or t, or includes no nucleotide
  misc_feature (470)..(470): n comprises a, c, g, or t, or includes no nucleotide
  misc_feature (546)..(546): n comprises a, c, g, or t, or includes no nucleotide
  misc_feature (563)..(563): n comprises a, c, g, or t, or includes no nucleotide
  misc_feature (565)..(565): n comprises a, c, g, or t, or includes no nucleotide
  misc_feature (581)..(581): n comprises a, c, g, or t, or includes no nucleotide
  misc_feature (594)..(594): n comprises a, c, g, or t, or includes no nucleotide
gtggcggcgggcgcggggctcggccggagctcgggaggcactaaacaggagcctgcaggggtctccacagagggcatcaggatgtcgtattttggagagcatttttggggtgagaagaaccatggcttcgaggtcctgtaccacagcgtgaagcaggggcccatctccaccaaggagctggctgacttcatccgggagagggccaccatcgaggagacctactcaaaggctatggcgaaactttccaagctggccagcaatgggacccccgtggggaccttcgccccactctgggaggtcttccgcgtctcctcagacaagctggcgctctgccacctggagctgacgcggaaacttcangacctcatcaaaggacgtgcttccgctattgcgaggagcagctcaagatacanaanaagtgccaaagaaggaaaccagtgggcacccttggacgctgtgcaaggtccttncaaggtgttaagccaagttcttgccaaagtcccgagagaacttaccttgaacccgttgcatggaaccaagaaccgnttgcggagggagagccncncccccaaggagatggncaaggcagaaacnaaacaaaaaagggggaaaa

SEQ ID NO: 5221 - DNA, 274 bp, Canis familiaris
tatgtactattatttttataggtgaattaggctggttacatttactgatataatcctcttaacatttgtctttattgttgctaactttacctttctctgattcatagtatctctgccagatactctctgatctatttaaggaagatgagccaaaaagcttcactgactctaagagtgtcctgaaccctccagccctgtcctgtgtctgtctcctcttactactggaattcaccaccagatacagaaccatggaggccctctaaagcctttaaaa

SEQ ID NO: 5222 - DNA, 661 bp, Canis familiaris
  misc_feature (351)..(351): n comprises a, c, g, or t, or includes no nucleotide
  misc_feature (375)..(375): n comprises a, c, g, or t, or includes no nucleotide
  misc_feature (377)..(377): n comprises a, c, g, or t, or includes no nucleotide
  misc_feature (385)..(385): n comprises a, c, g, or t, or includes no nucleotide
  misc_feature (400)..(400): n comprises a, c, g, or t, or includes no nucleotide
  misc_feature (430)..(430): n comprises a, c, g, or t, or includes no nucleotide
  misc_feature (441)..(441): n comprises a, c, g, or t, or includes no nucleotide
  misc_feature (485)..(485): n comprises a, c, g, or t, or includes no nucleotide
  misc_feature (499)..(499): n comprises a, c, g, or t, or includes no nucleotide
  misc_feature (504)..(504): n comprises a, c, g, or t, or includes no nucleotide
  misc_feature (524)..(524): n comprises a, c, g, or t, or includes no nucleotide
  misc_feature (540)..(540): n comprises a, c, g, or t, or includes no nucleotide
  misc_feature (561)..(561): n comprises a, c, g, or t, or includes no nucleotide
  misc_feature (585)..(585): n comprises a, c, g, or t, or includes no nucleotide
  misc_feature (604)..(604): n comprises a, c, g, or t, or includes no nucleotide
  misc_feature (607)..(607): n comprises a, c, g, or t, or includes no nucleotide
  misc_feature (614)..(614): n comprises a, c, g, or t, or includes no nucleotide
  misc_feature (651)..(651): n comprises a, c, g, or t, or includes no nucleotide
  misc_feature (660)..(660): n comprises a, c, g, or t, or includes no nucleotide
tgttcatgaagggcctgtccatggccaaggagggcgtcgtggccgccgcggagaaaaccaaacagggggtcaccgaggccgcggagaagaccaaggagggcgtcctctatgtcggaagcaagactcgagagggggtggtacaaggagtggcctcagtggctgaaaaaaccaaggagcaggcgtcccatctgggaggagctgtgttctctggggctgggaacattgcggcagccacaggcttggtgaagaaggaggaattccctgctgatctgaagccagaggaagtggcccaggaagctgctgaggagccgctgatcgagcccctgatggagccagaaggggaaagttatnaggaaccaccccaggaggagtatnanggagtatnaaccaaaagcgtaanggttcaccaacggccccccaccaaaagaanaatccccttcntttcccttgccaggcccccaaagcaagggttgtccttttacccnttccccttaaaacncaaanattgtggggggttggccatntggttgtctaaccctnccggttcaaaccttgggcgtnggacagggccggggttacggcctnggttgtgggcttccccccnctntttttgncccttccacccttccgtcaaagtttgggcggatgtantttttactnt

SEQ ID NO: 5223 - DNA, 383 bp, Canis familiaris
agtatgcagagactctgaaggaggagaatgccatttggcagcagaagatgcagcagatgtctgaacagatgcacagattgagggaagagaaggagcacagcatgagtcaggtgcaggagttggaggccaacttggctgaactgaagaaccagatagtggtgcccccagcccaggagcccccagccaggcccttggaggaggagcagcagcggctgcacgccgagactgaacaactacagaaggagctggagagcctggccgagcaggtgcaggcccaagtgaaagacaacgaaggtttgagtcgcctgaaccgggagcaggagcagcggcttgttgaacttgaaccggcaacccaatgcttggggggagcagccaaaggaacc

SEQ ID NO: 5224 - DNA, 599 bp, Canis familiaris
  misc_feature (420)..(420): n comprises a, c, g, or t, or includes no nucleotide
  misc_feature (423)..(423): n comprises a, c, g, or t, or includes no nucleotide
  misc_feature (481)..(481): n comprises a, c, g, or t, or includes no nucleotide
  misc_feature (524)..(524): n comprises a, c, g, or t, or includes no nucleotide
  misc_feature (555)..(555): n comprises a, c, g, or t, or includes no nucleotide
  misc_feature (558)..(558): n comprises a, c, g, or t, or includes no nucleotide
  misc_feature (573)..(573): n comprises a, c, g, or t, or includes no nucleotide
tttgctgctctgtaagcctctgaagagcaatagctaatttattattactgtaattttttaaggctttaaagtgcctccggggtcctctgaaactaattttctatttctcggattccctgggattcttcataagagatggtgacataatgattagaagaattctttttttagcatgaaagttgtcccttctcttcttcagtacttgcctcctgctggcattgaattatcacagggataaaaattggttaattttttatttctctcacagcaaactcctcttgcccagtatttatttggtgccctttaaccaccagagggggggaaaatgaactcctccaagctgccaatatttatctctggactctagcggtacactgaattgtactggagtgggaatattggaaagctcttgggggggantgnataccttcagtttcttattttgaatggaatttcttttttgatgtccgctcttcatatnacctcaaggtcaaactttgaaggacaagtatgatggggataanaagtcttgaaaggagaccactgtctaatcanaanaagaggaaagaaggnctggccattttgatattttctggagg

SEQ ID NO: 5225 - DNA, 651 bp, Canis familiaris
  misc_feature (301)..(301): n comprises a, c, g, or t, or includes no nucleotide
  misc_feature (363)..(363): n comprises a, c, g, or t, or includes no nucleotide
  misc_feature (383)..(383): n comprises a, c, g, or t, or includes no nucleotide
  misc_feature (414)..(414): n comprises a, c, g, or t, or includes no nucleotide
  misc_feature (430)..(430): n comprises a, c, g, or t, or includes no nucleotide
  misc_feature (438)..(438): n comprises a, c, g, or t, or includes no nucleotide
  misc_feature (474)..(474): n comprises a, c, g, or t, or includes no nucleotide
  misc_feature (528)..(528): n comprises a, c, g, or t, or includes no nucleotide
  misc_feature (535)..(535): n comprises a, c, g, or t, or includes no nucleotide
  misc_feature (537)..(537): n comprises a, c, g, or t, or includes no nucleotide
  misc_feature (557)..(557): n comprises a, c, g, or t, or includes no nucleotide
  misc_feature (580)..(580): n comprises a, c, g, or t, or includes no nucleotide
  misc_feature (586)..(586): n comprises a, c, g, or t, or includes no nucleotide
  misc_feature (592)..(592): n comprises a, c, g, or t, or includes no nucleotide
  misc_feature (612)..(612): n comprises a, c, g, or t, or includes no nucleotide
  misc_feature (623)..(623): n comprises a, c, g, or t, or includes no nucleotide
  misc_feature (636)..(636): n comprises a, c, g, or t, or includes no nucleotide
cttcctcgccaacctggtgccgcgcaacgccaagttcttcaagcagcgctccaggtcgtgccacgacctctccgtgctctgagccgcggtcgccatggtcacggcggtcgccatggtcgccgcgccctccactcgcccccccgccccgccccgcgtcctccgcgaagaccgtctaggaattcaaaaacgcccgggacgcccgggtgtgtgggccgcggctcggccccgcgggtgcccgggctggctgcccgccgcggaggcctgcagggcgaggacgcaggccggcgggcgggcggcttcnggagggcaggaggggctacaggcccgcgagctgttttgacttttattaaagtcgcgcttgancaccttttccattaaaagantcttaaaagcgagaactggaaaagtactttntagacccttttacggncccccagntttgtactcttgcgcgaaataccccttacctttaanaaacccttaaaggtaaagacacggaaaacgcgttttttgagacaccttaaaacntgcttgntntgaacaagcggcactttgtncacttttgcttttaagagctttnttaaangcaaangcctggaagcgctatttttnagaattgattntttgattcaccgncacagcacgggattt

SEQ ID NO: 5226 - DNA, 663 bp, Canis familiaris
  misc_feature (457)..(457): n comprises a, c, g, or t, or includes no nucleotide
  misc_feature (514)..(514): n comprises a, c, g, or t, or includes no nucleotide
  misc_feature (525)..(525): n comprises a, c, g, or t, or includes no nucleotide
  misc_feature (578)..(578): n comprises a, c, g, or t, or includes no nucleotide
  misc_feature (585)..(585): n comprises a, c, g, or t, or includes no nucleotide
  misc_feature (591)..(591): n comprises a, c, g, or t, or includes no nucleotide
  misc_feature (625)..(625): n comprises a, c, g, or t, or includes no nucleotide
  misc_feature (647)..(647): n comprises a, c, g, or t, or includes no nucleotide
  misc_feature (657)..(657): n comprises a, c, g, or t, or includes no nucleotide
tggaccccaagggcaagtccctgaaggatgaggacattctgcagaagctgcccgtgggcaccacggccacactctacttccgggacctgggggcccagatcagctgggtgacggtcttcctgactgagtacgcagggcccctctttatctatctgctcttctacttccgcgtccccttcatctacggccacaaatacgacttcacgtccagccggcactcggtggtgcacctcgcctgcatctgccactcattccactacatcaagcgtctgctggagacgctcttcgtgcaccgcttctcccatggcaccatgcccttgcgcaacatcttcaagaactgcacctactactggggctttgccgctggatgggctattaacatcaaccaatcttttttacacgccccctacctaacggagcttaacaaggttaaactgggcactgggcaatctttgtngatctggcaagctttgggaacttttcattcacatgggccttgcgagaacctggcggncagcgggggtncaaagaccaagaaaaatcccataccccaccaagaaacccctttacgggggttntttctgntggggncctgcccaactacacctaacaaggggggggcctnggattgggttttgcaatattanacaaagtttncaaggg

SEQ ID NO: 5227 - DNA, 550 bp, Canis familiaris
  misc_feature (394)..(394): n comprises a, c, g, or t, or includes no nucleotide
  misc_feature (411)..(411): n comprises a, c, g, or t, or includes no nucleotide
  misc_feature (421)..(421): n comprises a, c, g, or t, or includes no nucleotide
  misc_feature (427)..(427): n comprises a, c, g, or t, or includes no nucleotide
  misc_feature (436)..(436): n comprises a, c, g, or t, or includes no nucleotide
  misc_feature (465)..(465): n comprises a, c, g, or t, or includes no nucleotide
  misc_feature (480)..(480): n comprises a, c, g, or t, or includes no nucleotide
  misc_feature (492)..(492): n comprises a, c, g, or t, or includes no nucleotide
  misc_feature (526)..(526): n comprises a, c, g, or t, or includes no nucleotide
ctgaaagtttccaatatgaagcttgttcatgttattttgttacatttgtgcttctgcctaagtttttgcaaggatacagatgaaaaccaaaaacaatggataaggaaaacccagctttcttcgctatcaaacacaccacaagtgagtctgttagatgaaaaatgtttaactgaaagatacacacatctctcctgcaataaagtcttctgccaaccatggcagaaatgcatcgatgggacctgtacttgtaaactcccttatcagtgcccaaaggatggtacctcagtgtgttcaactaatgggagaagctacccaacttactgtcagcaaaagagttttgaatgtcttcgtccaggggcaaagtttttaaataatggaacatgcacaggtgganggacaatttagcatttncttaaatatnggaaanacccttcanagggaattgttgaagtaaaactttatacnccaagataagaaaantgttcatatgtnaaaaatcctggagcatattggaggctaatgtggnctgtgttgaccttggatttaacaa

SEQ ID NO: 5228 - DNA, 637 bp, Canis familiaris
  misc_feature (388)..(388): n comprises a, c, g, or t, or includes no nucleotide
  misc_feature (424)..(424): n comprises a, c, g, or t, or includes no nucleotide
  misc_feature (437)..(437): n comprises a, c, g, or t, or includes no nucleotide
  misc_feature (445)..(445): n comprises a, c, g, or t, or includes no nucleotide
  misc_feature (530)..(530): n comprises a, c, g, or t, or includes no nucleotide
  misc_feature (585)..(585): n comprises a, c, g, or t, or includes no nucleotide
  misc_feature (618)..(618): n comprises a, c, g, or t, or includes no nucleotide
  misc_feature (633)..(633): n comprises a, c, g, or t, or includes no nucleotide
aagaggggacgcccctgtggcggctgcagaagcttccaggcgagctgggcccgcagcttcttcacaaaataattgatggcatttgtggccgggcttaccctctctaccaggattatcacagtgtttgggattcaacagaatggaagaatgttctagaagatatcaccaaatttttcaaagctgtagttggtaaaaatttatctgatgaagagatatctcagcagttgaatcagttgaattcatttcatcaacaagctatcatgaaatgcttgaaaagtaggaaagatgagatcaagcaggctctgttaaaagaaatagttgatatttcttctgcacaactacaagattttgattggcagttaaagcttgcctgtcttagtgacaagancgctactttacaaaatgcccctcttaaacctttatnttagacataaaanaaaatggngaagtcaaaccgtattccgttgaaatgagtaaaagaagagctgcagaaacttaataagctccttggaagcagctaataagggggncctgccagttgaaatacctggaaatggcaaatacccacactgtctgggtccctgntcccccaaatgcagccgagttgaatcttgtggntccaaaccctggctntctg

SEQ ID NO: 5229 - DNA, 420 bp, Canis familiaris
  misc_feature (399)..(399): n comprises a, c, g, or t, or includes no nucleotide
  misc_feature (414)..(414): n comprises a, c, g, or t, or includes no nucleotide
tgtccaagagcttactgcttatgttttcttctaggatttttatggtttttggtcttacatcaaagcctttaatccattttgagtttatatttgcatctggtatacaaatatgatccagtttctttcttttgcatgtgaccatccacttattgaaaagactgtcttttcctcattgtatatttttgcttctttgcagaggaataattgaccatatatgcatgggtttagtcctggaatccattctgttccagaatgcatctattttaagtactattgtgtgtttacaaatatacctatgtaatcaccactgcagttgaggtctaaattatttccattgcactaaaaaagttcccttctgcttgatctgctttatttccccattgaattaatttttcctgntctaccaaatggatntagatt

SEQ ID NO: 5230 - DNA, 443 bp, Canis familiaris
  misc_feature (321)..(321): n comprises a, c, g, or t, or includes no nucleotide
  misc_feature (382)..(382): n comprises a, c, g, or t, or includes no nucleotide
  misc_feature (385)..(385): n comprises a, c, g, or t, or includes no nucleotide
  misc_feature (408)..(408): n comprises a, c, g, or t, or includes no nucleotide
  misc_feature (420)..(420): n comprises a, c, g, or t, or includes no nucleotide
  misc_feature (422)..(422): n comprises a, c, g, or t, or includes no nucleotide
ggctattactcttatcactcttctttttagacttcttccctgtgtcttttttgctgtttctctgaaacatgtattcttcttgagcaattttttcattgctcatatatcggagtagagagttttcataagttggggtgctttctcgtcttccttgactacttgatcttcctttctcatattcatagcaatacaagacagtatcttcctcgacaatattaaacctctttcgatattcctgatccagaaatgaatttggtgattcagatcccttatgcactggcttgccaaccatatgtcctctgaggtcttcacaaggaaggnttcctttttcatctctgggaatatatggttctgcaggaggaggggggatgtaaaaaacctnganagcaaaactggctctttttggtnggcggacctgtngngcttggaaggcgaacaaccct

SEQ ID NO: 5231 - DNA, 602 bp, Canis familiaris
  misc_feature (387)..(387): n comprises a, c, g, or t, or includes no nucleotide
  misc_feature (481)..(482): n comprises a, c, g, or t, or includes no nucleotide
  misc_feature (487)..(487): n comprises a, c, g, or t, or includes no nucleotide
  misc_feature (512)..(512): n comprises a, c, g, or t, or includes no nucleotide
  misc_feature (571)..(572): n comprises a, c, g, or t, or includes no nucleotide
  misc_feature (596)..(596): n comprises a, c, g, or t, or includes no nucleotide
  misc_feature (600)..(600): n comprises a, c, g, or t, or includes no nucleotide
taagcagcctctccccatctacctagcaactgtcttcatcaccaccccaattacggtcacagtgctaccagactatagatggtagctaatttttctttacctattttctaatgtcatgattcctgtttgcccaatggatcatttgtatgttaaccactgtatgtaaccaacccttatctggcaacataattgcagcacaataatgatttgcatgataccttgaaatttggggggagggggcatgccaagttgggcatcactttgtcttagcaattaatgggatattgataactaaaataagttaatattaagcaaggtgccggttgtacaatctctaatttgatcaatgtcttttcagcactttgagcatttacttagctcatttangctttctttgtagcgcaatgggttgggaaggaaaaagtgcatgccatcttttccttcactcctcttttcccaccctttacctttgcacataaannatttnggtttgcttccatcttttatgcagngcctggtttatttaaccaagtaatatcccttttgttgatgagctattgagaagctgcannagttgcttttaagattggtgttcntttnag

SEQ ID NO: 5232 - DNA, 559 bp, Canis familiaris
  misc_feature (396)..(396): n comprises a, c, g, or t, or includes no nucleotide
  misc_feature (452)..(452): n comprises a, c, g, or t, or includes no nucleotide
  misc_feature (457)..(457): n comprises a, c, g, or t, or includes no nucleotide
  misc_feature (459)..(459): n comprises a, c, g, or t, or includes no nucleotide
ttcaaaaatcagtgaatgttttactgttagcacatgtactttttagacaaaatcagatgaatgtgaaaaccagtgaccttccattctctattcttgggcttgtcaaatgtcagtaatttagagctagggctttccccctgaaatcgaggtagactatgtaatgtaagggtcacttaaagaaggcagattttatttttggtatatgggttgtaatagaaacattcctcctatggggaaaactagcttagcattacaaatttttgcaaacattcactgcagaaggggaattccattgtgttataaaccctaaggatttgttgctcttttcctgctttttaggcctgggtaacaatcttaccatcccttatttaccaaaagaacaaaagggactttganaaagctttataggttcaccgggttaagtttgtccaacaaggaacacttgtagaagnccccntnctttttatggggaatttgggctaactaagggaaaagctgtttgttgggctaatggtaaaaattgtcacataattagttttttggaagatggtaaacttaa

SEQ ID NO: 5233 - DNA, 242 bp, Canis familiaris
  misc_feature (5)..(5): n comprises a, c, g, or t, or includes no nucleotide
  misc_feature (13)..(13): n comprises a, c, g, or t, or includes no nucleotide
  misc_feature (56)..(56): n comprises a, c, g, or t, or includes no nucleotide
  misc_feature (140)..(140): n comprises a, c, g, or t, or includes no nucleotide
  misc_feature (153)..(154): n comprises a, c, g, or t, or includes no nucleotide
  misc_feature (204)..(204): n comprises a, c, g, or t, or includes no nucleotide
  misc_feature (237)..(237): n comprises a, c, g, or t, or includes no nucleotide
ccctncttaaacnactcctatagggaaagctgttcgcctgcaggtaccggtccggnattcccgggtcgacccacgcgtccgctgtttggaggtgctggagttggcaagacagtactgatcatggagttaatcaacaatgncgccaaagcccannggtggttactctagtgtttgctggtgttggtgaaaggacccatgaaggcnatagacttataccatgaaatgattgagtctggngttat

SEQ ID NO: 5234 - DNA, 398 bp, Canis familiaris
  misc_feature (379)..(379): n comprises a, c, g, or t, or includes no nucleotide
tttttttttttttttccacggaccactctattttaatatttttaagtagcataaatcataatggttcgtatactacactgtacaattatatactgttactttccaaagaaaattaacgtcttataggattttctgaaatggttactccattgggttaagagcttgaccctttagccatcgctacgacacatggcacacaatctaggaggatccaagccttccagttgtgcctgtttctgctgccatcgaggcaggagcctctcggagacctctcacggccccttccatctcctgtgccaggaaacaggctctgtaggtagatgtgtgccgatgagcgcagcttctgtgctttgctttcacaaaaccactcccctctaanaaaacttgcgcttcttcaa

SEQ ID NO: 5235 - DNA, 393 bp, Canis familiaris
  misc_feature (384)..(384): n comprises a, c, g, or t, or includes no nucleotide
ctcccccgcccggctctctgcgcccctcccgggcgccggggcggcggggccgtcggcgtgcggcccactccgtgcttccgtccgtgcacctgagtgcgcctgtgcgtccgccgctcgcggccaggcgcgcgccccgcgacaccgaggccgagcgggggcagggggttgcccgccatgaccccccggagcccggcgtgaggggccgagatgcggtgacccagcagcccctgccgctgtctgcttcttcgagcttcctcctctcactacaccccaaggggctcgccaccacctgccaccatgtcgacctcgtccctgcggcgccagatgaaaaacatagtccacaactactcggaggccgagatcaaggtcgagaaagcaaaaacnacgaaccct

SEQ ID NO: 5236 - DNA, 645 bp, Canis familiaris
  misc_feature (463)..(463): n comprises a, c, g, or t, or includes no nucleotide
  misc_feature (513)..(513): n comprises a, c, g, or t, or includes no nucleotide
  misc_feature (530)..(530): n comprises a, c, g, or t, or includes no nucleotide
  misc_feature (575)..(575): n comprises a, c, g, or t, or includes no nucleotide
  misc_feature (602)..(602): n comprises a, c, g, or t, or includes no nucleotide
  misc_feature (611)..(611): n comprises a, c, g, or t, or includes no nucleotide
ccgtcgaggaggcgctgccgctgctgccgccgccgctgctgccgccgccgcccgcgaagccggagctcgagccgcaggggggatgccgttctgagtgcctgactgcctcgccccgaaggatggcctctgatgggcattagaggcacagcagccccgggctcctgtcccgtccgtctgtctgttatcgtctgtccctcttgacatcaccgcagctccaccccctcccatcccagcccccaacgccagcttcctgtgggcccagagccggcatgaactctcccaccgagtcggatgggatgtcaggccgggaaccatccttggaaatcctgcctcggacccctctacacggcattcctgtggcaatggaagtgaaacccgttgcttgcttggaagcattgcccagcttcattaagggggtggggggaggaggcagccccaaccccgcggagctacggggggcttntggcaggccctgtggaccccgcacttgagggaagcagcagcttgcagcangagcttcttggcgcttnaacagcaacacaagctgaaaagcaagttcctgtttgccgattcanaaaagcatgacacctgacccggagacnagtcagttnagaacacctagcacacagaatgttgcggcaaaag

SEQ ID NO: 5237 - DNA, 379 bp, Canis familiaris
aaaggaaagaaacccaaggcggcagagtctgtcattgtgctcaatggcaccaaggaggatgtggaaacgctgaagaagaggatggaggaaacacaaaaggtgacaaacatgatgacctccagcgggcacgtttcatctgccccgtcgtgggcttagagatgaatggccggcacaggttttgcttcctgcggtgctgtggttgtgtgttttctgagcgagccttggaagagataaaagcagaagtttgtcacacatgtggggctgccttccaggacgacgacgtcattgtgctcaatggcaccaaagccaggagtcagtgaagaatccccaggaccatcaaaaattaaggcaatgaagcctgaaaaaaacaatcttgatt

SEQ ID NO: 5238 - DNA, 635 bp, Canis familiaris
  misc_feature (403)..(403): n comprises a, c, g, or t, or includes no nucleotide
  misc_feature (421)..(421): n comprises a, c, g, or t, or includes no nucleotide
  misc_feature (436)..(436): n comprises a, c, g, or t, or includes no nucleotide
  misc_feature (445)..(445): n comprises a, c, g, or t, or includes no nucleotide
  misc_feature (461)..(461): n comprises a, c, g, or t, or includes no nucleotide
  misc_feature (519)..(519): n comprises a, c, g, or t, or includes no nucleotide
  misc_feature (539)..(539): n comprises a, c, g, or t, or includes no nucleotide
  misc_feature (562)..(562): n comprises a, c, g, or t, or includes no nucleotide
  misc_feature (591)..(591): n comprises a, c, g, or t, or includes no nucleotide
  misc_feature (621)..(621): n comprises a, c, g, or t, or includes no nucleotide
tacaagattgagcacacagagacagatgccgtggaccccagaagcaacggtcggccccgcactgctgccgctgtcccgaaatctgcgaaatacatcgctcaggtgctgcaggattcagaggtggacggggatggggatggggctcccgggagctcgggggatgagcccccgttgtcctcgtcccaagatgaggagctgctgatgcctcctgatggcctcacggacacagacttccagtcttatgaggacagcctcatagagaatgagattcaccagtaaggggagggaggggccctggaggccacgccctgccccccaccccacccaccccccacggacactaaaaaaaaaaaaaacgctaataatttattagatctaaaagccctttcttccccatccttgnttttaattaaaggaattnaaacctggggatttnaccactctnccccccatggaggggngggagggaccccccccaaccttaattgaggaaaagccccagccggacccggggcaaanaggggtggcggacaggattncccaaataatgcccccaccccantattgtggtcaggaaagggtttttgaaancaaaaagggtcctggggccatgggttgganacttggccgggcaa

SEQ ID NO: 5239 - DNA, 415 bp, Canis familiaris
  misc_feature (247)..(248): n comprises a, c, g, or t, or includes no nucleotide
  misc_feature (279)..(280): n comprises a, c, g, or t, or includes no nucleotide
  misc_feature (299)..(300): n comprises a, c, g, or t, or includes no nucleotide
  misc_feature (351)..(351): n comprises a, c, g, or t, or includes no nucleotide
  misc_feature (360)..(360): n comprises a, c, g, or t, or includes no nucleotide
  misc_feature (396)..(396): n comprises a, c, g, or t, or includes no nucleotide
  misc_feature (406)..(406): n comprises a, c, g, or t, or includes no nucleotide
tggccgtctacaaggccggcgtgcgcgagggtgccgagcgcagcgtgagcagcatccgcgagcgcctctggccgctgctggagcaggcccgcgagcgcaacgccaaggtgggcgccctggccacgcagccgctgctcgagcgggccgacgccctgggccagcagctgcgcgggcagctggaggagatgagcaagccgggcccgcggccacctggaggagatgcgcgagcagatacaggaggtgcggnntgaagatggaggagcaggccgaccagatacnnccaaaaggccgaggccttnncaggcgcgcctcaagagcttggttcgagcccctgcttggaaagacatgcantcgccagtngggactggcttggttggaagaaaggagcaaggcggncctttggccnccattccac

SEQ ID NO: 5240 - DNA, 207 bp, Canis familiaris
ccctttttttttttttttaaagatttatttattcatgagacacacagaaagaggcagagacacaggcagacagagaagcagtctctctgtggggagcccaatgtggaacttgatcccaggaccctggaatcatgacctgaaccaaagggagacgctcggccactgagccacccaggtgtccccaaaccaattcttaaaaggatcaac

SEQ ID NO: 5241 - DNA, 356 bp, Canis familiaris
ctgatgtgcatttactgtgagcttttgcctgcctgtgctacttttacttgtaaagctagagtacccaagcttctgccttctggaatatagagaaatagtttcatccctgtgctaccccttgttctgtagttactctgatgatagccagtgggtttcttaaagtttgccagtattcttctctgatttgaatggttgggggaggggaagggaaagaacgtcctatttcttttatgatactgcaaattggctagtttaaaatgtatgtttatatttccttataattaaaatactgttcaatttgttttttatagacaaggaaaaatactttgcataaactgactccactattgaaaaag

SEQ ID NO: 5242 - DNA, 592 bp, Canis familiaris
  misc_feature (375)..(375): n comprises a, c, g, or t, or includes no nucleotide
  misc_feature (385)..(385): n comprises a, c, g, or t, or includes no nucleotide
  misc_feature (406)..(406): n comprises a, c, g, or t, or includes no nucleotide
  misc_feature (435)..(435): n comprises a, c, g, or t, or includes no nucleotide
  misc_feature (463)..(463): n comprises a, c, g, or t, or includes no nucleotide
  misc_feature (486)..(486): n comprises a, c, g, or t, or includes no nucleotide
  misc_feature (490)..(490): n comprises a, c, g, or t, or includes no nucleotide
  misc_feature (533)..(533): n comprises a, c, g, or t, or includes no nucleotide
  misc_feature (556)..(556): n comprises a, c, g, or t, or includes no nucleotide
cggaaacctctgggacttcttgtagcaccaggagagcttctgagcctcagggctgcagacaccccacccccttctacagcacctggtgcccgggtgataccccagccttctggcacccctcagtccttctgctccggctgcttctgccatcagtccactttcaggtggtggaccccagcctccaggccctgaccctgttggcgtgtgcacggaggatcccggcagactctgcagagctccctgagggtcaggagagttggagggtggaggtgatgacacccccagggacaggtggactcccatttcttgctactgtctgctctctgggcgtctgctgcagcctgagatgtgccctaagcccctcaaaacccaaancaagaatttnggaagccttttgccatttgantcaaaaccaaaagccttttaagcctttcnttcggtgggaagttgggggttggaagtntttgcctttacatggacccttgnaggnaggaagctggcacatttgcaccttggggctgggctcctttttntgtgccatggctttaaacacctngggagggccggggtcctgtggatccaagctttcccc

SEQ ID NO: 5243 - DNA, 563 bp, Canis familiaris
  misc_feature (371)..(371): n comprises a, c, g, or t, or includes no nucleotide
  misc_feature (397)..(397): n comprises a, c, g, or t, or includes no nucleotide
  misc_feature (411)..(411): n comprises a, c, g, or t, or includes no nucleotide
  misc_feature (436)..(436): n comprises a, c, g, or t, or includes no nucleotide
  misc_feature (456)..(456): n comprises a, c, g, or t, or includes no nucleotide
  misc_feature (467)..(467): n comprises a, c, g, or t, or includes no nucleotide
  misc_feature (476)..(476): n comprises a, c, g, or t, or includes no nucleotide
  misc_feature (490)..(490): n comprises a, c, g, or t, or includes no nucleotide
  misc_feature (533)..(533): n comprises a, c, g, or t, or includes no nucleotide
  misc_feature (548)..(548): n comprises a, c, g, or t, or includes no nucleotide
  misc_feature (551)..(551): n comprises a, c, g, or t, or includes no nucleotide
agggcctggtcaacctgcgctacctcaacctgggcatgtgcaacctcaaggacatccctaacctgacagccctggtgcgcctggaggagctggagctgtcaggcaaccggctggacctgatccgcccgggctcctttcagggcctcaccagcctgcgcaagctgtggctcatgcacgcccaggtggccaccattgagcgcaatgccttcgacgacctcaagtcgctggaggagctcaacctgtcccacaacaacctgatgtcgctgccccacgacctcttcacgcccctgcaccgcctggagcgcgtccacctcaatcacaacccctggcactgcaactgcgacgtgctctggctgagctggtggcttaangagacaagtgccaacaatacaaactngtttggcccggttncaccacaaaccggccttaagggccnttacatcggggagctggacnatcgcaacttnacctggttntgcgcccggtcatngtgggagccgcccacggacctgaatgttacaaagggcattggncgcggagcttaaatnttntaacggcacctc

SEQ ID NO: 5244 - DNA, 641 bp, Canis familiaris
  misc_feature (212)..(212): n comprises a, c, g, or t, or includes no nucleotide
  misc_feature (383)..(383): n comprises a, c, g, or t, or includes no nucleotide
  misc_feature (423)..(423): n comprises a, c, g, or t, or includes no nucleotide
  misc_feature (425)..(425): n comprises a, c, g, or t, or includes no nucleotide
  misc_feature (462)..(462): n comprises a, c, g, or t, or includes no nucleotide
  misc_feature (536)..(536): n comprises a, c, g, or t, or includes no nucleotide
  misc_feature (569)..(569): n comprises a, c, g, or t, or includes no nucleotide
  misc_feature (591)..(591): n comprises a, c, g, or t, or includes no nucleotide
ggccgccgcgggctctggtagtttcggcgccgctgacgcaggccggcgcgcacagccgggcccggcgtcctccgcagcagccgcgagccgcgcggccggtgccagacggttccggcggggggcaggggcggggcgccccggcggcggaggagccccggcgaggcccgtctggctgtgacgagttgccatggcatcctactacgacatcctanacgtgccgcgaagtgcgtccgctgacgacatcaagaaggcatatcgccggaaggcccttcagtggcacccggacaagaacccggataataaagaatttgctgagaggaagttcaaggaggtggccgaggcatatgaagtgctgtcagacaaacataaacgggaaaacttcnaaccgttttggccgggaagggcttgcttgggcaggaactngnccatcccggcagaaaccttgttggggtggggcccggnttaccttaccttccgaagccccgaggaggttttccgggagtttttttgggaagtggagacccttttccggagcntttttgataacctgggccctttttaaaagcttnaaagccggggttcccgaccctngggcccctttttaactttttttcttctttctgggggacttgattttcctc

SEQ ID NO: 5245 - DNA, 661 bp, Canis familiaris
  misc_feature (409)..(409): n comprises a, c, g, or t, or includes no nucleotide
  misc_feature (463)..(463): n comprises a, c, g, or t, or includes no nucleotide
  misc_feature (467)..(467): n comprises a, c, g, or t, or includes no nucleotide
  misc_feature (506)..(506): n comprises a, c, g, or t, or includes no nucleotide
  misc_feature (520)..(520): n comprises a, c, g, or t, or includes no nucleotide
  misc_feature (565)..(565): n comprises a, c, g, or t, or includes no nucleotide
  misc_feature (573)..(573): n comprises a, c, g, or t, or includes no nucleotide
  misc_feature (618)..(618): n comprises a, c, g, or t, or includes no nucleotide
  misc_feature (628)..(628): n comprises a, c, g, or t, or includes no nucleotide
  misc_feature (654)..(654): n comprises a, c, g, or t, or includes no nucleotide
aaccgaactggcagctccaggctctggagccatgccctgcacggaccctcatctttaccaagctcctgaggaatgaaaggaacccagggatcctcagaaggcagcagtgatgtggaccaaccccctggagcctgcacccttccaagggccataggcgacccagggaaccggagagagctccagaccggaaatcccagctttcctaaagtctctgtggatgctgacaaaaggagacccgaatttttggaagagcctgccctaggttacccagctgcagagtgattttcccctctggcattgaacctacccctccaacccccagccatccagagtaccatgaagaattatgaggatgtgtgacaagaagtattcaaatggtttgatcaacactggtggggagccttcgagnttttaagtttaatgaccattgcaatggggcaccggactactggttatattccanaggngtgtgcagggactaaatttacaagtgataatgaaaccanccggaagaatgaanaaataatgacccattcggggcttgtggaggacctgttcctaaaangggctttncgaggagtgtgcaagaaaatcgatcactttcctgaaaccttgctntgaacaaganacacagaatacttctggggctggganggcccct

SEQ ID NO: 5246 - DNA, 374 bp, Canis familiaris
  misc_feature (353)..(353): n comprises a, c, g, or t, or includes no nucleotide
gaggcgagaaggggctttcgagagccggctgcccgattctttgctttcccctccctctctcccgccccgtatctctcttacccctctcctgcctttgcttgcgcagccatggcggagccgtcggcggccactcagtccccatccgtgtcctcctcgtcctccggggccgaacccgcggcgcccggcggtgggagccccggagcctgccccgccctgggggcgaagagctgcggctcctcgtgtgcggtgcacgatctgattttctggcgagatgtgaagaagactgggtttgtctttggcaccacactgatcatgctgctctccctggcagctttcagtgtcatcagtgtggnttcttacctcatcctggctct

SEQ ID NO: 5247 - DNA, 530 bp, Canis familiaris
  misc_feature (429)..(429): n comprises a, c, g, or t, or includes no nucleotide
  misc_feature (448)..(448): n comprises a, c, g, or t, or includes no nucleotide
  misc_feature (475)..(475): n comprises a, c, g, or t, or includes no nucleotide
  misc_feature (515)..(515): n comprises a, c, g, or t, or includes no nucleotide
gcgatcgaaaccatcgtggccgccatgagcaacctggtgccccccgtggagctggccaaccctgagaaccagttcagagtggactacattctgagcgtgatgaacgtgcctgactttgacttccctcctgagttctatgagcatgccaaggctctgtgggaggatgaaggagtgcgtgcctgctatgagcgctccaacgagtaccagctgattgactgcgcccagtacttcctggacaagattgatgtcatcaagcaggctgactacgtgcccagtgatcaggatctgcttcgctgccgtgtcctgacttctggaatctttgagaccaagttccaggtggacaaagtcaacttccacatgtttgacgtgggtggccaacgcgatgaacgccgcaaaatggatccaatgctttaatggatgtggactggncatcattttcgtggggggncagcaacaagcttacaacattggtcanttcgggaggacaaccagaccaacccgcttgcaggaggttntgaacctttttaaga

SEQ ID NO: 5248 - DNA, 462 bp, Canis familiaris
  misc_feature (330)..(330): n comprises a, c, g, or t, or includes no nucleotide
  misc_feature (335)..(335): n comprises a, c, g, or t, or includes no nucleotide
  misc_feature (353)..(353): n comprises a, c, g, or t, or includes no nucleotide
  misc_feature (384)..(384): n comprises a, c, g, or t, or includes no nucleotide
  misc_feature (389)..(389): n comprises a, c, g, or t, or includes no nucleotide
  misc_feature (411)..(411): n comprises a, c, g, or t, or includes no nucleotide
  misc_feature (416)..(416): n comprises a, c, g, or t, or includes no nucleotide
  misc_feature (419)..(419): n comprises a, c, g, or t, or includes no nucleotide
aggcgccggcccccgcagctgctgcagaaggaggccagcctgccgcccccagtgcccccgggagctggaccaagtctcagagcctggacccgtttgctgacctcggtgacctcagttctggcctccaaggctcaccggctggatttgctccaggggcttttggcgccaagacggccccccctcccacgggcggcagctcctggcagcagacgggtcggcccccggcccagggcaccccgtggcccccccaggccaagccgccccccaaggcctgtccgcagccaaggcctaactatgctgccaacgtgagcgtgattggcggccgaaaangaganaggggttcgggcccccancttttggcaaaaaaccgaaaagtgttccganagcgnattttgaggacttgttgttccnacaanggnttttttttccaaaggtttaccgggaaggggccaaggaccattg

SEQ ID NO: 5249 - DNA, 366 bp, Canis familiaris
aaccactgaatttcttgttttatgttgtgcttatgtgaactccttggtgaaggtcccattttccttggataatgtgtagttatatgatctttttaaatgtacagatattttgctataaaattggtgcagttttttatggtttttacactttaattcccacttaagcctttgggtaatattgtaaatattgtttaaaaatgcatcagcctgtgctatacaatctgaatgttattttaacttatagtttcttttttaatatatatatttaactacaaggacagtttagggatcagttacatttcactttagcatacctatttacaaaaaattacttttaaaactgccacctgctagcacatttccatg

SEQ ID NO: 5250 - DNA, 677 bp, Canis familiaris
  misc_feature (444)..(444): n comprises a, c, g, or t, or includes no nucleotide
  misc_feature (450)..(450): n comprises a, c, g, or t, or includes no nucleotide
  misc_feature (468)..(468): n comprises a, c, g, or t, or includes no nucleotide
  misc_feature (472)..(472): n comprises a, c, g, or t, or includes no nucleotide
  misc_feature (541)..(541): n comprises a, c, g, or t, or includes no nucleotide
  misc_feature (560)..(560): n comprises a, c, g, or t, or includes no nucleotide
  misc_feature (572)..(572): n comprises a, c, g, or t, or includes no nucleotide
  misc_feature (577)..(577): n comprises a, c, g, or t, or includes no nucleotide
  misc_feature (613)..(613): n comprises a, c, g, or t, or includes no nucleotide
  misc_feature (630)..(630): n comprises a, c, g, or t, or includes no nucleotide
  misc_feature (633)..(633): n comprises a, c, g, or t, or includes no nucleotide
  misc_feature (652)..(652): n comprises a, c, g, or t, or includes no nucleotide
  misc_feature (670)..(670): n comprises a, c, g, or t, or includes no nucleotide
ggtcttgatttctcagatcgtattggaaaaaccaagagaacaggatatgaatctggagaatatgagatgcttggagagggtctaggagtgaaggagacaccccagcaaaagtaccagcgactactgcatgaggtccaagagctgacaactgaagttgagaaaatcaagacatcggtgaaggagtcagccactgaagagaagctgaccccagtggttttggctaagcagctggcagccttgaagcagcagctggttgcttcccacctggagaagctgctgggaccagatgcagctatcaaccttactgaccctgatggagctctggctaagcgcctgctgctgcagctggaagcaacaaaaaacagcaaaggaactggttcagggggaaagaccaccggtgggactcccgtagatagtaacctttgtcacttacgaactacattnttcggnctgaacaaggacaagttntctnaacttgccaaagttgcagaactttgagaagcgccttgacagactggaagcccttgtacgctttgatcangacctcaaaatcccctttnacaagtctacanggagncttgtcttatggagactgtaaactgttcagcaaagngacgccttgacctccanttntggacaaatggaggttcgntcagatgtctggcaaggngacaaat

SEQ ID NO: 5251 - DNA, 658 bp, Canis familiaris
  misc_feature (370)..(370): n comprises a, c, g, or t, or includes no nucleotide
  misc_feature (426)..(426): n comprises a, c, g, or t, or includes no nucleotide
  misc_feature (438)..(438): n comprises a, c, g, or t, or includes no nucleotide
  misc_feature (479)..(479): n comprises a, c, g, or t, or includes no nucleotide
  misc_feature (518)..(518): n comprises a, c, g, or t, or includes no nucleotide
  misc_feature (544)..(544): n comprises a, c, g, or t, or includes no nucleotide
  misc_feature (552)..(552): n comprises a, c, g, or t, or includes no nucleotide
ccactgctcaccccccgagggcaccatcaccaaagaaggcatgctgcattacaaggcaggcacctcctacttgggcaaagagcactggaagacttgcttcgtggtactcagcaacgggatcctctaccagtatcctgaccgcaccgatgtcacccctctgctctcggtgaacatggggggggagcagtgcggtggctgtcggagggccaacaccacggatcggccccacgccttccaggtcatcctcgccgaccggccgtgcctggagctgagcgccgagagcgaggctgacatggccgactggatgcagcacctgtgccaggctgtgtccaaaggggtcatcccccagggggtaacttccaagccctgnattccctggttgctaatgatcaccgatgaccgctttttacgtgccacgaggactgncagactagcttnttccgtcttgggcacaaccaactggccgacataacgccgtntcaccggccctggcaaggagtactgtgtcttgacttttncaagacaagcaagaagcctttcttgncctgggtnattacttgagctgacgtctgaactggacggttctgtctgccttggctttggtggaaaacatttacaagtggactgccacaagccatcaggaactcaacagaagttg

SEQ ID NO: 5252 - DNA, 659 bp, Canis familiaris
  misc_feature (284)..(284): n comprises a, c, g, or t, or includes no nucleotide
  misc_feature (405)..(405): n comprises a, c, g, or t, or includes no nucleotide
  misc_feature (481)..(481): n comprises a, c, g, or t, or includes no nucleotide
  misc_feature (503)..(503): n comprises a, c, g, or t, or includes no nucleotide
  misc_feature (551)..(551): n comprises a, c, g, or t, or includes no nucleotide
  misc_feature (573)..(573): n comprises a, c, g, or t, or includes no nucleotide
  misc_feature (579)..(579): n comprises a, c, g, or t, or includes no nucleotide
  misc_feature (591)..(591): n comprises a, c, g, or t, or includes no nucleotide
  misc_feature (606)..(606): n comprises a, c, g, or t, or includes no nucleotide
  misc_feature (621)..(621): n comprises a, c, g, or t, or includes no nucleotide
tctccctgctgcggagcagaccatgccgtcttcaccaaggtcacaggggcatttcattgctgggcggggttgaggtttgctttggttcttgtttcagcccgatatgtacagaatgttcaaaacagtctgcacctttgatgtgatattgcttttccaaagccaccaatccattttgtggattttatgtgtctgtggctttaataatcatggtaacaacaataatccctttttctccgttttgcttgcaaggaaacatgcctatctttcttagttttttgttttgnttttttctttgagaagaagagtaaaatagtcacattttaatactactctagttaggacagacttgtgcttttatcttgagtaaaaaggtaactattggaaatcacctacccagtaaaaganctaaagtttaattttcccatggataggggaggaaccctggtcttgctgagttgagttgggacaaggatgtcactgnctttttttttttcccttccctntgttataaaagttaaagcacaccctcactccaagagcttaaaaataantaaatggctttgagtagagtanaaatanctgtcttgtttntggatgcaaccgcanaagggaacaaaagangacttaatttaaacttttgccgagttttgtttttttaa

SEQ ID NO: 5253 - DNA, 504 bp, Canis familiaris
  misc_feature (465)..(465): n comprises a, c, g, or t, or includes no nucleotide
  misc_feature (472)..(472): n comprises a, c, g, or t, or includes no nucleotide
  misc_feature (475)..(475): n comprises a, c, g, or t, or includes no nucleotide
ccccacccccctactcagaggtgtgacgcccaccaggccccagccctggtgctgggaggggcggagctgtctcatcatccgcttctctgctttggtggccgcctcagcttgggtgacccacccagctgacttcaggacaacctgcttgtgtccccctcgctggcctgcttttcccatggggcctgggagatgctcacaactgggtcaacttcagtctgaaagactccttgaatctctcggaaatttggtccaacaggcctcggcttatttttgataggccccaacacttgttcaaaccattcatcgtcctgaattcagtgagtttgctgaaaccacttcaacgtgaccagtttaactgcgtggctgacaaatgaaaagcacccttctcggtgcagggaaactaagctcggtcagacaagccacggtccgtcgcattgggttttagaccgttgtctgttacacggnaacgcanccnagtcatcatgccttggtccttcccacaaa

SEQ ID NO: 5254 - DNA, 674 bp, Canis familiaris
  misc_feature (419)..(419): n comprises a, c, g, or t, or includes no nucleotide
  misc_feature (424)..(424): n comprises a, c, g, or t, or includes no nucleotide
  misc_feature (469)..(469): n comprises a, c, g, or t, or includes no nucleotide
  misc_feature (471)..(471): n comprises a, c, g, or t, or includes no nucleotide
  misc_feature (595)..(595): n comprises a, c, g, or t, or includes no nucleotide
  misc_feature (614)..(614): n comprises a, c, g, or t, or includes no nucleotide
  misc_feature (623)..(623): n comprises a, c, g, or t, or includes no nucleotide
  misc_feature (666)..(666): n comprises a, c, g, or t, or includes no nucleotide
ctgaccctgtggtgggcagtgtcgtccgggcggcgctgcggagacctccgcccaggacggctccccctccccgggcctctcccctcttacccgcgagtcccctcgcctcgtgggcctatcggatctgttatcgcggggtgaggtgagagcaggcccggggagggtagtcacggctgaggagccgcagtcgcggtcaagatgatagaagtactgacaacaactgaatctcagaaactgctacaccagctgaatgccctattggaacaggagtccagatgtcagccaaaggtctgcggcttgagactaattgaatctgcacacgataatggcctcagaatgactgcaagactaaagggactttgaaagtaaaagatcttcttaagtctaacttaagttctttgcttttgacacggagacanttttntctacttgggaattaactggacagaattccttgtccaaaatgaangnacagcccaagcaccttggcttgtgttgggctgagctgttctatttggcttgttaaatcaatagaagaggaaaggaatgtcccttggcaactgacttgatccgaataaccagtataggttacggnttcagattgatgaaatggnaaaaatttnttggaaaaagtgtgttgaaaataaaactctattgctttaattntgaactta

SEQ ID NO: 5255 - DNA, 671 bp, Canis familiaris
  misc_feature (549)..(549): n comprises a, c, g, or t, or includes no nucleotide
  misc_feature (642)..(642): n comprises a, c, g, or t, or includes no nucleotide
  misc_feature (660)..(660): n comprises a, c, g, or t, or includes no nucleotide
ggggatcctgcgctgcttttggcgttctcgccgctgttagctccaccggcgggaacgagtaaagtctgaaccggcttctccatggcctgggcatcagttcctggctgagccattttcttttttgactaaaagcccccgcccagaggccgattcgtcgcggcggcggtggggatcgcaggtcgctcaggcttgcagatgggtcaggggctgtggagagtggccagaaaccagcagctacagcaagaaggttatagtgagcaaggctacctcagcagagaccagagcaggaggatggctgccaacaacatttctaataccagtcatcgtaaacaagtccaaggaggcattgatatatatcatcttttgaaggcacggaaatctaaagaacaggaaggattcattaatttggaaatgtttgccccctgagctaagctttaccatcttgtcctacctgaatgcaactgacctctgcttacttcatgtgtttggcaagacttgcaaatgatgaacttctttggcaagggtgtgtaaatccacttgggtcactgntcatatataataagaacccacctctaggatttttttcaaaaatttatatgcactggatgaagcagcctacctttatgccaccagaggaggagngactcttatgtcaaggtntctaatgctac

SEQ ID NO: 5256 - DNA, 531 bp, Canis familiaris
  misc_feature (52)..(52): n comprises a, c, g, or t, or includes no nucleotide
  misc_feature (366)..(366): n comprises a, c, g, or t, or includes no nucleotide
  misc_feature (390)..(390): n comprises a, c, g, or t, or includes no nucleotide
  misc_feature (393)..(393): n comprises a, c, g, or t, or includes no nucleotide
  misc_feature (456)..(456): n comprises a, c, g, or t, or includes no nucleotide
tgtgaacaccatggccagctcggcagtggtgaactaaggagcaccagcgcangacctggtgctgaccagagccacctcttcctcagcctggcttgcacgtccaggccctttcccaggaggcacagctgactgagggccaggcaccgggtacctcagggtgagcaaaaggaactgggcgagggcaaagcccctaccccctccaccccactcctaccctgaagctccccaactgcacctttgttgacttgtggtagctaggaggctcttgagatgaaggatgatgtcctggcaactgaggctggggccagaaccttgggcttgagtaaggagcaaggtgggaagaaaatgttctggtcttaaacccanctatgtcttcaagaagctttggcnttntttccttggctttcctctttttgaagctataaattttatgggacccctggatctagggacagngtttccttacatatgtagagaaactattgtaaccaccttttttttaacagcaataaaagagggggtcctaagcaa

SEQ ID NO: 5257 - DNA, 374 bp, Canis familiaris
tgccgcggtcgggtccgcggcctgcgctgtagccgtcgcggttctttggaagcagcaactcccctcccccaccccggtcccggtcccggtccccgcccagccgctgacgtgaagatgagcagctcagaggaggtgtcttggatatcctggttctgtgggctccgtggcaatgaattcttttgtgaagtggatgaagactacatccaggataaattcaatctcactggactcaatgagcaggtgcctcactatcgacaagctctagacatgatcttggacctggagcctgatgaagagctggaagacaaccccaaccagagcgacctgattgagcaggcagccgagatgctttatggattgatccacgcccgcta

SEQ ID NO: 5258 - DNA, 286 bp, Canis familiaris
  misc_feature (66)..(66): n comprises a, c, g, or t, or includes no nucleotide
  misc_feature (75)..(75): n comprises a, c, g, or t, or includes no nucleotide
  misc_feature (83)..(83): n comprises a, c, g, or t, or includes no nucleotide
  misc_feature (113)..(113): n comprises a, c, g, or t, or includes no nucleotide
  misc_feature (124)..(124): n comprises a, c, g, or t, or includes no nucleotide
  misc_feature (156)..(156): n comprises a, c, g, or t, or includes no nucleotide
  misc_feature (206)..(206): n comprises a, c, g, or t, or includes no nucleotide
  misc_feature (211)..(211): n comprises a, c, g, or t, or includes no nucleotide
  misc_feature (247)..(247): n comprises a, c, g, or t, or includes no nucleotide
  misc_feature (260)..(261): n comprises a, c, g, or t, or includes no nucleotide
aggtgaagcccaccccccagctgctgccaccgacggagaggcccatgtcaccccgttcgctgccgnagtcacccncacaccgnggttttgcctatgtgctaccccagcccgtngagagtgatgnagggccgccgacccccacggtcgtacccccgncagtgcccaccctgtgcctgcctccgtaggccgacgtggagccggtcggnccaanaagcagcgcccacagactgaaccgatacacggtatncgacagagagctnncatcgggacgagcttttggtgccag

SEQ ID NO: 5259 - DNA, 665 bp, Canis familiaris
  misc_feature (417)..(417): n comprises a, c, g, or t, or includes no nucleotide
  misc_feature (522)..(522): n comprises a, c, g, or t, or includes no nucleotide
  misc_feature (663)..(663): n comprises a, c, g, or t, or includes no nucleotide
acgcgtgggagaatcttacttttgtggcatttcagcttgcacaagtctgtgcaatggacagtcccaaaagacaaaaactgagaagagggctttaaaacgaaggcgatctaaagtccaagaccaaggaaaattgataaaaactctaatacagactaagtcaggatcattgccgagcctgcatgacataatcaaaggaaacaaagagatcaccgtgggaacatttggtgtcacagcggtctcgggacatatataaaataatagaacttttcatactggagacttttgttgttctttgaagaacagtctgtggtatttgaagggtttgggggagggagaaaatattaatgggaaaagtattcagaaattatggtttctgcctttttaaaaaaaagtaggtgggattgtgtcaatcttggntaatgagctgcagttttacaaggcttgatcactttctacaaggacaatggtagacattttataaaagatttttttttccagattaattactgggacaaacgtaanttggaagccccagttcctttgggtgggataggaatgaaagcctaaacctcttcctttactttggtcctatttcttgcaccttccatattatgtgcctttgctattataatgcccctggagaggagggagacttttttttcntt

SEQ ID NO: 5260 - DNA, 625 bp, Canis familiaris
  misc_feature (409)..(409): n comprises a, c, g, or t, or includes no nucleotide
  misc_feature (427)..(427): n comprises a, c, g, or t, or includes no nucleotide
  misc_feature (438)..(438): n comprises a, c, g, or t, or includes no nucleotide
  misc_feature (444)..(444): n comprises a, c, g, or t, or includes no nucleotide
  misc_feature (555)..(555): n comprises a, c, g, or t, or includes no nucleotide
  misc_feature (600)..(600): n comprises a, c, g, or t, or includes no nucleotide
aatagcaaaggttctattcaacaatatagttcatggcttttgtggaggcttctgaaaccttttaagccaggtgactaatattttatttttgaaggaaaattgcttatactaagttcagattcatgcagctgagcctttgtttttcaagctgaagatcacaaaatatcaacggttgtttattttgttttcaagtgcacattctttattttcctcccagctattcctttatgatgacttccatttcttgtttcaccccccgcccttttttttttaaagattttatttatttattcatgacagacacagagaggggcagagacacaagcaggctccatgcagggagcctgacatgggactcggtcctgcgtcttcaggatcaagccctgggctgaaaggcgggcttaaatcncttggccatggggctggnccccctccctntatttnaaaaagttgggaaacttatggttccaaggaaaaacttatttagtcttttacacttaaccacctttcagactgctcattttaaataagctaagtgaaaaaaataaaaatttntgagatcaaatattatcaatcagatttgcaataaatctgctatgnaaatctttttggtgagaaaagtcag

SEQ ID NO: 5261 - DNA, 674 bp, Canis familiaris
  misc_feature (517)..(517): n comprises a, c, g, or t, or includes no nucleotide
  misc_feature (574)..(574): n comprises a, c, g, or t, or includes no nucleotide
  misc_feature (630)..(630): n comprises a, c, g, or t, or includes no nucleotide
  misc_feature (656)..(656): n comprises a, c, g, or t, or includes no nucleotide
  misc_feature (663)..(663): n comprises a, c, g, or t, or includes no nucleotide
aattggaagaaagatgtggttggctttcagctccacaggcctatgtgagtgaaaagcatgaaggcaataagatcatcgcttttgagagagcaggtcttcttttcattttcaactttcatccaagcaagagctacactgattaccgagtgggaacgacattgccaggaaaattcagaattgtgctagatacagacgcagcagaatatggaggacaccagagattggaccacaataccgattttttttctgaagattttaaacataatgagcgtcccttttctcttttggtgtacattccgagccgagtgggcctcatcctgcagaatgtggatatgcccaactgaacccacgggatttcagcttccaggaaaatgtgcgcttgttttcgtcttctcattgtcacagaagcttctagtgtgcaagcttttcaaaaatacaagttgtctagacgaaacgtcagatgtctgaaatttaatattggtttatgcaaatgaatgtcacattttgctttaagaantgcaaggggggaatagttttgaaatttcaaggaagctagactgtatttttcagcatntgagcactccgattcccaaatgaagattatatgtaaggcttaaacaacttactttntaggcggtatttgatacttaaaggtnaaattgnatatgtgcatg

SEQ ID NO: 5262 - DNA, 663 bp, Canis familiaris
  misc_feature (514)..(514): n comprises a, c, g, or t, or includes no nucleotide
  misc_feature (548)..(548): n comprises a, c, g, or t, or includes no nucleotide
  misc_feature (598)..(598): n comprises a, c, g, or t, or includes no nucleotide
  misc_feature (655)..(655): n comprises a, c, g, or t, or includes no nucleotide
aagaggacccaccccactgttccagggattccagggggaaccagggctggggcaggcaaaataggtcgaatgattgctgaagaaatcatggagatccacagaataagagggtcatcaccttccagttgtggctccagcccattaaatatcacaagtacacctccccctgatgcctcttctccaggaggcaagaagattttaaatggagggactccagacattccttccagtggcctactaccagggcaggctcaggaaaatccaggttatccgtactcttctgatagttcctctattcttggtgagaaccctcacataggcatagacatgatagaaaacgaccaaggctcaagtagtcccagtaatgatgaagcagcaatggctgtcattatgagtcttcttggaaacaaatgctgggctgggtggtcctgttgactttagcgacttgcatggccgctgtaaacgctactgttgctttggcaacaagctacagtatcaaaagtgcattactggnggagttttacaagtctgtgaacttactggataangagagaacagcttttatgtctgtcttcataaaagcatctaaagccattgntcaagtcaatcttctattgtacttcaacaaagggactaacctgctcagggttctaanatgatatg

SEQ ID NO: 5263 - DNA, 560 bp, Canis familiaris
  misc_feature (305)..(305): n comprises a, c, g, or t, or includes no nucleotide
  misc_feature (410)..(410): n comprises a, c, g, or t, or includes no nucleotide
  misc_feature (431)..(431): n comprises a, c, g, or t, or includes no nucleotide
  misc_feature (444)..(444): n comprises a, c, g, or t, or includes no nucleotide
  misc_feature (450)..(450): n comprises a, c, g, or t, or includes no nucleotide
  misc_feature (485)..(485): n comprises a, c, g, or t, or includes no nucleotide
  misc_feature (504)..(504): n comprises a, c, g, or t, or includes no nucleotide
  misc_feature (517)..(517): n comprises a, c, g, or t, or includes no nucleotide
  misc_feature (533)..(533): n comprises a, c, g, or t, or includes no nucleotide
  misc_feature (550)..(550): n comprises a, c, g, or t, or includes no nucleotide
cagttgttgccaacctgaatccgcggtgttcctgtggctgtcgctgctaacttgctgcgcatcttgctgcacacagagctgtcaccatgccccactcgtacccagccctttctgctgagcagaaaaaggagttgtctgacatcgccctccggattgtggccccaggcaaaggcattctggctgcagatgagtctgtaggcagcatggccaagcggctgagccaaattggagtggagaacacagaggaaaaccgcaggttgtacccgccaggtcctgttcagtgctgatgacccgtgtgaaaaaantgcatttggaggtgtcaatcttctttccttgagaacacttttaccagaaaggacgataatggtgttcctttcgttcgtaccattcaagataaaaggcatttgtcntgggcatcaaaggttgataanggggtagtggctnttacanggacccgtggagaaacaccctcaaggctggtgggntttggaacctttgcccaanaaaaaaggatggngccgcttttcaagggngttggtgctgaaaaaangacccaccct

SEQ ID NO: 5264 - DNA, 396 bp, Canis familiaris
  misc_feature (237)..(237): n comprises a, c, g, or t, or includes no nucleotide
  misc_feature (263)..(263): n comprises a, c, g, or t, or includes no nucleotide
  misc_feature (318)..(318): n comprises a, c, g, or t, or includes no nucleotide
  misc_feature (362)..(362): n comprises a, c, g, or t, or includes no nucleotide
  misc_feature (371)..(371): n comprises a, c, g, or t, or includes no nucleotide
cagttgttgccaacctgaatccgcggtgttcctgtggctgtccgctgctaacttgctgcgcatcttgctgcacacagagctgtcaccatgccccactcgtacccagccctttctgctgagcagaaaaaggagttgtctgacatcgccctccggattgtggccccaggcaaaggcattctggctgcagatgagtctgtaggcagcatggccaagcggctgagccaaattggagtgganaacacagaggaaaaccgcaggttgtnccgccaggtcctgttcagtgctgatgaccgtgtgaagaagtgcattggaggtgtnatcttcttccatgagacactttaccagaaggacgataatggcgntccttttcntcgtaccattcaagataaaaggcat

SEQ ID NO: 5265 - DNA, 412 bp, Canis familiaris
  misc_feature (358)..(358): n comprises a, c, g, or t, or includes no nucleotide
acccaccccgagcctggcacataggcacccggccttgcatctcagaaggaagtggagggggcattgctgttccccagaaacccactctgcccccaccctcttttgtacccttccccctcattcgctagggctgtggcttctgacttctagaagacttaaggctggtctgtgttcgcttgttgcccacctttggctgatgcccagactccctgggcacttgctgcctgatgcctacccctgccagtcattcccccatttacccagagggaggagagatgtgagagagtttgcattggataatccaataaggggggggggcaaaggtttatccgtcacaattctactccccagccccttnttctgggcacaaaaaacccacaaggcaggacccttaaaatttggggaaaggagg

SEQ ID NO: 5266 - DNA, 589 bp, Canis familiaris
  misc_feature (545)..(545): n comprises a, c, g, or t, or includes no nucleotide
cctcggcggcggcggcgctcacaacccgaggagggcggcttgcctggaagcggcggcggccaccgagacccacgcgaggcgcgtcccctcggcctccccgcgctcccaggccgcagcgcccgcgcccctagagctcgctcgcccgctcgcccgccttcctcctctgcggccggctgcgccatggcgttggcgttggcggcgctggcggcggtggagccggcctgcggcagccggtaccagcagagaaattaatggacttacgaaatgagtacctgcaagcagatgaggccaataaaagatttttggaacagagaaattagatggatgtaacaagatgacatgtactggctgtatgcagtatttctgctggatttgcatgggttctctctctagaacaaacccttacaaacatttactgatcctgcttccccgggttttaatcggcattctgacccaaaagtccacgctctaaaccaccaagtgatgatgccttctggtacctttgacaacaactgtgaacaacataagccaaaagcccatgcctntgaccaacagttgggaactgggttccaagaatcctaagctgagt

SEQ ID NO: 5267 - DNA, 187 bp, Canis familiaris
aggagctgtgcactcccttcctcactttggactgctgcttttctgagctcctctgcccccttctgcctctgaaaagctgctcgggggtggaatttacaaaatccctccccccaacttcccagggttttctcattgtctttttgcatcaggactttgtattgagatattaaagagatttaacttgggt

SEQ ID NO: 5268 - DNA, 544 bp, Canis familiaris
  misc_feature (381)..(381): n comprises a, c, g, or t, or includes no nucleotide
  misc_feature (383)..(383): n comprises a, c, g, or t, or includes no nucleotide
  misc_feature (405)..(405): n comprises a, c, g, or t, or includes no nucleotide
  misc_feature (458)..(458): n comprises a, c, g, or t, or includes no nucleotide
  misc_feature (478)..(478): n comprises a, c, g, or t, or includes no nucleotide
  misc_feature (505)..(505): n comprises a, c, g, or t, or includes no nucleotide
aaccatacgaaatttttccaccacatgcaccctctaagccagcaagatttcctctttgcaaaatcatatttttgtgggaatgggccctgctttttgtggcagggcccgttctgatcaataaaggatcgtgaaaaagtagggcctcggctgtttcctctgcgggccccagtcctacctcacctcccaggggaagaggcagtggcgtgagggggatggggagcctgggactgagtctcccccttgtcacctttgggatttgggttcactggtgataaggctctccctgagcttccagcctatgctcagatcgagaatctgaacccaccaactgcccagaaatcaggagagcaagccatacattcattctgatcaagccttaantnaggctttgtcggaagtggaatnttccttgaaaaccttttggttaacccagcccaacattaccttctggttccaanggggaccatcacaacccttncaaggcaggtcagacaaatccaaaagngggatcctccacctttcccgacctccctttgattgctgg

SEQ ID NO: 5269 - DNA, 428 bp, Canis familiaris
  misc_feature (337)..(337): n comprises a, c, g, or t, or includes no nucleotide
  misc_feature (373)..(373): n comprises a, c, g, or t, or includes no nucleotide
  misc_feature (375)..(375): n comprises a, c, g, or t, or includes no nucleotide
  misc_feature (385)..(385): n comprises a, c, g, or t, or includes no nucleotide
  misc_feature (399)..(399): n comprises a, c, g, or t, or includes no nucleotide
  misc_feature (412)..(412): n comprises a, c, g, or t, or includes no nucleotide
  misc_feature (414)..(414): n comprises a, c, g, or t, or includes no nucleotide
acgcgtgggtttttttttttttttatttgtgcaccatgaaacttgttatttattcacttcaattctgcgtttacacaaaagtgctgtaataaaatatctgtacactacttctgttacaaatatagataatatttaaagtgactttatatattctaatgtaggagtttcacgctctaaaatgggaatgaacacatgataattcctcaccagttgtctcaataaacagctccatctgtttcctttagtcttaaactattgtattataagatgttaatataaggcaatgaaatgaagttatgttaatccccttaatttttctatcaatttactaatggcncacaaccaaaataattactaacacattgcttttttntntgtcatttanaataaaagtaattngaaaaccaaattngncaggaacgcctaac

SEQ ID NO: 5270 - DNA, 675 bp, Canis familiaris
  misc_feature (367)..(367): n comprises a, c, g, or t, or includes no nucleotide
  misc_feature (413)..(413): n comprises a, c, g, or t, or includes no nucleotide
  misc_feature (420)..(420): n comprises a, c, g, or t, or includes no nucleotide
  misc_feature (561)..(561): n comprises a, c, g, or t, or includes no nucleotide
  misc_feature (589)..(589): n comprises a, c, g, or t, or includes no nucleotide
  misc_feature (613)..(613): n comprises a, c, g, or t, or includes no nucleotide
  misc_feature (622)..(622): n comprises a, c, g, or t, or includes no nucleotide
  misc_feature (658)..(658): n comprises a, c, g, or t, or includes no nucleotide
  misc_feature (661)..(661): n comprises a, c, g, or t, or includes no nucleotide
tgccaatcatggaggtgatataatagactatttgcttaaccagcttaagaatgccagcaatgatatcgttcgacatggtggcagtctgggccttggtttagctgccatggggactgcacgccaagacgtgtatgatttgctaaaaacaaacctttatcaggatgatgctgtgacaggtgaagcagctggcctggccttaggtttggttatgttgggctctaaaaatgcccaggctattgaggatatggttggctatgcacaggaaactcagcatgagaagattctgcgtggtcttgcagttggcattgcattagtgatgtatgggaggatggaggaagctgatgctctcattgaatctctctggcgngataagggcccaattctttgaccaatcttggggatgtacactgaanccatggnttattgtggctcgggtaacaacaaagctattcgacgcctgctacacgttgctgtaagtgatgttaatgacgatgtccggaggcagcagtagaatacttgggttcattctgttcaggacccctgaacaggccccagcgttgnttcattgttgcagagagttacaatcctnatgtccttatggacttgctatggncctggcatntgctgtctggtccaggaacaaggaacaatcaatttntanaccgtgacaatgac

SEQ ID NO: 5271 - DNA, 660 bp, Canis familiaris
  misc_feature (361)..(361): n comprises a, c, g, or t, or includes no nucleotide
  misc_feature (388)..(388): n comprises a, c, g, or t, or includes no nucleotide
  misc_feature (419)..(419): n comprises a, c, g, or t, or includes no nucleotide
  misc_feature (437)..(437): n comprises a, c, g, or t, or includes no nucleotide
  misc_feature (447)..(447): n comprises a, c, g, or t, or includes no nucleotide
  misc_feature (557)..(557): n comprises a, c, g, or t, or includes no nucleotide
  misc_feature (615)..(615): n comprises a, c, g, or t, or includes no nucleotide
  misc_feature (619)..(619): n comprises a, c, g, or t, or includes no nucleotide
  misc_feature (642)..(642): n comprises a, c, g, or t, or includes no nucleotide
aaaaaaaaaacccaaaacataaaccctctctaatcagcccccacctcaaaaagtaggggatgaggagaagtgattatctgctgtgagtagaatttgtgtaaatgttatgcacatgcaccaacccacacacagagtaaatcttttatcagctcaaaattgctgtttaatgcagagaatgattgtcttccgagtttttagttcttttttttttaactgtgttaaagtacttgaaatgtatcaactgctgactatcctttaaaaacaaaacaaaaccatttgagttgtattacagaggttgacattgttcggggatgggacaaagctttcttcaattcttttcataccacttaatgattttggngcaggcacttgaaattttcttaattantccgggaaatttaaaatccacctttcacagnatgagcataaagcccagnggcaccaagnggctgaatacaatcaaatgatattttatagcacttgactgtctgaagaaccttgggagttttaaatgatgacttcattgagcttcattcagcctgaaataaaaatgtgtntgatagatctacagcaagtgcattttgactggaaatttgatatgacctattcttactnattnttggctcttgggacatacaaaanctgaatttgtttccggcg

SEQ ID NO: 5272 - DNA, 625 bp, Canis familiaris
  misc_feature (434)..(434): n comprises a, c, g, or t, or includes no nucleotide
  misc_feature (445)..(445): n comprises a, c, g, or t, or includes no nucleotide
  misc_feature (509)..(509): n comprises a, c, g, or t, or includes no nucleotide
  misc_feature (527)..(527): n comprises a, c, g, or t, or includes no nucleotide
  misc_feature (530)..(530): n comprises a, c, g, or t, or includes no nucleotide
  misc_feature (544)..(544): n comprises a, c, g, or t, or includes no nucleotide
  misc_feature (593)..(593): n comprises a, c, g, or t, or includes no nucleotide
  misc_feature (613)..(613): n comprises a, c, g, or t, or includes no nucleotide
aaaaaaaaagtctttaaagaaaaaagaaaggaaaaggcagtattgtttacaaaggaagaatttaagtgtcagcagacgttaaagaaacccggcagttatttgaacggtcttacttgtttgtgcttggaggtactttaacgcaacattccaatctattttcttttgtttctgcatcattccaggttaaactcttgtttagaatgctgtctaaatttctccaaatttgtagcagtgtaaatagtacatcagaatcatagtactgaatacttgagcagtctaaaacgtgaacctgcctggaaaagaaaactggaacttgaaaaatcaataagcttaggaaaaaactttaaaaagcttacgcattataaaatagcaataaatcaagaataatgaacaatcaattgcttggataatcattttactttgacacacaagcnaaatttgatgngtatatgaaagatttctagcatttgaaaggtatggaagaatacaggaagtccatcaaaaagatncataaaaggaattccttntgntttaccaaatcacntagcaaaataaaataataaatttagggaagataggtactggatttgaanagctctgggatttgggattntggaagcttttg

SEQ ID NO: 5273 - DNA, 582 bp, Canis familiaris
  misc_feature (16)..(16): n comprises a, c, g, or t, or includes no nucleotide
  misc_feature (40)..(41): n comprises a, c, g, or t, or includes no nucleotide
  misc_feature (52)..(52): n comprises a, c, g, or t, or includes no nucleotide
  misc_feature (80)..(80): n comprises a, c, g, or t, or includes no nucleotide
  misc_feature (95)..(95): n comprises a, c, g, or t, or includes no nucleotide
  misc_feature (118)..(118): n comprises a, c, g, or t, or includes no nucleotide
  misc_feature (120)..(120): n comprises a, c, g, or t, or includes no nucleotide
  misc_feature (163)..(163): n comprises a, c, g, or t, or includes no nucleotide
  misc_feature (316)..(316): n comprises a, c, g, or t, or includes no nucleotide
  misc_feature (318)..(318): n comprises a, c, g, or t, or includes no nucleotide
  misc_feature (396)..(396): n comprises a, c, g, or t, or includes no nucleotide
  misc_feature (416)..(416): n comprises a, c, g, or t, or includes no nucleotide
  misc_feature (452)..(452): n comprises a, c, g, or t, or includes no nucleotide
  misc_feature (529)..(529): n comprises a, c, g, or t, or includes no nucleotide
agttctagaaatccanaatcactcagaggccaaatctgtnnaattaaaatgngattgaagacaattaatgaaagttttgnatcctcatcatattncccttttttattcaacccttttntntatgccatataattaaacactttctccttattttccttatttnttagtcaagaacaaattctctatatcaaaataagactttagaaagtaaacttgtatatgtatgtatttaaactccaaagtatggaacactgatattctacaagaaattatgtatgtgtggtatatgaatatgtaggagtatgtgtgtctgtgntntcttttactaccctcaaaatgaagtataaacctaagtatttgaatataatatctgcatatgtgcaaagaatactgcanattatctggcagccccaggnattcatgggtttttcttcttattgcttggggcgaanaggagggagccagtgaaaataatcatctgtcctaacagacctacattattgaacaatggtaggccattactcaatgncttactgggatatcctgtttaacagggtggtggctacctgctcttcccaaaat

SEQ ID NO: 5274 - DNA, 590 bp, Canis familiaris
  misc_feature (44)..(44): n comprises a, c, g, or t, or includes no nucleotide
  misc_feature (500)..(500): n comprises a, c, g, or t, or includes no nucleotide
  misc_feature (546)..(546): n comprises a, c, g, or t, or includes no nucleotide
  misc_feature (567)..(567): n comprises a, c, g, or t, or includes no nucleotide
aataattatagaaaatcctaaaaaaaaaaaaaaaaaaaaaggtnatctttgtggctgaaatgaaaggatactagacagtcacttgaatcgacaaggaaataaagaatagcaaggaaatagaggcttaggcaacattgtaaaccagctgaacctaatagacatctacagaacaccacccaacagcagagtatgcattcctcttgagtctacattctccaaggcagactatatgtcaagccataattcaaatctcagtgaattttaaaactggaggtcatacaaagtattttccttaactacaaaggcacaaaattagaaaccagtaacaagaggaaaataaataaatatggaaattaaacaacattctcttaaccagtggattaaaaaggagataaaggaaattagagaaaactttgagatgaatgagagtttggtataagacagtgtatcaatcctatgatatttgcaaaaatagtactcagaaaaaaatagcctacttnaagaagacattactttacaccttaaaaaactagaaaacagcaactnactgaagcaggaaggaaatantaagatttggccgacaaatatag

SEQ ID NO: 5275 - DNA, 546 bp, Canis familiaris
  misc_feature (357)..(357): n comprises a, c, g, or t, or includes no nucleotide
  misc_feature (416)..(416): n comprises a, c, g, or t, or includes no nucleotide
  misc_feature (454)..(454): n comprises a, c, g, or t, or includes no nucleotide
  misc_feature (499)..(499): n comprises a, c, g, or t, or includes no nucleotide
  misc_feature (504)..(504): n comprises a, c, g, or t, or includes no nucleotide
  misc_feature (511)..(511): n comprises a, c, g, or t, or includes no nucleotide
  misc_feature (527)..(527): n comprises a, c, g, or t, or includes no nucleotide
tcatggaaaaagtgaccacaaatggccctactgagattgtgcagacaaatggagagacagaacctgctccactagagaccaaaccaccaccttctgggccacagcccaccagccaggccaatgatttattggatttgttgggaggaaatgacataacacctgttattccaactgcacctacaagcaaaccagcttctgctggtggagaacttcttgatttgctgggagacatcaaccttacaggtgctccagctgctgctcctgcccctgcctcagtcccacagatatcccagccccccttcttgttggatgggctttcatcacaagcctctcttcaatgacatcactacaggcatncccttcatcacaagcatacagtaagaatggcttgaagatagaattcacctttgaacggncaaataccaatcctaacgtcacaagtgataacgatcangcctccaacagcacaaagctggacatgacagactttgtttttcangctgnagtaccnaaaacatttcagctgnagcttttgtttctacaaca

SEQ ID NO: 5276 - DNA, 429 bp, Canis familiaris
  misc_feature (364)..(364): n comprises a, c, g, or t, or includes no nucleotide
ataactgttttcattggcattcatattacctatttacggtttgcccattacaaagtttggaaattgagtttttattccaaaacaatttgtatctgaattttgtttcaaacgtaatttctgaccttcagggtcaatgcttttagttgccattatttcctaccttattactttattgaacatgagaaggaaagagaatgtgtttttaaatcaatgcaaatgaactgttcagaccctcagtgttgtcctaagtctactagtttgacatcagatctatctagtaaactccatagaaaaacttttaagataaaagtaaagttcagggcagctcgggtggctcagcggtttagcaccgcctttggcccanggcctgatcctggagaccccggatcgagtccacatcgggccccctgcatggagcctgcttctcct

SEQ ID NO: 5277 - DNA, 339 bp, Canis familiaris
gtgatattctagtttcttcacaacgtagtgattatcagccttactaattaccttgtagcctttcttaatatgcacataatgcacattttccaatggctagaaaatgcaaaacacaagtgaatatcattgcatctattttcatgtctttctaaaaacaggactactaaaatctctgggatacatgagatagtaacaaatgaggattataaatgagtagcacataagaattattttcttgaatttaaacttattacagccagtttcagcatgtaaatatataataatgtgggctagtgtgtaattcttgaactaagaaatataaataaaacttaaaaggat

SEQ ID NO: 5278 - DNA, 678 bp, Canis familiaris
  misc_feature (390)..(390): n comprises a, c, g, or t, or includes no nucleotide
  misc_feature (406)..(406): n comprises a, c, g, or t, or includes no nucleotide
  misc_feature (434)..(434): n comprises a, c, g, or t, or includes no nucleotide
  misc_feature (446)..(446): n comprises a, c, g, or t, or includes no nucleotide
  misc_feature (537)..(537): n comprises a, c, g, or t, or includes no nucleotide
  misc_feature (609)..(609): n comprises a, c, g, or t, or includes no nucleotide
  misc_feature (635)..(635): n comprises a, c, g, or t, or includes no nucleotide
  misc_feature (677)..(677): n comprises a, c, g, or t, or includes no nucleotide
ttgcatgtcaagtctgtgttcaggcatgcgtgtgtgccagtggactttgaagaggtgcacgtgagctccaatgctgatgaagaagatatccgcaacgccatcatggccatccggcggaaccgcgtggccctgaagggcaacatcgaaacgaaccataacctgccaccatcccacaaatcccgaaacaacatccttcgcaccagcctggacctctatgccaatgtcatccactgcaagagcctgccaggagtggtgacccggcacagggacatcgatatcctcattgtccgggagaacacagagggcgagtatagcagcctggaacacgagagtgtggctggggtggtggagagcctgaagatcatcaccaaaggccaagtcccttgccantggttaatatgccttnaaactggcccagaaaagcgggccccaanaaagtgacttgntgtgcacaaggccaacatcatgaaactgggcgatgggcttttctccatgcttgcaaggaagtggcagcccgttcccgcagatcactttganaatatatcgtggacaacaccccatgcactggtgtcgaggcccacaatttgatgtatggggatgcctaatctntacggaacattgtcaacaatgtttcncggaattggggggggccttgctttgggccgggccactttggna

SEQ ID NO: 5279 - DNA, 637 bp, Canis familiaris
  misc_feature (402)..(402): n comprises a, c, g, or t, or includes no nucleotide
  misc_feature (447)..(447): n comprises a, c, g, or t, or includes no nucleotide
  misc_feature (472)..(472): n comprises a, c, g, or t, or includes no nucleotide
  misc_feature (486)..(486): n comprises a, c, g, or t, or includes no nucleotide
  misc_feature (499)..(499): n comprises a, c, g, or t, or includes no nucleotide
  misc_feature (528)..(528): n comprises a, c, g, or t, or includes no nucleotide
  misc_feature (538)..(538): n comprises a, c, g, or t, or includes no nucleotide
  misc_feature (548)..(548): n comprises a, c, g, or t, or includes no nucleotide
  misc_feature (579)..(579): n comprises a, c, g, or t, or includes no nucleotide
  misc_feature (612)..(612): n comprises a, c, g, or t, or includes no nucleotide
  misc_feature (616)..(616): n comprises a, c, g, or t, or includes no nucleotide
  misc_feature (626)..(626): n comprises a, c, g, or t, or includes no nucleotide
taatcacgtaatgctaaatattaaggttattgtgaacataaacgttaaaggtagttgctaggggaaaaaagtttttttgtagaagagcccccagatagaagaaaaatacatataggggagaataacttgactgatggaattatgattctaagtaatgaaagaggtctgcaagggcttacgggccaggtccctttggatgaagaaggcagtctggaaatagcctctcatttaaggaggaccttctagatatgtatcactaaagcattaagtatattatgtctagttttcacaaaaaccctgcaaacaataggtattgagacccaagaaatagcaaataacttgcctaaagctacagagttagagactaaaggcaagggagtttgacttattgtcccatattgnctcaaatgtaacctcatggacagctatgaaaattgaatagatgtncaagaaagatcttaaagcctaactntatacaaaagcttnccaaatttattgngaattgtttatacaaactaataaaaagtntgatgccttntaatacccancaaaaaaaaaaaaaagggcgggccgttttanaggatccaagcttacgtcccctgcatgcgacgnatanttttttatanggcacctaaat

SEQ ID NO: 5280 - DNA, 436 bp, Canis familiaris
  misc_feature (349)..(349): n comprises a, c, g, or t, or includes no nucleotide
  misc_feature (362)..(362): n comprises a, c, g, or t, or includes no nucleotide
  misc_feature (372)..(372): n comprises a, c, g, or t, or includes no nucleotide
cagcatcaatatctctgtctgggacgacgtgggcaacctgatccagcctggagacattattcggctcaccaaagggtacgcttcagtgttcaaaggctgtctcacactatacactggacgtggcggtgaccttcagaagattggagaattctgtatggtttattctgaggttcctaacttcagtgagccaaacccagagtacagcgcccagcaggcacccaacaagacggtgcagaacgacagcagccccacagctccgcagcctgccacaggaccacctgccgtctctccagcctctgagaaccagaacgggaatggactgagtgccccaccaggtcctggtggtggnccacacccacctnacgtaccctngcacccccccagacccgaattacccgaagcaggccaacacacaacttgccgggcttcttgggcc

SEQ ID NO: 5281 - DNA, 675 bp, Canis familiaris
  misc_feature (450)..(450): n comprises a, c, g, or t, or includes no nucleotide
  misc_feature (460)..(460): n comprises a, c, g, or t, or includes no nucleotide
  misc_feature (516)..(516): n comprises a, c, g, or t, or includes no nucleotide
  misc_feature (555)..(555): n comprises a, c, g, or t, or includes no nucleotide
  misc_feature (568)..(568): n comprises a, c, g, or t, or includes no nucleotide
  misc_feature (581)..(581): n comprises a, c, g, or t, or includes no nucleotide
  misc_feature (585)..(585): n comprises a, c, g, or t, or includes no nucleotide
  misc_feature (605)..(605): n comprises a, c, g, or t, or includes no nucleotide
  misc_feature (665)..(665): n comprises a, c, g, or t, or includes no nucleotide
ataagccctccagggaaggtttttatagtctttgtagaagttttctcttgaaagatatttactcagaaaataactatgtttgagaacattttttgggggggtgaaagagcaacgcttttaagccccctaaactttagaggagatacaatcagaaatcgatttcccccagtggaaataaaggatgatgggaggaattgagaaaatatattagtctattattttagagttctaacatactttctctaaaaccttacattattgagaaaattgagggcaaatgactgtcttatctctcttttttgacattttatggatgtaagagaatggaaatgaatggtttcaacatagatcatttaataaggcagaggatggtgtgaccaagcattcttctaaagcgttagatggaaaatgctgtgtgctgccatggtaccagaaataataacccgagangggtgtattncaggaaatcaaaagtaattccctttcatgctgagttaatgcttaaataactggtgnttctggggccacctttctttactgacatcactctttttncattaagtttaanctttgaagcaganactntgctaataattgaaaccgtnagaacccggtttagtcctatgcctactagggagttatggacatggatggttaacggcttncctcattgaa

SEQ ID NO: 5282 - DNA, 581 bp, Canis familiaris
  misc_feature (393)..(393): n comprises a, c, g, or t, or includes no nucleotide
  misc_feature (412)..(412): n comprises a, c, g, or t, or includes no nucleotide
  misc_feature (419)..(419): n comprises a, c, g, or t, or includes no nucleotide
  misc_feature (483)..(483): n comprises a, c, g, or t, or includes no nucleotide
  misc_feature (501)..(501): n comprises a, c, g, or t, or includes no nucleotide
  misc_feature (508)..(508): n comprises a, c, g, or t, or includes no nucleotide
  misc_feature (525)..(525): n comprises a, c, g, or t, or includes no nucleotide
  misc_feature (546)..(546): n comprises a, c, g, or t, or includes no nucleotide
  misc_feature (555)..(555): n comprises a, c, g, or t, or includes no nucleotide
  misc_feature (567)..(567): n comprises a, c, g, or t, or includes no nucleotide
tccccccggcctgggctgcagcggcgcggcggcggcggcggcggcgtagacctgcggctgcggggcgcgctcctcccccgcccgcgctcccgccggccctccgcctcctcctgctcctcggcgtcgcccggccctgcgagctgcgagcggcaagatggcggcgcccaggccgccgcccgcccggctgtccggagtcatggtgcccgcgcccatccaggacctggaggccctccgcgcgctcacggcgctcttcaaggagcagcggaaccgagaaactgcacccaggactatcttccaaagagtcctggacatcttgaagaaatcttcccatgctgtcgagctggcctgcagagacccatcccaagtgggacatctgcttttaagcttgaactnataacgggtggcttaaggngtttgcnaaatgcttgtatcgagtgttctgtgaaccagaattccatcaggaacttggatacaattggcgtngctgtgatttgattcttnttttcgngaactgcggtggaacangaatccctgttgaaagctttncgttggggnctgaagttctangcaacattgcctcg

SEQ ID NO: 5283 - DNA, 537 bp, Canis familiaris
  misc_feature (522)..(522): n comprises a, c, g, or t, or includes no nucleotide
aatagtagatttaggaccagagacaaggaagagcctaatgctatcttgaagcccagggcccagaaagatgttaataacagtggcagggtcaaacaagagcccaggtgtgaagaggaagtaattattgggtcctggttctgggcagagaaagaggctggtatggaagctggggcttctgccatctgtgaatccagaccaggggtggaggagggggccattggtggatccttgttctggactgaggaaaagtccagtttgggagctgtggccagagaagaggccaggccagagtctgaagaagaggccatatttggatcctggttctgggatagggatgaggcctgttttgacctaaatcccagtcctgtatacaaggctaatttcagattcagacattcagcttgaggaggaacttaagacatcattcaggccccaaacttgggaagaggtcacttgttgaattcaaacctggtcctttgtcattggaggtggctttccatcttccaacttctttaaaaattnctggaagaaacagca

SEQ ID NO: 5284 - DNA, 656 bp, Canis familiaris
  misc_feature (400)..(400): n comprises a, c, g, or t, or includes no nucleotide
  misc_feature (420)..(420): n comprises a, c, g, or t, or includes no nucleotide
  misc_feature (498)..(498): n comprises a, c, g, or t, or includes no nucleotide
  misc_feature (510)..(510): n comprises a, c, g, or t, or includes no nucleotide
  misc_feature (555)..(555): n comprises a, c, g, or t, or includes no nucleotide
  misc_feature (565)..(565): n comprises a, c, g, or t, or includes no nucleotide
  misc_feature (594)..(594): n comprises a, c, g, or t, or includes no nucleotide
  misc_feature (602)..(602): n comprises a, c, g, or t, or includes no nucleotide
  misc_feature (614)..(614): n comprises a, c, g, or t, or includes no nucleotide
  misc_feature (631)..(631): n comprises a, c, g, or t, or includes no nucleotide
  misc_feature (646)..(646): n comprises a, c, g, or t, or includes no nucleotide
ttggcctctgccctgcaggagagaaagacaagaagtcagaaccagcatagttggagaggagggctgattttggcattgtgaagcctggacacacacaacccaaagtgaagagcacccaccacgggtgtgttttaccaagttagcacaaattatccatatgagaatctgagctggggcttgggccgacccatgtggctgcctggggatgtataggtacaagcaaacactgagcagcaggcagactttctcctgagtttctagatctacacctggatactgcctgtatttaagagacaacaggagtaggaagggagagaggagaggacaggatgcaggacgaagcaaggcacaggacaggcatatcacatgtggccaagctataacacaggcccactttttnaaaatcttgttggttggttnctaaagtacttaatacaattggaagaagtgataagggccataaccaggaacctaagtgacagccagggagactttaanattggagcttgnacaatgccaaatactctaaaggaactgaaaacgtgatggcttttnccactgttgnctgcagttgtaaccaacaccaaagtcccnatctagtntagaagccctgntaggggcagatttgganttacaaggttctgtntctggaccaa

SEQ ID NO: 5285 - DNA, 665 bp, Canis familiaris
  misc_feature (413)..(413): n comprises a, c, g, or t, or includes no nucleotide
  misc_feature (416)..(416): n comprises a, c, g, or t, or includes no nucleotide
  misc_feature (459)..(459): n comprises a, c, g, or t, or includes no nucleotide
  misc_feature (502)..(502): n comprises a, c, g, or t, or includes no nucleotide
  misc_feature (504)..(504): n comprises a, c, g, or t, or includes no nucleotide
  misc_feature (565)..(565): n comprises a, c, g, or t, or includes no nucleotide
  misc_feature (578)..(578): n comprises a, c, g, or t, or includes no nucleotide
  misc_feature (599)..(599): n comprises a, c, g, or t, or includes no nucleotide
  misc_feature (646)..(646): n comprises a, c, g, or t, or includes no nucleotide
atttgtccttgaacagtcaagaaaaatattatgggaagaaaatctaatatcgcagcataaccccaccctttgtattttgtgcagtgattattttttaagatcttctttcatgtaagtagcaaacagggcttcactctcttttcatctcattaattcaattaaaaccattaccttttaaaaatcttttcttctttctaagtgtggtgtcttttatcttgaattagtagttgtatgaagtcatagataataatacacttcaccatagatcttatgtgttaggaagaacttaaatttctttaattcatttatccagatttttatgtttgaattatgcattttccagaagaggggttatctcaagaataatcatatatatgcatacctaaaaaatggcccccagggccttaattagnagnttgtaagctgcccctgctacttagttggtagagcatttgagcncacattttaattttacctaattaaaaagggcagtattttcagngncatatttaactatttagagggtgattccacctcgatggtttaatatccaaacatctgctgnaataatattttanaaaatgttggaattaaggaanaacttgggtactaatttgtataacccgatctgtgcaatggaaataanttaccaagtgttgctaaag

SEQ ID NO: 5286 - DNA, 602 bp, Canis familiaris
  misc_feature (442)..(442): n comprises a, c, g, or t, or includes no nucleotide
  misc_feature (451)..(451): n comprises a, c, g, or t, or includes no nucleotide
  misc_feature (474)..(474): n comprises a, c, g, or t, or includes no nucleotide
  misc_feature (522)..(522): n comprises a, c, g, or t, or includes no nucleotide
  misc_feature (527)..(527): n comprises a, c, g, or t, or includes no nucleotide
  misc_feature (556)..(556): n comprises a, c, g, or t, or includes no nucleotide
  misc_feature (564)..(564): n comprises a, c, g, or t, or includes no nucleotide
cccagccagagggaaggccgaggggagagtgcggatgccggcacccatcaggagacccggtccaggtcaaggtccaattccaaatccaaacccaaccctccgtcagaatcacgctccagatcaaagtctgcttcaaaaacccggtctcggtccaagtccagatccaggtctgcctccagatcgccgtctcggtctagatccaggtcccactcgaggtcctaactggctacaaccacagctggaactccccgagaagtcttttgtacatgtttggtagccgtagcacaagtgatccaagtagaacatatgtcactgctgtacatttttaactcccctaatggtgtgtctacaattgttaaatctaagtgcttcctctccgtaaagccttctggtgccaggccttctgctcgatgaaaacaatcttctttttgaaaaccccctntattctggnccacagtagaatatccaaacctncgcgggccttcgcctggcctttctacagggagctagtacctggacggntttangctggaatgctgacataagtaggtaccgngagttcanccatgtttgcctcgaattgatgccctttgtgttggcat

SEQ ID NO: 5287 - DNA, 577 bp, Canis familiaris
  misc_feature (133)..(133): n comprises a, c, g, or t, or includes no nucleotide
  misc_feature (283)..(283): n comprises a, c, g, or t, or includes no nucleotide
  misc_feature (370)..(370): n comprises a, c, g, or t, or includes no nucleotide
  misc_feature (380)..(380): n comprises a, c, g, or t, or includes no nucleotide
  misc_feature (405)..(405): n comprises a, c, g, or t, or includes no nucleotide
  misc_feature (434)..(434): n comprises a, c, g, or t, or includes no nucleotide
  misc_feature (472)..(472): n comprises a, c, g, or t, or includes no nucleotide
  misc_feature (525)..(525): n comprises a, c, g, or t, or includes no nucleotide
  misc_feature (530)..(530): n comprises a, c, g, or t, or includes no nucleotide
  misc_feature (545)..(545): n comprises a, c, g, or t, or includes no nucleotide
  misc_feature (561)..(561): n comprises a, c, g, or t, or includes no nucleotide
aagcaaccaaaaaatcaaaagttgtgtttacggatcctttggccacagataaccaaaaagaatgtgaggtgtgccctggtctgaggacttccggggaagagagcaggagcagttctggggccctcaactcggntcttgaagaacttgccaaagttagtgaagaattatgcagctttcaagaggaaatccgaaagcggtctaaccacagaaggatgaagtcagattctttcctgcaggaaatgccacgtgtaacgaacatgcctcgcggagaccacatgatcancgatggccagggcattcttgcaatcaacttggaaaagcaaacgcaggaacacggaaagaatctaaagctgcacccgatgtacccctnagcggggctnggaaaaaaggtggaacttgggttcngacccatcttgcagagaaaatgaagcttncaccgcttttcttctccgagaagcacaatccccgaacntttcccagcttcttgtgcaaaacgagcttctgggagtttgaagggaggtttangccgnagcaaccctggtggncccggagggttacggnggaagggggccggggg

SEQ ID NO: 5288 - DNA, 315 bp, Canis familiaris
ggctcaagccactccacagacctcatggaagccattcggttcctgtagaaaatggatacgcagagaactcccaaccctggcctggctgggtctagagaccaccgcaagaatcgcagcccagggcagtggttccagttacactggctcaggcccttactcgcttctccacccccctgtctcccccactcccacctgcccttctgttcctaggctcagctgcaggcaaacactccaccctccatttcccccactcctgcagctgcctccaggcctgttgctatagagcctacctgtgtgtcaataaacaacaattgg

SEQ ID NO: 5289 - DNA, 676 bp, Canis familiaris
  misc_feature (408)..(408): n comprises a, c, g, or t, or includes no nucleotide
  misc_feature (431)..(431): n comprises a, c, g, or t, or includes no nucleotide
  misc_feature (511)..(511): n comprises a, c, g, or t, or includes no nucleotide
  misc_feature (543)..(543): n comprises a, c, g, or t, or includes no nucleotide
  misc_feature (594)..(594): n comprises a, c, g, or t, or includes no nucleotide
  misc_feature (632)..(632): n comprises a, c, g, or t, or includes no nucleotide
  misc_feature (669)..(669): n comprises a, c, g, or t, or includes no nucleotide
cggttaactaagcctactttattcaccaatattccagtaacatgcgaagaaaaagacttgcctggagatctctttaaccaactcatgagagatgatccttcaactgtaaatggtgcagaaattttaatgttgggagaaatgttgactttaccacagaattttgggaatatatttttgggagagaccttttccagttatatcagcgttcataatgatagcaatcaagttgtaaaagatatattagtaaaagctgatcttcagacaagttctcagcgtttaaatctttcagcttccaatgccgcagtggctgaacttaaacctgattgttgtattgatgatgtcatacaccatgaagtaaaggaaattggaacacacatcttggtgtgtgcagtgggctatccaactcanggtggagaaaaaatgtattttanaaaattcttcaaatttcaggttctcaaaccattggatgtgaaaaccaaattttataatgcagagactgatgaagtatttntcgaagcccagattcagaatattacaacctcnccatgttatggagaaagtttattggaaccatctataatgtcaatgtagcanaattaaactcatcagccaacttggaaatgtgtactacnttgggcaagagatatttcagccatggaacccgccgtnttgactc

SEQ ID NO: 5290 - DNA, 665 bp, Canis familiaris
  misc_feature (447)..(447): n comprises a, c, g, or t, or includes no nucleotide
  misc_feature (534)..(534): n comprises a, c, g, or t, or includes no nucleotide
  misc_feature (576)..(576): n comprises a, c, g, or t, or includes no nucleotide
  misc_feature (609)..(609): n comprises a, c, g, or t, or includes no nucleotide
  misc_feature (663)..(663): n comprises a, c, g, or t, or includes no nucleotide
agtggttttaggaatgaaatagattaattgcttcaacaggtacctgccagacctcattttggtagataatagctttagccttcactttcaagccttgtccggagaaaatgatgagggaatttacttcaatttgttcacttactgagtatcctaacaaaaggcatacaaagtcctatgggtgactgaaagaatcaatatttttttgctctctaagaacttctagtctaagaaagatgagaaaaggatgtgtgtgtgtgtgcacatgttaaatttaaaagtttgttccagagcccatagaaaagataattaaggaaggcttaaacagattttggggatcagtgaagttttcatggaattagcatttcagaggaccgtgaaggataggtaggattttaacccctttatttcttgctcttattatagtaaaaatgctttaaaagaaacatncaaatttgatagaaggaagatggagaaacacttgaataatcccacattggatgatggagctcactaaatgagaatgggtttgtccanctgttatatttatagttagatactctcacatctttcattttnaacattattggaacttactcctgctggcctatntaaacctggacatatacaaggacaaaaccctgcctattgagctactttctaaanaa

SEQ ID NO: 5291 - DNA, 547 bp, Canis familiaris
  misc_feature (358)..(358): n comprises a, c, g, or t, or includes no nucleotide
  misc_feature (397)..(397): n comprises a, c, g, or t, or includes no nucleotide
  misc_feature (432)..(432): n comprises a, c, g, or t, or includes no nucleotide
  misc_feature (470)..(470): n comprises a, c, g, or t, or includes no nucleotide
  misc_feature (498)..(498): n comprises a, c, g, or t, or includes no nucleotide
gaagccgcggaagccgggacgctgggtccgagatgaccgccagcaaacgggtggcgaaggagctggagagtcttcaggcaaagcttcccccctacctacgggacctgttcagtgatgatgcggacgtcctggtgtggcatgtgctcctcctgcccgagaaaccaccttataacctcaaggcattccacctgcgcatcagcttccccgaggactacccgttcaagccccccacggtgaccttcaccaccaggatctaccaccccaacgtgggccatgacggagatgtttgcctgcccatcatcagcaaggagaactggaatcctcacaccaaggcctgccaagtcttggaggctctcancgtgctggtgaataaaacaaaactggggcagccaagttnggtggagctcgccgacttgttgacgcgggacccanagctgttcaacaaaaaaggcccaagagttacccttcantatggagtggaccggccttctaactggntctgacccctctttgtgctgggtccttgtgtgatggacgaattgtttac

SEQ ID NO: 5292 - DNA, 417 bp, Canis familiaris
  misc_feature (342)..(342): n comprises a, c, g, or t, or includes no nucleotide
  misc_feature (383)..(383): n comprises a, c, g, or t, or includes no nucleotide
  misc_feature (391)..(391): n comprises a, c, g, or t, or includes no nucleotide
  misc_feature (397)..(397): n comprises a, c, g, or t, or includes no nucleotide
  misc_feature (411)..(411): n comprises a, c, g, or t, or includes no nucleotide
gagggcgggggagggcgggggagggcgggcctggacatcccgggctcccggctcccgccgccgtccagggcccggcccggagcccggggagtgggcgcgcgggtgtccgccttcccggcccagggccgcagaggacgcacaggcttttaaaaagcccgatcccctcgatctggtgaaaagccatttgatgtatgcggttagagaggaagtggaggtcctcaaagagcaaatcaaagaactaatagagaaaaattcccagctggagcaggaaaacaatctgctgaagacactggccagccccgagcagctcgcccagtttcaggcccagctgcagactggctncccgccttgcaccacacaggcacaggggaacacgcaagccnccggccangcaagngtccaagggttaangaccaa

SEQ ID NO: 5293 - DNA, 564 bp, Canis familiaris
  misc_feature (441)..(441): n comprises a, c, g, or t, or includes no nucleotide
  misc_feature (444)..(444): n comprises a, c, g, or t, or includes no nucleotide
  misc_feature (456)..(456): n comprises a, c, g, or t, or includes no nucleotide
  misc_feature (493)..(493): n comprises a, c, g, or t, or includes no nucleotide
  misc_feature (504)..(504): n comprises a, c, g, or t, or includes no nucleotide
  misc_feature (553)..(553): n comprises a, c, g, or t, or includes no nucleotide
accccttcctgtctgaggccaactgcttgcccgccaacggcacagccaacagcacctctggcagccacctcttccatgcgtccagggtcctgggccagcaccacgctgaggcgtggcgttggtccaaccagtcgctctccaggctgcctccacaggatggagcagggacccgcgtgtcgtatgccttctggatcatggccctgatcaacctcccggtgcccctggctgtgctgtttctgctgtccaaagagcggctgctggcctgctgccctcagaggaggcccctgctcctgtctgcagatgagctcgccctggagacacagcctcctgagaaggaagatgcctcctccctgcccccaaagtttcagccacacccagggcacgaggacctgttcaagcttgctgccagagaaagaacttcaaaggagccccttattcttnttnggcatccacatnaaaaccgcctggtctgttatgaaccgatgggatgacnggggagtattnacatttgtgtacagtatcagtggagaaaccgctcttttggggacaaggnggttggttacc

SEQ ID NO: 5294 - DNA, 687 bp, Canis familiaris
  misc_feature (504)..(504): n comprises a, c, g, or t, or includes no nucleotide
  misc_feature (506)..(506): n comprises a, c, g, or t, or includes no nucleotide
  misc_feature (519)..(519): n comprises a, c, g, or t, or includes no nucleotide
  misc_feature (530)..(530): n comprises a, c, g, or t, or includes no nucleotide
  misc_feature (537)..(537): n comprises a, c, g, or t, or includes no nucleotide
  misc_feature (559)..(559): n comprises a, c, g, or t, or includes no nucleotide
  misc_feature (572)..(572): n comprises a, c, g, or t, or includes no nucleotide
  misc_feature (577)..(577): n comprises a, c, g, or t, or includes no nucleotide
  misc_feature (603)..(603): n comprises a, c, g, or t, or includes no nucleotide
  misc_feature (649)..(649): n comprises a, c, g, or t, or includes no nucleotide
  misc_feature (684)..(684): n comprises a, c, g, or t, or includes no nucleotide
tttcactgtgtcttcagaaagatccttctaaaaggcccacagccgcagaacttttaaaatgcaaattcttccagaaagccaagaacagagagtacctgattgagaagctgcttacaagaaccccagacatagcccaaagagccaaaaaggtgagaagagttcctgggtcgagtggtcaccttcataaaaccgaggacggtgactgggagtggagtgacgacgagatggatgagaaaagtgaagaagggaaggcagccttttctcaagaaaagtcacgaagagtaaaagaagaaaatccagagatggcggtgaatgccagcagtatacccgagcaaatacagtccctctctgtgcaggactctcagggcctacccaatgctagtgaagactatagagaaacttcttgtgctgtgaacctcgttttaaggattaagaaactccagaaaggacttaatgacatacggttgagtttactccaggaagaaataccgcagatggtgtatntnaggagctcttctntgttgcttggntgatggncatgatgtaattataggggtgntaatttacagaanatgtngatgatcccaaactttaaaacattgncgttaaattggcttcaggcttggatgggcggagattcttgagaaangaactgatcggtttgttaattggtgtaactgtttntgt

SEQ ID NO: 5295 - DNA, 508 bp, Canis familiaris
ctttttcagagccaagcatatgaaagactttgttgtgttttttttaagccacaatttaactccacacctcacaacgtgttataaagctgaatggttcctcttgataaggatatttgttaacaaatgccagaaaataactctttaatacctgcattaacagacttccttttgcccagagaaggaaaataaaaatgaaccaaaggatatttccagaaagaattaagaaagctgtttaagaaggccatgactcagtccttaggtgtgtatgcctttcaaaatcctaggaattttaatataaaatagcaaaatatgcttttccagttgaatttgactttaaggaattactatttgttcccttttgtcacagttaaaatcaagtgttgggaattataatttgagtaaaaatattacccaataccaatgaatgtagatggctaaacgattcttactcagtgtgatgtaaaattgcaacaagggaccctttgtaaaatgtcatatgccaataaaa

SEQ ID NO: 5296 - DNA, 663 bp, Canis familiaris
  misc_feature (489)..(489): n comprises a, c, g, or t, or includes no nucleotide
  misc_feature (548)..(548): n comprises a, c, g, or t, or includes no nucleotide
  misc_feature (574)..(574): n comprises a, c, g, or t, or includes no nucleotide
  misc_feature (591)..(591): n comprises a, c, g, or t, or includes no nucleotide
  misc_feature (618)..(618): n comprises a, c, g, or t, or includes no nucleotide
  misc_feature (628)..(628): n comprises a, c, g, or t, or includes no nucleotide
  misc_feature (649)..(649): n comprises a, c, g, or t, or includes no nucleotide
acctgcgtactgaactgactgtcacacaattctctggtcgctcttaccaaaaataccacaaaatcatcatgtccagagccgaactaatttccacaaaattccccgaatccacatccccttctgtatttggtatctaagtggataacactgccattcgcctttcacaaaataaacttgagtgtggattgaacgtcttccttcaaacaccacaccttatacattttacaccctaactatctgttgagttgaccttctcttctccatgttcggtaccactattcgtttccttcattactatttcttgcctgtgttactataagagaccccaagcggtcctcttgtctccatttccacctttgtgtttatccagaagacccttctaatgatagatcagatttcacgtcctcatggtaaatattcttcagtggcatgcattctatactgtcagggcaaaagccaagcaccaagcgtaggcacaccataacctgncaagaatgcagattaagactgattctgtcattccgtagccttatgtattacacttcttntgcatattccgcttgggtaattaaanaaccggctgggttgaanaacaccgtgattttacccattgatggnggatgggggnggtttaacatctagctactantgaataggcttgga

SEQ ID NO: 5297 - DNA, 570 bp, Canis familiaris
  misc_feature (315)..(315): n comprises a, c, g, or t, or includes no nucleotide
  misc_feature (390)..(390): n comprises a, c, g, or t, or includes no nucleotide
  misc_feature (423)..(423): n comprises a, c, g, or t, or includes no nucleotide
  misc_feature (435)..(435): n comprises a, c, g, or t, or includes no nucleotide
  misc_feature (478)..(478): n comprises a, c, g, or t, or includes no nucleotide
  misc_feature (481)..(481): n comprises a, c, g, or t, or includes no nucleotide
  misc_feature (527)..(528): n comprises a, c, g, or t, or includes no nucleotide
  misc_feature (551)..(551): n comprises a, c, g, or t, or includes no nucleotide
  misc_feature (553)..(553): n comprises a, c, g, or t, or includes no nucleotide
ggacgacggcagctgtggagccgctgacgatgtcgcagctggagaaggcggcgctggccctgctcgacgtgttccagcagtactcggcgcgggcgggtggtgggcgcaggctgaggaaggccgacgtcaaggagctcatcggcagcgagctcgcccacttcctggaggagatcaaggagcaggaggtcgtggacaaggtcatggagacactggacagtgacggagacggcgagtgcgacttccaggagttcgtggccttcgtggctatggtcaccaccgcctgccacgagttcttcgagcacgagtgaggcgcanccgcgcaggaagcggagcggggccgagtccctggcgccgtgtagctgattaggaagcttgacgtgctttgtcgangagacgccgacccccttttccggggctgacctnggggcccccatncttcgctgacggtccgtgcgacgccggtcacgatcctcaaganggngtgtgctccgccgtggtcagggccggcacccccccccccaacaacnnaattgccggaaccaaaagatggntntggaccacgtggtcctt

SEQ ID NO: 5298 - DNA, 661 bp, Canis familiaris
  misc_feature (4)..(4): n comprises a, c, g, or t, or includes no nucleotide
  misc_feature (405)..(405): n comprises a, c, g, or t, or includes no nucleotide
  misc_feature (426)..(426): n comprises a, c, g, or t, or includes no nucleotide
  misc_feature (487)..(487): n comprises a, c, g, or t, or includes no nucleotide
  misc_feature (502)..(502): n comprises a, c, g, or t, or includes no nucleotide
  misc_feature (524)..(524): n comprises a, c, g, or t, or includes no nucleotide
  misc_feature (559)..(559): n comprises a, c, g, or t, or includes no nucleotide
  misc_feature (595)..(595): n comprises a, c, g, or t, or includes no nucleotide
  misc_feature (600)..(600): n comprises a, c, g, or t, or includes no nucleotide
  misc_feature (626)..(626): n comprises a, c, g, or t, or includes no nucleotide
  misc_feature (652)..(652): n comprises a, c, g, or t, or includes no nucleotide
  misc_feature (657)..(657): n comprises a, c, g, or t, or includes no nucleotide
tggntgcaggaggcgatagagctgaacaaggactctgcgtactggcatcaggtgcggctgaccctcctgcagctgaaaggcctcgaggacagctatgaaggcagtatgacctttccaactgggaggtttaccatcaaacccttggggttcctcctgttgcagctctctggggacctgggagacttagagccagccctgaataagaccaagaccaagcacgttatgggctctggctcctgctctgccctcatcaagctgttgcccggccagagtgacctcctgattgcccacaacacctggagctcctaccagaacatgctgcggatcatcaagaagtactggttccagttccgggaagacccccaagagaactcttccctggctctggcaacaaagctgggcttntcatcctaccctggcaccctnttttctgggatgacttctacatcatggcagcggactggtgaccctggaaactaccatcggnaacaggaacccactntgtggaagttgtgcagcccaanaacttgtgtgctggatgggtgcgtaatgttgtggncaacccttggcttggatggggactctggcagacatnttaanaaattaaaaggggcgtcaaaaaccanggatgacggggatataaggatttttncctgngggc

SEQ ID NO: 5299 - DNA, 423 bp, Canis familiaris
  misc_feature (129)..(129): n comprises a, c, g, or t, or includes no nucleotide
  misc_feature (171)..(171): n comprises a, c, g, or t, or includes no nucleotide
  misc_feature (178)..(178): n comprises a, c, g, or t, or includes no nucleotide
  misc_feature (198)..(198): n comprises a, c, g, or t, or includes no nucleotide
  misc_feature (221)..(221): n comprises a, c, g, or t, or includes no nucleotide
  misc_feature (228)..(228): n comprises a, c, g, or t, or includes no nucleotide
  misc_feature (249)..(249): n comprises a, c, g, or t, or includes no nucleotide
  misc_feature (286)..(286): n comprises a, c, g, or t, or includes no nucleotide
  misc_feature (345)..(345): n comprises a, c, g, or t, or includes no nucleotide
  misc_feature (366)..(366): n comprises a, c, g, or t, or includes no nucleotide
  misc_feature (417)..(417): n comprises a, c, g, or t, or includes no nucleotide
acgcgtgggttttttttttttttttttttctttggcataaatgcgactttattattttcaagtacatacgtagtacctcgaactaatgtcttacaaaatgtcactgagtgaaggtcttgcgagtgtttnttgaacaaacacaggagaattgatgattaggccatgcacacnctacttntatgtagatattcctaaagngcctccaaagtatacttttaggnggactanatatgccatccctagcaatgnggtttatgcttttaatttgctaaacaaatgccttttntttttttaactgacggtgcaaaggtaaactttgtccatagtcaacagatctcaaacttntcaggcccaaattcatgtggnttccatttcgttttcccagctggggcgccgacctcactttattttaaaggnattttt

SEQ ID NO: 5300 - DNA, 586 bp, Canis familiaris
  misc_feature (459)..(459): n comprises a, c, g, or t, or includes no nucleotide
  misc_feature (476)..(476): n comprises a, c, g, or t, or includes no nucleotide
  misc_feature (498)..(498): n comprises a, c, g, or t, or includes no nucleotide
  misc_feature (519)..(519): n comprises a, c, g, or t, or includes no nucleotide
  misc_feature (539)..(539): n comprises a, c, g, or t, or includes no nucleotide
  misc_feature (557)..(557): n comprises a, c, g, or t, or includes no nucleotide
  misc_feature (559)..(559): n comprises a, c, g, or t, or includes no nucleotide
  misc_feature (566)..(566): n comprises a, c, g, or t, or includes no nucleotide
actaggcctgggcgggcggagtctcgggggggcgtcctcggcaatcgcggggccgagtgggctcacggcaccgtctcctctccttcgcccgcagaaaccgggggcgagcatggcgggcttggaggtcctgttcgcgtcggtggcgccggccatcacctccgcacaggacgcgctcgtctgctttctgcactgggaggtggtgacgcacggctactacagcgtggggaccggcgaccagccaggtcccaatgataagaaatcagaactgctgccggctgaatggaacagcaataaagacctgtatgtcctccggtatgagtctaaggatgggtccagaaagctccttgtgaaggctgtcactgtagagaacaacatgatcatcaatgtgctggaatttgggtcacagcaagtatcaaattttgaccctgaactttggatgattatatcgattcaaaacanctgggtgactttcacangacctataaaaacaagtgaggnacttcggtctcgcattgcgtnttgggatcattacacctatncatgagcactgggacaangntagtgtnacagtctcaaccgggagttt

SEQ ID NO: 5301 - DNA, 619 bp, Canis familiaris
  misc_feature (500)..(500): n comprises a, c, g, or t, or includes no nucleotide
  misc_feature (528)..(528): n comprises a, c, g, or t, or includes no nucleotide
  misc_feature (537)..(537): n comprises a, c, g, or t, or includes no nucleotide
  misc_feature (558)..(558): n comprises a, c, g, or t, or includes no nucleotide
  misc_feature (575)..(575): n comprises a, c, g, or t, or includes no nucleotide
ttcctgcggtctgcgactgccctccctaaatccatcctgttcggtctgttttcattttcacttgtgttcagtgctctcgcgcgcgcgtgtgcgtgtgtgtgtgtgactgctctccgcagcttctgggtgtcgtgacttaattctcccacttgaggctctctcgcgcccgccgtctccccagtcccggcgatctcccatcctaggcgatgtctagcctggtttgaccgcccttttcccggggaatggcaagtctttcacctgccgcacacattcccagatccacagactgatgatcctctccccaagaaggctaccacaggagctgtcttctgagactctggatacctttattcttcaaatggctttacccttctcatagctccagggaccctccattctctgtatctaggaaaatgtgatgagttacaggtatcagcttctagatcaccaagcacttcgtgttctagccacaagtggctcgagtggaagatcaaggggcnacaaggtgcatcaggaagatgcctaaanaacaaggangaggagaagctgggggaaaanagccgtgcagataccanatcaaagaatcggacaaagaagaggaaccgccagctgctttacc

SEQ ID NO: 5302 - DNA, 765 bp, Canis familiaris
  misc_feature (544)..(544): n comprises a, c, g, or t, or includes no nucleotide
  misc_feature (550)..(550): n comprises a, c, g, or t, or includes no nucleotide
  misc_feature (592)..(592): n comprises a, c, g, or t, or includes no nucleotide
  misc_feature (613)..(613): n comprises a, c, g, or t, or includes no nucleotide
  misc_feature (623)..(623): n comprises a, c, g, or t, or includes no nucleotide
  misc_feature (628)..(628): n comprises a, c, g, or t, or includes no nucleotide
  misc_feature (642)..(642): n comprises a, c, g, or t, or includes no nucleotide
  misc_feature (670)..(670): n comprises a, c, g, or t, or includes no nucleotide
  misc_feature (677)..(677): n comprises a, c, g, or t, or includes no nucleotide
  misc_feature (679)..(679): n comprises a, c, g, or t, or includes no nucleotide
  misc_feature (714)..(714): n comprises a, c, g, or t, or includes no nucleotide
  misc_feature (716)..(716): n comprises a, c, g, or t, or includes no nucleotide
  misc_feature (737)..(737): n comprises a, c, g, or t, or includes no nucleotide
  misc_feature (742)..(742): n comprises a, c, g, or t, or includes no nucleotide
  misc_feature (745)..(745): n comprises a, c, g, or t, or includes no nucleotide
tgctcagccccaagagctgtggcttcctgtgctcccgtttgtccattcttgggccaggagatactcttgaacaccgagtctgagccatagtcaggtgcagccccgccctcccagggctggcagtcctggagctgagagtcgggatacagtggacatcgattaggagcaccctgcgtgcttaagccctcagtggctccaggcgcaaagggagaggcttcagggagcatgtgtggtccacaaagctgagcgagacggggtggtcagagcctgcagctggggctgaggaccagtcctgcttcctgagcctctttgctctgccccttggggcaagttgcttaacctgtctgtgtgttggtacctctgcctccctgatgtagtctctcctttgactacctctccccacagaggggcaagagcccacccaaaggagcagggaggccagtctctgaggacagcaccgcagggcccaggggcagctgcctcccaccttgcctggcttttggtgaacggaacccatcatttcctgaggttcagtttaagggcnaaccangtcttttcctttgtccattgcctctgccctgggaggtgggangcatctggtccacctcctttnctggcaagtnccaangtctggagaagtgnccgcctgtccgaaaggcagccagtgccnacgctgntnacccctgctaggggtatctggaaacctggggccananactgctttcatagttttcccngaacncanccctttaggaaaagggttgg

SEQ ID NO: 5303 - DNA, 894 bp, Canis familiaris
  misc_feature (696)..(696): n comprises a, c, g, or t, or includes no nucleotide
  misc_feature (774)..(774): n comprises a, c, g, or t, or includes no nucleotide
  misc_feature (797)..(797): n comprises a, c, g, or t, or includes no nucleotide
  misc_feature (815)..(815): n comprises a, c, g, or t, or includes no nucleotide
  misc_feature (837)..(837): n comprises a, c, g, or t, or includes no nucleotide
  misc_feature (873)..(873): n comprises a, c, g, or t, or includes no nucleotide
  misc_feature (892)..(892): n comprises a, c, g, or t, or includes no nucleotide
aacaccttgaggtacaaattcctttgcatttgaaactcaaaattaatttagttaataagattatatttctcctttttcacagatcagctttgaaatttaaaaacaatggagaagactcaagaaacagtccaaagaattcttctagaaccctataagtatttacttcagttaccaggtaactgtttagttatggtccatatagggtcttgttatagagtagtggtcattcaaatactagcatacagaaaagattagacttaccagctcttaagatttcctctttaaggtgatacgtatgagaaaaatgacaaatagaacgttttagtttttttgttctaaaaagggacattttaagcacccttttaaaaatctccaatgtggggtgcctgagtggctcagttagttaagcatctgcctttggctcaggtcatggtcccaggacccttctgagtcccacatcaggctccctgctcctcaaggagcctgcttctccctctctgcctgctgctcctatctctctctgtcaaataaataaaaataaaaataaataaaaaataaaattaaaatatacaattgtacaatgtaactaaaaatactaaaaactttttgagtaggtcattggagggttttattctttatggatgaaacacattacccattatttagatattagaggtttttatgccaatttttatnacaacaaacagcttcactctacttttcacattctctggtgtcatacacactgcatttcttaggctactcgttcctttnagagccacatagtaatgcatctntaagtcacattacttggnaacatagtccacattactcctntagcaagatggatcacctggactgggtttttacagnacactggctagtctgtttntg

SEQ ID NO: 5304 - DNA, 846 bp, Canis familiaris
  misc_feature (644)..(644): n comprises a, c, g, or t, or includes no nucleotide
  misc_feature (721)..(721): n comprises a, c, g, or t, or includes no nucleotide
  misc_feature (808)..(808): n comprises a, c, g, or t, or includes no nucleotide
  misc_feature (823)..(823): n comprises a, c, g, or t, or includes no nucleotide
actgctcaaaccaaaaagcaaggtgggatcacatctgaccaagctgctgtcatttccaaattttggaagaaccataagacaaaaattcgagagagcctcatgaaccagagccgttgggacagtgggcttcggggcctgagttggagagttgacggcaaatcacagtcaaggcattcagctcaaatacatacccctgttgccataatggagctggaaataggaaaaagtggacaggaatcagaatttctgtgtttggaatttgatgaagtcaaggtcagtcaactcctaaagaagctctcagaggtagaagaaagtatcagcacactgatgcagccagcctagctgaagatggagttgttgaagcaaaggtgttcatgatccctccccagtgacctgcgatttttttttttttaatcttattcacccattttattaaatccccaaattcaaatctgtttgtctcacttgctgagatttcttttgtctttctctttcattcattcttacagttgtactacttgtagaggttctaaaactttagcatgcagagtgctcataaaagcaccttgagatcaagagtcacctgcttcactgagtaagccagcccggttccccattataaaagcattttaaaaaggcttaanggccatatccctagacacttgaattcagtaggactaggtggagtcaacttcaggaacccttactatggtgggtcggntcctggagtaggatttccttaaatcatgggaagaaattagaaaaaggggggaccaaaacattttttttatgccaatacaaggctgancaaaagccatgtgtnttgggctgaggcttaaaagcctg

SEQ ID NO: 5305 - DNA, 850 bp, Canis familiaris
  misc_feature (700)..(700): n comprises a, c, g, or t, or includes no nucleotide
  misc_feature (746)..(746): n comprises a, c, g, or t, or includes no nucleotide
  misc_feature (762)..(762): n comprises a, c, g, or t, or includes no nucleotide
  misc_feature (784)..(784): n comprises a, c, g, or t, or includes no nucleotide
  misc_feature (793)..(793): n comprises a, c, g, or t, or includes no nucleotide
  misc_feature (821)..(821): n comprises a, c, g, or t, or includes no nucleotide
  misc_feature (831)..(831): n comprises a, c, g, or t, or includes no nucleotide
ccttctgctcttcatcgggaagactcaggagtctgccgcttgtcaaagaaggtgctgatcctaagaatcttcattctcaaaattcggtgtgctgccaacttgacgttccgtctgccacaaaccacccagactgaaagaagagaaacgtcctgaaggcaaagtttacagatgtttcttccccctcggtcccaagcctgatactttagccatcataactcactcacagggagaagcagctagaagcgatgtgccttgactgattgcatagagattgcttgtaggcagcacaagaccaaacctcagtcttttgcccttactggcccagatcttcagtttctgaatccctctgcctgcccatctggtctgttgccattctgtgacttttgcttaatcccaatattttgccttttttcctccctatgtcaaagccctttttaattaccagggatgtttagccccagatcccccctatgccataacatttaaaaggctgagaaatgtggggccccactgatgtggtaggtgatcaatatgcatcttctagagacacattgaccagatgagggcctgaaatggcagtcctttagagacgctcattgcctgtgagagtctctggcaggtcactgtcatttttggaatgtacatttctaaatgtacatttggaatggagaaagaggaattctactaaaacaacaacagncaccacaaaaccccagcccccagaccacccagaatagtgatgaggncatttaaatatgctgnctggtgctatgcttcttcatgnactcattanctagggtccccttaggtttcgctggggnctcgcaagcnccaagcatttggctttggg

SEQ ID NO: 5306 - DNA, 576 bp, Canis familiaris
  misc_feature (503)..(503): n comprises a, c, g, or t, or includes no nucleotide
  misc_feature (570)..(570): n comprises a, c, g, or t, or includes no nucleotide
tcaaaacagtcatcaccaccatcatcaaaactgttaacatagcggcggcggcggcggcggcggcaaacgtcaccctccggccacggcgtccgcctaaagggatggttttctcggcggagcagctctttgccgaccaccttcttcactcgtgctgagcaggatttttgggctctccggggttcgggctgggagcagcttcatgactacgcggagcgggagagcggccacaccatgcgagagatctgagagaggaagccttcccccagctctccagctccatcagtggaatcaaccccagcctgcagaaggatgacagagatcacagccagctccccatcatctggaggaataaacagaaaccttgaaagcggatctttagaatttgcagtcagcatggccactaactagttgtgtgcaatggcgaaaagactaggtaggcatttaactcctcagaagcttgcttacttcgtctttaaattgcgattcactatacaggatattgnggctcttaaatgtggcaatgtatctgaaagctctttggaaatggtaacatgcttgctatagaaatgnggaact

SEQ ID NO: 5307 - DNA, 234 bp, Canis familiaris
  misc_feature (53)..(53): n comprises a, c, g, or t, or includes no nucleotide
  misc_feature (210)..(210): n comprises a, c, g, or t, or includes no nucleotide
cagcgatgtcctgacgcaaaagtgggagcagggcacctcgattcctccctctncatttaccccgtttaactgggccccaaggacttgtccccctgaaagtgccttaagcccagaagggtggggaggaggttgtgttgctgactcaggggctctttcctccctgtttcctgtctcttctgaccttagtttggtgcatcaatctagtggatnttgtctatttattaaaaaatattt

SEQ ID NO: 5308 - DNA, 350 bp, Canis familiaris
tgttgaatgtctgctcctcttcacactggaaattgtcaactccagaagaacaggagtttttataatctatgtttttcactgccgtatccctagcgcccagaacagggatggcacttggtgcgtacctgagaactgtttgtccgatgcctgcacgtctccttccccatgtccccaggaagggaaagatgtgttgctaaagagcagaggactgtaagggtcagagcaacaggggcctgttgagacccaggggacaaagctgtccctgcctgtcctcaaacctgagcacccctgacctggcccccacagagataggtcctacagctgtcataaattaaatttattttccagag

SEQ ID NO: 5309 - DNA, 859 bp, Canis familiaris
  misc_feature (425)..(425): n comprises a, c, g, or t, or includes no nucleotide
  misc_feature (575)..(575): n comprises a, c, g, or t, or includes no nucleotide
  misc_feature (768)..(768): n comprises a, c, g, or t, or includes no nucleotide
  misc_feature (771)..(771): n comprises a, c, g, or t, or includes no nucleotide
  misc_feature (780)..(780): n comprises a, c, g, or t, or includes no nucleotide
  misc_feature (820)..(820): n comprises a, c, g, or t, or includes no nucleotide
  misc_feature (840)..(840): n comprises a, c, g, or t, or includes no nucleotide
  misc_feature (854)..(854): n comprises a, c, g, or t, or includes no nucleotide
actcaaaatttttaccttgatacctgcataactatcttaacttccttcttatacctttagttctattttgatgactggccataataaaaatctgctggctaggtacaaagtactgagctactgcaaaacacttagtctggattgtttgattaattgttaatgaagtacacatagtttatctttgtagcccacaaggtttcaggctcagtatctatcagccacaattcttacccactgctatatctgtctagacctccacttaatttacctggaccttttctccttatctttgatgtaaagatatggtacaaacccttttcagagccattatgtggaactactttaaagaatggatattaagttattacctccatgtctccagtcacataattgaataatatccatcttttttttcccttacggtnaaaggaaataaatgaaatatataaaattatcagcttcctggaatcattgcagtgcctatatatatatacgattaggaatactcagtttccctatttccaagttacatattagaatgtaacagtgaaatttaacagtgaaatttctgggcntgtggaatacatttcatggtttacaaataagagagaaattgtcagagaaatctgtagacgttaggcacttttgaaaatcatttactttttcaaggagtaaaaaggaatccacctcacccaaagcctgagcagttcttgcctttgtctttggatgaattgaaatgaaattaattcaggcatcaagccaattctnttnctagtcctnccttttcagcccaaaaaaaaaaaaaaaagggcgggcgctntaaagatccagcttcgtacncgtgctgcgacgtnttaac

SEQ ID NO: 5310 - DNA, 577 bp, Canis familiaris
  misc_feature (569)..(569): n comprises a, c, g, or t, or includes no nucleotide
aatgaaacttaggacgtttgtttttcagttcgagtgctctccgcacttgtctgtctctcccagtctgcaaacccaccttcacatttttctctcttccctccctctccctctccccttggttgagtgtttccttccccccacagcctgcccgccaccgaggacgacctctgctttcctcttctttccctttggcagctgcaatacccggtgtttcttgggggaagtaaatctaaggaagcctcgccttccaggccaggtgtcgcccaggcccggctccggctccggctccggctccgggagggaaaggcctgtgtttgggatgctcagtgggctgcttttcccttctcttccccaacacgccctcccctccccaccttgttttctgttctccttttattaggaattcccaagtgaattttatcaatgtgggagtggaacagatgctaaaagctatccaggattttgtttttgtttttaatttgtggttcctcccttccctcccctcccatgcgtaaaacgttctgtgtaacctccattaaatttggtacaaaaccactcaccagagctgnggtgtcag

SEQ ID NO: 5311 - DNA, 207 bp, Canis familiaris
  misc_feature (141)..(141): n comprises a, c, g, or t, or includes no nucleotide
  misc_feature (146)..(146): n comprises a, c, g, or t, or includes no nucleotide
  misc_feature (151)..(151): n comprises a, c, g, or t, or includes no nucleotide
  misc_feature (178)..(178): n comprises a, c, g, or t, or includes no nucleotide
tgtggacatcggatacccaaggagatgaagctgaagcaggagaaggaggggaaaattaaccggccttccaacttttgtctgcctcattctaaaatttacacagtagaccatttgtcattcatgctgtcccacaaatagttntttantgttnacgatttatgacaggtttatgttactnctatttgaatttctatatttcccatgtgg

SEQ ID NO: 5312 - DNA, 836 bp, Canis familiaris
  misc_feature (453)..(453): n comprises a, c, g, or t, or includes no nucleotide
  misc_feature (464)..(464): n comprises a, c, g, or t, or includes no nucleotide
  misc_feature (594)..(594): n comprises a, c, g, or t, or includes no nucleotide
  misc_feature (620)..(620): n comprises a, c, g, or t, or includes no nucleotide
  misc_feature (634)..(634): n comprises a, c, g, or t, or includes no nucleotide
  misc_feature (680)..(680): n comprises a, c, g, or t, or includes no nucleotide
  misc_feature (682)..(682): n comprises a, c, g, or t, or includes no nucleotide
  misc_feature (718)..(718): n comprises a, c, g, or t, or includes no nucleotide
  misc_feature (751)..(751): n comprises a, c, g, or t, or includes no nucleotide
  misc_feature (756)..(756): n comprises a, c, g, or t, or includes no nucleotide
  misc_feature (779)..(779): n comprises a, c, g, or t, or includes no nucleotide
  misc_feature (784)..(784): n comprises a, c, g, or t, or includes no nucleotide
  misc_feature (804)..(804): n comprises a, c, g, or t, or includes no nucleotide
  misc_feature (822)..(822): n comprises a, c, g, or t, or includes no nucleotide
gtccctgctgtctggtggaaggacgcccaaggaaaggaccagatgtggtacgaggatgccttggcttccagccaccctatcatcctgtacctccatgggaatgcaggcaccagaggaggcgaccatcgggtggagctttataaggtgctgagttcccttggttaccacgtggtcacctttgactacagaggttggggtgactcagtaggaaccccatcagagcgaggcatgacctatgatgcactccatgtttttgactggatcaaagcccggagtggagacaaccctgtgtatatttggggtcattccctaggcactggggtggcgacaaatctggtgcggcgcctctgtgagcgagagacacctccagatgcccttatattggaatctccattcactaatatccgtgaggaagctaagagtcatccattctcagtgatatatcgatacttncctgggtttgntctggttcttcctcgaccccattacaagcagcggaattaaatttgcaaatgatgaaaatgtgaagcacatctcctgctccctgcttatcctgcacgcggaggatgacccggtcgtgcccttccagcttgntagaaagctctacaacatcgctgctncatctcgaagcttncgagacttcaaagttcagtttatccccttttcactcagaccttggntncaggcacaagtacatctacaggagcccctgagcttncaccggatactggaggggagttcctgggggaantcaanaacccgggcgccagcactgaatnctggntgcctgaagggaacatgaanacctttggccttcccgtntgctgggggccgcc

SEQ ID NO: 5313 - DNA, 420 bp, Canis familiaris
  misc_feature (261)..(261): n comprises a, c, g, or t, or includes no nucleotide
  misc_feature (315)..(315): n comprises a, c, g, or t, or includes no nucleotide
  misc_feature (318)..(318): n comprises a, c, g, or t, or includes no nucleotide
ggtgcgcggcggcggagagcgaggcctggtgagccccggcgctggccggctgcgggagcgtgcgcgcgggagcggtacggcgggcggcgagcgagccagcggctcacgccagcgtcggttgcctcgagcctgaaatcatgactactccaggaaaagagaactttcgcctgaaaagttacaaaaataagtccctgaatcctgatgagatgcgcagaagaagggaggaagagggactgcagttacgcaagcagaaaagagaanagcagttattcaagcgaagaaatgttgctacagcagaggaagaaacagaagaanaanttatgtcagatggaggcttccatgaggctcagattaataacatggagatggcaccaggaggtgttatttacttccgacatgatcgaaatgatattttccaat

SEQ ID NO: 5314 - DNA, 845 bp, Canis familiaris
  misc_feature (1)..(1): n comprises a, c, g, or t, or includes no nucleotide
  misc_feature (640)..(640): n comprises a, c, g, or t, or includes no nucleotide
  misc_feature (677)..(677): n comprises a, c, g, or t, or includes no nucleotide
  misc_feature (696)..(696): n comprises a, c, g, or t, or includes no nucleotide
  misc_feature (709)..(709): n comprises a, c, g, or t, or includes no nucleotide
  misc_feature (724)..(724): n comprises a, c, g, or t, or includes no nucleotide
  misc_feature (745)..(745): n comprises a, c, g, or t, or includes no nucleotide
  misc_feature (747)..(747): n comprises a, c, g, or t, or includes no nucleotide
  misc_feature (762)..(762): n comprises a, c, g, or t, or includes no nucleotide
  misc_feature (774)..(774): n comprises a, c, g, or t, or includes no nucleotide
  misc_feature (806)..(806): n comprises a, c, g, or t, or includes no nucleotide
  misc_feature (819)..(819): n comprises a, c, g, or t, or includes no nucleotide
  misc_feature (828)..(828): n comprises a, c, g, or t, or includes no nucleotide
nacgcgtgggcggctgggcatcttccctgctaattatgtggaggtgctgcctgcagatgagatccctaagcccatcaagccccccacctaccaggtgctggagtatggagaagctgtggcccagtacactttcaagggagatctggaggtggagctgtccttccgcaagggggagcgcatctgcctcatccgcaaggtgaatgagaactggtacgaggggcgtatctcaggcaccgggcgccagggcatcttccctgccagctacgtgcaggtgtgccgtgagccccggctccggatcagtgacgatggtccccagctccccgcgtcaccgcgcctgaccaccaccgcccatctggctcggcactccagctccccattgacaccacacagcccaggtgatcccaccgactgggggagccggacctccccccgccgcactggcttctccttccccacccaggagcccagagcccagacccagggtctcagcacccctgggtcaactctgtcccatcctggagactccagccgtcccctggacctggggacccccaccaccaccactcagatacactggaccccgtatcgggcgatgtaccagtacaggccccagaatgaggatgagctggagctacagganggggatcgggtggatgtcatgcagcagtgtgatgacngctggtttgtgggtgtctntcggaggacccanaagtttgggacattncctggaaattatgtagcttcngngtgagtcgtcttcgnggcaactcaaancccaaccaggatggggtgcgggagcagtagcncttacaggaaggnaaaaaggtnccccttcattcttttcc

SEQ ID NO: 5315 - DNA, 543 bp, Canis familiaris
cgagccagtcacctgaagatgtcgagcgaggagcgccgggcacaccgggacggcaccgtgtggcagctctacgaatggcagcagcgccagcagttccggcacggcagccccacggcacccatctgtgctggctccccagagttcactgaccagggccggagcaggagcatgctagaggtgccccgctccatctctgtgcctccatctccctcagacatccctcctccaggccccccgagggtcttcccaccccggcggccacacacgccagcggagagggtcaccgtgaagccaccggaccagcggaggagcgtggacatctccctggggagttctcccaggaaggcacggggccatgccaccaagaactcctctcacgtggaccgacgctccatgccctccatgggctacatgacccacacggtcagcgccccgagtctacacggaaaatcgctggaggagctctcactgcttctcgcccggttacggcggcaccaggccaggttggccagtgtgcgaaatctcgccgtcggccagttactg

SEQ ID NO: 5316 - DNA, 695 bp, Canis familiaris
  misc_feature (602)..(602): n comprises a, c, g, or t, or includes no nucleotide
  misc_feature (616)..(616): n comprises a, c, g, or t, or includes no nucleotide
  misc_feature (672)..(672): n comprises a, c, g, or t, or includes no nucleotide
gctgggctgcttgtggcagaaggaccacctcctcagcatctccctgtctgggtacatcaattacctggacaagaacaaccccagcaagcccctgcgggtcattaagggtcacagcaaatccatccagtgtctgacggtgcataaaaacggcggcaagtcctatatctactccgggagccacgatggacacattaattactgggattcagagacaggggagaatgactcctttgctgggaagggccacacgaaccaggtgtccaggatgacggtggacgaatctgggcagctggtgagctgcagcatggatgacacagtgcggtacaccaacctcacgctgagggactacagtggtcagggagttgtgaagatggacatgcaaccaaagtgcgtggctgttggccctggaggctatgctgtagtcgtgtgcatcgggcagatcgtcctgctcaaggatcagaagaagtgcttcagcatcgacaacccaggctacgagcccgaagttgtggcagtgcaccccagcggtgacatggtggctgtcgggggcacggacgggaatgtccgcttgtactccattctgggcaccacgctgaaggacgaangccgggtcctggangccaagggccctgtgaccgacgtggcgtatttccacgatggcgcctttctcgccgngtgtgatgccagcaagggggtca

SEQ ID NO: 5317 - DNA, 548 bp, Canis familiaris
cagctttgtggctgtgagtgcggggaggcccatactaacggggatcagtgttctctgatccacagtcctctggcacagaagggcaggcagcctcgagagcagctgcagctctggctattcaagtcttcagtgtaaggggcactgagccctcaaagctcattgccagtaggctaccattttcggctctccctgttcacaggcagcacccagtttgacccagtggctactggtttgcagcacaccgtatcactgtgctggcctgtgaagcaatttgttcccggggtgtgtgtattcctggagtggcgtgctgccccgatggctttcttctgcagaggatgttgccctctgacctagctgccgcctctagcctctggcttgagaacttaataaagggacttcttcccattaaacgcccaatagcactctccataaatttgctgattctctgcaaggcctgagaatctgagttacatctcttgaagccaaactccacctcttgtgcttttttgcttgggataaaggagtttttctttagaaacagtgccaag

SEQ ID NO: 5318 - DNA, 857 bp, Canis familiaris
  misc_feature (782)..(782): n comprises a, c, g, or t, or includes no nucleotide
  misc_feature (808)..(808): n comprises a, c, g, or t, or includes no nucleotide
  misc_feature (825)..(825): n comprises a, c, g, or t, or includes no nucleotide
aatgactccatgtttctctgagaagctgtgtaaatgaagtcaccctagaatatattctgtgtggatacttctatttcgttaactccatggctgatatggcatgtcttatttttttaaaaaaaaatgtgtgttaggtgtaaataacatcatgaaatgatatttaattaaaaaaatccatgtgatacctgtttagtttgagtcttctgtttggctaatactttctaaagttgtctagaataagtgctgtccaatagaactttcatcagtgatcaaattgttctgtatgctgccaagtacagcagccactaaccagatgtagctattgagaatcttaaatgtggccaagtgcaacctaggaactagatttttaattttatttcaattaaactcaaatactcacacagagctggtggtggctgtagtaacagtacagttctagagatgcccatgagtgtagtgaaggctgaattaagcactttttttcccctgcagtggttaagagtacagactctgtaaccaactgcttagatttgattcctaactccatcacgtattagctgtgtggcattggcaagttacttaaattctctgagcctcatctgtgaaacagggatagtaacagtatctacctaaaggtggttatgaggatcagatcaatgaatagatgtaaagtcttgcaactatgtccagcatcccatcaggatgttatgtcacattgaagcatgtggggagtcccaagcaccagagcttctgtccccaaggagttgagatcattcaacttncctttggggatgtcttcacctacctncctttactattggcagnttatgggaggctgagccaaggaataacttggg

SEQ ID NO: 5319 - DNA, 636 bp, Canis familiaris
  misc_feature (117)..(117): n comprises a, c, g, or t, or includes no nucleotide
gatgccatgtgagaatgtgcaacaagcagttggatatctgagcctgaaaccttgaaaacagattcagactgcagttataaatgtgtggatcatctgcataaagacggcagccaaggnaagataactttgtgatctgagcgagaagaaaagtggggctctaggagagaaacagaggaataccaccctgagttttgatagaaaaagagcctccaaaggaggaagccagaggtgtgtggtgttgtgggagctaagctaaggacaagcttcaaaaaggtctgacctgctagcagtgcacatgctattgagctgtcaccggagacaagtaatgagaaatgtgccttggttatgacagtggtgcattcattgcagtctttggcaaagtgccatttagctgaagactaagggtaacagaagccagattgcctgaggctgaaggataaacaggaagtgaggataaggagatagggagtgcaaatgactatttaaaggttagctcaagagaggaggaaagagatagcaaagtaagaacagcgggatggaggattgagaaaagaattttttaagatgggaaagacttgagcatgtttactgatggggagagaccaaattgaggtaggtgggagagatcaaattgag

SEQ ID NO: 5320 - DNA, 216 bp, Canis familiaris
  misc_feature (15)..(15): n comprises a, c, g, or t, or includes no nucleotide
  misc_feature (35)..(35): n comprises a, c, g, or t, or includes no nucleotide
  misc_feature (98)..(98): n comprises a, c, g, or t, or includes no nucleotide
  misc_feature (204)..(204): n comprises a, c, g, or t, or includes no nucleotide
  misc_feature (207)..(207): n comprises a, c, g, or t, or includes no nucleotide
cggccaactaataancacgtactgcactatagggnaaactggtacgcctgcaggtaccggtccggcaattcccgggtcgacccacgcgtccgcgaggnctgctgggattccagtaattggagaaggaggcatgatgaagactctcctgctgctggtggggctgctgctgacctgggacaatggacgggttttgggagaccaggntgnctcagacac

SEQ ID NO: 5321 - DNA, 734 bp, Canis familiaris
  misc_feature (7)..(7): n comprises a, c, g, or t, or includes no nucleotide
  misc_feature (11)..(11): n comprises a, c, g, or t, or includes no nucleotide
  misc_feature (30)..(30): n comprises a, c, g, or t, or includes no nucleotide
  misc_feature (37)..(37): n comprises a, c, g, or t, or includes no nucleotide
  misc_feature (41)..(41): n comprises a, c, g, or t, or includes no nucleotide
  misc_feature (44)..(44): n comprises a, c, g, or t, or includes no nucleotide
  misc_feature (50)..(50): n comprises a, c, g, or t, or includes no nucleotide
  misc_feature (73)..(73): n comprises a, c, g, or t, or includes no nucleotide
  misc_feature (75)..(76): n comprises a, c, g, or t, or includes no nucleotide
  misc_feature (82)..(82): n comprises a, c, g, or t, or includes no nucleotide
  misc_feature (98)..(98): n comprises a, c, g, or t, or includes no nucleotide
  misc_feature (110)..(110): n comprises a, c, g, or t, or includes no nucleotide
  misc_feature (126)..(126): n comprises a, c, g, or t, or includes no nucleotide
  misc_feature (150)..(150): n comprises a, c, g, or t, or includes no nucleotide
  misc_feature (152)..(152): n comprises a, c, g, or t, or includes no nucleotide
  misc_feature (251)..(251): n comprises a, c, g, or t, or includes no nucleotide
  misc_feature (253)..(253): n comprises a, c, g, or t, or includes no nucleotide
  misc_feature (286)..(286): n comprises a, c, g, or t, or includes no nucleotide
  misc_feature (387)..(387): n comprises a, c, g, or t, or includes no nucleotide
  misc_feature (567)..(567): n comprises a, c, g, or t, or includes no nucleotide
  misc_feature (576)..(576): n comprises a, c, g, or t, or includes no nucleotide
  misc_feature (578)..(578): n comprises a, c, g, or t, or includes no nucleotide
  misc_feature (601)..(601): n comprises a, c, g, or t, or includes no nucleotide
  misc_feature (617)..(617): n comprises a, c, g, or t, or includes no nucleotide
  misc_feature (639)..(639): n comprises a, c, g, or t, or includes no nucleotide
  misc_feature (653)..(653): n comprises a, c, g, or t, or includes no nucleotide
  misc_feature (663)..(664): n comprises a, c, g, or t, or includes no nucleotide
  misc_feature (694)..(694): n comprises a, c, g, or t, or includes no nucleotide
  misc_feature (705)..(705): n comprises a, c, g, or t, or includes no nucleotide
  misc_feature (712)..(712): n comprises a, c, g, or t, or includes no nucleotide
  misc_feature (723)..(723): n comprises a, c, g, or t, or includes no nucleotide
  misc_feature (731)..(731): n comprises a, c, g, or t, or includes no nucleotide
ttatcgnccanatctatacatcacgcactncactctnaggnaanctggtnacgcctgcagataccggtccggnanntcccgnttcctcccacacgtcntctcccctgggnatccctgctcttcagnaaattggccatgggagccttgggncngtctgtctcgtggagcctgaaactggggcctaactgcagtcacctcccttctttgggcagtagaaacactttcaaaacccaaatctggtcataatctantngcatcccggctttttgtctgaggggtcatctgnctgcatctcctccacggctgtcccaccctagaatgtgacttccctcctcaggaacctgcaggagactccaggaattttctgggggttggctctccatttgncagcctctcctccctaaggtgtccaggtggcagagttgtacagagcagctttctccccagtggctgcagcaggcgggcatgctgtcaggccattggaggaacctcagctcggctcctcaggcacctttcagggtgtagcttgggcctaaggagccacatgagaaaggatcctagcccggnagaggctgngngggactcgcccctggccccccanctgggccctttggacnggtggcacaccacctgcggcantattgccctgtccncggcgcaggnnaaatactacctgcccttccttgctcccaangccacttttcnaaagatncctccctggcnaattaaancaa

SEQ ID NO: 5322 - DNA, 845 bp, Canis familiaris
  misc_feature (6)..(6): n comprises a, c, g, or t, or includes no nucleotide
  misc_feature (11)..(11): n comprises a, c, g, or t, or includes no nucleotide
  misc_feature (42)..(42): n comprises a, c, g, or t, or includes no nucleotide
  misc_feature (778)..(778): n comprises a, c, g, or t, or includes no nucleotide
  misc_feature (786)..(786): n comprises a, c, g, or t, or includes no nucleotide
  misc_feature (813)..(813): n comprises a, c, g, or t, or includes no nucleotide
cactanagggnaaactggtacgcctgcaggtaccggtccggnaattcccgggtagctcgttcctgaggagaggtggagattctggacgcaaagacgcgggagaagctgtgcttcctggacaaggtggagccccatgccaccattgccgagatcaagaaccttttcaccaagacccatccgcagtggtaccctgctcgccagtccctccgcctggaccccaagggcaagtccctgaaggatgaggacattctgcagaagctgcccgtgggcaccacggccacactctacttccgggacctgggggcccagatcagctgggtgacggtcttcctgactgagtacgcagggcccctctttatctatctgctcttctacttccgcgtccccttcatctacggccacaaatacgacttcacgtccagccggcactcggtggtgcacctcgcctgcatctgccactcattccactacatcaagcgtctgctggagacgctcttcgtgcaccgcttctcccatggcaccatgcccttgcgcaacatcttcaagaactgcacctactactggggctttgccgcctggatggcctattacatcaaccatcctctctacacgccccctacctacggagctcagcaggttaaactggcactggccatcttcgtgatctgccagcttggcaacttctccatccacatggccctgcgagacctgcggccagcggggtccaagaccaggaaaaatcccataccccaccaagaaccccttcacgtggctcttnctgctggngtcctgccccaactacacctacgaggngggggtcctgggattggctttgccatcatgac

SEQ ID NO: 5323 - DNA, 766 bp, Canis familiaris
  misc_feature (515)..(515): n comprises a, c, g, or t, or includes no nucleotide
  misc_feature (540)..(541): n comprises a, c, g, or t, or includes no nucleotide
  misc_feature (560)..(560): n comprises a, c, g, or t, or includes no nucleotide
  misc_feature (589)..(589): n comprises a, c, g, or t, or includes no nucleotide
  misc_feature (614)..(614): n comprises a, c, g, or t, or includes no nucleotide
  misc_feature (653)..(653): n comprises a, c, g, or t, or includes no nucleotide
  misc_feature (674)..(674): n comprises a, c, g, or t, or includes no nucleotide
  misc_feature (732)..(732): n comprises a, c, g, or t, or includes no nucleotide
cagcggcggcggctgtggtgaaggaggaggaggaggagcgtcgcgcgctgccagctaggcctgaccatggacgaggaatacgatgtgatcgtgctggggaccggcctcaccgaatgtatcttgtcgggcatcatgtccgtgaacggcaagaaagtgctgcatatggaccggaacccctactatgggggtgagagctcctccatcacacccctggaagagctctataagcgttttcaattgctggaggggccccctgaggcaatgggcaggggccgagactggaacgttgacctgatcccgaagttcctcatggccaatgggcagctggtaaagatgctgctgtatacagaggtgacgcgctacctggacttcaaggtggtggagggcagcttcgtctacaaggggggaaagatctataaagtgccatccactgagaccgaagccttggcttccaatctgatgggcatgtttgagaaacgccgtttccgcaagttcctggtatttgtggcaaactntgatgaaaatgaccccaagaccttnngagggtgttgaccccccanagcaccagcatgcgtgacgtctacccggnaagttttgacttgggccaggatgtnattgactttatctggccatgcccttggcccttttaccgnactgatgactaccttggaacnaccctgtctttgagaccattcaaaccgcatcaagtttgtacagtgaagtcccttgggnttcggttttgggaaaagaatccttttttttttac

SEQ ID NO: 5324 - DNA, 816 bp, Canis familiaris
  misc_feature (603)..(603): n comprises a, c, g, or t, or includes no nucleotide
  misc_feature (652)..(652): n comprises a, c, g, or t, or includes no nucleotide
  misc_feature (661)..(661): n comprises a, c, g, or t, or includes no nucleotide
  misc_feature (687)..(687): n comprises a, c, g, or t, or includes no nucleotide
  misc_feature (711)..(711): n comprises a, c, g, or t, or includes no nucleotide
  misc_feature (777)..(777): n comprises a, c, g, or t, or includes no nucleotide
  misc_feature (789)..(789): n comprises a, c, g, or t, or includes no nucleotide
ttttttttttttttttttactcacctgcttgaatacttgaataaaccattctccagttttaacccttttacttttatccttttagataatatcatccaaactcctgacaaattgcacagaagctctttggcattaatctaattttagtgtactgataaagacgaaaacatggtttttcctttacttggacaaagtaatgtaatttttaccttatttatctgtatgaaattccagcagttaatttgaacatttatttatatgatgtttgtatttttaggtctttaatacagtgtttctacctctcatttgtaactgcatgcattactctcgaaactaggtaaaactcacggaattgttgtgtactagcctttttattcctgtgtgtacagatgtatattaaggtaaaataaaactgacaaagtgtttctagggtaaagctgggtccatattacatggctcttcaggccaggtccttcctcagtgagtttggaggcttggtcattaatatcctttgtcctgcccccagatttcagatgctcagcctgtcatgcaggctaccactcgtgtagactacatgatgagggttctggcccctccctgcangggttataaacatcgttagtaggaatactgttttgtatcactttttcangtgtcccangcaatttcattttatgttctcacagntctcacccacgttatcttcttcanggggggctgggttcagtctgggcccttcggcttccaaactggttttttggtttggtttggtttggnttggtttggttnggtttgggtttggtttggtttaaaaaa

SEQ ID NO: 5325 - DNA, 841 bp, Canis familiaris
  misc_feature (587)..(587): n comprises a, c, g, or t, or includes no nucleotide
  misc_feature (646)..(646): n comprises a, c, g, or t, or includes no nucleotide
  misc_feature (678)..(678): n comprises a, c, g, or t, or includes no nucleotide
  misc_feature (698)..(698): n comprises a, c, g, or t, or includes no nucleotide
  misc_feature (720)..(720): n comprises a, c, g, or t, or includes no nucleotide
  misc_feature (723)..(723): n comprises a, c, g, or t, or includes no nucleotide
  misc_feature (752)..(752): n comprises a, c, g, or t, or includes no nucleotide
  misc_feature (759)..(759): n comprises a, c, g, or t, or includes no nucleotide
  misc_feature (774)..(774): n comprises a, c, g, or t, or includes no nucleotide
  misc_feature (832)..(832): n comprises a, c, g, or t, or includes no nucleotide
ctgtacacctggcacgctgccgggttgctcggaattccgaagaagagaatgtcctcgccttcgtggctcctgtggcatctttggggggtggttcaaagcagggcttgtgggacatacggttctgaagacctatagtgtctgcctactggtttctccttgctgcctccgtggactggggaccaggagatgtcttgaggcccagaagaaaggatttggagactctggtagaatttgtccaaacgaccctttgaaggatctctaaaagctggtgccaaaggtcacttcccttgctcgccctctgctttcgagcctgacagccttgcccctcctaggtctcgaggcaggtgctgggagcggggtcaccggggcttgggcatccagagcgggaaccggacgatgcgcgtttccctgcttggggttcggtgggaacctggggcgtgcttcaggtaccatagagtcccgtccatggggttcacaccgagccattcagatcctccccccattcttccccagtggggcactttgcccgagaggatgtccgtgtatcccagttcctgtgcaaccgaagatgggttgatttccctttnctgccatcccgagtcccgtcagatggcaagtgtgtgtgcgcaccagcacgtgcttgtangttggtcgtagtttttgacagaagggcctgcngctctgctcttgaaaatggncttctccttttatgctggctgncanagccgactcggagtcttgaccctttccanccattangtgcaccccccctgnctgactgctgagttcggtccctacggagctaacattctgaacagccggctgtaaaggnccagtgggg

SEQ ID NO: 5326 - DNA, 846 bp, Canis familiaris
  misc_feature (5)..(5): n comprises a, c, g, or t, or includes no nucleotide
  misc_feature (23)..(23): n comprises a, c, g, or t, or includes no nucleotide
  misc_feature (705)..(705): n comprises a, c, g, or t, or includes no nucleotide
  misc_feature (709)..(709): n comprises a, c, g, or t, or includes no nucleotide
  misc_feature (712)..(712): n comprises a, c, g, or t, or includes no nucleotide
  misc_feature (789)..(789): n comprises a, c, g, or t, or includes no nucleotide
  misc_feature (795)..(795): n comprises a, c, g, or t, or includes no nucleotide
  misc_feature (797)..(797): n comprises a, c, g, or t, or includes no nucleotide
  misc_feature (814)..(814): n comprises a, c, g, or t, or includes no nucleotide
  misc_feature (840)..(840): n comprises a, c, g, or t, or includes no nucleotide
caagnacataatagaatcagagnacttccagcaggaaaaacaaccttgctgctcccccgtctacagtgtccagcaaaataaaagtgccagtccctcagcccatagtgaagaaagagaagcggcaaaattcctccaggtttaacgccagcaataacagagagcttcaaaaactgccgtctctaaaagatgttcctcctgctgatcaagagaagctttttatccagaagctacgtcagtgttgtgtcctctttgactttgtttccgacccactaagtgacctaaagtggaaggaagtaaaacgagccgctctaagtgaaatggtggagtatatcacccataatcggaacgtgatcacagagcctatttacccagaagtagtccacatgtttgcagttaacatgtttcgaacgttaccaccttcctccaatcctacgggagcagaatttgaccccgaggaagacgagcccacgttagaagcagcctggcctcatctacagcttgtttatgaatttttcttaagatttttagagtctccagatttccaacctaatatagcgaagaaatatattgatcagaagtttgtattgcagcttttagagctctttgacagtgaagatcctcgggagagagattttcttaaaactacccttcacagaatctatgggaaaattcttaggcttaagagcttacatcagaaaacagatnaatnatntattttatagggtttattttatgaaacaggagcatcacaacggcatagcagaattactgggaaatcttgggggagtntaattnanggggattggccttaccncttaaaagaagaggcccaggattttnttactg

SEQ ID NO: 5327 - DNA, 745 bp, Canis familiaris
  misc_feature (724)..(724): n comprises a, c, g, or t, or includes no nucleotide
agcaatgctgaaatgagaatcaaaatgtgccctttacaaaaaactaaatgtctttaaaagaaacatgatgggctttttttagtacaataaagagcgtacatacatctgaaaggacaaataatgttatagaagaattgggaggaatgtatagagtgattattttggatatgcaacttaaaatggaaaagttgaaatttggggtaatacaaattttaaaagacattttagaaacctttcaaatattgagaggtatttcttaaaaactcaaaaatatctaatgagccccttttcttatggaaacaaggaaaataaatgagacaaaagtggtctatgggtgagataattttccctcagtttattcctcaaaagtatgttgattttccagctgtaagctttctttctgcatacatgcatgcatctatacaaatggataatgttaccttatgaatttgccaagacctaaaatgtaaatataagcaggatatgatcaaaacaaaatgaacaaaagacaaaagaagcaatgcattattggctagacattccttttaagtccaatatcaaaggaaactggatataagcagtaacaggtgcaatggagtagacggagactctcttcagccgattttgccatttgtctgtgtaaatacagctacataaagcctgtaactacttgtgcgtagctacaaatctaagcatgtgtatatacacatatgtatttaatagnggtggttactatttataattt

SEQ ID NO: 5328 - DNA, 806 bp, Canis familiaris
  misc_feature (651)..(651): n comprises a, c, g, or t, or includes no nucleotide
  misc_feature (790)..(790): n comprises a, c, g, or t, or includes no nucleotide
  misc_feature (803)..(803): n comprises a, c, g, or t, or includes no nucleotide
cggcggaggacgcgagcccagatcaaggactgagctctcggcaccatgaaccccgccatcggcttcgctcttttgctgacaggtactgggtaaggggcagggctgggattccaagcaccttggcttccttccctttagggaagctagcttctccctcccaacctcagaagcaggaggtgactgagggagagagggctcttgttcatccctaaatctgctgagtaacctagctgatctctgactgcctgaagcggttttttgaaaaagagcccactgagtctgccctggactgagttggaatctccaaacgggaaccaagaacctacatcaactccccagaatctcctgctccctgaggacacccaggactaaggaagatgagggagggagggagggctgggtctgcagtggaggagctgaactggctctgcagggacctctgggatagggagaggtgcccaaggtacagaaccttgtacccttcctggctaggccattccctgctgttacagtgggtgggaggccccctgctctgcaggccccccaacttgggagtgggcactgctggtgccagtcttgcaggtagcccgtggacaaaaggtgaccagcctgacagcctgcctggtggaccagagccttcgtctggactgncgccacgagaatgctaccaccttgcccatccagtatgagttcagcatgacccgggagaaaaagcagcacgtgatctatggcactggggggggtaccagaaacactcataccgcttccgaaccaatttcaccagcaagtncaacatcaagggncct

SEQ ID NO: 5329 - DNA, 808 bp, Canis familiaris
  misc_feature (708)..(708): n comprises a, c, g, or t, or includes no nucleotide
  misc_feature (715)..(715): n comprises a, c, g, or t, or includes no nucleotide
  misc_feature (733)..(733): n comprises a, c, g, or t, or includes no nucleotide
  misc_feature (758)..(758): n comprises a, c, g, or t, or includes no nucleotide
  misc_feature (767)..(767): n comprises a, c, g, or t, or includes no nucleotide
  misc_feature (780)..(780): n comprises a, c, g, or t, or includes no nucleotide
gccgcggccgtgttccgcgctacgctgagagggtggagaaccggcgtcccgccgggctgcaggctacggcggctgagccagacccaggggcctcctgattaccccagctttgtggagtctgtggatgaataccagtttgtggaacgcctgttaccccctaccagcatcccggagcccccgaagcacgaacattatcccactcctagtggttggcagccacccagagaccccccacccaacctgccctactttgtgcggcgctctcgaatgcacaacatccctgtctacaaggacatcacacatggcaaccgccagatgactgtgatccgaaaggtggagggagacatctgggccctgcagaaggatgtggaagattttctgagtctactgctggggaagacacctgtcacccagatcaatgaggtgacaggtaccttacgggtcaaaggctactttgaccagcagctcaaagcctggctcctggagaagggcttctgaggctcagctgagcagcctgaataatagcatcccccacagactagagtttaggggtgtcttggaaggaggggggatggctgttggagcaattaggacaggaaggtataaacgccaggcctaagagcttgggcagggcagaggaagttaggctaaagggcttcagagcttcagagcaggccttgctcatattaaaggggtaatgggactctntttacangtgccagcagtgggaganggctgtgtgacattggtgaccctgnctttatcanagctcaattgggntctgctggtcaaattcttggaggttgac

SEQ ID NO: 5330 - DNA, 837 bp, Canis familiaris
  misc_feature (3)..(3): n comprises a, c, g, or t, or includes no nucleotide
  misc_feature (712)..(712): n comprises a, c, g, or t, or includes no nucleotide
  misc_feature (771)..(771): n comprises a, c, g, or t, or includes no nucleotide
  misc_feature (789)..(789): n comprises a, c, g, or t, or includes no nucleotide
  misc_feature (820)..(820): n comprises a, c, g, or t, or includes no nucleotide
  misc_feature (830)..(830): n comprises a, c, g, or t, or includes no nucleotide
agnaggggttgattttggattgagtatcctgtggttcttgctttttactccttgttcatttgtctgttggtacagaccactttacggagctttcaggagtgacagttcattcagattctttgtattcttcttcgtctatatttgtcagtttgctgttcatgtactccaagctgcaggatttcataattggggcaactgtggttggatttcatcccttactggtctcaaccaaagtattcccgttggaatcatgatgataatcatagcggcactttttacagcatcagcagtcatctcgctagttatgtttaaaaaggtacacggactataccgcacaacaggtgctagttttgagaaagcccaacaagaatttgcaacaggtgtgatgtccaacaaaactgtccagactgcagctgcaaatgcagcttcaagtgcagcaactagtgcagcccagaatgctttcaagggtaaccagatttagagaaccctccaacaatacactggtatcttctgactgtactttttctccagttactgtattctataaatatttttatgttcaaaacacagtacacatggcatgtatatttcctgttcacttgtgcatggggctaaaaccagaaaaacttccttgtcttattatttaccctagcagtttaatattttggcgccccctgcagaaaaaaaaatcacatgctaaataaatattctncatattttttggggggatgaatgttcagcaaatatttcagtggtgacacactggaattnatatgatacttatggatnaaaatgcatttagtactagctgcagtctttntttcagaatnttaaact

SEQ ID NO: 5331 - DNA, 672 bp, Canis familiaris
  misc_feature (526)..(526): n comprises a, c, g, or t, or includes no nucleotide
  misc_feature (534)..(534): n comprises a, c, g, or t, or includes no nucleotide
  misc_feature (546)..(546): n comprises a, c, g, or t, or includes no nucleotide
  misc_feature (579)..(579): n comprises a, c, g, or t, or includes no nucleotide
  misc_feature (589)..(589): n comprises a, c, g, or t, or includes no nucleotide
  misc_feature (597)..(597): n comprises a, c, g, or t, or includes no nucleotide
  misc_feature (649)..(649): n comprises a, c, g, or t, or includes no nucleotide
gctgttgcagccggccctgaagagacagagggcagtggtggagcctcggcgtatttggaccaagagagatatccaagctgacttctgcagctggactgcatccgatcctcacatagaggatctcaagagccaggaactgagtcctgtcggcctctttgagttgttttttgatgaaggaacaattaatttcattgttaatgaaaccaatcgttatgcttggcagaaaaatgtcaacctggggctcacagcccaggaattaaagtgtgttctgggcattttgattttaagtgggtatatatcctatccaaggagaaggatgttttgggaaacctctcctgattcccatcatcatcttgtggctgatgcaatcagaagggacaggttcgaagtgatcttctcctacctgcattttgcagataacaatgagctggatgaaagtgataggtttgccaaagtcaggcctctcatcatccggatgaattgcaatttccagaagcacgcacccttggaagagttctacagcctntggagagnccatgtgtgagnactttgggcacccgggatccaagcctctgcctncaaggcaggnccatgcanctgggctacaagatctggtgtgggacaaccattatgggcttaccctggtgtngtttgagcccctcacagggcacg

SEQ ID NO: 5332 - DNA, 774 bp, Canis familiaris
  misc_feature (759)..(759): n comprises a, c, g, or t, or includes no nucleotide
attttgctcattaaatgcatttgtttgtaatcatgggattaacattcagatttttaattaacattagaaagatacagtaaaactgcagatatttaactatgtgaagcttaggtttgtctactttgtaaaatatctttaaatgttttagcaatatggtagtcatggtgtcattctcagtttgagtggggctgttgttcagtgttcagtaagcaaaactatgtgaaatcttttagcttttaattatttagctaatagtccatagagaaaatatttttctcttaggagattttgaagtcatagcctacctacaaaagggaccactacatttaaaacattaaaaaatgaataactctgggaggaggtgactgctattggatatggggtcttcttttgggtactgaaagtgttctcagatagtggtaagggttccacaactctcaatatactgtaaaccactaaattgtacactttaaatgggtgaattttatgttatatgaattatatctcaataaagctatttaaaaaaacccagtaactgcttgttatatcacattgaatcatggaggaactctttgtttttctagatgctggatccattgtctttaagcagccctgaaaattctggctcaggaagttgtccatcacttgatagtcctttggatgggtaatattgattataggttttattttttagtatatgtgcataaatgcatgtatatatattatgttagaagagtgtaattgatactcattacttanggcaaatgaattttt

SEQ ID NO: 5333 - DNA, 787 bp, Canis familiaris
  misc_feature (649)..(649): n comprises a, c, g, or t, or includes no nucleotide
  misc_feature (663)..(663): n comprises a, c, g, or t, or includes no nucleotide
  misc_feature (708)..(708): n comprises a, c, g, or t, or includes no nucleotide
  misc_feature (740)..(740): n comprises a, c, g, or t, or includes no nucleotide
aagttgtttaattgagtttttttgtttgtttgtttgtttgtttattgaggtagatatttagcattatgaacttcctcttaaaacttctttgctgcatctaataaattttggtatgttgtattttcatttcatttatctcaaagttgttttttttttatctctcctttgatttctttgttcactcattggttattcagacatgctgtttaatctccatacatctgtgaatttttcactttttcttgtaattaatttctagtttcataccattatagtttgttattattttaatcttcttaaatgtattaaaatttttttgtgacctaacatgtgatctattctggagaatgttccatgtgcacttgaaaagaatgtgtattctgttacttacttttgtttagaatgttctgtgtatatctattaagtcactctggtctaatgtgtcatttaaggcctgtgtttccttattgatttctttcctggtataagtgggatattaaagttcttttctattactgtattgtcaatgtcttcagttaggtctgttaatatttggtttatatatttaggtactctaacttctgttggatacatatatatttacaaatgttatatcctcttgttggattgacctctttatcatttctgnaatgccttctttgnctctggattacaaccctagttttaaagtctattttgtatgatatnaagtatagctatcccagctttctttaggtttncattcttcatgaaacacctttttccattcccttggctttccgtttgg

SEQ ID NO: 5334 - DNA, 519 bp, Canis familiaris
  misc_feature (4)..(4): n comprises a, c, g, or t, or includes no nucleotide
  misc_feature (478)..(478): n comprises a, c, g, or t, or includes no nucleotide
  misc_feature (512)..(512): n comprises a, c, g, or t, or includes no nucleotide
  misc_feature (514)..(514): n comprises a, c, g, or t, or includes no nucleotide
aggnacagctctgctccctggtcagctggcccctcctgcttctccgtggtgatttggttggctccttaacacctgtgctgtctctgtgccctctctccccgcgcccacctgcctgccccccacactcccccagcggagagcatgatccgtgaccttgcttctggttttcgcctctgggacaagtaagtcaatgtgggcagttcggtcgtctggatttttcttttcctttttctgttcatttcatcttgccctccccacccccgaacccaggttgtgcaagtggcttttcctgagacttgcccagctttgagaatctcctcatccgccctctggcacccagcctatgggggaagggaggggagggacgggcgtagtgggagacctagctaagagctgagggtaagggcaggtaggtgtgaggctgtggacattatcggagtgtttcggttttggttttggttttttggttttttggttntctttttttttttttttaaaccgggcaatattgngntcagt

SEQ ID NO: 5335 - DNA, 878 bp, Canis familiaris
  misc_feature (704)..(704): n comprises a, c, g, or t, or includes no nucleotide
  misc_feature (709)..(709): n comprises a, c, g, or t, or includes no nucleotide
  misc_feature (742)..(742): n comprises a, c, g, or t, or includes no nucleotide
  misc_feature (745)..(745): n comprises a, c, g, or t, or includes no nucleotide
  misc_feature (763)..(763): n comprises a, c, g, or t, or includes no nucleotide
  misc_feature (794)..(794): n comprises a, c, g, or t, or includes no nucleotide
  misc_feature (808)..(808): n comprises a, c, g, or t, or includes no nucleotide
  misc_feature (857)..(857): n comprises a, c, g, or t, or includes no nucleotide
  misc_feature (871)..(871): n comprises a, c, g, or t, or includes no nucleotide
ttactgtgattttgagtggagggggcgttgaaagcttcagtacctaaatccttgccctctgttgtcagcggagcaagggttctgctgactgagctagcttgtgcacatggaagtccctagaggttctgcaaggcatgccaacaatcaaaccaaaaagactcttggagctctacaatactcgagtgtattaaaggctctgagaagtcctgcggtaacttaacagttaaccttctatcaatccagcatttccaaacttcactgagcctgaaactttttttattttttggtctcataccttgtccagccctccacaaaccatgttttgcagaacttctgccaactttggtatagcttaccctcttcctattccaggaaagattttattattagaggaccctttagaaggcatggtacctgtgatctgttctaagtcacaaagaggtggttgttgaatcagagtctggggcaggtggggaaaagcacacagattccatgtgtgctttggggagcaggatggctttgacctcgggaagaggagagccttcagtttttagccgaagccagccattgtatttttgactaccgtgacctatccccagatacaggtgcagtgctggttgctattcaaattttcttgtgccttgtgaattccataccatgtcctgcacctcatactttgtggtgtcactcctgccactgtgaangcagnttgtcatttatgtggcttggaatctaatatcgntangggtctttttaaagtaanggtgatgagtttcttctcatggatgagcctnacgtaattggaggnggtttcccatgctaaaaaaggttttgggctttttgggttgatggaaagnacattgggactggngaaccca

SEQ ID NO: 5336 - DNA, 775 bp, Canis familiaris
  misc_feature (15)..(15): n comprises a, c, g, or t, or includes no nucleotide
  misc_feature (302)..(302): n comprises a, c, g, or t, or includes no nucleotide
  misc_feature (355)..(355): n comprises a, c, g, or t, or includes no nucleotide
  misc_feature (392)..(392): n comprises a, c, g, or t, or includes no nucleotide
  misc_feature (407)..(407): n comprises a, c, g, or t, or includes no nucleotide
  misc_feature (475)..(475): n comprises a, c, g, or t, or includes no nucleotide
  misc_feature (481)..(482): n comprises a, c, g, or t, or includes no nucleotide
  misc_feature (512)..(512): n comprises a, c, g, or t, or includes no nucleotide
  misc_feature (552)..(552): n comprises a, c, g, or t, or includes no nucleotide
  misc_feature (605)..(605): n comprises a, c, g, or t, or includes no nucleotide
  misc_feature (632)..(632): n comprises a, c, g, or t, or includes no nucleotide
  misc_feature (645)..(645): n comprises a, c, g, or t, or includes no nucleotide
  misc_feature (673)..(673): n comprises a, c, g, or t, or includes no nucleotide
  misc_feature (687)..(687): n comprises a, c, g, or t, or includes no nucleotide
  misc_feature (693)..(693): n comprises a, c, g, or t, or includes no nucleotide
  misc_feature (734)..(734): n comprises a, c, g, or t, or includes no nucleotide
  misc_feature (755)..(755): n comprises a, c, g, or t, or includes no nucleotide
  misc_feature (763)..(763): n comprises a, c, g, or t, or includes no nucleotide
aagtttggtacagtnggcattatgtgcacagcaaattgccaaaggaccaagtaacttaaaagtttttttaatagaatgccattttgtggaaacaagaataggtgaaatgagacattatctaaaccaaactttaatatttctgaaaatgaagctgagatttggttttaaatgttgatttttttttttaaagaaaacatctgaaagccttcgaatactgtattaaaccatgagagaaagcagatgtatttttacattttttcttttacataaaaatttaaaaattccaacttttataatattanaattaaaaaccagctggctgagtgcagtcagggtgaaaatacttgtgatgtanacatgagctagattggggtcgggtggatgttgaccanttttgaatggtttangtttaaaattgaactatttttgtttgaaaatgtaaagaatttcctacaagaaaatttcatgaaatcanaaagtnnattattttcaccctattgcagctaaatggncctggggaatggaattttcgacctcactactttggatggnacaccttcatcacttatgttacttttgtgcctccacaatggattgggggattntgctttcactggttagtgaataatcanaaggaaaaaaatnccttattattggtaagttagccatcatnatgcctctcggaangcattnctgtactgggtcctattcaagatttaaatatgctactactngaggaaaaaaccattgcctgncgaattgnaagactgccttt

SEQ ID NO: 5337 - DNA, 658 bp, Canis familiaris
  misc_feature (401)..(401): n comprises a, c, g, or t, or includes no nucleotide
  misc_feature (405)..(405): n comprises a, c, g, or t, or includes no nucleotide
  misc_feature (427)..(427): n comprises a, c, g, or t, or includes no nucleotide
  misc_feature (490)..(490): n comprises a, c, g, or t, or includes no nucleotide
  misc_feature (503)..(503): n comprises a, c, g, or t, or includes no nucleotide
  misc_feature (508)..(508): n comprises a, c, g, or t, or includes no nucleotide
  misc_feature (517)..(517): n comprises a, c, g, or t, or includes no nucleotide
  misc_feature (572)..(572): n comprises a, c, g, or t, or includes no nucleotide
  misc_feature (600)..(600): n comprises a, c, g, or t, or includes no nucleotide
  misc_feature (636)..(636): n comprises a, c, g, or t, or includes no nucleotide
ccttagttatatgttatgtattttattgaactgatcctgaaaggtataaaacatgatatttagcctcattatgcaataatcacattgcctttgtgttaatggtcaagtacttacccttaaagtggtggatagtttttcagacgaattcaagcagagtcttgggtacaggaaatgtaatttatgaagtaaatcctagttgcttaatcaaactaagggtctcttaacaactaagcaaacctctcatctggcatccttaaaatgagattccctgagaaaccattcaccactactggaactggtatctagctacttagtcttactttggatttatttatgcttcagaatacagctgtttgtcctgtgcatgaacatatgaataattatgtgtggatatgtgaggntttnccaatagaaaaagttaactggnacttctaaatattaacatacttctggggtaaatttggtatagtattaaataaacttaagctgnagctttttaccgngtttngataatggncccaacatctggctgtttacatgggataaaatcaagttttaaacaacagccattntaagaacttgtcctggtgaatggacggnaaaatttaatgcattgtaaaacctggtggggaaggngccaaaaggttgatggggacaa

SEQ ID NO: 5338 - DNA, 319 bp, Canis familiaris
cggggtctcgggagagtgtatttggtcagatgaccttgaatgaatagactactgtgttgaaagagccttatcacactgcctcagatgcataaagcatatgcacacaagctaggtaatggatgttctgacctccgaagtcttgcaaagagccatttgcctaagggagaggcgatttttgtaggtgccgtgaaggaacactattactgttggtaagccttcgggggtgggggtgtgagtgggaatgataaacagatatttttgtttcctgtgtaaatactggaagaatcctttcataataaactagagactctacaacaac

SEQ ID NO: 5339 - DNA, 392 bp, Canis familiaris
tttgactcaaaacttatttatcctgaaaaggacctccaacacaggagtcctccttgtcatttctttgtggtgtggtgtaccacctgatggcatggttaaagaggagcacgtgtcgacgagctgccatttgacaactttgatcacccatacaagacaccacctgtgctcatggttggaaaactgaaaggggggaaggacagctgctcccctccttggagctaaggatccttggctccgtgctttcttttacagctgtttacagacaagacaggccaaggcagacggccactgctcttgtaatgtttgctcagaggaatatgaccattttatttttgaaaagggatgatgtgtttttgtgccaggtggttataaattaaacctttaataataat

SEQ ID NO: 5340 - DNA, 515 bp, Canis familiaris
  misc_feature (359)..(359): n comprises a, c, g, or t, or includes no nucleotide
  misc_feature (381)..(381): n comprises a, c, g, or t, or includes no nucleotide
  misc_feature (395)..(395): n comprises a, c, g, or t, or includes no nucleotide
  misc_feature (403)..(403): n comprises a, c, g, or t, or includes no nucleotide
  misc_feature (456)..(456): n comprises a, c, g, or t, or includes no nucleotide
gcagctgcaggaagtgggcccaaggaccccctggctcgcaagatgcggctccggaggcgtaaggactcagcccaggatgaccaggctaagcaggtgctgaagggcatgtcagatgtggcccaggagaagaacaaaaagcaggaggagagtactgacgcccgagcccctgggggcaagacacggcgctgggaccagggcctggagaagccgcgccttgactactctgagtttttcacggaggatgtgggccagctgcctggtctgaccatctggcagatcgagaactttgtgcctgtgctggtggaggaagccttccatggcaagttctatgaggctgactgctacattgtgctcaaaanctttcttgatgaaaaggggttntttgaactgggagnatttattnttggattggggggggagggccacccttgaaaaaaaaggcttggttttgccatncattgccgggaaccttgcgcaactacctgggggcccaatgccccacttttccgggagga

SEQ ID NO: 5341 - DNA, 289 bp, Canis familiaris
  misc_feature (12)..(12): n comprises a, c, g, or t, or includes no nucleotide
  misc_feature (44)..(44): n comprises a, c, g, or t, or includes no nucleotide
  misc_feature (46)..(46): n comprises a, c, g, or t, or includes no nucleotide
  misc_feature (48)..(48): n comprises a, c, g, or t, or includes no nucleotide
  misc_feature (255)..(255): n comprises a, c, g, or t, or includes no nucleotide
  misc_feature (260)..(260): n comprises a, c, g, or t, or includes no nucleotide
  misc_feature (267)..(267): n comprises a, c, g, or t, or includes no nucleotide
tttaaaaccctntctataatcccactcactatagggaaagctgncncncctgcaggtaccggtccggaattcccgggtcgacccacgcgtccgggatgaggcctcgcccaggcagaagagcatgccttctgcttttgcatgcaaccagccctgtgattctgtgtgcatatcccagcagcctcttggggcaagggtgccgagagaggcattccagaaggactggggggtgggggggattgaggagttgtggtgttnactgnatatggncaggactgggtccaggggcaag

SEQ ID NO: 5342 - DNA, 389 bp, Canis familiaris
acgccccgcgctgtgcagacaccatggaggtggcactgatctttctgtgcagcatgctggctcccaccgtcctggccagtgctgagcaggagaatgagaaggaccctttccattatgactatcagacgctgaggattgggggcctggtgtttgccgtggtgctcttctcggtggggattctccttatcctgagtcgcagatgcaagtgcagtttcaatcagaagccccgggctccaggggatgaggaggcccaggtggagaacctcatcactgcaaatgcaacggagccccagaaagcagagaactgaagtgtagccctcgggtaggaagcctccagaacctgaacggagctgcttgaacctttaaatgcaaatggtgatgctttaaaa

SEQ ID NO: 5343 - DNA, 389 bp, Canis familiaris
  misc_feature (25)..(25): n comprises a, c, g, or t, or includes no nucleotide
  misc_feature (347)..(347): n comprises a, c, g, or t, or includes no nucleotide
  misc_feature (376)..(376): n comprises a, c, g, or t, or includes no nucleotide
ccgtcgccatgctgcccgccgcggncctccgccgtcccggcctgcgctgcctcgtccgccaggcccgcgcctacgccgaggccgccgcggctccggccccggccgcggccccgggacagatgtccttcactttcgcgtcacccacgcaggtgtttttcaacggtgcgaacgtccggcaggtggatgtccccacgcagacgggagcctttggcatcctggcggcgcacgtgcccaccttgcaggtcctgcggcccgggctggtggttgtccacgccgaggacggcaccatctccaaatacttcgtgagcagtggctcagtcacggtgaacgctgattcctcaatgcanttgctggctgaaaaaggctgtgacactanaaatgcttgacgt

SEQ ID NO: 5344 - DNA, 504 bp, Canis familiaris
  misc_feature (385)..(385): n comprises a, c, g, or t, or includes no nucleotide
  misc_feature (432)..(432): n comprises a, c, g, or t, or includes no nucleotide
  misc_feature (453)..(453): n comprises a, c, g, or t, or includes no nucleotide
  misc_feature (471)..(471): n comprises a, c, g, or t, or includes no nucleotide
  misc_feature (478)..(478): n comprises a, c, g, or t, or includes no nucleotide
  misc_feature (483)..(483): n comprises a, c, g, or t, or includes no nucleotide
cccacgcgtccgcaacttccggacgtttttacaagccttgatgctattgttcaggagtgccactggggaggcctggcacgagatcatgctgtcttgtctcagcaaccaggcctgtgatgagcacgccaatgccagtgagtgtgggagcgactttgcctacttttacttcgtctccttcatcttcctttgctcctttctgatgttgaacctctttgtggccgtgatcatggacaattttgagtaccttacacgggactcttccatcctagggcctcaccacctggacgagtttatccgggtctgggctgagtacgacccagctgcgtgttgccggattcattataaggatatgtacagtttgttgcgttgaattgcgccacccgtnggcttagggaagaactgccctcgtaggttggcctacaagcgcctggntcggatgaacatgcccatctncaatgaggatatgactgngcacttnacgtncacgctgatggacctcattcg

SEQ ID NO: 5345 - DNA, 801 bp, Canis familiaris
  misc_feature (15)..(15): n comprises a, c, g, or t, or includes no nucleotide
cccacgcgtccgagnatctttatgaaccagtgtcagtcccattctcatatcccaatggcctcaatgaaaacacatccgttgttgaaaaattgaaacatatggaagccagggcactgtctgctgaagctgcattagctagagcacgtgaggatctgcaaaaaatgaaacaatttgctcaggattttgtgatgaacgcagatgtcagaacctgctcgtcatctactactgccattgcagacctccaggaagatgaggatggtgtttatttcagctcatacgggcattatgggatacatgaagaaatgctaaaggacaaagtgcgaacagaaagttaccgagattttatataccaaaatccacatatcttcaaagacaaggtagttttggatgttggttgtggaactggaattctctctatgtttgcagctaaagctggggcaaagaaggttcttggagttgatcagtctgaaatactttaccaggcaatggatatcataagactaaataaacttgaagatactattacactaattaaaggaaaaattgaagaagtttgccttcctgtagaaaaagtggatgttattatatctgagtggatgggctattttcttctttttgaatctatgttagattctgtcctttatgcaaagaacaagtacttggcaaaggaggatcggtctaccctgatatttgtactatcagccttgtggcagtaagtgatatgaataaacatgctgatcgaattgcgttttggggataatgtctatggcttcaacatgtcttggatgaaaaagcagttat

SEQ ID NO: 5346 - DNA, 753 bp, Canis familiaris
cccacgcgtccgaaaaaactgtgattaagaattctacctctggctggttactgtactgtactgattccttaccaatgaattcattactttatctacagatgatttatgccactgattttaaacttgtgattcagtaatgtcttaccttataatggccttatatggaaaacaaagaatttaggaatattgaggacaattttatttttctaggaacaaaatgaagagtgggaatgcgaagaatgttacttgtattaagcaaaaaaagcataattagtgagcaaagaactaaattctttaatatttctaaagatattaatctgcttcatggctttttaaatgccagtattcaattttgaaagtaaaattatgctaaaattaatctacttaccacttaatggctgattttgtctttggtttttagttacataaactcttaaaatacagtatttaaagcctaggattttactaatttgcatttgggttgttaatgatgtctattctttgatgtgaatgttaaggtaaagaaggtaaataacggttgaaaacagcatggaaataaattacaaactgaaatgtaattttatgttacgtatgtttatccttcgtaagcattgctattatgtcttaaaattaacaaaaatcgaatacatagaattgtaagcatccccaaataattctttatcttaaatttctttaaaaaatgactcagcatgtaataacttttcattttaaatatcacatcagtggtgctca

SEQ ID NO: 5347 - DNA, 330 bp, Canis familiaris
cccacgcgtccgatgtaataatatcacctttatcactatatctgtagttacatccttcttttaaattgtcctttttaaaaacgtttgatgagaatatggagtcttaaatgttatgaagtataggaaccttcaacaactggaagttaatgacataatactaagtgggtggattatctaggtctagagagagaagcatgttgcctcgggtctttgcattttatctgccccagagacactaccaagagtgctatttggagagaagcaaggaaacctcatgtagggcagtgtttagctgctagtccagattttgccaaaaaatgcttgactcaa

SEQ ID NO: 5348 - DNA, 815 bp, Canis familiaris
  misc_feature (695)..(695): n comprises a, c, g, or t, or includes no nucleotide
  misc_feature (709)..(709): n comprises a, c, g, or t, or includes no nucleotide
  misc_feature (718)..(718): n comprises a, c, g, or t, or includes no nucleotide
  misc_feature (732)..(732): n comprises a, c, g, or t, or includes no nucleotide
  misc_feature (740)..(740): n comprises a, c, g, or t, or includes no nucleotide
  misc_feature (752)..(752): n comprises a, c, g, or t, or includes no nucleotide
  misc_feature (766)..(766): n comprises a, c, g, or t, or includes no nucleotide
  misc_feature (779)..(779): n comprises a, c, g, or t, or includes no nucleotide
  misc_feature (813)..(813): n comprises a, c, g, or t, or includes no nucleotide
cccacgcgtccggaagaaccgatttacaccctgcctgccattattagcaagaaagaagaaatgtacttaaatgaagcagggttcaactttgtaagaaaatgcattcaagctgtggaaacaagaggcatcactgttttaggactctaccggataggaggagtaaactccaaagttcagaaactcatgaacacaacattttctccaaagtcccctcctgatattgacattgatattgaattgtgggataataagacgataacaagtgggctgaaaaactacctcaggtgccttgcagaaccactgatgacttacaaattacacaaagattttattgttgcagtgaaatccgatgaccaaaactaccgggtggaagctgtacatgcattggtgcacaaattgccagaaaaaaacagagagatgctggacatcttaataaagcacctcgtaaaagtatcactacacagccaacaaaatctcatgactgtctcaaaccttggtgtcatatttggcccaactctaatgagagcacaagaagaaactgtggctgccatgatgaatattaaatttcagaatattgtagttgaaattctgattgagcactatgaaaagatttttcatactgccccagaccccagtgttcctcttcctcagcctcagtctcgattctggattcccgaaggactcgcgcaatctgnctctccacaggttncccggaagnccagagggcaggtntacaccgngctttggcagancctggtagtgactnttacagcagcagnccaaacggcacacccatggggagcattgagtctntg

SEQ ID NO: 5349 - DNA, 925 bp, Canis familiaris
  misc_feature (3)..(4): n comprises a, c, g, or t, or includes no nucleotide
  misc_feature (32)..(32): n comprises a, c, g, or t, or includes no nucleotide
  misc_feature (88)..(88): n comprises a, c, g, or t, or includes no nucleotide
  misc_feature (115)..(115): n comprises a, c, g, or t, or includes no nucleotide
  misc_feature (184)..(184): n comprises a, c, g, or t, or includes no nucleotide
  misc_feature (815)..(815): n comprises a, c, g, or t, or includes no nucleotide
  misc_feature (835)..(835): n comprises a, c, g, or t, or includes no nucleotide
  misc_feature (842)..(842): n comprises a, c, g, or t, or includes no nucleotide
  misc_feature (877)..(877): n comprises a, c, g, or t, or includes no nucleotide
  misc_feature (887)..(887): n comprises a, c, g, or t, or includes no nucleotide
  misc_feature (889)..(889): n comprises a, c, g, or t, or includes no nucleotide
  misc_feature (905)..(905): n comprises a, c, g, or t, or includes no nucleotide
aannctggtacgcctgcaggtaccggtccggnaattcccgggtcgacccacgcgtccgggttctcagtgccaccctccatcagcaggnagcccggccatggtgaaggagcccagnaggggacggggacggcggtcccactccccgctcggagggcagcagcagcggcagcgagagctccaaggnatagttcgagatgttccacgccggggctggaccctgagcgccacgagagactcagggagaagatgaggcggaggatggaatccggtgacaggtggttctccttggagttctttcctcctcggactgctgagggagcggtcaacctcatctcgaggtttgatcggatgggggcaggtggccccctcttcatagatgtgacctggcacccggcaggggaccctggctcagacaaggagacgtcctccatgatgattgccagcaccgccgtgaactactgtggcctggagaccatcctgcacatgacctgctgctgtcagagccgggagcagatcacaggctatctgcacaaggccaagcggctgggcctgaagaacatcttggcgctgaggggagaccccgtgggcgaccagtgggaagaggaggaaggaggcttcagctatgccgcggacttggtgaggcacatccgaagcgagtttggggactactttgacatctgtgtggcagggctaccactcccttcggcagctcgtgaaactgtccaagctggaggtaccgcagcagatcaaagatgtgattgagccaatcaaagacatgatgctgcgatccgtaactatggcatcgagcaggctgngagcctgtgccaggagcttntgacagnggcttggtgccaggccttcacttttacaccttaancgggaaaggncncacaaagtgctgaacnctggcatgtgatcgagaccc

SEQ ID NO: 5350 - DNA, 859 bp, Canis familiaris
  misc_feature (569)..(569): n comprises a, c, g, or t, or includes no nucleotide
  misc_feature (616)..(616): n comprises a, c, g, or t, or includes no nucleotide
  misc_feature (671)..(671): n comprises a, c, g, or t, or includes no nucleotide
  misc_feature (700)..(700): n comprises a, c, g, or t, or includes no nucleotide
  misc_feature (736)..(736): n comprises a, c, g, or t, or includes no nucleotide
  misc_feature (813)..(813): n comprises a, c, g, or t, or includes no nucleotide
  misc_feature (824)..(824): n comprises a, c, g, or t, or includes no nucleotide
  misc_feature (838)..(838): n comprises a, c, g, or t, or includes no nucleotide
  misc_feature (853)..(853): n comprises a, c, g, or t, or includes no nucleotide
cccacgcgtccgccatcccatgggtgtgttacttggaagtttggggaggagggtgggtgtggagtgggggggaggagggtgggaaagcatgggtgatagttccatgagtttgatattggctgagtttgcaatggcaggtggaaccttaactattgagggagtttgcagatacctcaggattcgtgacaatgcctttaaagatccaggagagatgttcagcttctaggaactgctagcaagtatagcgcgaatggctccgagctcagacactctacagctgagagtagacacttgtggtatgtggagtacagataagccaggggcaggccacggcacgctccatgaaagctaggagggagtgaagtttcagtgaccatcgcaagaaaggaggcagacaagagtaaggcacacctgactcttaggactagcagtcagaaccaggagaaaaggttttattgctatgctggtaggtaagaacagattttacttacatccatatagtgttacttaaattccagttttctgttacattttccttaatatattgagccaaaactagtccagttaanctgaactggcttttctggagatcagttgttttaaatggacaccctanacttggctcccaaatgaaggaagtgaacacttaattctactgtgacaatatattnttgcccttttaattttatttcctaccttnctttaacccatttcattaaaacaatggcttaaaagnaatgcattataatctttccccaaacatggtgggagggaaggtggaccattaattttgggggtgggggattaccctgntctggaatggnctaaaaaactattntaaggtgttactttntaggaa

SEQ ID NO: 5351 - DNA, 471 bp, Canis familiaris
  misc_feature (3)..(4): n comprises a, c, g, or t, or includes no nucleotide
  misc_feature (28)..(28): n comprises a, c, g, or t, or includes no nucleotide
  misc_feature (51)..(51): n comprises a, c, g, or t, or includes no nucleotide
  misc_feature (59)..(59): n comprises a, c, g, or t, or includes no nucleotide
  misc_feature (188)..(188): n comprises a, c, g, or t, or includes no nucleotide
  misc_feature (191)..(191): n comprises a, c, g, or t, or includes no nucleotide
  misc_feature (221)..(221): n comprises a, c, g, or t, or includes no nucleotide
  misc_feature (240)..(240): n comprises a, c, g, or t, or includes no nucleotide
  misc_feature (249)..(249): n comprises a, c, g, or t, or includes no nucleotide
  misc_feature (275)..(275): n comprises a, c, g, or t, or includes no nucleotide
  misc_feature (347)..(347): n comprises a, c, g, or t, or includes no nucleotide
  misc_feature (355)..(355): n comprises a, c, g, or t, or includes no nucleotide
  misc_feature (357)..(357): n comprises a, c, g, or t, or includes no nucleotide
  misc_feature (373)..(373): n comprises a, c, g, or t, or includes no nucleotide
  misc_feature (395)..(395): n comprises a, c, g, or t, or includes no nucleotide
  misc_feature (402)..(402): n comprises a, c, g, or t, or includes no nucleotide
  misc_feature (415)..(415): n comprises a, c, g, or t, or includes no nucleotide
  misc_feature (446)..(446): n comprises a, c, g, or t, or includes no nucleotide
  misc_feature (453)..(453): n comprises a, c, g, or t, or includes no nucleotide
  misc_feature (457)..(457): n comprises a, c, g, or t, or includes no nucleotide
ggnnaaaccccctctcttactcactatngggaaagcctggtacgcctgcangtaccggnccggaattcccgggtcgacccacgcgtccgaccaccctctgcagaagccaaggttctgtgtccaaagccatcactgatcccccagcccaagcacccagccacccccaaccactaccatggccgaagacncanacatgcgcaatgagctggaggagatgcagngaagggctgaccaactggntgatgagtnactggaaagcacccgtcgtatgctgnaactggttgaagagagtaaagatgctggtatcaggactttggttatgttggatgaacaaggagaacaactgnaacgcatngnggaagggatggaccanattcaataaggatatgaaagangcagatnagaatttgacggncctaggaaaattctgcggactttgtgtgtgnccctgtnacangcttaattcaagtg

SEQ ID NO: 5352 - DNA, 944 bp, Canis familiaris
  misc_feature (3)..(4): n comprises a, c, g, or t, or includes no nucleotide
  misc_feature (32)..(32): n comprises a, c, g, or t, or includes no nucleotide
  misc_feature (794)..(794): n comprises a, c, g, or t, or includes no nucleotide
  misc_feature (799)..(799): n comprises a, c, g, or t, or includes no nucleotide
  misc_feature (809)..(809): n comprises a, c, g, or t, or includes no nucleotide
  misc_feature (830)..(830): n comprises a, c, g, or t, or includes no nucleotide
  misc_feature (839)..(839): n comprises a, c, g, or t, or includes no nucleotide
  misc_feature (873)..(873): n comprises a, c, g, or t, or includes no nucleotide
  misc_feature (877)..(877): n comprises a, c, g, or t, or includes no nucleotide
  misc_feature (894)..(894): n comprises a, c, g, or t, or includes no nucleotide
  misc_feature (917)..(917): n comprises a, c, g, or t, or includes no nucleotide
  misc_feature (920)..(920): n comprises a, c, g, or t, or includes no nucleotide
  misc_feature (935)..(935): n comprises a, c, g, or t, or includes no nucleotide
aannctggtacgcctgcaggtaccggtccggnaattcccgggtcgacccacgcgtccgtgctcctcctcctcctcatcctctttctgctcctcctccttgaaaagagccagaactgggaactacacccgctcatcgacggagctcggagcaaacccacctccacccccaccatacccagcccatacatgagccccctgggctgagctgcgctgccccggccaggcagacaggcagggcactgctgtgcacaatgcagcggtttagctgaatgtgattgctcaggcagctagtcagtcagggcccccaccgcggagtcccgcgggggtggggcatctgggccgggacgccccagccaggagccagccggtggcccacctgccagcatgggccctgggcgcggctagttaaatcttgagctctgtttgaccaagcagccaaggtttcggtctaagtaccacccagatgaggtggggaagcgtcggcaggaggcccggggggccctgcaaaaccgactgagggtattcctgtcccttatggagagtggctggtttgataatcttctcctggacatagacaaagctgatgccatcgtcaagatgctggatgcagctgtgattaagatggaaggagggacagagaatgatctgcgcatcctggagcaggaggaggaggaggagcaggcaggaaagcctggagagcccagtaagaaagaggaaggccgggctggaccaggcctgggggatggagagcgcaaggccaatgataaggatgacaagaaagaagacggcaacangctgnaaatgacagntctaatgatgacaaaactaanaaatctganggtgatggggacaaggaaaaaaaaaagatgactntganaagatgcccaaaaactngcagaagcggacaggagcccagnggngatgaagctttgatnaagcagcgg

SEQ ID NO: 5353 - DNA, 457 bp, Canis familiaris
  misc_feature (14)..(14): n comprises a, c, g, or t, or includes no nucleotide
cccacgcgtccggnaaattgggatgcagaccaattggaactcttacacaccgttgatgggaaagcagaatggaacagccactttggaaaagtttggcagtttcacataaagttaaacatatacttgtcatacaacccagcaattctgcccctagaaactccccctagagaaaaaaataggtatatattcacacaaaaacctctatgtgagtgttggtagtagctttactcataatctcccaaaaccagaaattcaaatatccttcccctggtgaatgatgctctggtacatgcatccagtgagatattatttagcagtgaacatgaagcaactattggttcatacaacaacatgaggattcatgttgctatcatgtaccccttatatgatgcaatgagaagggaacttcacttctgttagtgttctttcccaaaactcataacccagtctagtcctt

SEQ ID NO: 5354 - DNA, 837 bp, Canis familiaris
  misc_feature (645)..(645): n comprises a, c, g, or t, or includes no nucleotide
  misc_feature (702)..(702): n comprises a, c, g, or t, or includes no nucleotide
  misc_feature (729)..(729): n comprises a, c, g, or t, or includes no nucleotide
  misc_feature (734)..(734): n comprises a, c, g, or t, or includes no nucleotide
  misc_feature (738)..(738): n comprises a, c, g, or t, or includes no nucleotide
  misc_feature (764)..(764): n comprises a, c, g, or t, or includes no nucleotide
  misc_feature (804)..(804): n comprises a, c, g, or t, or includes no nucleotide
  misc_feature (806)..(806): n comprises a, c, g, or t, or includes no nucleotide
cccacgcgtccgggggagtgtgggtgccctgggcctgggtgagggggaagaagaggcccctcttccactgaggtctgacccggagggtggagagtctcctttgcttgcttctggaggcccacttacctgtaaggtctgtggcaagagctgtgacagcccactcaacctcaagacccatttccgcacacacggcatggcgttcatcagggctcggcaagggggcagtggggacaactaagcctgggcctggactgaccagccccctcccctccctctgggtcaggagcctgggccgctgctgctgtctagtccctgggctagggatttcattctaattcacattttgttcagctcctctcccccaacccccccgacacacacgcttttgaggattatagtgatttgcagtaccccctcccctttcgggtttggcccttgggtcctagtagagtgggccctccactcctcctttctgagcccaacactaattagcttcctgctgcagaccccgtgtgggttgaggtgggaggagggacttcctaggcctgctagatgggcccaggtaaggcccctgatggggctctcaggatgcttctcctcaaccctcaagggcctggccctgcccctgcaccatccctcagcctncttggcagttgaagcccccctcccccgcagtgcctttcacttttttttttaacccanaatccgggtgggggggggggttggtangggancaantcctgtcaagggggagcccaaggganaggaggggacaggctctcaagaatcctttattcttggagnanaataaactaaaggggggaaatgggaggaaac

SEQ ID NO: 5355 - DNA, 688 bp, Canis familiaris
  misc_feature (30)..(30): n comprises a, c, g, or t, or includes no nucleotide
cccacgcgtccgctcccctccacttcgagnaatgcactttcctccccagaagctcccaaacaccagggaacgtgttctggccctaacactgctgagttcccctcctagagccctgaaattcttggaaaaccatactcctggtcccagatctctcaagttcgtcttgttccccatcagaatttccgaaatccttaagaaaccccggccttggcacccctttccatggatctctcatctctagagatccacctcttcagatgccactatccagcccaaggatttctcctaaccggccccaatcccattcaacacattgggaggccctcctagggctaggactcttctgttccccagggacccacactcccactttcctgcctctgacagctatctttaaatatgcaaactccacccatcctcccagactcctttgcacatggagggccaggggtcctccacttccccacctttgccgtgatgtctgtgtctgtgactgacgtggcctcctctcgtgccgtgcttggcatatgtggtcttcgttcatcgtgccgcctgtggtgatgcgtgcagtggcgctgtttgtgtggtccgcattcccccccacccaccactccttgcctggactcactcccacccttcagcggctctgaaccccatgagaagagtcggggaagcaaaataaacaagc

SEQ ID NO: 5356 - DNA, 882 bp, Canis familiaris
  misc_feature (14)..(14): n comprises a, c, g, or t, or includes no nucleotide
  misc_feature (25)..(25): n comprises a, c, g, or t, or includes no nucleotide
  misc_feature (647)..(647): n comprises a, c, g, or t, or includes no nucleotide
  misc_feature (681)..(681): n comprises a, c, g, or t, or includes no nucleotide
  misc_feature (710)..(710): n comprises a, c, g, or t, or includes no nucleotide
  misc_feature (723)..(723): n comprises a, c, g, or t, or includes no nucleotide
  misc_feature (773)..(773): n comprises a, c, g, or t, or includes no nucleotide
  misc_feature (810)..(810): n comprises a, c, g, or t, or includes no nucleotide
  misc_feature (845)..(845): n comprises a, c, g, or t, or includes no nucleotide
  misc_feature (876)..(876): n comprises a, c, g, or t, or includes no nucleotide
  misc_feature (879)..(879): n comprises a, c, g, or t, or includes no nucleotide
cccacgcgtccggnagggacagggnaagatcgttccataatccctttctgactactttggttcacgacaacccaaattgaaagtgaaccaaaaacaaaatcaggccaagataaggtgaccctttgttgttaatgaggctcaaagcatcaaagatgatttccaagagctgagtctgctcagaggagttctgtgcatttaggatgttttgtcaggcggattctatttctgtgggaagaaagggggcagctcctatcttccccacaaatcttaacagttgcacctgagtctgtccccttcctccttggttacatcttgacagaaaccagacactgcaaaacccacaggctgagtcatatttacctcctttccccacatgtcactgcccttgcaactttgcatcctgaatcccccagtgtggggtgaacttgaagagcaagaggaaaacaagtgccagcaaaatcctgtcacccaaggatttaaataaaacctcaccttcctcctgactggcatatgcagcgggcttatttctctcatcctgttcttcagctggattgggaggatttggttttcacttacccccttattgttcagaatacgagctttagctggaggttgctgactaattttacggttgtgtaggtaactgntagcacttcggtcagtcctgcattctttttgaangaagtctctgtgttccaagtctagtaggntaaattggttttnccttcaagagaaaaggctagcaaaggccagctgattaacttgactttggngcttacatgttctgggttcattctttgaatcactggngaccaaatctggtagtgtccaaccagtctttttanaatggaaaggactctcgaaggatgcttgggncantgg

SEQ ID NO: 5357 - DNA, 860 bp, Canis familiaris
  misc_feature (710)..(710): n comprises a, c, g, or t, or includes no nucleotide
  misc_feature (742)..(742): n comprises a, c, g, or t, or includes no nucleotide
  misc_feature (754)..(754): n comprises a, c, g, or t, or includes no nucleotide
  misc_feature (841)..(841): n comprises a, c, g, or t, or includes no nucleotide
  misc_feature (843)..(843): n comprises a, c, g, or t, or includes no nucleotide
cccacgcgtccgcgcgagcgccgccctttttttttttttttaatcttcatctgttctgttctctcaaaccactacggctcattcttgtgtaagtaactgttcattagagttctggtattacgaagaggggggtagaaaacagtatctaataagcacccgctatgtgccagccaagactaagaatttcacatactgttcatacaatcctcacagttaataataaaaaagctactattagacctttttaacctctgaagaaagcctgggttcagagcctatgctctttctattctactatatttcctccaaagtaatgtgccctccaaagtaatgtgcctccaaagtagaaggacaccatagtacttagaggcagaagacctggcttagtttctgatgaactatgggcaaatcacttcactcttctgacatcaattttctcacagataaaatggagataaagctatcttccaaccttacagagctgctgcaaaaagcaaactaaataatgtgaaaatatgtatgtactatccaatgttgatataatcattatgctatttttgggggaaatattctcttcttctaagattttaaaaatgctatctttatccaattacttaaagaaaaaaatgaagcagattagaaacaaaggtgcaacccaggagaaacatttttaattacccatatacatataataaatcttattatacctncccaaaaacctggcctcaaaaccctttagttnatggagatcttnagcagaaaacttttggatgaaagcctccttcagatcagtgctcattaaatccaaaagggaaaatagtgcaaaggggaatttatttgntntggggctaataaaacag

SEQ ID NO: 5358 - DNA, 503 bp, Canis familiaris
cccacgcgtccgaaagcatgagcaataaaagaaaaaaaaaagggcagccccggtggctcagcggtttagccccgccttcagcccagggcctgatcctggagaccgggatcgagtccctgcatcgggttccctgcatggagcatgcttctccctctgcctgtgtctctgcctctctctctctttctctgtgtgtttgtctctcatgaatgaataaataaaatcttaaaaaaaaaagaatgtgaaaagataatcaatggaatgggaaaaaattgcaaatcatatatttgatgagaatttaataactagactatacaaagaagaaaaaaacttaaaaataagttagttcaacttgaaaatggtcatttcttcaaagaaggcataagaaatggccaataagcacatgaaaagacattcaacaccattggtcattaaggaaatacaaatcaacatcacaataagacaccatttcacacccactaggatagctttaaacccccccccca

SEQ ID NO: 5359 - DNA, 830 bp, Canis familiaris
  misc_feature (17)..(17): n comprises a, c, g, or t, or includes no nucleotide
  misc_feature (635)..(635): n comprises a, c, g, or t, or includes no nucleotide
  misc_feature (772)..(772): n comprises a, c, g, or t, or includes no nucleotide
  misc_feature (793)..(793): n comprises a, c, g, or t, or includes no nucleotide
cccacgcgtccgtcggnggggagctcggtgcgccccgctaccgcacagagaaggaaagaaaactgagaaagaaaaggaataaattcctgatttccctgtctgtactgtacagaatagcaaagaacgcctccgcttcggggaccctaaaagggccagttaagcgatcccctttgagctgatgtgattttaatgcgggattttcgacattagctcaaatcgagggaatccgaagtaagcacctcaggacgcacactttctaaagatcttttaccgaagattagtctctctagtttcaaaagttgagagatggtacttttcggacgctttcctgagagccgtcttgttcaagcgtctaccaatttcgtcacgtttgacggattcgcggtgaaaacaatcactgctacgatttctgttcttttctacctaagacacgtctttaatatcctcgtgtgcgtggctgcggcgtgtatcggcctgacgcaaagcgcagacccgttagcaccgcgcaattcacgggttcggacccccacgcgtcgggtcgcgcccgccgcccgcccgcccgcccgcccgtgggtccgccgctgccgaggcgctcggccctccccgggagccggtctcgggggcagtaggctctnccggaagccggtgctgctccaagggagaatcggggcatttgcaggatttgtaggcgggggttacagaccgcctcgctgagggtcactcatcgggtattctgacctctcggggcctttactgtcgctacagacaaggngccggagcttagccgaccctncttccgcgaaggaagccggccgcagtccacgggctcc

SEQ ID NO: 5360 - DNA, 866 bp, Canis familiaris
  misc_feature (770)..(770): n comprises a, c, g, or t, or includes no nucleotide
  misc_feature (790)..(790): n comprises a, c, g, or t, or includes no nucleotide
  misc_feature (806)..(806): n comprises a, c, g, or t, or includes no nucleotide
  misc_feature (815)..(815): n comprises a, c, g, or t, or includes no nucleotide
  misc_feature (850)..(850): n comprises a, c, g, or t, or includes no nucleotide
  misc_feature (864)..(864): n comprises a, c, g, or t, or includes no nucleotide
cccacgcgtccggttttgagtgtgatcagaaccagaatgtcagtaatcaccatgtcagatttacctggagtggtcctggagaggtcaagacattctgcatgtgccatttctacagagttgtcccaacagacccctatcagcaactaccctgggaatccaggtgccgggatcacccttgtacctgtgggaagaggttcatctgatgattctaaagtatctgtgtattagtgtgtgtttgtgtatgtgtatgtgaagcacacatctacatgtgtaaagatacagactcttatatagagacccacagaagctggcagctgctgagcctttgcagcctttaagatttagaagttagagaaacaagaagctgttgattgactatcaaaatgatcaaaagatgtaaattaagtgccattttaaaatgtatttatcatactgttactatctacagctgtattccttattaacttattaaaagtcgtgttgagaaacatcaaactcctaaacctttagtagcgactacgaggctagtggtcacaagcactctaaaagacattctgtccctattttggagaagaaaatatttgcatgtttaactcctaatttaggctttgagtatactgtaaaaagtgctgtgtgatatattatcaataaagtactcaaaaatggcactttaattttttaaaaaccataaattatgcactgttttaaacttcagtattgaatattgactggtgtgtggaatccaattctgtaattaaaaaataatttgngactagaatagaactttttncctggttttagtaaanagtcttgcntgttgagactttaaaaaattaaattaaaaaaaagngcttttgggtactnaa

SEQ ID NO: 5361 - DNA, 780 bp, Canis familiaris
  misc_feature (31)..(31): n comprises a, c, g, or t, or includes no nucleotide
  misc_feature (734)..(734): n comprises a, c, g, or t, or includes no nucleotide
  misc_feature (759)..(759): n comprises a, c, g, or t, or includes no nucleotide
  misc_feature (771)..(771): n comprises a, c, g, or t, or includes no nucleotide
cccacgcgtccgctgattgccacactaaggnagcttggacattattctgtagataatgggaagctattgaaggtgagtgctgtgatccattttgcattttaaaaggctctctagtgaagctttgtgaagatggaccagatgggaacaagacagatcatttaagagaataatgcaattaacgggggcagatgctataatctgtagcaatcttttggtcctgatttgttaaaatctatcttcctttctttttattccccttccctctgcccccaccatttctctctccttccttcttttcttctcttcctttcttcccccttgaagtatatcacggttaaaaatgagactgtcttttcatatactttcaaatctcactaatgtttgtttaaataagttttctctttgtatctcaatatcttctctttctaactttaagcctttctatctttgttttcatgtcatgtatggtgatagttttcatgccccctttttggatgactttagtgttcatgaacagtccattcaataccctatacttaatttcagacgcttattcacatgaccaaaccctgttctttattagcatcagaagtgtctcacatctgaaatcataacttctttttcaagactctaactgtaggggatccctgggtggcgcagtggtttggcacctgcctttggcccagggtgcgatcctggagtcccaggatcaaatcccatgtcgggctcccggngcatggagcctgcttctccctctgnctggggctctgnctctctctc

SEQ ID NO: 5362 - DNA, 901 bp, Canis familiaris
  misc_feature (5)..(5): n comprises a, c, g, or t, or includes no nucleotide
  misc_feature (9)..(9): n comprises a, c, g, or t, or includes no nucleotide
  misc_feature (36)..(36): n comprises a, c, g, or t, or includes no nucleotide
  misc_feature (67)..(67): n comprises a, c, g, or t, or includes no nucleotide
  misc_feature (712)..(712): n comprises a, c, g, or t, or includes no nucleotide
  misc_feature (824)..(824): n comprises a, c, g, or t, or includes no nucleotide
  misc_feature (831)..(831): n comprises a, c, g, or t, or includes no nucleotide
  misc_feature (850)..(850): n comprises a, c, g, or t, or includes no nucleotide
  misc_feature (853)..(853): n comprises a, c, g, or t, or includes no nucleotide
  misc_feature (880)..(880): n comprises a, c, g, or t, or includes no nucleotide
agggnaagnctggtacgcctgcagtaccggtccggnaattcccgggtcgacccacgcgtccggtagnatatttattccaaatttgatgtaattaaccttgctgctgaaaaaacctacaataacctagatatcacagtgacccaggccctccagcaccgttcacagtatttcgagggtgttgtgaagtgcagtaagctggaaatcctggagaccatcgtggacagaatagtgcgggctgaggtccatcggctggtggtagtgaatgaagcagacagcattgtgggtattatctccctgtcagacattctgcaagccctgatactcacgcctgcaggtgccaaacagaaggaggcagaaacagaatgaccactgtgagtggagcagcccttggaggagaacttgaacagattcggggtcacgctttgcctcatgaacacggaccgtgacagagacagtaaaatggctaagaatgtatatcagggtttagtgatgggtattttttccagtgatattgaaactgagcataagaaacagagtttatgtgtttgaagattcaggcttgcgttaaagactgttttcagacgtttgtctgaacgatttcaaatgctgtatgttattaaagtgcactgtgtcctgaaattcttattacttttcattttcaaagaattcactggtctgtaacaggtaatatgacataaggcgagtgcatggnctattcagacctagtgccttatgtcagaacacgcgatatgtcaccattgcggcccgtggcagctggagccacacggtgctgggggcgtgagcgttctttgggacctttaccnaatcagnttgtttcctttagatttgncgnacagttgggatttgggatttaataatnaccttataaaacttaacgacg

SEQ ID NO: 5363 - DNA, 745 bp, Canis familiaris
  misc_feature (699)..(699): n comprises a, c, g, or t, or includes no nucleotide
  misc_feature (716)..(716): n comprises a, c, g, or t, or includes no nucleotide
  misc_feature (733)..(733): n comprises a, c, g, or t, or includes no nucleotide
cccacgcgtccgaacaaataatacctgagtaatgaacacaaagtattgccacaaatccccactttactgtgtctgcttagacataatatgaatttttcaaatgatgtaatttattccaaaaggaaattatattttaaaagcagatttttcttgagaaaaaattatacaagaaaatatttcaaattatgatgttaaatctataaaatatgcttaaagtaagttgtttctatgttatgtggttatgttacaaataatatttggccaaatctttaccatcttttatatatatatatatatatatatatatatatatatatatatatatatataagctacaataaatgtatggttattttggagagaatgggcccacatgtgaaaaaaatgtaaagaaaaaacatctttttcccctataaaaacatactgtatatttcaaaagaagaaagttaaaagatatttgaagattgcaggggcaaaagaaaaacctaccagggctcagcacttaagcacttttcccacatccagggtcagaacagcagtgattcccacacggacttttaagtgcggtatgaatgccacattacacttctattatacacagtactgtcaaacctcaaatgttttctttcttcaaatgcttttccttgtacatgatactagtagacacttttctctttatatttgctgatagtggaaagntatatgcaataaaatgnttgatgggtgaagcagnggcaccagttgg

SEQ ID NO: 5364 - DNA, 752 bp, Canis familiaris
  misc_feature (585)..(585): n comprises a, c, g, or t, or includes no nucleotide
  misc_feature (656)..(656): n comprises a, c, g, or t, or includes no nucleotide
  misc_feature (659)..(659): n comprises a, c, g, or t, or includes no nucleotide
  misc_feature (662)..(662): n comprises a, c, g, or t, or includes no nucleotide
  misc_feature (693)..(693): n comprises a, c, g, or t, or includes no nucleotide
  misc_feature (695)..(695): n comprises a, c, g, or t, or includes no nucleotide
  misc_feature (728)..(728): n comprises a, c, g, or t, or includes no nucleotide
  misc_feature (736)..(736): n comprises a, c, g, or t, or includes no nucleotide
cccacgcgtccgtgccgtgaggagcgcggacgtgcccccgtggttgcgccggctgctcgtgacccgagcggcctggcggggcggcggggccccttcccccgagcctgcagcctcccgactcccgaccgcgcccgcggggacccggacccgcggcagtccgtgaggaagctccgtgaggcggctccgcgaggaagctccgtgacgaggctccgtgaggcggctccgtgacgaggctccgtgaggcggctccgtgaggaagccgaggcgtcacaggtgatggcggagcccggggtgacggcggggccggcggcggagcctgggctcccggaggagcggggagcccccgccgcccccgcccccgcggacagcggccccccagccccggtgggaggcggcgggcgtcgcggttccgtagcgaccggagcggggcgggcggaggccccgccccctagcgaaggcctggcagcggcgccggtgtcggtgtcggtggcaacggacggcggcctggaaaatgggtgtgggagcgccggggcgcgcgggccgggtgcggggggccctgcgggggcgtcggacgtgcgggcggangagacggccccggagctgccggcccgcgacggcctcgcttcgcggcggcggcggcggcggcggcggcggangancanaagatggagacagacccgcaggaaggggaananctggccggccgggaaggtgccgggcggccgctntaaagatncaacttacgtaccctg

SEQ ID NO: 5365 - DNA, 871 bp, Canis familiaris
  misc_feature (19)..(19): n comprises a, c, g, or t, or includes no nucleotide
  misc_feature (722)..(722): n comprises a, c, g, or t, or includes no nucleotide
  misc_feature (733)..(733): n comprises a, c, g, or t, or includes no nucleotide
  misc_feature (754)..(754): n comprises a, c, g, or t, or includes no nucleotide
  misc_feature (774)..(774): n comprises a, c, g, or t, or includes no nucleotide
  misc_feature (789)..(789): n comprises a, c, g, or t, or includes no nucleotide
  misc_feature (816)..(816): n comprises a, c, g, or t, or includes no nucleotide
  misc_feature (818)..(818): n comprises a, c, g, or t, or includes no nucleotide
  misc_feature (844)..(844): n comprises a, c, g, or t, or includes no nucleotide
  misc_feature (850)..(850): n comprises a, c, g, or t, or includes no nucleotide
  misc_feature (868)..(868): n comprises a, c, g, or t, or includes no nucleotide
cccacgcgtccgctcgggnaccggggtttggggcgtgcccgcttcctctgtgtcaggcatggactccttggaaaatctagtgagaactcgacagagaaatgcacgtgcgcactaaatcttgcaacaaggtgaggcccagagaggagaagccactagttgagctggatggaaataattaccccgctctgccaattagaagaattgctttgaagatctggtgccggggtgcctctgatgctgcctgggacctttgaagtgcagggcaagcatttaagccaggttttcttacttcagagtttagaaacatacagactttgatatgtgtgtgtgtatatatatataccactgagccacccgggctgccctgaagacatctttatgtcaaagctgcctaattcagttttacgtctgggtgttttgcagatagataggatctgcttcagaggaaactataccagctcctgagagccaccagctcctgagagcctttcctggcatgtccagcgcccaggtggtgccccttccaggctcttaccctggcacagcactcatcacattgtggtataattgcccaggtccccacagaaacagacaattcactgggaaagaaattaaaatggacttgaaacatttgaaaagatgaaactcaaagaatgccagctgataaaggcataccaaaggacagaattagaaaatcatttgacagcacctgataacttggntcacccaaggnccatcagtgaatgagaaaccngatacccctaagggtctggngggaagaggaaaaangggcatttacatggggagggggggccncncttaacctggcttattagtagggggnctcaanaattggggatttttgggngca

SEQ ID NO: 5366 - DNA, 863 bp, Canis familiaris
  misc_feature (718)..(718): n comprises a, c, g, or t, or includes no nucleotide
  misc_feature (731)..(731): n comprises a, c, g, or t, or includes no nucleotide
  misc_feature (760)..(760): n comprises a, c, g, or t, or includes no nucleotide
  misc_feature (793)..(793): n comprises a, c, g, or t, or includes no nucleotide
  misc_feature (798)..(798): n comprises a, c, g, or t, or includes no nucleotide
  misc_feature (802)..(802): n comprises a, c, g, or t, or includes no nucleotide
  misc_feature (848)..(848): n comprises a, c, g, or t, or includes no nucleotide
  misc_feature (860)..(860): n comprises a, c, g, or t, or includes no nucleotide
cccacgcgtccgacccagcccaggggcagaagacgggggcctgaggaatggccccccgttcccgcaaacataaatatatatggatagattgctaggtaggtagacacacacacgcgcacacacacggtctggagatggcagttccccggagcgctggagcctctagaagacttcggccgctgtcaccaggttcactacaggcccttcctgccccgtcaccttgccttcccgagtcggccctgctctgcatgggggtccccgtgggactcagaggagaggcggctgggtcatccggaggaagccggctgcgcccaagcgtcggactggggaccttgctgctgacccggagggaggaccggagcagggtccatgcgccttccccgctggcccgccctgtaccacggctgttctggaacccgggtgcaaggccagacgacagcactaaccagacctctagccactcacagctctttttaaacagcttcaaaatatgcagcaaaaatccacacaataacacgagtggcaccatttgtctcaaactaggccagctgggttccagcttttcttctactagtctgatgttttataaatcaaaacctggttttttcttctccgacatccttttttttggccaaatctcgtggtgtttcgcagaaatacggaaaatttcaaatgcagttgagtattcttttttaaatgcagattttcaaacctatgnttttttttcaggnggtccttttttgggtctggcttgctgagngtaaaagttggtatctgaatgagtctgtccctntgctnccgngcgacattggggcggacggccgcctacggagcgtccggggcccggntttcataactgngca

SEQ ID NO: 5367 - DNA, 263 bp, Canis familiaris
  misc_feature (2)..(2): n comprises a, c, g, or t, or includes no nucleotide
  misc_feature (33)..(33): n comprises a, c, g, or t, or includes no nucleotide
  misc_feature (38)..(38): n comprises a, c, g, or t, or includes no nucleotide
  misc_feature (41)..(41): n comprises a, c, g, or t, or includes no nucleotide
  misc_feature (53)..(53): n comprises a, c, g, or t, or includes no nucleotide
gnaattcccgggtcgacccacgcgtccgacagnaaagnagnacattatcaagnaaggaatttggataaggcacaaaccaaattttgattactaccgacttactggtattccaattccttatttaattgtatttatctaccacaagtgggttttgaggggaagatttttagtagtcttggtcatctctagccccgtgggggataaaaacctcactccacagttagctgtgtgatttatatgtggctcattattattttgtggcc

SEQ ID NO: 5368 - DNA, 404 bp, Canis familiaris
  misc_feature (2)..(2): n comprises a, c, g, or t, or includes no nucleotide
  misc_feature (51)..(51): n comprises a, c, g, or t, or includes no nucleotide
gnaattcccgggtcgacccacgcgtccgccactcccttcaacccctccagnaaaatgaatttcagtgtgttcactgaattatcttgaacctgaaacctgcgtttgggtatcagtccccaggtaaaggcttatatttacagaacttgcacaatcatacgattatatctcaaatgtgaagactttgtacagtaatattttcactttctaaatgacccatacaacaatcaggaagtataaatgtgtacgtatattttttaaatatacaaagttcaactggtctgtgaggagaagaagcaaaaactgttcccgccctgtattgagataaatacaacagaaacattccagttttgcaatacaatattttggcttataacacagcagatgctagaatgtgcaatgcaact

SEQ ID NO: 5369 - DNA, 203 bp, Canis familiaris
  misc_feature (2)..(2): n comprises a, c, g, or t, or includes no nucleotide
  misc_feature (44)..(44): n comprises a, c, g, or t, or includes no nucleotide
  misc_feature (104)..(104): n comprises a, c, g, or t, or includes no nucleotide
  misc_feature (113)..(113): n comprises a, c, g, or t, or includes no nucleotide
  misc_feature (151)..(151): n comprises a, c, g, or t, or includes no nucleotide
gnaattcccgggtcgacccacgcgtccggcacctcggttccggnaatcccagaatcccagccacagcgctccaggccgtcccagcccctccccacccccccggncagcatggncaagggaggaagacccacatcaacattgtggtcattgnccacgtggcactcggtcaagtccaccaccacggtccacctcatctacaagtg

SEQ ID NO: 5370 - DNA, 843 bp, Canis familiaris
  misc_feature (2)..(2): n comprises a, c, g, or t, or includes no nucleotide
  misc_feature (29)..(29): n comprises a, c, g, or t, or includes no nucleotide
  misc_feature (31)..(31): n comprises a, c, g, or t, or includes no nucleotide
  misc_feature (762)..(762): n comprises a, c, g, or t, or includes no nucleotide
  misc_feature (772)..(772): n comprises a, c, g, or t, or includes no nucleotide
gnaattcccgggtcgacccacgcgtccgngnaacatctccattctacattcaccttggtcacatgtgaactgccatagttttatttgggtgtaatgaatgtctactgccctctgtttaaatttaaattctggaaaggggtagtggatgttttccctttcccttaaaaaccattcttaaaaacttcaaaatacaggaccactaagcctgctgtgtctgagcaaattagtggctaccctcttttttcctttttaaagcacaagaggcccatatgtcttcagttattttccttggtttaatatatatatttttttgataacaagctttcagaagcaagagaataaaaatcatgcattgttgaacccttaactggctggcatgctttcctgtttgtaccctttatattttattggataaaaccaaggacagtccagataaaatcctaaatcacttactgcagtagaagtgtagcacagttgcttagtacaagcttctcacttcccagagacctgaattcaaatttgaatagcctgagttcttgctcacttaaaatccaaaagaacacactgttatccatgtgtatgcttgaacctaaatcatgttggtatgagttaacagtttggtttggaagaccttggttgggaagagtttcagataaggtcatatatataaaaagcaatgtctactgttttgcgccagctagtgcttacaatttcattcgagccctaagttatgtgctccgctgttattctttctttggcagntgaacgttgnaattcgaaattttttggtttcagaagtactaagcaaacaggcataaaaggggaaggggcgtgctagtgttg

SEQ ID NO: 5371 - DNA, 479 bp, Canis familiaris
gaattcccgggtcgacccacgcgtccgactcccgaggcctggatgtgatggcgtcacagaaaagaccctcccagaggcacggatccaagtacctggcctcagcaagcgccatggatcacgccaggcatggcttcctcccgaggcacagagacacgggcatccttgactccctcgggcgcttctttggcggtgacaggggtgtgcccaagcggggctcaggcaaggatggacatcacgcagcgagaactgcccactatggctccctgccccagaagtcccagcatggccggccccaagacgaaaaccccgtagtgcatttcttcaagaacattgtgacaccacgcacacctcctccatcgcaaggaaagggagccgagggccagaagccgggatttggctacggaggccgcgctccagctcacaaggggctcaagggcaccgacgcccagggcacgctttccaaaatcttcaaactggga

SEQ ID NO: 5372 - DNA, 378 bp, Canis familiaris
  misc_feature (2)..(2): n comprises a, c, g, or t, or includes no nucleotide
  misc_feature (37)..(37): n comprises a, c, g, or t, or includes no nucleotide
gnaattcccgggtcgacccacgcgtccgcggcgaggnaggcgctcatcatcccccccgacgccgtcgcggtggactgcaaggaccctgatgaagtggtaccagttggccaaagaagagcctggtgttggtgcatgtgctttggactagcatttatgcttgcgggtgtcattctaggaggagcatacctttacaaatattttgcacttcaaccagatgacgtgtactactgtggaatcaagtatatcaaagatgacgtcctcttaaacgagccttctgcagatgccccagccgcccgctaccagacaatcgaggaaaatattaagatctttgaggaggatgaggttgaatttatcagtgtgcctgtccccgaatttgca

SEQ ID NO: 5373 - DNA, 320 bp, Canis familiaris
  misc_feature (2)..(2): n comprises a, c, g, or t, or includes no nucleotide
  misc_feature (31)..(31): n comprises a, c, g, or t, or includes no nucleotide
  misc_feature (33)..(33): n comprises a, c, g, or t, or includes no nucleotide
gnaattcccgggtcgacccacgcgtccgagnanatctacggttgcccagttggtgaagagacttacagatgcagatgccatgaagtacaccattgtggtgtcagctactgcttctgatgctgctccacttcagtacctggctccttattctggctgttccatgggagaatattttagagataatggcaaacatgctttgatcatctatgatgacttatccaaacaggctgttgcttatcgtcagatgtctctgctgctccgccggccccctggtcgtgaagcctatcctggtgatgtgttctacctacactcccgtctgc

SEQ ID NO: 5374 - DNA, 338 bp, Canis familiaris
  misc_feature (2)..(2): n comprises a, c, g, or t, or includes no nucleotide
  misc_feature (32)..(32): n comprises a, c, g, or t, or includes no nucleotide
gnaattcccgggtcgacccacgcgtccgtagnaaatctagtatcccctaaggaggcagcaacaggtcggggtaatttagctaaaatatatgtacctattgttactgctatttcatgcataaatgtagtttgtcttaaaaaccttgacagaaatgcttgacactccaatcaactcatcattccctttggtagattaaaatatgtacacttgggccactcacagggtgttgcccctcccaaaacacacacacacacacctgcttctccctctgcctatgtctctgcctctctctctctctctctctctctatcataaataaataaatgaaaaaattaaaa

SEQ ID NO: 5375 - DNA, 818 bp, Canis familiaris
  misc_feature (2)..(2): n comprises a, c, g, or t, or includes no nucleotide
  misc_feature (690)..(690): n comprises a, c, g, or t, or includes no nucleotide
  misc_feature (696)..(696): n comprises a, c, g, or t, or includes no nucleotide
  misc_feature (734)..(734): n comprises a, c, g, or t, or includes no nucleotide
  misc_feature (740)..(740): n comprises a, c, g, or t, or includes no nucleotide
  misc_feature (742)..(742): n comprises a, c, g, or t, or includes no nucleotide
  misc_feature (795)..(795): n comprises a, c, g, or t, or includes no nucleotide
  misc_feature (799)..(799): n comprises a, c, g, or t, or includes no nucleotide
  misc_feature (813)..(813): n comprises a, c, g, or t, or includes no nucleotide
gnaattcccgggtcgacccacgcgtccgcatgtattatatgtatgaaaaaatccagctttattgagatataattcacatatcacacagttcacctattcaaagtatataattcagtggatttcagaatattgaaagttgtgcatctatcacctcagtcagttttagaacattttcattattcccagaagaaactcttcgctgctgtacccgatccccaagtctctcaacctcttcagccctgggcaaccattaatctactttttgtcttcctatattggctattctggacattttctgtaatgaaattataccatatgtgttcctttgtgactggttgctttcaggtagatcatgttgtcagtgttgacacatgatgtagcatgtgtaagtccttcatttattattgccagataaatttccattgtgtggatataccatgttttatttgttcatccatcaattggtagacatttgggttatttccactttctgcataatgtgaaaatgaacatttgtgtacaagtttttgtgtgcacatgtgttttcatttttcttgggtgtatacattagagtggaattgctggattatatgataactatgtatatagaatccaacaatgttggaaccacccaactgtttctaaagtagctgtgtccttttacaatatcaccagcagcatatggggggntttagntcttccttgactatcttttttattttaaacattatagngggtgngnagggggtatctcattgggggtttggattggggttccctggagactagggacgntggncattttttataagnttggg

SEQ ID NO: 5376 - DNA, 293 bp, Canis familiaris
  misc_feature (117)..(117): n comprises a, c, g, or t, or includes no nucleotide
  misc_feature (146)..(146): n comprises a, c, g, or t, or includes no nucleotide
  misc_feature (193)..(193): n comprises a, c, g, or t, or includes no nucleotide
  misc_feature (220)..(220): n comprises a, c, g, or t, or includes no nucleotide
  misc_feature (256)..(256): n comprises a, c, g, or t, or includes no nucleotide
  misc_feature (270)..(270): n comprises a, c, g, or t, or includes no nucleotide
  misc_feature (287)..(287): n comprises a, c, g, or t, or includes no nucleotide
gaattcccgggtcgacccacgcgtccgaggcggctcccgcgctcgcagggccgcgccacctgcccgccgcccgcacgcccgccgcccgccgcccgccgccgtcgcgctgcccgccgncgacatgctgccgctgctcctgccgccgncgctgctgctgctgccgctgctgctgggcgccggcgggggccgcggngcgcgcgccgaggtgctgttccgctgnccgccctgcacgcccgagcgcctggccgcctgcggncccccgccggccgngccgcccgccgtcgcgnccgggg

SEQ ID NO: 5377 - DNA, 495 bp, Canis familiaris
  misc_feature (2)..(2): n comprises a, c, g, or t, or includes no nucleotide
  misc_feature (30)..(30): n comprises a, c, g, or t, or includes no nucleotide
gnaattcccgggtcgacccacgcgtccggnaaagtaatcagctctttcaaaaacaaggaggaccagtatgaccatttggatgctgctgacatgctgaaggtagaaaaaagcacgaatgaggccatggagtggatgaataacaaactgaatctgcagaacaagcagagtctgactgtggatccagttgtcaaggcaaaagaaattgaagctaaaattaaggagctgatgagtgtctgtggccctataatttcaaagcccaaacccaaagtggaacctccaaaagaggagcaaaaaaacgcagagcagaatggaccagtggacggacaaggagacagcccaggcccccaggctgctgagcagggtacagatacagctgtgccttcggattcagacaagaagcttcctgaaatggacattgattgattccaacaattgtttatattaaaacagactattataaagctttaagttgtcaactttgttctaaatatcaac

SEQ ID NO: 5378 - DNA, 585 bp, Canis familiaris
  misc_feature (2)..(2): n comprises a, c, g, or t, or includes no nucleotide
  misc_feature (34)..(34): n comprises a, c, g, or t, or includes no nucleotide
gnaattcccgggtcgacccacgcgtccgcgaagnagtagggctctttcgtttgacttctttacggcaggcacgtgttccaggcagaggtgcctgccttgccaggatttgagtcggagctttctgtgactcccagctgtcttcgtgtggctcacagggccctggcacggtggtcgggccttccctgggcccaggagcgagtcctatgggaactcattccattgcctggactcctcctctgaaggccaatggcttctctgctggcttcggttctggggcctctgaagccctgggaacatgacgcccaattcagtttccctgcagccagccagcagcccaggtatcctgcccaaagtgcagtccactttgagcatggaagatatggaacacaatttccacttccattcctgcagagcaccctttttgaaaagtcagttgcaggaattaggggtgaaccttccacaccccagaaatctcacttaccatccaagtgggctatttcaagcccactttagggggctcagcaatctcagtggaccacaggatggggcctctgtctctttccttccgtgaactcttgaggtctt

SEQ ID NO: 5379 - DNA, 255 bp, Canis familiaris
  misc_feature (2)..(2): n comprises a, c, g, or t, or includes no nucleotide
  misc_feature (30)..(30): n comprises a, c, g, or t, or includes no nucleotide
  misc_feature (32)..(32): n comprises a, c, g, or t, or includes no nucleotide
gnaattcccgggtcgacccacgcgtccggngnaaaacgagcctatgtagagatagagtatgagcaggagacagagcctgtggccaaggccaaaactatgtgacttgagacatttataagcaggactgaacattttcatcatcctctttcttgtaccatgaacatgtaaacacctccagttttgctctttcatatggtattcaacacaatatttgtgtttttaatatttatgctacttctgtggggcaagaaatct

SEQ ID NO: 5380 - DNA, 346 bp, Canis familiaris
  misc_feature (2)..(2): n comprises a, c, g, or t, or includes no nucleotide
gnaattcccgggtcgacccacgcgtccgaattttgctatgtataaatttttgtaacctaacagtgaatcaatattttctatcagtgccaagggcttcctgtagttctattcaagtgttacaataaatatttgtagataatagtcattacttgtgtatgcttattttaaagatctatttaggtggaaatagttgtggatgtactaagagtaatgcaataaaagtatagcttcactcacttgcctttttaccatacataaatactatctttctctgtctgcagtatggtgtcatttttaaatagtatgcattatcaagacctcacgtgtggatggaaattgtgtttat

SEQ ID NO: 5381 - DNA, 407 bp, Canis familiaris
  misc_feature (2)..(2): n comprises a, c, g, or t, or includes no nucleotide
gnaattcccgggtcgacccacgcgtccgatttcagtgcaagggtacaaaataggacaggaacaggaatgagattgtattcctcctagagtatgcccaatcaatatcacaattgtatttcttatgaaaaagtatactctaggaggaatacaatctcatttcagtgcaagggtacaaaataggacaggaacaggaataaaaaaaaagtctccaatccagttgatttaagtaggttttgtcctaatctgaggttactcattgtaaacaacacaaggttgtgagcattagtgagaacatgtgtacataaagcagctgcgtccctttgcataaataaatggtggctgttattaaggatgaaacttggtgaaaggaggttccttattctgaagtttcttctttaaaaacaaaa

SEQ ID NO: 5382 - DNA, 502 bp, Canis familiaris
  misc_feature (2)..(2): n comprises a, c, g, or t, or includes no nucleotide
  misc_feature (30)..(30): n comprises a, c, g, or t, or includes no nucleotide
gnaattcccgggtcgacccacgcgtccggngttcacattgttgtcatgggactgttgtcaggtattttccccatacttaatatatcaggtcttactcaagccctaaagtcaggctagtaatgaagtgtgtttataaatgcatcctttgtataagtgtggaatgacatacgtatatacaacacaaagattttaggcgcacagaggcactacatatactgatactgctgtgccaccaaatatgtagactgtgacctgtcagcctcctgatgcacagatctgtctgactagataggattgggaagtaggactctgacagttattataaatcagataaatattttctcttttaggcaatttcaatagaaatttcaataaatcattacacttttgaggaattctaatgatataaaggataaaaagaaaatctcaaaagtactgagggaggatataaagacatgaaaaattaacagaaaaatattaaattggcaattcaaggcaaaaa

SEQ ID NO: 5383 - DNA, 277 bp, Canis familiaris
  misc_feature (127)..(127): n comprises a, c, g, or t, or includes no nucleotide
  misc_feature (186)..(186): n comprises a, c, g, or t, or includes no nucleotide
  misc_feature (243)..(243): n comprises a, c, g, or t, or includes no nucleotide
  misc_feature (267)..(267): n comprises a, c, g, or t, or includes no nucleotide
  misc_feature (271)..(271): n comprises a, c, g, or t, or includes no nucleotide
ccattgttggagacagctgtgaggactgagaatgaaatttgccttctggggtgttgatgccataaggacatgacaaaatatatcacaggcccagggataagtgacaagaagtatgtgtgtgtattgnaaaatatctatgaaaatggaaacccatccttttctgtacagataatatcatttgggcgngacttgataggtttactacacagaaaacagactgcaactcttggagactctgcttgnctggcatgtcttgcctgaacatgngcanagcctt

SEQ ID NO: 5384 - DNA, 665 bp, Canis familiaris
  misc_feature (2)..(2): n comprises a, c, g, or t, or includes no nucleotide
  misc_feature (36)..(36): n comprises a, c, g, or t, or includes no nucleotide
gnaattcccgggtcgacccacgcgtccggcggcggnaggagcctcagcagcagaagcaggagccgctcggcagcgactccgaaggtgttaactgtcttgcttatgatgaagccatcatggctcagcaggaccgaattcagcaagagattgctgtgcagaaccctctggtctcagagcggctggagctttcggtcctgtacaaggagtatgctgaggatgacaacatctatcaacagaagatcaaggacctccacaaaaagtactcctacatccgcaagaccaggcctgatggaaactgtttctaccgagctttcggattctcccacttggaggcgctgctggatgacagcaaggaattgcagcggtttaaggctgtgtctgccaagagcaaagaggacctggtgtcccagggcttcactgaattcacaatcgaggatttccacaacacgttcatggacctgatcgagcaggtggagaagcagacctctgtagctgacctgctggcctccttcaacgaccagagtacctcggactacctggtggtgtacctgcggctgctcacctccggctacctgcagcgcgagagcaagttcttcgagcacttcatcgagggcgggcggacagtcaaggagttctgccagcaggaggtggagcccatgtgcaag

SEQ ID NO: 5385 - DNA, 262 bp, Canis familiaris
  misc_feature (2)..(2): n comprises a, c, g, or t, or includes no nucleotide
  misc_feature (34)..(34): n comprises a, c, g, or t, or includes no nucleotide
  misc_feature (93)..(93): n comprises a, c, g, or t, or includes no nucleotide
gnaattcccgggtcgacccacgcgtccgctgggnaggagcagagcaactgtcaaggctggcccttgcccctcagccccgtacactgacagggnatgagccctagactgactccagtagcaccccggggtacaggattggggcctgtcacccgtcttcaggtggcagggtccctccccctcctccagcccaccttgtttggaaataccgagctatactttaaaatgtattcaagagatttccaataaattttttctgtacttt

SEQ ID NO: 5386 - DNA, 509 bp, Canis familiaris
  misc_feature (2)..(2): n comprises a, c, g, or t, or includes no nucleotide
  misc_feature (58)..(58): n comprises a, c, g, or t, or includes no nucleotide
gnaattcccgggtcgacccacgcgtccgcacctcgatcccgggcttccggcctccagnagctgagagataatacatttccattgccgaagccagccgtctgcggtacttggttacagcagccctagcacagtgattcagggggtgatctcaaagtttcctatcccgaacggtggctcatttagaagaggggtgccagatggccctttcccatatatgagcatctcacatttaaaggagcagttctgggctatctgaggttacttgcaagtgcccatctcagtcataaacttcctgaagttgcatcatgaagaatttgttttccctagcagtcttttgtttcatggctttcttcccttctctttttgttccctcattcttcctggcacatttctacttggaagagctttggtctgggctcttggtgctcagttattaggagcctctgttgcaccaggtaggaagccatggagtgtgttcacgggccttgcggtcccctcacagatcaaag

SEQ ID NO: 5387 - DNA, 825 bp, Canis familiaris
  misc_feature (689)..(689): n comprises a, c, g, or t, or includes no nucleotide
  misc_feature (738)..(738): n comprises a, c, g, or t, or includes no nucleotide
  misc_feature (760)..(760): n comprises a, c, g, or t, or includes no nucleotide
  misc_feature (815)..(815): n comprises a, c, g, or t, or includes no nucleotide
  misc_feature (822)..(822): n comprises a, c, g, or t, or includes no nucleotide
ttttaatatctagctctaagcctaaaagagtggatccagaaacttgatatttaagtgcagctggtttgaaaattcaaatttttgtttatccttaatgtttcctgtggccagttagccatttcctagataaggtatgcattatcttggactcccatgtcattggagtaaacttcatacagatgttttaaataaatgggaatgtaccccttacttcttttatatttctgcctttgtgtttcatgacaatgttgcatgttgttttctttttaattatataaaattcatctttgaatgactatatgaatgacactatagcaaattctgtaataaaatttgttttattagttcctcatatctttaaatattgttaatactctgttactaagttacttcctccaactgtgtctatagggcagagaacaggccacctcttctacatgataattatgatcaaaccagtcaatacgatagttgtcagcagacagcaaggataacatttttgttgttgacttaaacagtcaaattagtcaaaatagtaaaactgggttatatggacagagagctacagcattcaaaaattacttttcaaaggtttcttcttttcttaaaatgaactttctcaagtgaaatacatcctcttctagcaaccatctttatctttttgtggatgggttaatcccaaatacttnctgtaattgagggacagtatgaggtgactagaaaatatctcatcagatntgtcgagcagaggctgtaactnccacttaccacgagaaactttaaataagggtgaacagcaggagggttggagggtntagttcntag

SEQ ID NO: 5388 - DNA, 832 bp, Canis familiaris
  misc_feature (7)..(7): n comprises a, c, g, or t, or includes no nucleotide
  misc_feature (794)..(794): n comprises a, c, g, or t, or includes no nucleotide
  misc_feature (820)..(820): n comprises a, c, g, or t, or includes no nucleotide
tcacagnagcctcaggcagcaatccggggctggtggacctcgtagacagtaacctccggggggagggggtgcacctgtgttcacattcttgattacctgacaggctggtgccggaaaattctatgcccaagtgccaagaaccacactcgactggagctagatcaggaaagaaagagctaaaatgacaccggtagtgaggtggcatccagttgaccaccccccaagcctctttgcaaaactgtccccggaagcgtcggctgcacgaagcaatacacactggagccgtgtgacttgtctgggagcaattaattaggggtgagaaaaacagaggacttcagcctcctttccagggtgtgtgtgacaggccctgcgacaggccctgcttcggtaagactgccgatggaaggttcccaggagcataacgcctcgcggccgggaagggcagccagttgggggctgacggcagcgagcgccctgggaaaggggccgccgtgcacgcgaggccggccgcctcccgtttccctgcggagctggcttgtgggtaacggggccaggaatgtggccagggcctgaggcttggggctctgcactgaaaatgggaacgatcacagataccagtggaggcaagtgctcacggcagctgtgtgccctgcgcggggcacggcctccgggaggtggcggggcgagcccacgtgggtctctggagcccctttttgcttttttttccgtgtcaccctgttggggagttcctgcagatcggggactgtgctgcgccgaaggggacccaaggtctnaagcctgcaagtcccccagccgcagnccagagcttggg

SEQ ID NO: 5389 - DNA, 651 bp, Canis familiaris
cagccagcgcccgcgatgactgccactctccgcccctacctgagtgccgtgcgggccacactgcaggctgccctctgcctggagaatttctcctcccaggtcgtggaacgacacaacaagccagaagtggaagtcaggagtagcaaagagctcctgttacaacctgtgaccatcagcaggaatgagaaggaaaaagttttgattgagggctccatcaactctgtccgggtcagcattgctgtgaaacaggctgatgagatcgagaagattttatgccacaagttcatgcgcttcatgatgatgcgagcagagaacttctttatccttcgaaggaaaccagtggagggatatgacatcagttttctgatcaccaacttccacacagagcagatgtacaaacacaagttggtggactttgtaatccactttatggaggagattgacaaggaaatcagtgagatgaagttgtcggtcaatgctcgtgcccgcatcgtggctgaggagttcctcaagaatttttaaatcatctggctggacctcaaggccttcccctccagactcccctgtgtctctgcaaagacatcctggagttattccccagagtggcagcaacgatgacagcagcagcagaggcggggagctgggttgggg

SEQ ID NO: 5390 - DNA, 780 bp, Canis familiaris
  misc_feature (726)..(726): n comprises a, c, g, or t, or includes no nucleotide
  misc_feature (728)..(728): n comprises a, c, g, or t, or includes no nucleotide
  misc_feature (754)..(754): n comprises a, c, g, or t, or includes no nucleotide
tatgtactttgttttcagctccctcgttggtgcatccactgaagaagtcattaagtttcttacacaaatgcctgctctatccctgcagcatgctaagggttaacgaaaaagatcaaatatccatatggccccttgagaatgccatggtttccctgaatagggcccaaaccaatcctatcattttggctgaaagttgtgaaaggcattttccccttattcttgaagcaccacttacatctgtaccgatcaacgaagaaagagttttgctttgatttaggcagtaatggataccagatgaacatcagtttggcctgttatgctgcagaagggcaaacaacgtttttctacttagtgatccgatcttgatttttctgaatttctcttaccttgtcacccactccacatgcttccaaagttgagttagcgaagcaggagtttataatttttttttttcttcatgcaaccgttgagttgtttgccaagaaagtctttctgggattttgagatggcatggaaatgcccacaaagttcattccttttagagctccttttagcttctgctctaaagctctctcctacactttaaggcataccttgcctgactagtgaatttgccattactagcacagtggaatagcaaaaggaggctatattatggtgtgtctagttaaggaagtttgatgcagtaattatgctaatgatatggccagctgatgctaagtctananacctgtccctggtagcaacttttctnttgaatacccctttggattcattggt

SEQ ID NO: 5391 - DNA, 794 bp, Canis familiaris
  misc_feature (632)..(632): n comprises a, c, g, or t, or includes no nucleotide
  misc_feature (668)..(668): n comprises a, c, g, or t, or includes no nucleotide
  misc_feature (713)..(713): n comprises a, c, g, or t, or includes no nucleotide
  misc_feature (781)..(781): n comprises a, c, g, or t, or includes no nucleotide
aaagctatgtatccctaaaatgtgtaagaccaattaaaggaaggttattacctagctaactgtaagttattaacttcttttttcctacctccagatgcatggggtgtcagaggccctcacagagaggagatgactttcacttgcagggcctgatgcttgttgatgcctttgaacctgtcctacttctctagggggcctggggggagagttcctgaactctggaatgtgccagagtgtgattaacctttgtaattggtgatttttatttggatttaggtctactcacatttttctccccctatacccatcttgagcccatctgtagaaatggtagatcttgtgaaacatcatgaattcatggtggtaagggaattaggccaccttcacatacaacttctttcctctttcttacctaaattgtgatacctgttgatacctattaaacgttctactaataagctattttgaaattcagtgttaaagcagtctccttctttgaagggacaggtattttgcaaacaaaggaattagtgggcattagttttgaatggacacggtaaatgcctgagccagggtctagttcagtgttcttttatttgtgtagtaaacatggattgtatcttagtatcttncagtaagggtgttccttatcttaaagatctcactgnttagcaggggagataggttcatagattgatgcttataatatatgntagtgaactgggtgttatgagtaggcctggaagtaggaagctttccagaaaggaggtagtcttggagntagggggggtaag

SEQ ID NO: 5392 - DNA, 817 bp, Canis familiaris
  misc_feature (10)..(10): n comprises a, c, g, or t, or includes no nucleotide
  misc_feature (698)..(698): n comprises a, c, g, or t, or includes no nucleotide
  misc_feature (751)..(751): n comprises a, c, g, or t, or includes no nucleotide
  misc_feature (784)..(784): n comprises a, c, g, or t, or includes no nucleotide
agccgctagnacgtggatctgttcagaggaagacattactgggtacccacaaccaagcggctgtttgggggtcagattgtgggccaggccctggtggctgcagccaagtctgtgagtgaagacttccatgtgcactctctgcactgttactttgtacggacaggggacccaaaagtgccggtgctgtaccaggtggagcggacacgaacagggacgagcttctcagtacgctctgtgaaggctgtgcagcacggcaagcccatattcatctgccaggcctccttccagcagactcagcccagccctgcgcagcaccagttttccatgcccaatgtgcccccgcctgaacagctgcttgaccatgaggccctcatcgaccagtatttaagggaccccaacctccaagagaagtaccgagtaggactgaaccgaattgctgccaaggaggtgcccattgagatcaagccagtaaacccgcctaccctgagccagctgcagagcatggagcctaagcagatgttctgggtgcgagcccggggctacattggggagggcgacatgaagatgcactgctgcgtggctgcctacatctcggactacgccttcctgggcacagcgctgctgcctcaccagtggcagtacaagggtgcacttcatggtctctttggaccactccatgtggttccacacttcccttncgagctgaccactggatgctctatgagtgtgagagcccctgggctggtggctnccggggctggtccaaggcggctgtggcgtcggnaggcgtcctggctgggtcctgtgcccagaagga

SEQ ID NO: 5393 - DNA, 852 bp, Canis familiaris
  misc_feature (2)..(2): n comprises a, c, g, or t, or includes no nucleotide
  misc_feature (7)..(7): n comprises a, c, g, or t, or includes no nucleotide
  misc_feature (38)..(38): n comprises a, c, g, or t, or includes no nucleotide
  misc_feature (49)..(49): n comprises a, c, g, or t, or includes no nucleotide
  misc_feature (58)..(58): n comprises a, c, g, or t, or includes no nucleotide
  misc_feature (714)..(714): n comprises a, c, g, or t, or includes no nucleotide
  misc_feature (745)..(745): n comprises a, c, g, or t, or includes no nucleotide
  misc_feature (831)..(831): n comprises a, c, g, or t, or includes no nucleotide
  misc_feature (833)..(833): n comprises a, c, g, or t, or includes no nucleotide
tnagggnaagctggtacgcctgcaggtaccggtccggnaattcccgggnagttctagnagccctgccgtatgaccagtgcctagagttgacaataagtgttatgcacttcaaagtttaagagggtaggtctcatgttaagtgttcctgccacaaaaaaaaaaaaaaaaaaaggcaaatcaaagcaaaaaaaagccaaaaggcatgcaaggaaactctgggaggtgttggataggtctcttaccttgatcgtggggacggcatcatgtctacagatgtccagattcatcaaattgtgcacatgtgcggctctttgtatagcagtcgtgcctcaataaaggtactaagaaaagagtgactaggtgccccccccacctcggcttcaagggccctggctgccctccacagcctcccttagtgatgggagtctctctcctactggccctgaaaagcccacattgtctcttatgggttgtagcattgaaggcagctcttgaaggcacattgtatttggaagacagaagcagacatagaatagtaataagaaatgtcaataagagaagttagcactcatttcctcaccaagtcattcctgcatgtctactgtgagccagcgattgggctgcttcttactgcacttcacctcaatccttcccatgcgtgtgcatgcacgtgtgctcgtgtgtgtggggggccgatgggtattgccattcttnccatgttacaggtgaggaaagagaagctcanagacagacttgatcaagactgtaatgggatggcgggcaagggggcggtgctctagaagcaggaaaggaggagagtgggctgtcaananactttgagttccggcaagc

SEQ ID NO: 5394 - DNA, 764 bp, Canis familiaris
  misc_feature (745)..(745): n comprises a, c, g, or t, or includes no nucleotide
  misc_feature (761)..(761): n comprises a, c, g, or t, or includes no nucleotide
cgtgggttttccaaactttttagacctacaaatctttccctggattccataggaattggtttaatgatatatcattttctctagtatttaaaaagagctgatttaatgttaaaatgcatcttagtgtttatgatgttacatacattttaacaaatatttttaaagttcactcttaattttaacttttttaatttagcaagtcattatgccatttaattttgtatgtaaaggagctcaatttttttgtccaatcaattttcaaatttattatatgtgatttaataatgaaactttttttaaaattttagccatctgacaggtgtatggtgatatctcattgtggttttgatttgcatttccctgatgattagtgatgttgtgtatcttatgtgtctgttggccatctatatatcttttttttggaaaatgtctatttaggtctgcccatttttaatcagattgctgtgttctttagaaggaattgtatttatttgagagagagagaaagcagcaggagcagagggaagaggcagagggagagggaggagggctacccattgaccaattctgggtttgatgccaggaccctaagattatgacctgagctgaaggcagataattaaccaaccgactgagccacccaggcaccccttagtcagatattttttgggggtgaggtggataaatcctttatatattttggatattagccccttatcagatatatcatttgcgaaaacctctnccattcagtagggtgnaat

SEQ ID NO: 5395 - DNA, 874 bp, Canis familiaris
  misc_feature (5)..(5): n comprises a, c, g, or t, or includes no nucleotide
  misc_feature (656)..(656): n comprises a, c, g, or t, or includes no nucleotide
  misc_feature (801)..(801): n comprises a, c, g, or t, or includes no nucleotide
  misc_feature (832)..(832): n comprises a, c, g, or t, or includes no nucleotide
  misc_feature (835)..(835): n comprises a, c, g, or t, or includes no nucleotide
  misc_feature (864)..(864): n comprises a, c, g, or t, or includes no nucleotide
  misc_feature (868)..(868): n comprises a, c, g, or t, or includes no nucleotide
aaagnagtagggtgagtgaaggagacagactcgctctagtacctaccatgtgtcagccccgtgctaagtgcttcaaaagcattgcttcatttaaattctcctgtgtgagatcagttgttactcttcttttgcaggtgaagaaaaactgactctttgtaatgaaccagtagtagaactggggttgaaaccctcctctgatttgctctgacagccatgtttttttcctctggaccgcctgggtgaagcccccactttcttgtctgttgaatgaagaaactgggcaagataatttttaagacccatttcaggaccatcgttccgattctgtcacacactggttgtcctgagctttggttgcttctaatactgaaaaaggaagttgccatcccactctaggaaacatcctgttttattaagaccaagagtactaacgtgttatttgtagaagttgtgaagtagggcaaaggcatttaaagtagtcctgatgatagatcttcatataagttgcaagggatccctgaaaaatatattttaaagataagattcactacagtgtggcttgatagctttataacgtcagtggacaaccctaaaatgattaactgtcatatgattcgcccatatcttgtcttcaaacatgcaaatagatgggttanggggggtacctacatttttttttgatttacacagtacacatcacaaaaaacttagctaagtattcctagatatgtctatatccttagagtaataactatatttccagggtatgtagaatctggtttaccggcccttactcataanatcctccagcccttcctcgttttccattttnttntggaaaatgggaaatggaagggttatttncttntttgat

SEQ ID NO: 5396 - DNA, 703 bp, Canis familiaris
atgctccaggggtctggaggaaaaacaaaccactggggtaatcatgatgaggggcctggattgggacttcttgacgctgactttgggcccaacttgaaatctctttgggcgtctcagtcttttcattctaaaacgctgcagacggtaggaccctcccatgctagaacctacactgtggcagtgtactttaagggagaaagaataggctgtgggaaaggaccaagtattcagcaagcagaaatgggagcagcaatggatgcacttgaaaaatataactttccccagatggcccatcagaagcggttcattgaacggaagtacagacaagagttaaaagaaatgaggtgggaaagagagcatcaagagaaagagccagatgagactgaagacataaagaaataaaggagggcacggaaatggtggcgtatttacttgcttaataactgtgactgttgcccatcgagatctagcctagttttcctgcagacgatgaatgaagtgtgctcgttgaaataaaacacaaggtcaactcgctattgttgttttaccgatctaatatgttattttgagctggatggtctttattacaaagtatatggtttctcttctctttaatggaaaacctcactttggtggatgtgcatattcccttttattttgttctttcaacaataaattcaaaaagcatcttaaaaaaaaaaaa

SEQ ID NO: 5397 - DNA, 835 bp, Canis familiaris
  misc_feature (5)..(5): n comprises a, c, g, or t, or includes no nucleotide
  misc_feature (584)..(584): n comprises a, c, g, or t, or includes no nucleotide
  misc_feature (594)..(594): n comprises a, c, g, or t, or includes no nucleotide
  misc_feature (705)..(705): n comprises a, c, g, or t, or includes no nucleotide
  misc_feature (714)..(714): n comprises a, c, g, or t, or includes no nucleotide
  misc_feature (798)..(798): n comprises a, c, g, or t, or includes no nucleotide
  misc_feature (803)..(803): n comprises a, c, g, or t, or includes no nucleotide
atggnagggctgcgggcactaccgcgtggtgaagtacgagcgcattaagttcctggtcatcgcgctgaagagctccgtggaggtgtacgcctgggcccccaaaccctaccacaagttcatggccttcaagtccttcgcagatctccctcaccgccctctgctggttgacctgactgtggaggagggtcagcggctcaaggtcatctatggctccagtgccggcttccatgctgtggacgtggactcggggaacagctatgacatctacatccctgtgcatatccagagccagatcacgccccatgccatcatcttcctccccaacactgacggcatggagatgctgctgtgctacgaggacgaaggcgtctacgtcaacacatatgggcggatcattaaggacgtggtgctgcagtggggagagatgcccacctctgtagcctacatctgctccaaccagatcatgggctggggtgagaaagccattgagatccgctccgtggagacaggccacctggacggtgtcttcatgcacaaacgagcccagaggctcaagttcctgtgcgagcggaatgacaaggtgnttttcgcctncgtccgctctgggggcagcagccaagtttactttatgacgctgaaccgaaactgcatcatgaactggtgacagggccagcttggccccaaagccagacttccccaggccgncctcctttnccttcctggctttttgcttttcgactgggtttgattcactggagcctgctgggaacgggacctctgaccctgagcttttgggancacgngaccattctatttccttcccccaaaatttttc

SEQ ID NO: 5398 - DNA, 300 bp, Canis familiaris
  misc_feature (2)..(2): n comprises a, c, g, or t, or includes no nucleotide
  misc_feature (30)..(30): n comprises a, c, g, or t, or includes no nucleotide
  misc_feature (32)..(32): n comprises a, c, g, or t, or includes no nucleotide
gnaattcccgggtcgacccacgcgtccggngnaactggtggtggcggaggcagtagtgggcccggcggtggtcctacctgcgggtccggcagtggccgcagcggcttgttggacaaggtttgatgacaaatacactctgaagttgaccttcatcagtggaagaacaaagcagcagcgagaggccgagttcaccaagtccattgctaagttttttgaccacagcgggacactggtcatggatgcatacgagcctgaaatatccaggctccatgacagccttgccacagaaataaaaataaa

SEQ ID NO: 5399 - DNA, 539 bp, Canis familiaris
  misc_feature (2)..(2): n comprises a, c, g, or t, or includes no nucleotide
  misc_feature (35)..(35): n comprises a, c, g, or t, or includes no nucleotide
  misc_feature (49)..(49): n comprises a, c, g, or t, or includes no nucleotide
gnaattcccgggtcgacccacgcgtccgctcaagnatccacgccagggnagatctttgactctcgcgggaaccccactgttgaggttgacctctacacctccaaaggtctcttcagagctgctgtgcccagtggtgcctccactggtatctacgaggccctcgagctccgggacaatgacaagacacgctacatggggaaaggtgtctcaaaggctgttgagcacatcaataaaactatcacaccctgcttccagccctaaccacttttcagaatatcttcttcactctccttgggattttcctgcagcaactcccagcctcagttctgctgctgtcttttttgctctcagctttacttctcaacttcctgctttttaatcccacctcattcccccaaacaatacagcaggttgtctcattttcccaggggtgggtcatgggctctatgctgctcttctgtctgtctgagcttatgaacacccccacaggtagaagtggggagtaatcttaaatcactcctctctccacttgacatatc

SEQ ID NO: 5400 - DNA, 753 bp, Canis familiaris
  misc_feature (2)..(2): n comprises a, c, g, or t, or includes no nucleotide
gnaattcccgggtcgacccacgcgtccggcgagtggcccgggagcgcctaggccaccacctgcagggcctgcgggctgccttcctgggttgcctgaccgatgtgaggcaggcattggctgcacctcgtctggctggaaaggaaggcccaggcctggcggagttgctggccaatgtggccagttccatcctgagccacatcaaagcctccctggcagctgtgcacctcttcaccgccaaggaggtgtctttctccaacaagccttacttccggggcgagttctgcagccaaggtgttcgtgagggcctcatcgtgggcttcatccgctccatgtgccagacagctcagagcttttgtgacagccctggggagaaggggggtgccacaccgcctgctctgctcctgctactctcccgcctttgcttggactatgagacagccaccatctcctacatcctcaccctcaccgatgaacagtttctcgtgcaggaccagtctccagtgacacctgtaagcacactgtgtgcagaggccagggagacagcacggcggttattgacccactatgtgaaggtgcagggcctggtcatatcacagatgctgcgcaaggctcagagcagtgactccagcaaaaggaccttctctgtgtatagcagctctcgccaacagggccgctatgcacccagctatacacccagtgccccaatggacactaatctcttgagcaacatccagaaactggtctctgaacgta

SEQ ID NO: 5401 - DNA, 609 bp, Canis familiaris
  misc_feature (2)..(2): n comprises a, c, g, or t, or includes no nucleotide
  misc_feature (36)..(36): n comprises a, c, g, or t, or includes no nucleotide
gnaattcccgggtcgacccacgcgtccggttctagnatcgcgagtggccgccctttttttcctttttatcatctgaaaaaagattactagtactaatcattgtagtggcatgagtgtgatttaacacttcagaagtcacattctcaaaaagagacaagtagaagccagcacccagcacagcccagatcttttcttacctctcctttcctcatttattactaaaggaatctggcggatagttttctctctctgcgctaccaaaacaaggcaaaaacaaaaaatgctttttattcctgtcaattggatggaaacacaaatgtcatggagctgtgtatcattgaaggaatctggtgtctgggatgaaattctttttaaagagcttcctgtaaaacacgtgaacaaactgtgagacaaaaggcatgggcgcgtgttggaagacttgtgacctgcagctgggactgtcacctccagcattcaccttcatgtgtcttcagcccccgcttctgggcaggggactctgtttggtcttagaatgtttggatataactgaattgtagttggtaaaaataatttgatgttgtgttgtgtttttttggtttttaaaaaaat

SEQ ID NO: 5402 - DNA, 454 bp, Canis familiaris
  misc_feature (2)..(2): n comprises a, c, g, or t, or includes no nucleotide
  misc_feature (32)..(32): n comprises a, c, g, or t, or includes no nucleotide
gnaattcccgggtcgacccacgcgtccggggnatggtagctgatccggacaaccctttggtattggacatcctgacgggctcttctacctcttactccttcttcccggacaagcctatcacccagtacccccacgccgtggggaagaacaccctgctcattgctgggctgcaggccaggaacaatgcccgggtcgtcttcagtggctccctggacttctttagtgacgccttcttcaactctgcagtgcagaaggcggcgcccggctcccagaggtattcccaaacaggcaactatgaactagctgtggccctctcccgctgggtgttcaaggaggaaggtgtcctccgtgtagggcctgtgtcccaccatcgggtgggtgagacagccccacccaatgcctacaccgtcactgacctcgtggagtacagcattgtgattgagcagctctcaaa

SEQ ID NO: 5403 - DNA, 558 bp, Canis familiaris
  misc_feature (2)..(2): n comprises a, c, g, or t, or includes no nucleotide
  misc_feature (481)..(481): n comprises a, c, g, or t, or includes no nucleotide
  misc_feature (520)..(520): n comprises a, c, g, or t, or includes no nucleotide
  misc_feature (536)..(536): n comprises a, c, g, or t, or includes no nucleotide
  misc_feature (545)..(545): n comprises a, c, g, or t, or includes no nucleotide
gnaattcccgggtcgacccacgcgtccgctcaatgcacagtaagccaatgtctgagacactggttttgaagcaaagaaagctttattatcagatgaaaaggcaggggatcattcccaaagcaaccttgccctgttgagcctagggacagcttacatgcaggagaggagggtaaggagtttctagaaaccttgagttggggtgggggttggggagtttgaaacaatctggaagtgagcattctggacaatgaggtactatttgggacctggtatgatcagatacgtcaagaccaacactaccattaattaggttagggaattaattaggcagggaacaaaataatgtggagctaagttaataacgcaactaaaacaactatagttctgcttgtgctttcaaagtaggtcctgaggccaggtgttagtgtcagtctgacagttctttctctcagcacttgactaatgtgccacttctggcctntggtttctgatgacaatctgttttcctttgaatggtttncccttacagacaaggngtttttctntccatgctttcaa

SEQ ID NO: 5404 - DNA, 230 bp, Canis familiaris
  misc_feature (2)..(2): n comprises a, c, g, or t, or includes no nucleotide
gnaattcccgggtcgacccacgcgtccgggtggtgggaactataatgattttggaaattatagtggacaacagcaatcaaattatggacccatgaaagggggcagttttggtggaagaagctcgggcagtccctatggtggtggttatggatctggtggtggaagtggtggatatggtagcagaaggttctaaaaaaatttcagaagaaaagggctacagttcttagcag

SEQ ID NO: 5405 - DNA, 469 bp, Canis familiaris
  misc_feature (2)..(2): n comprises a, c, g, or t, or includes no nucleotide
gnaattcccgggtcgacccacgcgttcggtggccgatgcatcagcgggatgttcgtgttcctcacctatgtgctgggagtggcctggttgggcgtgttcggtttctctgcggtacccgtgttcatgttctacaacatatggtcaacttgtgaagtcatcaagtccccccagaccaacggcacagctggtgtggagcagatctgcgtggatatccggcagtacggtatcattccttggaatgctttcccagggaaaatatgtggctctgccctcgagaacatctgcaacaccaatgagttctacatgtcctatcacctgttcattgtggcctgtgccggagctggtgccaccgtcattgccctgctgatctacatgatggctactacctataactatgccgttttgaagtttaagagtcgggaagattgctgcactaaattctaaattgcttaaggccaaccaggagctt

SEQ ID NO: 5406 - DNA, 712 bp, Canis familiaris
  misc_feature (2)..(2): n comprises a, c, g, or t, or includes no nucleotide
  misc_feature (605)..(605): n comprises a, c, g, or t, or includes no nucleotide
  misc_feature (671)..(671): n comprises a, c, g, or t, or includes no nucleotide
  misc_feature (694)..(694): n comprises a, c, g, or t, or includes no nucleotide
gnaattcccgggtcgacccacgcgtccgagcagcgaccccggctccttcgcactctgcgcccgcgcccgatgccgcctgtgacgtggcctgcttgatgttcgatagcagcgaccccggctccttcgcactctgcgcccgcgtctataagcgccactacatggacggacagaccccctgcctcatcgtctcctccaaggcggacctgcccgcgggcagcacgccccctggcctggcgcccgctgagttctgccgcagacaccggctgcccgcccctgccgccttctcccgggtgggcccagccgggctcagcgctgccgtcttcacccggctcgccaccatggctgccttcccacacctggctcatggggagctacacgccacctccttctggctgcgggtgaccctgggggccgttgggtttgcggtcactgccgtcctcagcatctcgctctacagggccctggtgaagagccgatgaggcctcaggcccccgggtgctggtattggggcacctgctcgagggggccttccttgtgtcggaacttccttctggggatactgcccacccccctgcccgagccccaagtgcagtcccccaggtctncgcagcacgcgtcctacccagctgcacatgccaggcgttacccgcttcggggatcacgtgttgganggactggggtcatggcgaggaanccggtgacccttaggccc

SEQ ID NO: 5407 - DNA, 474 bp, Canis familiaris
  misc_feature (2)..(2): n comprises a, c, g, or t, or includes no nucleotide
gnaattcccgggtcgacccacgcgtccggcaattcatttttaattactaagaaatataattttggaatttttaatctgttatgctttgttcttcaactttattttaattacgacttttataggatgagcaaaaatggcagtttacattatttttgcaaaaaagttagactcgttcctttcttgctagtcagagtaaataggcagtaattttgaaaagatgtgaactcaaatattgcacttctttcaagatgttatcatttggttattgtactgtatagttttaataatattgtgattgaaaccctttaacaactctttgtaaattttaactcattttagttgttttttcagtactatttacataggaattgatttttatggatatagtagaagaaatgtgatgtattttgataaaattcatttactgtatgtgtgttgtaatctctaaaaaaaaataatgacaaacagattctt

SEQ ID NO: 5408 - DNA, 738 bp, Canis familiaris
  misc_feature (2)..(2): n comprises a, c, g, or t, or includes no nucleotide
  misc_feature (59)..(59): n comprises a, c, g, or t, or includes no nucleotide
  misc_feature (662)..(662): n comprises a, c, g, or t, or includes no nucleotide
  misc_feature (689)..(689): n comprises a, c, g, or t, or includes no nucleotide
  misc_feature (724)..(724): n comprises a, c, g, or t, or includes no nucleotide
gnaattcccgggtcgacccacgcgtccgattttaaggaagtgtttcactttttaaaagnatagaagaggtggatgggagactaaactagatcctggcattaaaataattcttttttaaagactattttggggaaaagcaagtgattaaagatgaataaaatagagcatttgtactagttttggaggacaacatcactcttaagtttgccacgtgaaactcaatagaaaaggggttttaaaaaatggaaattgaaagtttggaatgtttctgacctgcatagtgcaaatatagtatattcataacacgtttaactgtcagatctcactcaggttttaagattttgagctccctagtcttagaagagttcattaaatgtataatttacttcaaattctaaggaattaggtatttacttagtgatacagaaagttaaaataagatgtaacatatggccattaatgtacaggattaatgggatttttctattaaaatataacgaccatgaaaaaattgattagcttgttgcatttgttgccaaaattgggtgttcagttatagcttattcaattcccatttgtgggaattttgaaacaaaaaccaattgtcttacttggttagccattgattaaggcaacagcatatctgcaggaaaatatcttgnttgtagtaatacaccccaatagttggntttactcttgaaatgatttatttcacttaatttgnataattggtatgag

SEQ ID NO: 5409 - DNA, 511 bp, Canis familiaris
  misc_feature (2)..(2): n comprises a, c, g, or t, or includes no nucleotide
  misc_feature (41)..(41): n comprises a, c, g, or t, or includes no nucleotide
  misc_feature (234)..(234): n comprises a, c, g, or t, or includes no nucleotide
  misc_feature (345)..(345): n comprises a, c, g, or t, or includes no nucleotide
  misc_feature (392)..(392): n comprises a, c, g, or t, or includes no nucleotide
  misc_feature (412)..(412): n comprises a, c, g, or t, or includes no nucleotide
  misc_feature (455)..(455): n comprises a, c, g, or t, or includes no nucleotide
gnaattcccgggtcgacccacgcgtccgacaggccctcggngtcagcacgagctccagaccatccaagaaggacagcgcagccactcccgagggcctggatgtgatggcgtcacagaaaagaccctcccagcaggcacggatccaagtacctggcctcagcaagcgccatggatcacgccaggcatggcttcctcccgaggcacagagacacgggcatccttgactccctcggncgcttctttggcggtgacaggggtgtgcccaagcggggctcaggcaaggatggacatcacgcagcgagaactgcccactatggctccctgccccagaagtcccagcatggncggccccaagacgaaaaccccgtagtgcatttcttcaagaacattgngacaccacgcacacctcctncatcgcaaggaaagggagccgagggccagaagccgggatttgnctacggaggccgcgctccagagcccagcaggaggggccagggagacgcttgtctca

SEQ ID NO: 5410 - DNA, 778 bp, Canis familiaris
  misc_feature (697)..(697): n comprises a, c, g, or t, or includes no nucleotide
  misc_feature (709)..(709): n comprises a, c, g, or t, or includes no nucleotide
  misc_feature (715)..(715): n comprises a, c, g, or t, or includes no nucleotide
  misc_feature (731)..(731): n comprises a, c, g, or t, or includes no nucleotide
  misc_feature (751)..(751): n comprises a, c, g, or t, or includes no nucleotide
  misc_feature (757)..(757): n comprises a, c, g, or t, or includes no nucleotide
tttttttttttttttttggagttagaaccagcactttattgtagtgtatacacgttctgacctcatcaatatacacatctggaaagtgacaccacgcggagtccgcattagcatctatcattgtctacacagagcagctacagtgacagtacatgaggatggccacacacgacgcaggacagctgcattgtcctcgaaactagcagttatgatcacagaacagtattcaaaattattttcccccagttttagaaatctaaaattttacatgtaaattaaaaatgaagtgccataggggttttagctcatgacttgtcctctccttttccttccctgccaggccgagcagcagggctcctcactcctggggagtggggcttacctctggggctgctggagggaaagctggcactttgcctttgggccacggggcgtccttgggagcgtgtctgtcctcagacgttctgagtatggacccctcaggtgggttctgattccaaaccaggtggccagacgctttgcaccatccacacgtacactcaccagcagggcaacggacatctagtcggtgtgaacccaaggctgcgcacgaggagtccagcttcctgcgcaaggagctgccggtcattggaggagtgtgtgaggccagggacccgggcacccttttccctttggcaagtcagaaatgggaagaatncccaaagaaagncccggncatttccagccttcanaggggggtccctgatccagngccctnctgctgaacaacagggggggg

SEQ ID NO: 5411 - DNA, 372 bp, Canis familiaris
gcgctctgaccacatccaagaataaaattgaagacactgctgggatactcctgaaagagccatttctggctttttatttccagtaatgagcttctttttctttgcttggaagaatgtgattataaccaggccatcatgttcagaaaagttactttaattttgatgtagactgcattcctattggaataattggcctatcgctcttaaatatatctgataatttatttatacctacctttataaaatatagtgcaactacttttgtgtaaaaatgtctttaaatttagcatttcgtatcagcacatctgtatatgtataaatgttccacgttcatgtgtaagagagtcttcaataaattattttttccacttg

SEQ ID NO: 5412 - DNA, 434 bp, Canis familiaris
  misc_feature (29)..(29): n comprises a, c, g, or t, or includes no nucleotide
  misc_feature (80)..(80): n comprises a, c, g, or t, or includes no nucleotide
  misc_feature (268)..(268): n comprises a, c, g, or t, or includes no nucleotide
  misc_feature (324)..(324): n comprises a, c, g, or t, or includes no nucleotide
  misc_feature (327)..(327): n comprises a, c, g, or t, or includes no nucleotide
  misc_feature (345)..(345): n comprises a, c, g, or t, or includes no nucleotide
  misc_feature (375)..(375): n comprises a, c, g, or t, or includes no nucleotide
  misc_feature (381)..(381): n comprises a, c, g, or t, or includes no nucleotide
  misc_feature (409)..(409): n comprises a, c, g, or t, or includes no nucleotide
  misc_feature (425)..(425): n comprises a, c, g, or t, or includes no nucleotide
acgcgtgggctgggggacttctgtcaagnatctgctcagtgaaggaacggcatgccagtgaaatgcgggacttgccaagncgatatgttgaaatagtgtctcagtttgaaactgaattctacattagtggacttgcacctctctgtgaccagctggttgttctttcctatgtgaaggaggtttcagaaaaaacggaaagagaatactgtgccaggccacgactagatatcatccagccgctctctgaaacttgggaagagatctcttntgacgctctgacagagagaggctttcaggagaatgagtgcagagattatcatttanagnactctgaaggggaatcgntcttttacatcgtgagtggcaagagacatnggagtnggcaaggaacgagaccaagatgaccacntggactggctgcttgnaaagaagaa

SEQ ID NO: 5413 - DNA, 810 bp, Canis familiaris
  misc_feature (659)..(659): n comprises a, c, g, or t, or includes no nucleotide
  misc_feature (756)..(756): n comprises a, c, g, or t, or includes no nucleotide
  misc_feature (784)..(784): n comprises a, c, g, or t, or includes no nucleotide
ccagggctgagtggacgatttatcataactgctcttcctactatttatcattgtaaagatggtgaatttaggcgctatcaaggcccaaggactaagaaggacttcataaacttcataagtgagaaagagtggaaaagtattgaaccggtttcatcatggtttggtccaggttctgttctgatgagtagtatgtctgcactctttcagctgtctatgtggatccggacttgccataactattttattgaagacctggggttaccagtttggggatcatatacagtttttgctttagcaactctgctttcaggactattactaggactttgtatgatatttgtggcagattgcctttttccttcaaaaaggcgcagacctcagccatacccttccaaaaaattattaccagagtcttctcaacctttgcaaaaagtggaggaggaacaagaggctgatgaagaagatgtttcagaagaggaagctggaagtaaagaaggaacaaacaaagactttccacagaatgccataagacaacgttctgtgggtacttcattggccacagataaatcctagttaatttttctaaatgttgtaatattattttggcaaaaacagaagatcaatcatttctttgtggtttgaagtgaactgtgacttgnttgtacattgcaaggttcagtctagattgtcattagattgaacagactacctttcagaaaataaaagtagcacttgaacagagtaccttcagaaaangaaagtaatactacgtaaaaaattttgnaataggattaagaacagcagtttggg

SEQ ID NO: 5414 - DNA, 800 bp, Canis familiaris
  misc_feature (771)..(771): n comprises a, c, g, or t, or includes no nucleotide
ccgaaacaccaccttagtggagggagccaatctctgcttggaccttcgtcagtttgggattgtgacgattggagaggaaaagaaaatttgcaccgtctctgagaatttcatgaggatgtgtgaatctaccgagctgaacatgaccttccacttgttcattgtggcgcttgctggggccggggcagctgttattgctatggttcactaccttatggttctgtctgccaactgggcttacgtgaaagatgcctgccggatgcagaaatacgaggacatcaagtcgaaggaggagcaagagcttcatgacatccactctactcgctccaaagagcggctcaacgcctacacataaatccgccctgcctgtcctgcctgccatctagatgcattggtgtttaacgaagggccatccaaccatccaaccttgtgaaaactaaaatgggagtgcttctcatcaatgatctgtagggtgacttatgaatcacctgaccacaattctttgttgtttagcacgtaatttcctaatttgttaaattggtgtgaacaaatctcttctacaagctcctatccagccttttcctttttttaaatttctcacactcatttaaataattctgtaagattgaagatactaacattgtcaagtgcagagattttatttgattttaaccacttcccatgtgttgatacataacaccttttgcattatttcttatggtttgagaagaaaaaagctttttatactttttagttttgatttcgggaactagnttaactacaggtaaccttcaagggaccat

SEQ ID NO: 5415 - DNA, 345 bp, Canis familiaris
tatatacaaatataaaacatctcactacatccactccaaaagttacactgggtgttgagggaaaaaccatcatttctcagtgttttgagttgattcaccaaaggcaaattatggaatgttcttactgctttttgtgcacttggaggagaaaactcagctacttatgcactttctgggttttctgtgctgcagggtggttggagggggtggtggggagaacaacttcgatggtcctctgtgacccagctgctgtgatgtgtctgctttggggagcaggctgtgttttctttgcagtttgttgtattgcttggatctattggctacaataaacagatcatctccccc

SEQ ID NO: 5416 - DNA, 527 bp, Canis familiaris
gacggtggcgacgaggcccggagtgaggccatccttggacccctgagcggttggaggaggagcgcagcggcacagaaccctgcagccactttgtgacactgcggacctgaaatgggagctcgcgaggcacaactgagctggatcaaaggttgggaaaagtgtttattgtctaattacccgtgtcacctttgtcttcaccatcacccccttcttttatcctcttcttgttcagatttcaaaatatctaccttgtgtctctcggtggttccccttcatcccttttaccaccacctgggtccaggccgttatcttaattaaaatagcttcctagtgagcttcctgtccttgattctttgcctgtttaagctttccgctgcaatcttaatactgcagccaaatttaagaaatgtaaatgaggtcacatcattcttccttttaaaccttccctttgcacataaatccaatcttcttatcatggctggcaggcaccccgtggacctgggcctctaccctgctctcccaacgta

SEQ ID NO: 5417 - DNA, 711 bp, Canis familiaris
  misc_feature (589)..(589): n comprises a, c, g, or t, or includes no nucleotide
  misc_feature (680)..(680): n comprises a, c, g, or t, or includes no nucleotide
ctcagcacttggaggatctatagtgtaagtggagagggatggggtgctgggaaggagtagaggggggctgcctggcccctagcttggatacagagaggtcaagcccaggaatcctccctccataaggctggaggggaggcaagaggagaaggtagaggaggcagttaggatgatgctagacatcagagtagggggttatgggcaaccagatacacttggcctctgggtcgtgggaatcaaggaagtgattcatcctcttgaagatgctgacactagagagaggggctgctgtccccaggggcaaggcacactttgttcctattttaaagcctccctccttgctgcataattcccccacccagacctctgagccactgtagctgctgcctcccaaccccagtaacactgctgggtgaagccactgtcctacatcagataattcccaccctccagtgacctgctgttttttcctaacccaagggctcttgtggttcccctcctactccaatgcaaaatgtaccctcatactgtaggtagcactatattttatcgtttggggaatggaggcacaaacagaatgaagactggnttgtgctctgctttccatgggaagactggggatgaggggcaggcacaggactatctgtgcccacaaatagggctgagagggtccgctccangggtcctcctcacccctccaagccagaaaag

SEQ ID NO: 5418 - DNA, 715 bp, Canis familiaris
  misc_feature (700)..(700): n comprises a, c, g, or t, or includes no nucleotide
gactcaaaatcaccagcacggtcaagtgttttaacgaggccgcctgcatctccgtgcccccagtggatggctacgtgatggtgttgcagccggaagagcccaagatcagcctgagtggggtccaccattttgctcgagcggcttctgagtttgaaagcccagaaggagttttccttttccccgagcttcggatcatcagcaccatcacaagagaagtggagcctgaaggggaaggggacgaggaccccacagttcaagagtcgctggtgtctgaggagatcgtgcacgacctggatacctgcgaggtcacggtggacggggaggaactgaacccagcccaggagagcctggaggtggacatggcccgcctgcagcagaagggcattgcagtgagcggctccgacctgggcatggtctttacaggtgtggacaccatggccagctacgaggaggttctacgcctcctgcgctatcggaactggcacaccaggtctctgcttgaccggaagttcaagctcgtctgctcggagctgaatggccgctatgtcagcaacgagtttcaggtggaggtgaacgtcatccacgcggccagccccatggagcacgccagccacatggctggccagccgcagtttgtccacccggagcaccatgcctttcgttgacctctcgggtcacaacctggccagcccccacccgntcgcagttgtcccca

SEQ ID NO: 5419 - DNA, 471 bp, Canis familiaris
atttaaagtgtctatttatgatgacagtacatgtgttctgcttgaatttactaaattctactactgggttataattaaaccatgtagtaatattactctatgtttggatatgctcatttaatttctacaggagaatttttaaattatttcacatagtcatccatgtaagcatagcataactcaacaggcttgattcaacctatatcaccctatatataccatgagcttttatttttaaagacatttagaagagtttttcagttgctttatcaaaaactactgcttcttttatattatgatttaatatagaatataaacttgatcaaaaatgcacaaaaaaatcactttgtatatgtacttgagtttcactgcattgtatattttttcatttggtacacaaagaaatgtattcttcataggtctattcttttaacatgtgaactattattaaagtttactctggttcctaag

SEQ ID NO: 5420 - DNA, 687 bp, Canis familiaris
  misc_feature (2)..(2): n comprises a, c, g, or t, or includes no nucleotide
  misc_feature (638)..(638): n comprises a, c, g, or t, or includes no nucleotide
gnagctggagaaccagatcaaggagcgccagggcctgttcttcgatatggaggcctatttgcccaagaagaatgggttgtacctgagcctggttctgggcaatgtcaacgtgacactcctgagcaagcaggctaagttcgcctacaaggacgagtatgagaagttcaagctctacctcaccatcatcctcatcctcatctcctttacctgccgcttcctcctcaactccagggtgacagatgccgccttcaacttcctgctggtctggtactactgcacgctgaccatccgagagagcatcctcatcaacaatggctcccggatcaaaggctggtgggttttccatcattacgtgtctacgttcttgtcaggagtcatgctgacgtggcctgatggcctcatgtaccagaagttccggaaccagttcctgtctttctccatgtaccagagctttgtgcagttcctgcagtattactaccagagcggctgcctgtaccgcctgcgggccctgggcgagaggcacaccatggacctcaccgtggagggcttccagtcctggatgtggcgcggtctcacctttttgctgccctttctcttctttggacacttctggcagctttttaatgcgctgaccctgntcaacctggcccgggaccctgagtgcaaggagtggcaggtgctcatgtg

SEQ ID NO: 5421 - DNA, 391 bp, Canis familiaris
  misc_feature (1)..(1): n comprises a, c, g, or t, or includes no nucleotide
  misc_feature (14)..(14): n comprises a, c, g, or t, or includes no nucleotide
nacacacgacttantgcctcagagatgaagcagctcattgacaacatcctggaagagtccgacattgaccgggatggcaccatcaacctctcagagttccaacacgtcatctcccgttcgccggacttcgccagctcctttaagattgtcctgtgacaggagccgtggcgtgtgtcccagcaagcaccctgtcagagagccttcccactgctgagctgtggccgaggtcatgcctgtgttgccagggccggccaagctggcctagcccagagctggcactgtgtggtcctgctccaggcaggggaaggccctccatgctggtgcctctctccttctgtcattgtcatcgctgtttgtgttctactaatatataataaaggtttagatgttc

SEQ ID NO: 5422 - DNA, 817 bp, Canis familiaris
  misc_feature (215)..(215): n comprises a, c, g, or t, or includes no nucleotide
  misc_feature (674)..(674): n comprises a, c, g, or t, or includes no nucleotide
  misc_feature (805)..(805): n comprises a, c, g, or t, or includes no nucleotide
aacaaaaacttgtatattaatttattttcagtgtcttgatcttatttatgatctgctaaagtggtgatttatccattcaaaatatattttttccatttaaaactaatttataaactatgtactcctgggaagatttgaattattagaagtttgttgaaatattttcaccatttaagacagacttcttagatactgattttattgccagtatctgntctaaatatttatgataaaaatgcattatttttttaaagagcttgatgcaatttgtgataagtgatagtactcaacctgaatcctacccccagtcccaccctttgaccaaatcctccacaaacctttagctgttggttaattcactaactgtaaacacaaatgacatggtctggtttagaagttatttttttcagccttatgatagttaacatggtaagccttagcagtgaatagtcttcctttctaacaggtagacttacatgttctcaagaaatagggtaagatggggtactataataccaaattctaaatcatgagcattttctccgctgtgtatgtacatgaggcaaatcatgcatctttgagtgcagtttggcctggcccctgaagagaaaagcatgtcaccacacttgcagtaggggtactggggtttgaatggataccatcactcttttctncacaaacagtgcagagaactgtctggagtggcaatttgaacagattccctgacgttccctctgctccttccgtcctacagtaagtaaaagaaccacctgggggaacccgggagtctgaaaaaatcagctgngctcatagccaa

SEQ ID NO: 5423 - DNA, 735 bp, Canis familiaris
  misc_feature (704)..(704): n comprises a, c, g, or t, or includes no nucleotide
  misc_feature (719)..(719): n comprises a, c, g, or t, or includes no nucleotide
ttctagatcgcggcggccgaggcggtgcggggcaggcgttgtctccggagcgcgagcggacatggcggcggcgtttcggaaggcggcgaagtcccggcagcgggaacaccgagagcgaagccagcctggctttcgaaaacatctgggcctgttggagaaaaagaaagattacaagcttcgtgcagatgactaccggaaaaagcaagactacctcagagctctccggaagaaggctcttgaaaaaaatccagatgaattctactataaaatgactcgagttaaactccaggatggagttcacgttattaaggagactaaggaagaagtaactccagaacagctgaaactgatgagaacccaggatgtcaaatacatagaaatgaaaagggttgcggaagttaagaaaattgaaagactaaaatcagagctccatctgctggatttccaggggaagcaaaagaataagcatacgtttttttttgacaccaaaaaggaagttgagcagtttgatattgccactcacctgagaacagccccggaactagttgacagagtctttaacagacccacaatagagacattgcagaaggagaaggtgaagggggttaccccagcagattcgactgaagcgaatagctaaagaaaggcaaaagcagttttaactgcctgacacagcggattgaacgcgagaagaaattgtttgntattgcacagaaaantcaaacgcgcaagatc

SEQ ID NO: 5424 - DNA, 827 bp, Canis familiaris
  misc_feature (715)..(715): n comprises a, c, g, or t, or includes no nucleotide
  misc_feature (777)..(777): n comprises a, c, g, or t, or includes no nucleotide
  misc_feature (782)..(782): n comprises a, c, g, or t, or includes no nucleotide
  misc_feature (796)..(796): n comprises a, c, g, or t, or includes no nucleotide
  misc_feature (814)..(814): n comprises a, c, g, or t, or includes no nucleotide
  misc_feature (822)..(822): n comprises a, c, g, or t, or includes no nucleotide
cttgtattggtgtgtgctgttcagagtaagaaaagccaaagcctgttaggaagcaactgtacaacaggaggtgagggaggaggaaggttaaagtgcagtgatagttgagtgggggagagcgagagccagccacctgaactagaagggaaaatggagatgaagctgagatggacagacagcattaactgagtgatatggttggtgtgcgcggggcaccagggctcctgtactgaatggtacagacgtgtgtacaaatagactctaacccagtgtaaagaagttgatgcattacagcctggcttgctttactctgaacattttaatcaaatgcttattttttttatgttgatctgtgtttctcccacattagggatgagggcaggaataatctcctgaaatacaaatcataaaggattctgtctagtttattagtattattaatattattattatttaaatctatttcccattgtaagggttttctcttcaaatacttctctttctttctgagggaaaaacatgtatttgaacaaagaaaggaggtaaactggcaatagaaagaggctgagatgggacgagataaatccaaggatttgtattctcactttctgaaatacttgtctcaaaataaatacgtagatttttattgttgtgcaatgaaatgtacgtgggccgtgaatagttggactctgtgaatggataagataagccccgngatacctgtaatgcattgagcccaaggagtaatacagactttaagacatggctgacctaaanggaanagttgggtctcganaatcactggatacagctnttgcttcnttaag

SEQ ID NO: 5425 - DNA, 825 bp, Canis familiaris
  misc_feature (679)..(679): n comprises a, c, g, or t, or includes no nucleotide
  misc_feature (707)..(707): n comprises a, c, g, or t, or includes no nucleotide
agtgcctacccatgtgccagtgtgtgtgctggggaattaccgtgacatgggcgagcaccgggtcatcctgcctgatgacgtgcgtgactttatcgacaacctggacaggcctccaggctcctcctacttccgctatgctgagtcctccatgaagaacagctttggcctaaagtaccttcacaaattcttcaacatcccattcctgcagcttcagagggagacgctgctccggcagctggagacgaaccagctggacgtggacgccacactggaggagctgtcagtacagcaggagacagaggaccagaactatgacatcttccttgagatgatggaggcacgcagccgtggccatgcgtccccactggcagccaacgggcagagcccatcctcaggctcccagtctccggtagtgcctcccagcgctgtgtccacagggagctccagccccagcacaccccagccagccccacagatgcccctccacacgccctcagcctgcccctgtcccctgccccccacggaggccccactgccccctgcagcccctgccccacggcgcagcatcatctccaggctgtttgggacctcaccagctgctgaggcagccccttcagccccagagccagcctcagtcccagaggccccagtgaaagtccagaacgtgggaggattttgntcctgaagaaggccttgaccgcagcttnctggatgacactggccccagcagaatgagaagagagtcggagctaaggtcccacaggacagtgacagcgatgaggaggtcccagcggggaaccactggtagcaggtttcaggatgatg

SEQ ID NO: 5426 - DNA, 570 bp, Canis familiaris
ttcttaacccatttaaaacttaaaacagacatttaaataatggatgggttactctgagcaatctagctttcagaagccccttgtttcagtatatgaaaaagataacctaatgcgcattaatgaggttgaagagactttgagaaatatgtatagtgtatattttaaaacagctttgcttgtattgtgaagatttaaaaacaaacttgagatttttaacgtaactattaacacagttttaacataagttatcccactgggtttaagagcatcttgaatgtataatcctttttgtaacccaggttggtttctgctttcaccagtcatccaaacatatttatgtttttagttttatatactcatttccctttgttttcctcaaccagcatgatttttttgcacatgtattgtagaaatttttaaaaagaaaagttaatacatcgttttctctgaattttcttcacttctctcttcctttctactaactccttaccttaaaggccatatcgctccatttgcattatttgtgcaaatgccagggttggtttttatttttatttttgctatttacct

SEQ ID NO: 5427 - DNA, 856 bp, Canis familiaris
  misc_feature (62)..(62): n comprises a, c, g, or t, or includes no nucleotide
  misc_feature (201)..(201): n comprises a, c, g, or t, or includes no nucleotide
  misc_feature (425)..(425): n comprises a, c, g, or t, or includes no nucleotide
  misc_feature (521)..(521): n comprises a, c, g, or t, or includes no nucleotide
  misc_feature (527)..(527): n comprises a, c, g, or t, or includes no nucleotide
  misc_feature (595)..(595): n comprises a, c, g, or t, or includes no nucleotide
  misc_feature (630)..(630): n comprises a, c, g, or t, or includes no nucleotide
  misc_feature (672)..(672): n comprises a, c, g, or t, or includes no nucleotide
  misc_feature (704)..(704): n comprises a, c, g, or t, or includes no nucleotide
  misc_feature (709)..(709): n comprises a, c, g, or t, or includes no nucleotide
  misc_feature (732)..(732): n comprises a, c, g, or t, or includes no nucleotide
  misc_feature (734)..(734): n comprises a, c, g, or t, or includes no nucleotide
  misc_feature (775)..(775): n comprises a, c, g, or t, or includes no nucleotide
  misc_feature (809)..(810): n comprises a, c, g, or t, or includes no nucleotide
  misc_feature (820)..(820): n comprises a, c, g, or t, or includes no nucleotide
  misc_feature (844)..(844): n comprises a, c, g, or t, or includes no nucleotide
gagtctaggttggttctatttccctctccactccctttccctcccaaccctacccccacctncccccacaacactgcttgggactggaagtgctgccaaacaaggtttgtcaaacatctgaggtgggtgtgatagttttctgtccccatcccaaaacaacccagtggcagaaccacaggcaagtcctaaatacgtaattgntttcacaaatgccagaggagaagcctgacttacagggattggttcatggttttgaagggagactctgtatgaggaggtgatatcagaaacctcttaaaactgggggggttccattgtatttccagaccttctgtaactcttgcaccccccccccatcccctgcagccaaatgaccctgtgactaacatctgtcaggcagctgacaaacagctattcacgcttgntgagtgggcgaagaggatcccacacttttcctccttgcctctggatgaccaggtcatattgctgcgggcaggctggaacgagctcctcattgcttncttctnccaccgatccattgatgttcgagatggcatcctccttgccacaggtcttcatgtgcaccgcaactcancccattctgcaggcgtgggagccatttttgatcgntccctcttcagggtgctgacagagctagtgtccaaaatgcgngacatgaggatggacaaacagagcttggctgnctganggcaatcattctgttcaatccanangccaagggcctttcaacctatgagggggaggtctgcggganaaatgttgcatactgggaccattgcaagcaaaanncctgacagcnggacggttgccagcggtggtacgnttctggcctagg

SEQ ID NO: 5428 - DNA, 844 bp, Canis familiaris
  misc_feature (591)..(591): n comprises a, c, g, or t, or includes no nucleotide
  misc_feature (615)..(615): n comprises a, c, g, or t, or includes no nucleotide
  misc_feature (701)..(701): n comprises a, c, g, or t, or includes no nucleotide
  misc_feature (768)..(768): n comprises a, c, g, or t, or includes no nucleotide
  misc_feature (782)..(782): n comprises a, c, g, or t, or includes no nucleotide
  misc_feature (831)..(831): n comprises a, c, g, or t, or includes no nucleotide
gctcctcactgcagatggcatatgttcataacaccagtcaaaatagtctcttgcagctttgcaacttcctgcatattgttagtctgtgagtactataaaatgcaaatataaaatggtttagaagagtgatgtatatatttaatagaatattttgtttcttgtaaaaggaccacatgcagaagggatgccagacagccagtaataatgaataatttaagaataattcattatttcaaaacaatatgacttaaagagaaactttctagtgagaaacaaaatgagactttcacatggagaaaataatttgatagtacttaatggaagtctgttcaattaaaaagtgtaatttataaaaggatactgtgcaaaaataagactgaatttaagttaatatatttatatattatatgtagaagataagttcatttatcttcttttttaagatgtatttaatgtaaattgcacacactccaactattaccttgcttttgcatatgaaaataggaaatactttggttttataagttattaatgtgaagttgatagttccacatcagcctatttataaaaatattatttccaagaaaaagntactattagcattaatgtatttgntaaactttttaacattctttatctggtattatttattacattgatatagaattatatgattcatagatttgaagattccatatggnataataggttaatttcacctgctttgaaggtggattcaattgactaactacatgaaaatgccgtccnctcatttacatgancacggcctgtttatcttgcctggaggtctcgatagaattattgattccnaaaatttttttat

SEQ ID NO: 5429 - DNA, 854 bp, Canis familiaris
  misc_feature (709)..(709): n comprises a, c, g, or t, or includes no nucleotide
tttggaattgcttcaattttattaagtgttttatactaaaattgtttccttaggcaaaagagttgtctagtgttctttctcttttgcgtaatcttactgaagggtataagaagctatctttttatagtattttgctttctactgtgcttatgctgttgtatttctgttaaaatttgctaaaaacaaaaagacatataataatttgggaaaattgtttttaaaagtctgtagaagagaagctttctctagcacaggaggacttgatttcaaacagaaatcaaattggaaaccaaaataaattgattcaagaactgaaaactgccaaggctgcattggagcaggattctgcaaagaaagaacagcagttgaaggagcagtgtaaaacactacaagatattcaaaaagaaaagtcactgaaagagaaagaactagcaaatgaaaaatctaaattggcagagatagaggaaattaagtgtagacaggaaaaagaaattgctaaattgagtgaagaattcaagtcccacaagcaagaaagcataaaggtatgttaagataatcatttttctttcctctatactgtattgtcatttaaataaaaaataaatatgttactgagaacttactgtatgccacacattgttttgttgttttgacaatgctctcacccttttggtgaataggggctatctatatgtatatgaaactatgntacttatggtttcagattactgaataaagcagagtacctgtactagatgaggagactacctaaaaatggaaataaataaaaagatttggtttagaaaatcatgcctatagataggaacctaaaaatggaagagttaaaataagat

SEQ ID NO: 5430 - DNA, 228 bp, Canis familiaris
acggggatcgccggcaagtggcaccttggggtggggcccgacggggccttcctgcccccccaccagggcttccaccggttcctgggcatcccgtactcgcacgaccagggcccttgccagaacctgacctgctttccgccgtccaccccctgtgatggcagctgcgaccagggcctggtccccatcccgctgctggccaacctgtccgtggaggctcagcccccctgg

SEQ ID NO: 5431 - DNA, 283 bp, Canis familiaris
atccggggcatgccgtccaaagccagctggcctccttgcacacaccaagtccatagctgcacgaacggtgcctgcggtctgcgttgtcctggtttgtctccctcccagacggcactgtatgaaagtgacactttcctgttgccccccggccaacctgcatgggcgatcctggtttccttctatcgagtactaagtgtagttacacagataggacctcagttgagtttggccgagctctgtgccctcttggagagcgtatcaataaataacatcaaacaccggt

SEQ ID NO: 5432 - DNA, 476 bp, Canis familiaris
  misc_feature (444)..(444): n comprises a, c, g, or t, or includes no nucleotide
  misc_feature (451)..(451): n comprises a, c, g, or t, or includes no nucleotide
ctcggaaccatggcggcagtagcggcagcctcggctgagctgctcatcatcggctggtacatattccgtgtgctgctgcaggtgttcaggtactccctgcagaagctggcatacacggtgtcgaggaccgggcggcaggtgttgggagagcgccggcagcgagcccccaactgaggccccagcccccagccctgggcggcctcgtcaccaggtgctcctgtgcttctcagccagcatgggagccagtgccgcacaggaatggggagtcccctgtgctctctcgccagaggagcatttgccaaggtcagtgaggggccggtaggcccccggagaagcagaaccgacaatgatgacaataccagatcccttccaaacccctttgcacccctccgactgctgggcggggtagagggaagggggggtgggggggagcatacccccganatctggncacaggcaatgcattctaatctgga

SEQ ID NO: 5433 - DNA, 861 bp, Canis familiaris
  misc_feature (622)..(622): n comprises a, c, g, or t, or includes no nucleotide
  misc_feature (682)..(682): n comprises a, c, g, or t, or includes no nucleotide
  misc_feature (688)..(688): n comprises a, c, g, or t, or includes no nucleotide
  misc_feature (719)..(719): n comprises a, c, g, or t, or includes no nucleotide
  misc_feature (771)..(771): n comprises a, c, g, or t, or includes no nucleotide
  misc_feature (805)..(805): n comprises a, c, g, or t, or includes no nucleotide
  misc_feature (811)..(811): n comprises a, c, g, or t, or includes no nucleotide
  misc_feature (818)..(818): n comprises a, c, g, or t, or includes no nucleotide
catgtaaacacctccagtttttgctctttcatatggtattcaacacaatatttgtgtttttaatatttatgctacttctgtggggcaagaaatctgggagggagcggaggaggccttgagttgtgaacacagtatttttatagcgttggcatatgctttgaagtaacagcttgagcccaagaagcttaacagatgaatttgtgggtgtaaatatttctaagttttaaatgctatccacccgtttccttggcatcctcccccccccccccaactttatttagaaatatcttcatttttttgccttgttcccctttccctacttctatggaagggactaaaacaaaaaggtctaagctataatgtttagtgtgaaaataccttttttcttaaataattccatttacacagtaggaacaagaagaaaaagccttccagttttaggttccattgtaggatgtgccttcagaaacctgctgcacttttcggatacagttcaccaccttgctgtcttcacagctttggagaattttaaccaggagatcctgaaacatgaaaccaaatagactttgggttttatttttaattgatactttttcttttactttggtatttctttcttggnaccacactcaaagaaaaaaaaaatgagattagagagcagtctgtggaacaggtgtactgngtcggngtgcatggaaatgtcctgctggctggtgaanatggctggtaagaagcccgttataccagccaatgcaaatcaaattggatccngctcgggaaaacggccgggatgaaagagcccacncgaagnaatttgnataaactgaaaaaaaaacccaccttttctaatttttttatggc

SEQ ID NO: 5434 - DNA, 745 bp, Canis familiaris
  misc_feature (584)..(584): n comprises a, c, g, or t, or includes no nucleotide
  misc_feature (656)..(656): n comprises a, c, g, or t, or includes no nucleotide
  misc_feature (663)..(663): n comprises a, c, g, or t, or includes no nucleotide
  misc_feature (682)..(682): n comprises a, c, g, or t, or includes no nucleotide
  misc_feature (697)..(697): n comprises a, c, g, or t, or includes no nucleotide
ccagtcaggcccatccggtaacaaccaaagccaaggcaacatgcagagggagccaaatcaggcctttggttctggaaataattcctatagcggttctaattcaggtgcagcgattggttggggatccgcatcaaatgcagggtcaggcagcggttttaatggaggctttggctcaagcatggattctaaatcctctggctgggggatgtagacagtggggttggtagagactggtgggaattcaaatttttctaaacacatggtaagtatattgtaaaatacatatgtactaagaattttcaaaattggtttgttcagtgtggagtatattcagcagtatttttgacatttttctttagaaaaagaggaaaagctaaaggaattttataagttttgttacataaagggttgaaatattgagtgtttgaaagtgaactgctgtttgcctgatgggtaaaaaccaacacactacaattgatatcaaaaggtttctcctgtaatcttttatccctggacttgtcaagtgaattctttgcatgttcaaatggaaaccattgattagaactacattcttttctccttgntttaatttgaaccccaccatatggatttctcccttaggaagatctcctttttggagatcatggtgtcacagnggttggntctttggttttggttttgnttttttaacacttgnctcccttcacatgcaaagacaatatgaagccctcatttatctctgcag

SEQ ID NO: 5435 - DNA, 679 bp, Canis familiaris
  misc_feature (475)..(475): n comprises a, c, g, or t, or includes no nucleotide
  misc_feature (513)..(513): n comprises a, c, g, or t, or includes no nucleotide
  misc_feature (526)..(526): n comprises a, c, g, or t, or includes no nucleotide
  misc_feature (528)..(528): n comprises a, c, g, or t, or includes no nucleotide
  misc_feature (577)..(577): n comprises a, c, g, or t, or includes no nucleotide
  misc_feature (621)..(621): n comprises a, c, g, or t, or includes no nucleotide
  misc_feature (661)..(661): n comprises a, c, g, or t, or includes no nucleotide
  misc_feature (665)..(665): n comprises a, c, g, or t, or includes no nucleotide
gtctcgccgcccccgccgcagccatgtcgttcttcccggagctttacttcaacgtggacaatggctacttggagggactggtgcgcggcctgaaggccggggtgctcagccaggcggactacctcaacctggtgcagtgcgagacactcgaggacctgaagctgcacctgcagagcacagactacggcaacttcctggccaatgaggcatcgccgttgaccgtgtcagttattgatgaccggcttaaggagaagatggtggtggagttccgccacatgaggaaccatgcctatgagccactcgccagcttcctggacttcattacttacagctacatgatcgacaatgtcatcctgctcatcacgggcacgctgcaccagcgctctatcgccgagcttgtgcccaagtgccacccactaggcaagctttgagcagatggaaacttgtgaacattggccaaacacctgccgagctntacaatggcattcttggtggacacccccctggcgggcnttttcaggaatgnantttaaaacaaggaccttgttgagatgaacattgagatcatttgcaacanacttacagggctactggagttttttaaagttttgacctatgggnggacacggccagcattgccatctggagttgaagcgaccanagcnttatataacataaa

SEQ ID NO: 5436 - DNA, 684 bp, Canis familiaris
  misc_feature (352)..(352): n comprises a, c, g, or t, or includes no nucleotide
  misc_feature (356)..(356): n comprises a, c, g, or t, or includes no nucleotide
  misc_feature (373)..(373): n comprises a, c, g, or t, or includes no nucleotide
  misc_feature (448)..(448): n comprises a, c, g, or t, or includes no nucleotide
  misc_feature (450)..(450): n comprises a, c, g, or t, or includes no nucleotide
  misc_feature (454)..(454): n comprises a, c, g, or t, or includes no nucleotide
  misc_feature (477)..(477): n comprises a, c, g, or t, or includes no nucleotide
  misc_feature (488)..(488): n comprises a, c, g, or t, or includes no nucleotide
  misc_feature (509)..(509): n comprises a, c, g, or t, or includes no nucleotide
  misc_feature (532)..(532): n comprises a, c, g, or t, or includes no nucleotide
  misc_feature (537)..(537): n comprises a, c, g, or t, or includes no nucleotide
  misc_feature (565)..(565): n comprises a, c, g, or t, or includes no nucleotide
  misc_feature (581)..(581): n comprises a, c, g, or t, or includes no nucleotide
  misc_feature (590)..(590): n comprises a, c, g, or t, or includes no nucleotide
  misc_feature (626)..(626): n comprises a, c, g, or t, or includes no nucleotide
  misc_feature (654)..(654): n comprises a, c, g, or t, or includes no nucleotide
  misc_feature (670)..(670): n comprises a, c, g, or t, or includes no nucleotide
  misc_feature (682)..(682): n comprises a, c, g, or t, or includes no nucleotide
gcccaggaaagctgcccaggaagacccagcttcgtccccacggcaggtcgctgcggaagaactgtgctccctgctggggcaggtcttccagattgtgtacacggagtccaccatcgacttcctggacagagccatattcgatggggcctcgacacccacccaccacctgtccctgcacagcggtatgtgagtgtgggcagacagtccccgaggtccatgtctcccacctggtggcttcctgcatcactgtggggaccagggaacgtgtcaacgaaggtcacttcacctgtttcagatcaaaagagccgggggctagggggcgctgtggggaggagcccccagacctcactgntctntgatgaagggctttgtncggggaccgaggcttgccaagcagtggacgtgtggaagccaccacctactctgtgtctggggagcatttttggangngccntacttacaagaagttaattaatncccttaacccntcttaacccttttttaaaagnccaatagccacacttgatcttgncttgnttttgttggggggaccttaagtcctggncaacgttcttggtagntgttggggncatctttttgttgtgcggggccttggcttggggggnctgctttttctttgggaaaaaatgcttntggacttcgggggggnaaacctctttgngg

SEQ ID NO: 5437 - DNA, 605 bp, Canis familiaris
  misc_feature (470)..(470): n comprises a, c, g, or t, or includes no nucleotide
  misc_feature (486)..(486): n comprises a, c, g, or t, or includes no nucleotide
  misc_feature (514)..(514): n comprises a, c, g, or t, or includes no nucleotide
  misc_feature (525)..(525): n comprises a, c, g, or t, or includes no nucleotide
  misc_feature (549)..(549): n comprises a, c, g, or t, or includes no nucleotide
  misc_feature (580)..(580): n comprises a, c, g, or t, or includes no nucleotide
acacttcgggggattaccagaagattctgctgaagatctgcggtggcaacgactgagctgtgacgggtggctcacttccgtccacctgccggcaacagcaatgccaggacaaggtcaaaagagtgtccatctgttcctaacaaatccacaaaagagccccccaggtgtcccggtgcagcccgtccgtcagtagagcctggcccgtcctcctccgcctcctctcctgctccgtgcgtcatgctcgtgctgtaggatctgggtccctctctcagggcgcctcttcctccccagccctcacagccgcttgctgctaaagtagacattttatctcttgactcgtgcagtcattcccttttgcttgtggctgagtctcggcttctattagtcacgtaatctatatttttattcggaagcatctttttttttttttaatagtcctcggcagacagacacatacaggcctttgctgngtacacatttcaagtnaaaatggttggcgggggaacaccctgtnctcagtaaggngtaaaagggaagacctttacgggnaatctttgcgttggggagaaagggcataacntttgtatggccaactcactcttaaa

SEQ ID NO: 5438 - DNA, 674 bp, Canis familiaris
  misc_feature (536)..(536): n comprises a, c, g, or t, or includes no nucleotide
  misc_feature (599)..(599): n comprises a, c, g, or t, or includes no nucleotide
  misc_feature (618)..(618): n comprises a, c, g, or t, or includes no nucleotide
  misc_feature (646)..(646): n comprises a, c, g, or t, or includes no nucleotide
  misc_feature (649)..(649): n comprises a, c, g, or t, or includes no nucleotide
  misc_feature (671)..(671): n comprises a, c, g, or t, or includes no nucleotide
tcacaatgatatcaactcccctcccattccactcaccacagtgggaagcagaacaaaaactgcaagcagttatgatgtgggcacatctcacttcatttcttcctcacgggaatggcaattctcatattggacaattgtttctgtcactcgttttagattttttttctaggcccgtattttactcttgttataaaggtgttatgtttaaccttaaggtaatttaaatgaacatatctttgtctcccaccaccaccaatgacccagagcatgaaaataatccaaaagaccaaggatattatctcttggctacaattgttacctttttaattgtcttgaaaacatgatggttttcggtcttatacaaaggtaactttcatactttcttatgaaaggatatcatatgaactgagaaactgggtttcaaatgggtacagttgatggtttctatcaaatatgtagcttctatgccccagctataggaaggctctatggagtggaatgagcagaatgtattatgctcaacgaaataagtcggntggggaaagacaaataccatttgatttacttattggggaattaagaaacaaaataatgacatntggaagggggaaaaaaaanggaacaagcctaggagacttgtaccgcnganacaactaggttgtgaaaggttnggg

SEQ ID NO: 5439 - DNA, 688 bp, Canis familiaris
  misc_feature (444)..(444): n comprises a, c, g, or t, or includes no nucleotide
  misc_feature (500)..(500): n comprises a, c, g, or t, or includes no nucleotide
  misc_feature (508)..(508): n comprises a, c, g, or t, or includes no nucleotide
  misc_feature (539)..(539): n comprises a, c, g, or t, or includes no nucleotide
  misc_feature (634)..(634): n comprises a, c, g, or t, or includes no nucleotide
  misc_feature (646)..(646): n comprises a, c, g, or t, or includes no nucleotide
  misc_feature (653)..(653): n comprises a, c, g, or t, or includes no nucleotide
  misc_feature (662)..(662): n comprises a, c, g, or t, or includes no nucleotide
  misc_feature (687)..(687): n comprises a, c, g, or t, or includes no nucleotide
cacacacgagtgcagttctttgtgagtgcctatgtacgagtgtgagtgtgcatgtgcacataagcacgcacacgtacaagtgtgggagcgagctgtgtgagcatgcatgtccacgggtgtgagtgtgagcatgagtgggcatgagaatgtgagtgcatgtgagcctgagtggaaatgtgtgcatgtgcaatgggagtatgagtgtgtatgtgtgagtgtgtgagcagcggaaggtgtgagcagagctctgtatctccacccacgggggtgcccccagtgccccggcaccccaacgaggggatgccttcccatctgatgtgtgcacagcaccgaggcccccagagggcacaaccccatccacacatcatccggagggggagctggggtagggaactgggaccagagctcagtggtgagcaacctggggctgcttggctatgggtnccccctacagggcttcccgacttcttgattcgcacacaatccttcgagtacttgtncaagaacnggggcccctttcccggcttaatgagccattntgttttccgggttaacgtccttgttgttccaccttcaaggaaggagaaaaccggggcccccgtcaatgcttttgttgcaaaagccggttggtttncaaatggggggncaagatntccgaggcncgattggttttgatgagccttatang

SEQ ID NO: 5440 - DNA, 442 bp, Canis familiaris
  misc_feature (393)..(393): n comprises a, c, g, or t, or includes no nucleotide
tgcaccccagtgtcgcagacagcgccaacaagctcgaggagaatgtgtattactttggccgcaccgtggagacgttgcttctccgctttggcaagaccatcgtggaggagcagatggtcctgaagcgggtagccaacatccttatcaacctgtatggcatgacagccgtgctgtcgcgggccagccgttccatccgagtggggcttcgaaaccacgaccatgaggttctgctggccaacatcttctgtgcagaagcttattaccagaatctcttcaccctgtcccagctggacaaatattctccagaaaatctagatgagcagattaagaaagtgtccagcaggtcctagaaaagcaagcctacatctgtgcccaccctctggacaggacgtnctgaagcaaatggacagtgttccctactggcccgagggcacaacccatc

SEQ ID NO: 5441 - DNA, 611 bp, Canis familiaris
  misc_feature (464)..(464): n comprises a, c, g, or t, or includes no nucleotide
  misc_feature (494)..(494): n comprises a, c, g, or t, or includes no nucleotide
  misc_feature (562)..(562): n comprises a, c, g, or t, or includes no nucleotide
  misc_feature (574)..(574): n comprises a, c, g, or t, or includes no nucleotide
  misc_feature (596)..(596): n comprises a, c, g, or t, or includes no nucleotide
  misc_feature (607)..(607): n comprises a, c, g, or t, or includes no nucleotide
agcaagcagacgtggtggaaggaggaccagcctaggagtaaggagacctggattctaacataggctctgtttctcacttcgtttgaggccttgggcaagccacttaaccttctcatggctgttccttcatctgtaaaataaggctattggaccagatgacctccaaggtctttccaaaagttctatcattctgtggtactataggttgccttgcaaattcaacctgctaaagtgattgatggcaaatattgcatgcttaagcctgggtttcttatgttgccgttaaactgtagaaatatgtaagatgatgggggaagaaaaaaaccttaagtaaatgaaaataacactagggaatgttgataaaacttatggcagccttcccaatcctcgcattttgtttcgttgttggtttaatgtcctttttctgtgatgtgttcccagtttttattttccatatgctctgnatgtgaagctggttttcattaagctgtggncaatatgtgctactagaacagaaatcactgtcacacttgctagaacagaacgaagtttgggcctttcntttctacaaagngatgttgggttatagacttaanttttaaatggncaag

SEQ ID NO: 5442 - DNA, 688 bp, Canis familiaris
  misc_feature (490)..(490): n comprises a, c, g, or t, or includes no nucleotide
  misc_feature (512)..(512): n comprises a, c, g, or t, or includes no nucleotide
  misc_feature (526)..(526): n comprises a, c, g, or t, or includes no nucleotide
  misc_feature (575)..(575): n comprises a, c, g, or t, or includes no nucleotide
  misc_feature (584)..(584): n comprises a, c, g, or t, or includes no nucleotide
  misc_feature (604)..(604): n comprises a, c, g, or t, or includes no nucleotide
  misc_feature (637)..(637): n comprises a, c, g, or t, or includes no nucleotide
  misc_feature (679)..(679): n comprises a, c, g, or t, or includes no nucleotide
  misc_feature (683)..(683): n comprises a, c, g, or t, or includes no nucleotide
aactgattttatacactcgcaaacgtgactcggtaaaatggcactacctctgcctgcgacgctatggctatgattcaaatctcttttcttttgaaagtggccggagatgtcaaactggacaaggaatctttgcctttaagtgtgcccgtgcagaagaattatttaacatgttgcaagagattatgcaaaataatagtataaatgtggtggaagagccagttgtagaaaggaataatcatcagacagaattggaagtccccagaacacctcgaacacctacaactccagggtttgctgctcagaatttacctaatgggatatccccgatatccctcatttggagatgcttcatcccatccctcaagcagacatccttctgtgggaagtgcacgcctgccttcagtaggtgaagaatctacacatcctttgcttgtagcggaggagcaagtacatacctatgtcaacactacaggagtgcaagaagagcggnaaaaccgcccagtgtgcatgtnccattggaggcgangatttttaatgttgaagcacacaccaaaagaagaaccaagttgttttgnggacagggncctcaaatttttttgaaccnaaggagcaaatttgtttaagaccaaccctgttnaaagaattgtggaaaagaaaaatgggcacttggaaaaccaancagnggagg

SEQ ID NO: 5443 - DNA, 631 bp, Canis familiaris
  misc_feature (500)..(500): n comprises a, c, g, or t, or includes no nucleotide
  misc_feature (517)..(517): n comprises a, c, g, or t, or includes no nucleotide
  misc_feature (541)..(541): n comprises a, c, g, or t, or includes no nucleotide
  misc_feature (568)..(568): n comprises a, c, g, or t, or includes no nucleotide
  misc_feature (589)..(590): n comprises a, c, g, or t, or includes no nucleotide
  misc_feature (618)..(618): n comprises a, c, g, or t, or includes no nucleotide
catccccccgccgccggccgcgccatggagggctaccataagcctgaccagcagaagctgcaggccctgaaggacacggccaaccgcctgcgcatcagctccatccaggccaccacggcggccggctcgggccaccccacgtcatgctgcagtgccgcggagatcatggctgtcctctttttccacaccatgcgctacaagccccaggaccctcggaacccacacaacgaccgctttgtgctctccaagggccacgcggctcctatcctgtacgccgtctgggctgaggccggcttcctgaccgaggaggagctgctgaacctgaggaagatcacctctgacttggacgggcaccccgtcccgaaacaagctttcactgatgtggccactggctccctgggccagggccttggggccgcttgcgggatggctacacaggcaaatactttgacaaaagccagctaccgcgtctactgcatgatgggagatggggaagctgnccggagggcttcgtgtngggaggcatggcggttgcaacatntacaaactggacaacttgatggcaatnttgaataaacgctgggcaaanngaacccacccaattgaaacaggtggttnttacaaaacgtgg

SEQ ID NO: 5444 - DNA, 682 bp, Canis familiaris
  misc_feature (456)..(456): n comprises a, c, g, or t, or includes no nucleotide
  misc_feature (462)..(462): n comprises a, c, g, or t, or includes no nucleotide
  misc_feature (481)..(481): n comprises a, c, g, or t, or includes no nucleotide
  misc_feature (515)..(515): n comprises a, c, g, or t, or includes no nucleotide
  misc_feature (548)..(548): n comprises a, c, g, or t, or includes no nucleotide
  misc_feature (578)..(578): n comprises a, c, g, or t, or includes no nucleotide
  misc_feature (598)..(598): n comprises a, c, g, or t, or includes no nucleotide
  misc_feature (609)..(609): n comprises a, c, g, or t, or includes no nucleotide
  misc_feature (623)..(623): n comprises a, c, g, or t, or includes no nucleotide
  misc_feature (633)..(633): n comprises a, c, g, or t, or includes no nucleotide
  misc_feature (639)..(639): n comprises a, c, g, or t, or includes no nucleotide
  misc_feature (651)..(651): n comprises a, c, g, or t, or includes no nucleotide
  misc_feature (668)..(668): n comprises a, c, g, or t, or includes no nucleotide
  misc_feature (678)..(678): n comprises a, c, g, or t, or includes no nucleotide
ttttgtgatgatttctggcctgattgaaggaaatttgagatctctgcctttaaatattttaaatagttttgataggttttaaaattgctttttttcataaggtatttataaagttacttggggttgtctgagattgtatgaaaaaaaattagaaccacactgtatttacatttaccttgatgtttatttgtgggtggcagttttttctagttcttaggactgtggcagcctttggaatattttacaaatctgtgtcatccactacaactggcttatgtggctaggaaaggagaggaaaagaaatgaaatagttggttactaagttttttattcccacaaaaatgtctaatattaggagaactttaaataaacgtgatttaaatatggtggatgatttacagtccattatagccttacaagggttgcaaaaggaggggaaaaggtaattctttctgnctttgncagggatattctatacagnaataatttaagctataatttatttgttaaatggngcctctcaggaacttctttttgtctaacacttncctggtaaagggactatcttaaactttatngggggcttttcgttaacggnatttgaagccntttactaattagcnggtttttttntggaanaaaaaaaaaggntttgtttcctcggcttnaaaaatttgngaat

SEQ ID NO: 5445 - DNA, 670 bp, Canis familiaris
  misc_feature (445)..(445): n comprises a, c, g, or t, or includes no nucleotide
  misc_feature (459)..(459): n comprises a, c, g, or t, or includes no nucleotide
  misc_feature (472)..(472): n comprises a, c, g, or t, or includes no nucleotide
  misc_feature (499)..(499): n comprises a, c, g, or t, or includes no nucleotide
  misc_feature (503)..(503): n comprises a, c, g, or t, or includes no nucleotide
  misc_feature (517)..(517): n comprises a, c, g, or t, or includes no nucleotide
  misc_feature (559)..(559): n comprises a, c, g, or t, or includes no nucleotide
  misc_feature (561)..(561): n comprises a, c, g, or t, or includes no nucleotide
  misc_feature (569)..(569): n comprises a, c, g, or t, or includes no nucleotide
  misc_feature (642)..(642): n comprises a, c, g, or t, or includes no nucleotide
  misc_feature (649)..(649): n comprises a, c, g, or t, or includes no nucleotide
ttttgaacatttgacttccttattaactaagaatgttggaaaatgctcgaggatagaattgtatatatatttttttaagtatttgtaatttcttggtgatttaaggaagctaaaaaatgtatggcatcggtgcttcgctttttagaacatcaataagcagtctgagtaatcaattaggaattcaaaatccgttgcaaactcctgtatgacatcagagagccttaaacaatgccatgtgaaaggggtgagtttagcaggaatatatccatcagataacctcaggttgcatcagaatcttactttttaagagcatcgcaggctaaaacccgagtaaaaattcagccacgtatttcagaaaagaaaacggggtttctgccttggtcacacaaggggacagaaaaagcaaacagctgaggtagcatctgatgctcgggcccaacagaanggggcctgtgagtnctcacaccagcanggtctctcaaagaaccccgtggcagangacngccctggaattcanatgatgcttttccccttggtttgggttggtttgcactttatntnttagtgcncaaattaggccaaaaaagtttctggaaaaggatgtgatgggaatggacacggcccgagttaaaaatgtctacnataaggnccttctgaggcaacagggttc

SEQ ID NO: 5446 - DNA, 259 bp, Canis familiaris
  misc_feature (9)..(9): n comprises a, c, g, or t, or includes no nucleotide
  misc_feature (15)..(15): n comprises a, c, g, or t, or includes no nucleotide
  misc_feature (58)..(58): n comprises a, c, g, or t, or includes no nucleotide
  misc_feature (78)..(78): n comprises a, c, g, or t, or includes no nucleotide
  misc_feature (88)..(88): n comprises a, c, g, or t, or includes no nucleotide
  misc_feature (163)..(163): n comprises a, c, g, or t, or includes no nucleotide
  misc_feature (181)..(181): n comprises a, c, g, or t, or includes no nucleotide
  misc_feature (197)..(197): n comprises a, c, g, or t, or includes no nucleotide
  misc_feature (224)..(224): n comprises a, c, g, or t, or includes no nucleotide
  misc_feature (226)..(226): n comprises a, c, g, or t, or includes no nucleotide
  misc_feature (237)..(237): n comprises a, c, g, or t, or includes no nucleotide
cattcatanacccantacagtttaatttttttcacaatcgagggcgctatataggatnagctttgttaatgataaatnaagacagganttatttacaaaataaagtacttcaccattctttactgttatatattaagtgtcttgctatataaaatataccctnaagaagtcaaaatatttnaaatcagtgtttcaanataaaaatcatagctatgttactgctnancaactccattnaaataaacatggtactgcgtgt

SEQ ID NO: 5447 - DNA, 482 bp, Canis familiaris
  misc_feature (283)..(283): n comprises a, c, g, or t, or includes no nucleotide
  misc_feature (372)..(372): n comprises a, c, g, or t, or includes no nucleotide
  misc_feature (437)..(437): n comprises a, c, g, or t, or includes no nucleotide
actgccttctggtctcccagcatctcttctgactctctacttggacaacaataagatcagcaacatccctgatgagtatttcaagcgttttaatggactgcagtatctgcgtttatctcataatgaactggcggatagtggagtacctggaaattcttttaatgtatcatccctgctggagctggatctctcctacaataagcttaaaaacataccgactgtcaatgagaaccttgaaaactattacctggaggtcaatgaactcgaaaagtttgagggaaanaagcttctgtaagatccttggaccattatcctactccaagattaaacatttgcgtctggatggcaaccgtcttacccacaccagtctgnccctgatatgtacgaatgtctacgtgttgcaaatgaaatcactggtaattaacatctactaattncaattctattgaggggaccctggagcaacattttatgggttatgg

SEQ ID NO: 5448 - DNA, 607 bp, Canis familiaris
  misc_feature (464)..(464): n comprises a, c, g, or t, or includes no nucleotide
  misc_feature (494)..(494): n comprises a, c, g, or t, or includes no nucleotide
  misc_feature (530)..(530): n comprises a, c, g, or t, or includes no nucleotide
  misc_feature (564)..(564): n comprises a, c, g, or t, or includes no nucleotide
  misc_feature (593)..(594): n comprises a, c, g, or t, or includes no nucleotide
cacaagcttcaatgacacttgtcttagccaataagagaaatgccaaaataatggatcaacctctgagatcaagggattgacttaaggcagacagaggaggccgtacagcgcaagtccgattctctagaaaccgttgtaccagcagcaaaaccccacctggtacattgagatcgagggtggatagtcagaaggactgtcaggcaggttgtcagcaccagagggagcggcaagggctcccgggagggccggtgagaatggcaccctgacattcaggaggcggactgcttggctgccgcccatggccagcgcagcaggagccagggatctcagggccccaaacctcgcacagatggggctgttgtgttttatgggattctattgtgtcaggttctggccgtttccccgctgacatgtcttgcagcttcgtgtaggagaaaagcatgatgtatctggtgagggacgangggtgagccaatggaccaaaaggtgtgggnccagcctttaaaaaaggcctggtgttaaggaagggngcttttttttcttaatttttcatcctaagtttgncttatttccaaaggttgggaaattcttgnnaagttccccgcca

SEQ ID NO: 5449 - DNA, 598 bp, Canis familiaris
  misc_feature (429)..(429): n comprises a, c, g, or t, or includes no nucleotide
  misc_feature (467)..(467): n comprises a, c, g, or t, or includes no nucleotide
  misc_feature (500)..(500): n comprises a, c, g, or t, or includes no nucleotide
  misc_feature (513)..(513): n comprises a, c, g, or t, or includes no nucleotide
  misc_feature (539)..(539): n comprises a, c, g, or t, or includes no nucleotide
  misc_feature (544)..(544): n comprises a, c, g, or t, or includes no nucleotide
  misc_feature (566)..(566): n comprises a, c, g, or t, or includes no nucleotide
  misc_feature (568)..(568): n comprises a, c, g, or t, or includes no nucleotide
  misc_feature (576)..(576): n comprises a, c, g, or t, or includes no nucleotide
ctgatacttggagtgcgagaagatgtggcccatatgtgaatatatgtatagataagtataaacatgagggttaatgtaaaaatgtttcttttgttacctgaaactggaactgagaatcttaaccaccatgcccttctatatttggaaaataatgttcttgtttgctcttttcaccccatgttgagctcactttgttcaacagtgccaaatgcctatgcagaagggaggtggaaaacctcaggaattattcagagccagtgaattagctgtgggctgggagatgtgctcatgggtggaccacttggcatgttagagtgaaggagaggaagaaattttcctctgttcaagattcttccagttggactacgaattaaaatttacatgagacagattaacaggagaaaaaaaaaatcgaagtttgagtttgcncaccccaaacctaaacaaaaggactaggagccgggcantttttaaaactacattttagacaataaatctgntaggaaatgacangataaaaaccaccggtgtttgggagntttantaaggaattcaagcttgttgtntnaattattnaaaaaataagcccgaattggtt

SEQ ID NO: 5450 - DNA, 463 bp, Canis familiaris
gccattgaaccagagtctggaaagagcaatgaaagaaaaggcggtcgatctcgttcccacactcgttcaaaatccaggtctagctcaaaatcccattctagacgaaaaagatcacaatcaaaacacaggagtagatcccataatagatcacgttcaagacaaaaagacagacgcagatctaagagcccacataaaaaacgctctaaatcaagagagaggcgaaagtcaaggagtcgttcacgttcacgggacaagagaaaagacacccgagaaaagatcaaggaaaaggaaagagtgaaagaaaaagatagagaaaaggaaagggaaaaagagagagacagggagaaggaacgtgaaaaagaaaaggaacggggtaaaaacaaagataaagaacgggaaaaggcccgggataaagacaagggaaaggacagagagagagagccgggccaagaacattgccaag

SEQ ID NO: 5451 - DNA, 690 bp, Canis familiaris
  misc_feature (494)..(494): n comprises a, c, g, or t, or includes no nucleotide
  misc_feature (510)..(510): n comprises a, c, g, or t, or includes no nucleotide
  misc_feature (534)..(534): n comprises a, c, g, or t, or includes no nucleotide
  misc_feature (610)..(610): n comprises a, c, g, or t, or includes no nucleotide
  misc_feature (616)..(616): n comprises a, c, g, or t, or includes no nucleotide
  misc_feature (628)..(628): n comprises a, c, g, or t, or includes no nucleotide
  misc_feature (649)..(649): n comprises a, c, g, or t, or includes no nucleotide
  misc_feature (652)..(652): n comprises a, c, g, or t, or includes no nucleotide
  misc_feature (659)..(659): n comprises a, c, g, or t, or includes no nucleotide
  misc_feature (688)..(688): n comprises a, c, g, or t, or includes no nucleotide
aaaacagtgctcagaggaaaatttatactttgaatgcataaacaaagataaaaaattaatcatctacattcccactttattaatccaaaaaaggaataaattaaatccaaagtaaggaaaagaaaagaaatatgctaagagaagtccatgaaattgaaaaacagaaaccaacagagaaaaatcaacgtccaaagctggttctttgaaaagattaataaaatcagtactcctctagccaggctaagggaaaaaaaagacctaaattgctcctatcgcaaatgaagtaaagggacatcacaacagatcccatgaacattaaaagggtaaaaaagatatactatgaataactctatgcccacaagtttgatacttagatgcaatgaactaattccttgaaagacacaatctgccaaaactcacaagaagaaagacaatctgatatgaaaactgaataaataacctttcaaaacagaaagtgccagaccagattaggntcactggggaatttgncaaaaatttaagtaagaaattgtncagttctctcaatcttcaaatgatccagctttgggctataggctaatctgattaaaagggcccgctttaaaagcgnaagatntttccttaaaanaaggttgtagatctggaaggnctntcttagngggtagaacgaggaggacaaaaccttttntt

SEQ ID NO: 5452 - DNA, 527 bp, Canis familiaris
  misc_feature (387)..(387): n comprises a, c, g, or t, or includes no nucleotide
  misc_feature (396)..(396): n comprises a, c, g, or t, or includes no nucleotide
  misc_feature (415)..(415): n comprises a, c, g, or t, or includes no nucleotide
  misc_feature (420)..(420): n comprises a, c, g, or t, or includes no nucleotide
  misc_feature (479)..(479): n comprises a, c, g, or t, or includes no nucleotide
  misc_feature (503)..(503): n comprises a, c, g, or t, or includes no nucleotide
  misc_feature (515)..(515): n comprises a, c, g, or t, or includes no nucleotide
tctctctttcccacccccctgtgctttctttccctggcccgccctctttctgttgcctgcggctttggggggcaccccattctctgccttcccctctcctcgcctggtcctgcctgctttctcgctgtctgccccaggaggtaggtacgctgccgacctgacctgacaccgacctgacacgggaggggctgccaggggctgccatggccctgggccataggagggggctgggcactcgggactcggactcccaggctctgggcagacaggcaggcttagaaagtgcggagccccacgttgggggtgggcgggatcctgggggggggggccctgaaggcctgtccctgcttgtctctcttccccgcatttcttcatcccaggccctgncagccccgncttcctgcgctcactctgnctttnaatccctcctgctcccggaggccctgtccccctggtgagcccaggccccttccaacccnttcctttaaaggggcccggtgaanactggaaacggnctggttaatctt

SEQ ID NO: 5453 - DNA, 514 bp, Canis familiaris
  misc_feature (39)..(39): n comprises a, c, g, or t, or includes no nucleotide
  misc_feature (76)..(76): n comprises a, c, g, or t, or includes no nucleotide
  misc_feature (232)..(232): n comprises a, c, g, or t, or includes no nucleotide
  misc_feature (288)..(288): n comprises a, c, g, or t, or includes no nucleotide
  misc_feature (375)..(375): n comprises a, c, g, or t, or includes no nucleotide
  misc_feature (378)..(378): n comprises a, c, g, or t, or includes no nucleotide
  misc_feature (404)..(404): n comprises a, c, g, or t, or includes no nucleotide
  misc_feature (411)..(411): n comprises a, c, g, or t, or includes no nucleotide
  misc_feature (427)..(427): n comprises a, c, g, or t, or includes no nucleotide
  misc_feature (429)..(429): n comprises a, c, g, or t, or includes no nucleotide
  misc_feature (466)..(466): n comprises a, c, g, or t, or includes no nucleotide
  misc_feature (468)..(468): n comprises a, c, g, or t, or includes no nucleotide
  misc_feature (487)..(487): n comprises a, c, g, or t, or includes no nucleotide
  misc_feature (511)..(511): n comprises a, c, g, or t, or includes no nucleotide
cgccgcgcccggagctgccgacggaccgactgccccttncccgcccggccacccgcctgccgcccgccgccggcgncggcgcatgcccttcttcaacagccacaacacattgaagctccgtttcccggccgaggatgagttccccgacctcagcgcccacaacaaccacatggccaaggtgctgacccccgagctctacgcggagctgcgcgccaagagcacgccgagcggnttacgctggacgacgtcattcagaccggcgtggacaacccgggccacccctacatnatgaccgtgggctgcgtggcaggcgacgaaaagtcctatgacgtgttcaaggagctctttgaccccatcatcgaggaccggcacggnggntacaaacccagcgacgagcacaagancgacctnaaccccgacaacctgnangggggggacgacctggacccaactattttctgagctngngggtgcgcaccggtcgcanaatcccgggtttttgcttcccccncac

SEQ ID NO: 5454 - DNA, 541 bp, Canis familiaris
  misc_feature (435)..(435): n comprises a, c, g, or t, or includes no nucleotide
  misc_feature (443)..(443): n comprises a, c, g, or t, or includes no nucleotide
  misc_feature (475)..(475): n comprises a, c, g, or t, or includes no nucleotide
  misc_feature (498)..(498): n comprises a, c, g, or t, or includes no nucleotide
  misc_feature (506)..(506): n comprises a, c, g, or t, or includes no nucleotide
  misc_feature (519)..(519): n comprises a, c, g, or t, or includes no nucleotide
  misc_feature (532)..(532): n comprises a, c, g, or t, or includes no nucleotide
aggccaggctgtgtccaggccaccaggtcctgcccatttccatgcatccccaccatgctgtctaaagaatgtaatttattggggcacccccaagctgctttctctcctaactctctgccctcccttaatcacactcccagcttctcttctctacagatacatatgtgtatataattatatatatatttttgccggggtctggcttttgttcctgctcaggccctggtacccctttccactgtgtgtgtgtgtgtgtgtgataatgctgtgggagggggactctgcttggaattaaaaggttgcattgggtccccaaatctatttgttctttctggaacacctgggagcacttgggagaggcaatgccaggctgagggaagccttgggggtaagaagtcaaatggggaccacaaaaaggcttggaaaaggccggantaaaaaantgccctttccccaaacccttggccataaaaanaggggcccagcctaaagggacanattgttgntttttttagggtntgtttgaaaaaanatgggggaa

SEQ ID NO: 5455 - DNA, 638 bp, Canis familiaris
  misc_feature (482)..(482): n comprises a, c, g, or t, or includes no nucleotide
  misc_feature (491)..(491): n comprises a, c, g, or t, or includes no nucleotide
  misc_feature (527)..(527): n comprises a, c, g, or t, or includes no nucleotide
  misc_feature (580)..(580): n comprises a, c, g, or t, or includes no nucleotide
  misc_feature (596)..(596): n comprises a, c, g, or t, or includes no nucleotide
  misc_feature (625)..(625): n comprises a, c, g, or t, or includes no nucleotide
ttgagaatttttcttctgaaataatcagcttcaagtccatggaggacctcgtgaatgaatttgatgagaagctcaatgtctgctttcggaactacaatgccaagacggagaccctagctcccgtgaagaaccagttccagatccaagaggaggaggagaccctgcaggatgaggaggtttgggatgctctgacagacaattacatcccttcactctcagaagactggagggacccaaacatggaggctctgaatggcaacagctcttgacactgagatccatgagaaagaagaggaagaagttcaatgagaagagtgaacatgattctggtatcaatgaggagcctctactcacagcagatcaggtgattgaggagattgaagaaatgatgcagaactccccagaccctgaggaagaagaagaggttctagaagaggaggatgagggagaaacctcttccagcagactcggtccttctgcangagatgcangccttgcccaaacctttaacaacaactggtcctacnaaggctgagcacctgtcggggtcggagctgaccgacttgttgaccaggtggangggcgccatccggacnttttggaggactggtgcaacacttgcccnccggacagcttga

SEQ ID NO: 5456 - DNA, 673 bp, Canis familiaris
  misc_feature (54)..(54): n comprises a, c, g, or t, or includes no nucleotide
  misc_feature (194)..(194): n comprises a, c, g, or t, or includes no nucleotide
  misc_feature (300)..(300): n comprises a, c, g, or t, or includes no nucleotide
  misc_feature (335)..(335): n comprises a, c, g, or t, or includes no nucleotide
  misc_feature (366)..(366): n comprises a, c, g, or t, or includes no nucleotide
  misc_feature (368)..(368): n comprises a, c, g, or t, or includes no nucleotide
  misc_feature (381)..(381): n comprises a, c, g, or t, or includes no nucleotide
  misc_feature (391)..(391): n comprises a, c, g, or t, or includes no nucleotide
  misc_feature (467)..(467): n comprises a, c, g, or t, or includes no nucleotide
  misc_feature (492)..(492): n comprises a, c, g, or t, or includes no nucleotide
  misc_feature (495)..(495): n comprises a, c, g, or t, or includes no nucleotide
  misc_feature (532)..(532): n comprises a, c, g, or t, or includes no nucleotide
  misc_feature (555)..(555): n comprises a, c, g, or t, or includes no nucleotide
  misc_feature (557)..(557): n comprises a, c, g, or t, or includes no nucleotide
  misc_feature (584)..(584): n comprises a, c, g, or t, or includes no nucleotide
  misc_feature (609)..(609): n comprises a, c, g, or t, or includes no nucleotide
  misc_feature (641)..(641): n comprises a, c, g, or t, or includes no nucleotide
  misc_feature (660)..(660): n comprises a, c, g, or t, or includes no nucleotide
  misc_feature (665)..(665): n comprises a, c, g, or t, or includes no nucleotide
gtgttattatgtatatgggtaaagatgtacaaatatatgtcctctttgtagcanatatgattttatatttataatgtgcatcaacatgtgaaagcaatctaggtcacgagcacagaggaagttgccaggcaggtgcgtttggcagctccaggttggtttctgggtgccctccggtgaggggaaaagtgggagtntgccaagcgcaggccaccgagcagatggagctgcttcgagagtcggtggcgtgtcggtggcggctgtcccgagcatcagtgtctcaaagtgttcctctcttccctncccagctctttgtggagcatctgccccactccttncccgtgaggggtggacagagccccccacctntnactggagcccagncgccttccanagaggtggcttcagaggcaaaaacccttctgcatgttttaagcctttccttttcccaagaaggctgggggagaagnctttgtcttttccgttttaagtaanatnatatttaagaaaagaaacttgggactgacttattcgngccaaggaaagggggtttttggntnttccttggggtttggggtttttttaangagagggatcaagggtccccattgnaccttatacccaccaattattaaaatgggggngcctgttgattttggattncgaanggagggca

SEQ ID NO: 5457 - DNA, 648 bp, Canis familiaris
  misc_feature (403)..(403): n comprises a, c, g, or t, or includes no nucleotide
  misc_feature (424)..(424): n comprises a, c, g, or t, or includes no nucleotide
  misc_feature (470)..(470): n comprises a, c, g, or t, or includes no nucleotide
  misc_feature (487)..(487): n comprises a, c, g, or t, or includes no nucleotide
  misc_feature (501)..(501): n comprises a, c, g, or t, or includes no nucleotide
  misc_feature (615)..(615): n comprises a, c, g, or t, or includes no nucleotide
  misc_feature (627)..(627): n comprises a, c, g, or t, or includes no nucleotide
gaggttcaaacggaggcctcttagtggccgcttgtgcaaatcagcgccctgacctctttggctgtgttgttgcccaagttggagtgatggacatgctgaagttccataaatacaccatcggccacgcctggaccaccgactacgggtgctcggacagcaaacaacactttgaatggcttatcaagtactcgccgctgcacaacgtgaggctcccggaggcggacgacacccagtacccgtccatgctgctcctgaccgccgaccacgacgaccgcgtggtcccgctgcactcgctcaagttcatcgccacccttcaatacgtggtgggccgaaccggaagcaaagcaacccgcttgtcatcacgtggacacaaggccggccacggggccgggaagcccacggncaaggtgatagaagaggtctncgacatgttcgcgttcatagcgcgcttgctggacatcgactggatncagtgagcgggccccgngggcccggcccggncgccgccgggaccttaaaggctttcacaccgtcacggcacccggagaagcaccgggcttcggccggccacggagccgggtccttggttaaacgcggccaggaacgcgggagttnttttaggttttntttacaggcctgggttttttt

SEQ ID NO: 5458 - DNA, 657 bp, Canis familiaris
  misc_feature (442)..(442): n comprises a, c, g, or t, or includes no nucleotide
  misc_feature (475)..(475): n comprises a, c, g, or t, or includes no nucleotide
  misc_feature (518)..(518): n comprises a, c, g, or t, or includes no nucleotide
  misc_feature (547)..(547): n comprises a, c, g, or t, or includes no nucleotide
  misc_feature (553)..(553): n comprises a, c, g, or t, or includes no nucleotide
  misc_feature (564)..(564): n comprises a, c, g, or t, or includes no nucleotide
  misc_feature (577)..(577): n comprises a, c, g, or t, or includes no nucleotide
  misc_feature (587)..(587): n comprises a, c, g, or t, or includes no nucleotide
  misc_feature (589)..(589): n comprises a, c, g, or t, or includes no nucleotide
  misc_feature (628)..(628): n comprises a, c, g, or t, or includes no nucleotide
  misc_feature (647)..(647): n comprises a, c, g, or t, or includes no nucleotide
  misc_feature (654)..(654): n comprises a, c, g, or t, or includes no nucleotide
tgctcccataaactatcttatcaaactggcactgtatggcccaaggcctcaggcatccagaaatggttttatcaggatagaatattccaagggcttagaactcacctgccaggagctgtccaagggccagtcctgaagacaaacattctgggaggaatgaggattgagcagcccaggtctgctgagttaaccctttcctgcacaatggaaggaggaggaggaggaggaggggaaggaagaagaagcagaaggacaagattgcaatctcagaaatatatatatatatatatatatatatatatatatatatatatatattcatggtcatggtggtagtggtaggggaggatggtataaaataagacataccgctgtgtttgttggttctagaagaaaagaaaatgatgatcttttcttctgcatttagttatgctgcatttanttatgaaagagggaaaatgtgtgcatttttttnacttaaaacaggggtctgcaatttttttttcgtaaagggccanttagtgaatagcgagctgtgtgggctcantcagtntcccccaccantaaccctgtgtgnatcaggagtngnacaaatacacatatgcttggccatggttgtccaataagnttaggcacaactttaattnttaattngag

SEQ ID NO: 5459 - DNA, 688 bp, Canis familiaris
  misc_feature (391)..(391): n comprises a, c, g, or t, or includes no nucleotide
  misc_feature (432)..(432): n comprises a, c, g, or t, or includes no nucleotide
  misc_feature (451)..(451): n comprises a, c, g, or t, or includes no nucleotide
  misc_feature (487)..(487): n comprises a, c, g, or t, or includes no nucleotide
  misc_feature (506)..(506): n comprises a, c, g, or t, or includes no nucleotide
  misc_feature (514)..(514): n comprises a, c, g, or t, or includes no nucleotide
  misc_feature (551)..(551): n comprises a, c, g, or t, or includes no nucleotide
  misc_feature (561)..(561): n comprises a, c, g, or t, or includes no nucleotide
  misc_feature (578)..(578): n comprises a, c, g, or t, or includes no nucleotide
  misc_feature (580)..(580): n comprises a, c, g, or t, or includes no nucleotide
  misc_feature (594)..(594): n comprises a, c, g, or t, or includes no nucleotide
  misc_feature (617)..(617): n comprises a, c, g, or t, or includes no nucleotide
  misc_feature (676)..(676): n comprises a, c, g, or t, or includes no nucleotide
ggttggggggcagggggcagggggcagggggcaggcctgctttggctcacaacatccacaaacgagggcgggtcccgggagggagggcagagtttacggagtgtggtcagagcccttctgcagaggcccagagagtacggtgggccctggcagggcggagggggtaggtacccccaggctccatactggtcctcatgcctgccctccctactggccaatcctggacccaaggtcagggggtctcaggagaggggtctgccaaggtgcagcaagaaccaggctggaaaaataagttcctggatggggtcagaggggagcctagggcgcacacagcacaaacacacacacattgcccgctgtgtgggtaaggccagcagtgcccccccaccgnacacaggcccaccttttgaagggccaggtcagtttgagggntggttggacacaaacttgntcccagacatttacacaatgcacacaagaccttaanacgctacgggttccctaancttggggngggggggtagagggcccaccaagaaagggatgcttgntcccacggangggggggggtttgcttnangggtaaacttaatntgaccccccgttggacttctggnttaataatgggggggtgggaacccaatcttccccaaggtggccaagtgaaaggcaaccncaggaaaagttt

SEQ ID NO: 5460 - DNA, 650 bp, Canis familiaris
  misc_feature (470)..(470): n comprises a, c, g, or t, or includes no nucleotide
  misc_feature (477)..(477): n comprises a, c, g, or t, or includes no nucleotide
  misc_feature (502)..(502): n comprises a, c, g, or t, or includes no nucleotide
  misc_feature (511)..(511): n comprises a, c, g, or t, or includes no nucleotide
  misc_feature (529)..(529): n comprises a, c, g, or t, or includes no nucleotide
  misc_feature (532)..(532): n comprises a, c, g, or t, or includes no nucleotide
  misc_feature (539)..(539): n comprises a, c, g, or t, or includes no nucleotide
  misc_feature (560)..(560): n comprises a, c, g, or t, or includes no nucleotide
  misc_feature (563)..(563): n comprises a, c, g, or t, or includes no nucleotide
  misc_feature (580)..(580): n comprises a, c, g, or t, or includes no nucleotide
  misc_feature (596)..(596): n comprises a, c, g, or t, or includes no nucleotide
  misc_feature (609)..(609): n comprises a, c, g, or t, or includes no nucleotide
  misc_feature (635)..(635): n comprises a, c, g, or t, or includes no nucleotide
  misc_feature (640)..(640): n comprises a, c, g, or t, or includes no nucleotide
acgcgtgggcaaaaatacatagaccttgaaaacgatgatatattcaaactctccttttgaagttttgtatcttcttgcaccaagtccgaattgaaaggttccagaatctacctcctaactgcattctatcctccctcaatcttttgggctaattgataagccccctattttttatctctaaaaatcatcaacaaggtctacgtccgatggctgctccagtcctttgagctgtagtcaggataatataacttgcctctgaatccaaacttaagaaaaaggaagcccataagcaaaggtactgaatcttttcctgccaatttctagaggtagaaattcatcctgctacagagagagagagagagagagagaagagaaagcaaagatagagagtgagagagcacactggcatttctacagggggtaggtaagctgacgcttgtaaatatttttacacaaaaatttactaaagncacaaanttttctgaagatccccctgggtganggtttggtntgccattaaaatcactgnggnagaaaanaaacattcctacatattttanttntattttgaaaaaaaatntttaatctacagtgcnaagttcaaaaaanaggaatttttctgaattttagggttntttcntttgcaaagg

SEQ ID NO: 5461 - DNA, 632 bp, Canis familiaris
  misc_feature (417)..(417): n comprises a, c, g, or t, or includes no nucleotide
  misc_feature (466)..(466): n comprises a, c, g, or t, or includes no nucleotide
  misc_feature (527)..(527): n comprises a, c, g, or t, or includes no nucleotide
  misc_feature (529)..(529): n comprises a, c, g, or t, or includes no nucleotide
  misc_feature (556)..(556): n comprises a, c, g, or t, or includes no nucleotide
  misc_feature (570)..(570): n comprises a, c, g, or t, or includes no nucleotide
  misc_feature (577)..(577): n comprises a, c, g, or t, or includes no nucleotide
  misc_feature (599)..(599): n comprises a, c, g, or t, or includes no nucleotide
  misc_feature (606)..(606): n comprises a, c, g, or t, or includes no nucleotide
  misc_feature (614)..(614): n comprises a, c, g, or t, or includes no nucleotide
  misc_feature (625)..(625): n comprises a, c, g, or t, or includes no nucleotide
acgcgtgggcggacacggagcgagaggctgagagagtcggagacgctatccgcttccatccgtcgcgcagaccctgccggagccgctgccgctatggatgatcgggaggatctggtgtaccaggcgaagctggccgagcaggctgagcgatacgacgaaatggtggaatcaatgaagaaagtagcagggatggatgtggagttgacagttgaagaaagaaacctcctatctgttgcatataaaaatgtgattggagccagaagagcttcctggagaataatcagcagcattgaacagaaagaagaaaacaagggaggagaagacaaactaaaaatgatccgggaatatcggcaaatggttgagactgagctaaagttaatctggtgtgacattctggatgtactggacaaacacctnatttcagcagctaacactggcgaagtccaaggttttttttataaaatgnaaggggctaccacaggtattttgcttgaatttgccccaggaaatgacaggaaggagggttnanaaaaaaacctatggcttttaaagttgntagggatttggatngcagaantttcaccacgcatccaatttgnttagggnttggtttnaacttttttgntttaata

SEQ ID NO: 5462 - DNA, 681 bp, Canis familiaris
  misc_feature (353)..(353): n comprises a, c, g, or t, or includes no nucleotide
  misc_feature (477)..(477): n comprises a, c, g, or t, or includes no nucleotide
  misc_feature (493)..(493): n comprises a, c, g, or t, or includes no nucleotide
  misc_feature (495)..(495): n comprises a, c, g, or t, or includes no nucleotide
  misc_feature (542)..(542): n comprises a, c, g, or t, or includes no nucleotide
  misc_feature (552)..(552): n comprises a, c, g, or t, or includes no nucleotide
  misc_feature (559)..(559): n comprises a, c, g, or t, or includes no nucleotide
  misc_feature (592)..(592): n comprises a, c, g, or t, or includes no nucleotide
  misc_feature (628)..(628): n comprises a, c, g, or t, or includes no nucleotide
  misc_feature (644)..(644): n comprises a, c, g, or t, or includes no nucleotide
  misc_feature (663)..(663): n comprises a, c, g, or t, or includes no nucleotide
  misc_feature (669)..(669): n comprises a, c, g, or t, or includes no nucleotide
agagggagagagagagagagagagagcaagacagagaccagaaagaaagccactctcagagatgaaattttaggagagcgaaatgatcgacctttttaaggctgagtgggtttcttcagtttgtgtgcaagtttcaagaaatggaaggactgaccaggtttgggtccctcaggatgactggacagggtacacccctcgtggtaaagacgacgaaatcccgtgccgaagaatgcggagtggcagctacatcaaagccatgggagatgaagacagtggtgactccgacacaagtccaagccttctcccaaagttgctgcacgaagagaaagctatctcaaggctactcagccatnccttacagaactcaccacactcaagatttccaatgaacactcccccaaactccagatccggagtcatagttacctgagggcagtaagtgaaagtctcatcaacccgaaagcctggacagccttnacccttgctgggctgntnacattaacaaaaggttccgttttaggaatgagaagcttcatgcgagnccttgagccnccttcanccaagtgagccgaaatggaggtgaacgggcaantttgagtcgtgtgcgagtcggggtcaacgactggantccagcgggggaaagntgaccttccctccccggtntttcgntgcggacccaat

SEQ ID NO: 5463 - DNA, 513 bp, Canis familiaris
  misc_feature (375)..(375): n comprises a, c, g, or t, or includes no nucleotide
  misc_feature (392)..(392): n comprises a, c, g, or t, or includes no nucleotide
  misc_feature (399)..(399): n comprises a, c, g, or t, or includes no nucleotide
  misc_feature (407)..(407): n comprises a, c, g, or t, or includes no nucleotide
  misc_feature (440)..(440): n comprises a, c, g, or t, or includes no nucleotide
  misc_feature (449)..(449): n comprises a, c, g, or t, or includes no nucleotide
  misc_feature (468)..(468): n comprises a, c, g, or t, or includes no nucleotide
ggtaaaaccagagaggaggaaaaaggaggagccctaggaatgaccttgttacttttgctctttgtataccagtaagtaaaaactaacatctagtacctcacagttcatgaagcaatctcccatccatcgtctggcttaaccctgtgaaatagattattcctcccatttgatccatggggaaacagagacttgggaaagcaaagtgagcaagtcaaagctcacaagtggtagagccacctgaatcctgcttgtctgctttcccttgtctaactccacacacaggcctgtgaactgaagcatctatgctctgcaccccctctttgccctggtatgtaatccagatcaaagacagggccccaaggcaaaaaccaggtncagaaaggcttgtggtntggaaanagcccaangtccacatgcctttttcagtatgtgtgggaganccccagttntggctggcctcccccttgntttgatggagatccacaagcctagccaactttggggagtcattgt

SEQ ID NO: 5464 - DNA, 679 bp, Canis familiaris
  misc_feature (426)..(426): n comprises a, c, g, or t, or includes no nucleotide
  misc_feature (441)..(441): n comprises a, c, g, or t, or includes no nucleotide
  misc_feature (489)..(489): n comprises a, c, g, or t, or includes no nucleotide
  misc_feature (523)..(523): n comprises a, c, g, or t, or includes no nucleotide
  misc_feature (537)..(537): n comprises a, c, g, or t, or includes no nucleotide
  misc_feature (544)..(544): n comprises a, c, g, or t, or includes no nucleotide
  misc_feature (562)..(562): n comprises a, c, g, or t, or includes no nucleotide
  misc_feature (596)..(596): n comprises a, c, g, or t, or includes no nucleotide
  misc_feature (610)..(610): n comprises a, c, g, or t, or includes no nucleotide
  misc_feature (617)..(617): n comprises a, c, g, or t, or includes no nucleotide
  misc_feature (676)..(676): n comprises a, c, g, or t, or includes no nucleotide
cagctcgccttgcacaacaggaaaaacaagaacaagttaagattgagtctgtagccaagagcttagaagatgctctgagccaaaccgctcacatcactcaacaggccattgtagctcagaatgctgcggttcaggctgtcaacgcacactccaacatcttgaaagcagccatggacaattcggagattgcaggtgagaagaagtctgctcagtggcgcacagtggagggtgcattgaaggaacgcagaaaggcagttgatgaggctgctgatgcccttctcaaagccaaagaagagctagaaaagatgaaaagtgtaattgaaaatgcaaaaaaagaagaggttcctggggccaaatctcatataactgctgcagaggggaaacttcacaacatgataagttgatctggataatgtggtccaaaangtcaaagcagctcantcttgaggctaaggttgtgtcttaatatcatgagctggtggtccaagncccgggatgacttttaaccagaactgggccggtnttacttccaaaatncttgccngatggaaagggttgagtnttttgttttacttgacagctgctactggagatcngaattcctggatgnttattcncatcgccgatttgcccacttaatagagagttgccgaccaaaagccccgagaagcgccanttt

SEQ ID NO: 5465 - DNA, 665 bp, Canis familiaris
  misc_feature (510)..(510): n comprises a, c, g, or t, or includes no nucleotide
  misc_feature (512)..(512): n comprises a, c, g, or t, or includes no nucleotide
  misc_feature (569)..(571): n comprises a, c, g, or t, or includes no nucleotide
  misc_feature (581)..(581): n comprises a, c, g, or t, or includes no nucleotide
  misc_feature (609)..(609): n comprises a, c, g, or t, or includes no nucleotide
  misc_feature (612)..(613): n comprises a, c, g, or t, or includes no nucleotide
  misc_feature (640)..(640): n comprises a, c, g, or t, or includes no nucleotide
cttcctcttcgataagcccgtgtcgcccctgctcctggcctcgggcatggcccgcgactggccggacgcccgcggcatctggcacaatgacaataagaccttcctggtgtggatcaacgaggaagaccacctgcgggtcatctccatgcagaaagggggcaacatgaaggaggtgttcactcggttctgcaacggcctcacccagattgaaacacttttcaagtcaaagaattacgaattcatgtggaaccctcacctgggctacatcctcacctgcccatccaacctgggcacaggcctgcgggcaggtgtgcacatcaagctgccccacctgggcaagcacgagaagttcccggaggtgctcaagcggcttgcggcttcagaaacgaagcacaagtggtgtggacacaactgcggtgggtggcgtctttgatgtttcaacgcaaaccgctgggctttttaaaagtggagctggtacaaatggtggtggatggtgtgaacttctcattnanatggaacaacggctggagcaagggcaggccatcgataaccttttgcttgccaaaaannnagggcccaanccgaacttgcacaacacaaacccggtgnttnntaattattgccgggagggcccccttcncccttttagtttgcaattgggggtg

SEQ ID NO: 5466 - DNA, 670 bp, Canis familiaris
  misc_feature (338)..(338): n comprises a, c, g, or t, or includes no nucleotide
  misc_feature (510)..(510): n comprises a, c, g, or t, or includes no nucleotide
  misc_feature (519)..(519): n comprises a, c, g, or t, or includes no nucleotide
  misc_feature (542)..(542): n comprises a, c, g, or t, or includes no nucleotide
  misc_feature (579)..(579): n comprises a, c, g, or t, or includes no nucleotide
  misc_feature (595)..(595): n comprises a, c, g, or t, or includes no nucleotide
  misc_feature (649)..(649): n comprises a, c, g, or t, or includes no nucleotide
  misc_feature (665)..(665): n comprises a, c, g, or t, or includes no nucleotide
gccctgggaagtgcggatcttatgggaggtgggaagtggcggggggtgtcgtagaaattcttggattgtttttacttaggtggggaattaagtttgggttatggagaatatatgtctgaattggaggcgacttgaagatggagtggttggagggtaagaggggtggcggcggcaggggcaatttttgcttcttgggttaggctgtggcttgttagaaaacctcattttcttctcatgactttgattccctgacaattcttttgcactgttggcgcttccgatctctgccagaatgctatgtcatgatcatttacttggaatttctcacatctcacctnctcttttcttctttcaatatgaagcaagtgtatgattctttatgatggtgcaaacaagaattaccagagaaatagtaattattcaatttcttctgaagtggtttccaattgtatatttaggattcctgtgaaaaaaggctgagaataaccaacatctttgtttctaagattnctttggggncagggagtaatggagtagaatanaaaaaatcatcatctaagtatctaaaataaacttcanattgtaatacccgttnggttaacaaccctttatcttaaaatccataaatgggaaaggggaagactaccanctagggtttgtttggntaatt

SEQ ID NO: 5467 - DNA, 475 bp, Canis familiaris
  misc_feature (229)..(229): n comprises a, c, g, or t, or includes no nucleotide
  misc_feature (243)..(243): n comprises a, c, g, or t, or includes no nucleotide
  misc_feature (249)..(249): n comprises a, c, g, or t, or includes no nucleotide
  misc_feature (403)..(403): n comprises a, c, g, or t, or includes no nucleotide
  misc_feature (446)..(446): n comprises a, c, g, or t, or includes no nucleotide
  misc_feature (449)..(449): n comprises a, c, g, or t, or includes no nucleotide
  misc_feature (459)..(459): n comprises a, c, g, or t, or includes no nucleotide
tccatccatccacccagccagccagccagccagccaaccatccacctgtgcatccaccaatccatccatccatccatccatccatccatccatccatccatccatccaataatcactaacggccaggcacatagttagggttacagcagtaaataaaaacaaacctgttccttgtccctagccgctgtcagttaagtgggtagaaagatccaggatgtaagcgtgaaancccgggcatgaagntctcanaggaagattttcgtttttccttcctaccacatcctcttttcttctgcccacagcaagatgcgttctcaagtcattttgggagcccctctaccttttgatttctagaacctttggcatggtgaacaggaaattggggttagcaagcaagagctgncttgagggggggcaaaggacacttgatggtttatgggcactgnttnagtgcttggntgcttgccaaggcatt

SEQ ID NO: 5468 - DNA, 508 bp, Canis familiaris
  misc_feature (470)..(470): n comprises a, c, g, or t, or includes no nucleotide
  misc_feature (472)..(472): n comprises a, c, g, or t, or includes no nucleotide
  misc_feature (489)..(489): n comprises a, c, g, or t, or includes no nucleotide
  misc_feature (495)..(495): n comprises a, c, g, or t, or includes no nucleotide
gaagaggacgaaaaaaaataaccgtccgcgacgccgagccgaaccggacccgcagccaccatgaacagcaaaggtcaatatccaacgcagccaacctatcccgtgcagcctcctgggaacccagtgtaccctcagaccttgcatctccctcaggctccaccctatactgatgctccacctgcctactcagagctctatcgtccgagcttcgtgcatccgggggctgccacggtccccaccatgtcagctgcatttcctggcgcctcactgtatcttcccatggcccaatctgtggctgttggacctttaggttccacaatccccatggcttattatccaagttggtcccatctatccacctggttcagcagtgctggtggaaggagggtatgatgcaggtgccagatttggagcgggggctactgctggcaacatttcttcttcacccctggatgcccttccaacgctgntnaacttgcagtcatgcanggaggncaatgtccttgta

SEQ ID NO: 5469 - DNA, 438 bp, Canis familiaris
  misc_feature (265)..(266): n comprises a, c, g, or t, or includes no nucleotide
  misc_feature (350)..(350): n comprises a, c, g, or t, or includes no nucleotide
  misc_feature (424)..(424): n comprises a, c, g, or t, or includes no nucleotide
  misc_feature (426)..(426): n comprises a, c, g, or t, or includes no nucleotide
gtgatggcgtcacagaaaagaccctcccagaggcacggatccaagtacctggcctcagcaagcgccatggatcacgccaggcatggcttcctcccgaggcacagagacacgggcatccttgactccctcgggcgcttctttggcggtgacaggggtgtgcccaagcggggctcaggcaaggatggacatcacgcagcgagaactgcccactatggctccctgccccagaagtcccagcatggccggccccaagacgaaaaccccnnagtgcatttcttcaagaacattgtgacaccacgcacaccttcttcatcgaaaggaaagggggcgaaggactgtccctcaacaanatttaacttggggaagccgagggccaaaaagccgggatttggctacggaggccgggcttcaacttaaaaggggntnaagggcaccgac

SEQ ID NO: 5470 - DNA, 660 bp, Canis familiaris
  misc_feature (268)..(268): n comprises a, c, g, or t, or includes no nucleotide
  misc_feature (478)..(478): n comprises a, c, g, or t, or includes no nucleotide
  misc_feature (494)..(494): n comprises a, c, g, or t, or includes no nucleotide
  misc_feature (518)..(518): n comprises a, c, g, or t, or includes no nucleotide
  misc_feature (528)..(528): n comprises a, c, g, or t, or includes no nucleotide
  misc_feature (551)..(551): n comprises a, c, g, or t, or includes no nucleotide
  misc_feature (584)..(584): n comprises a, c, g, or t, or includes no nucleotide
  misc_feature (586)..(586): n comprises a, c, g, or t, or includes no nucleotide
  misc_feature (616)..(616): n comprises a, c, g, or t, or includes no nucleotide
  misc_feature (626)..(627): n comprises a, c, g, or t, or includes no nucleotide
  misc_feature (650)..(650): n comprises a, c, g, or t, or includes no nucleotide
  misc_feature (658)..(658): n comprises a, c, g, or t, or includes no nucleotide
aagatgactctggagtaacattttcataaaacaaaacttattgcactccgaggatgatctctttttctgtatcctgacatttttctgggttaaaatccctttttttggtgaaatcaaacacttgttttaaagtctttcttgggtgacatgaaaagttggcagcccctctctttgcctccctcaaatttagaaatactttcaaattctaagaatcatgtttcattttcacgtttaaaaaaatgcagactgggacgccggggtggctcancagtttagcgcctgccttcagcccagggcatgatcctggagacccgggaccgagtcccacatcgggctccctgcatggagcctgcttctccctctgcctgggtctctgcctctgtgtgtgtgtgtgtgtctctcatgaataaataaataaaatcttaaaaaaaaaaaaaaaaaaagcagactaagcccccctgtgtgcctggcacgcttntagtgcttgggggtanggcacaataaaattagaaggtttnttggaaagancggtaccatccccttcaattggnaagccctggccagaacactttaactgggttttngnggggcttcaaaaatggctggcttgggctgncaagccagannttttaccaaggaaaaacactttntttttttnca

SEQ ID NO: 5471 - DNA, 633 bp, Canis familiaris
  misc_feature (465)..(465): n comprises a, c, g, or t, or includes no nucleotide
  misc_feature (484)..(484): n comprises a, c, g, or t, or includes no nucleotide
  misc_feature (540)..(540): n comprises a, c, g, or t, or includes no nucleotide
  misc_feature (559)..(559): n comprises a, c, g, or t, or includes no nucleotide
  misc_feature (564)..(564): n comprises a, c, g, or t, or includes no nucleotide
  misc_feature (567)..(567): n comprises a, c, g, or t, or includes no nucleotide
  misc_feature (596)..(596): n comprises a, c, g, or t, or includes no nucleotide
  misc_feature (613)..(613): n comprises a, c, g, or t, or includes no nucleotide
  misc_feature (630)..(631): n comprises a, c, g, or t, or includes no nucleotide
agacacagctaagttctgaaacatttgaccttgaaagagaagtctctccaagtagcagagagatcctggatgaagtaagaataataatggcagataaggaggttgataacaggggaaatgctgagaaggaaatacccatttctacagtctcatccagtacccaggtgtcctgcccactatgtgaccaaggcttcccacccacaaagattgagcgacatgccatgtactgcaatgggctgatagggcaagacacaggtaaaacttacctggatttatcaaactattttctttgcatggttgttttgtaatcctgtacaatggatgcagtacaggaaaaagagaccactctccctcaaagttaaaggtggtggggttatttatttatttatttttttctttctcctatctacttaattcttcagtacttttcggggtctttattactttggcaggtatgctatttgntgacatactcaggagaaanggagaggggaaaaactttcatcttttaatggttcaacttattctttgggggattgnaaaccaaaatggaccttgnatttnatnttattaagcagaatttgggactccttggngttggggaactaaattntaaggtgccggtttttnnaa

SEQ ID NO: 5472 - DNA, 658 bp, Canis familiaris
  misc_feature (382)..(382): n comprises a, c, g, or t, or includes no nucleotide
  misc_feature (455)..(455): n comprises a, c, g, or t, or includes no nucleotide
  misc_feature (515)..(515): n comprises a, c, g, or t, or includes no nucleotide
  misc_feature (528)..(528): n comprises a, c, g, or t, or includes no nucleotide
  misc_feature (534)..(534): n comprises a, c, g, or t, or includes no nucleotide
  misc_feature (555)..(555): n comprises a, c, g, or t, or includes no nucleotide
  misc_feature (577)..(577): n comprises a, c, g, or t, or includes no nucleotide
  misc_feature (591)..(591): n comprises a, c, g, or t, or includes no nucleotide
  misc_feature (595)..(595): n comprises a, c, g, or t, or includes no nucleotide
  misc_feature (602)..(602): n comprises a, c, g, or t, or includes no nucleotide
  misc_feature (636)..(636): n comprises a, c, g, or t, or includes no nucleotide
ttttatcagtcctgactgtacaagattgttgcaatttcagaacagcagttttatgaaattgatttatcttttgatctgaaacaattttttctaggtattcatttcagcgttatatttccacaagttccatttgtgggactcctttggttgcccctagtttttttttttttttcaaagaaagaaaaataaggagcagtggaggaaagagagtgaaaagaaaagaaaaagacagaaagggtggaggtaaagagagaggggacaaaatggaggcaggaaggacgagaagaaggaaggaagggaagaaggaagggagagagggaagaaaagaacattagggtagttgacttaattcatttgcattcttggtttaactgcaagtggngtaattatgttttacaatgatcccatttgaaacgtaagtcctggacaccattaagttcttttttcagcaattntttatggaaaaggctggccaaaatataaaattggggtttttggggaaacctaaaaattcngggagggaatggnaacctnaaaacccttttgggggggttnaaacttaccggaaaaataaagnttttttttacaatnaacnttttttnaaagggactggggactaaaaaataccccggattnggcttttttttttttttttttt

SEQ ID NO: 5473 - DNA, 605 bp, Canis familiaris
  misc_feature (519)..(519): n comprises a, c, g, or t, or includes no nucleotide
  misc_feature (542)..(542): n comprises a, c, g, or t, or includes no nucleotide
  misc_feature (563)..(563): n comprises a, c, g, or t, or includes no nucleotide
tgagcatgaccaatgcaacttttattggtgatcatatgaagaagggtcctaccaggccacctcgaccaagcaccccagacctttctaaggcaaggggttcccctccaacatccagtaatgttgtacaaggacagattaaacaagttcctgctcctgtcatttccgctcggtctgatgctgatcactctggctctgactctgcttctactcctgctttacatacctgtttcttagtaaatgaaggatggagtcagttagctgctatgcattgtgttatgctgccagacctgctgggattagacaaatttaggcctccacttctagagatgctggctcggagatggcaagatcgatgcttggaggtcagggaagctgcacaggccctgcttctagctgaattgagaagaattgagcaggctgggaggaaagaagccatcgatgcctgggccccttatttaccacagtatatggaccacgtcatatcacctggagtctagcagaagccatgcagactatcancactgctctgatgccctggggcngaagccaaggccaggaggaanacatgaccttcaaagatgacatacaactggtggttggaagtt

SEQ ID NO: 5474 - DNA, 442 bp, Canis familiaris
gtttcttttctggtgttccaggtgtttctttggcttgtgactctgtggctctgatctctcttataaggacacttgtcattggatttcaggcccacccatagaatccagaatgatcttatctcaagatccttacctttattacatcctcaaagactcttcttccaaataaggtcataatcaaaggttctagggattcaggtgtggacatatttttgagaggccatcattcaatccactatagaccagccaccctgcatgcttattctttgccctgtctttccacttgtgtagcttgtaaacggcctactgtaaaccaagcacttttttggtaaataaaaccaggtaggatttctgctcccgtggaagctacagcttaaagtgctttaaaaaaaaaaaaggctttttaaaatgaaaatggtcatatatttttgaatagcagtac

SEQ ID NO: 5475 - DNA, 494 bp, Canis familiaris
  misc_feature (319)..(319): n comprises a, c, g, or t, or includes no nucleotide
  misc_feature (445)..(445): n comprises a, c, g, or t, or includes no nucleotide
  misc_feature (486)..(486): n comprises a, c, g, or t, or includes no nucleotide
gctgtcaggactgtttaatctgcctttgtagctcaaaggcagccttaggtaataatgaatgagtgtggctatgtgccagtatttacacaaacaggtaggtggctggatttggccatatcacatatcaatactaagcaacctaggacaatatttataaacataaacataataaatcactagactgtgaaaatcagtgctgttcactggagttctctgcagtgatggaaatgatctgtggttctgtgtctgtactgctcattatggtagccactggccacacgtagtatccatggctgaagacgaagccagtgtgactcanggactggatttctgattttatgtaagttcaattaatttaagtttaaatagccgttggatagcagagctttgtagtggttggcctttgctaagatggggttgatgcaagaaacacagaacaacctgnaaaggtttactttatattttcactgaccttgagaacaatantttgctta

SEQ ID NO: 5476 - DNA, 472 bp, Canis familiaris
  misc_feature (353)..(353): n comprises a, c, g, or t, or includes no nucleotide
  misc_feature (359)..(359): n comprises a, c, g, or t, or includes no nucleotide
  misc_feature (386)..(387): n comprises a, c, g, or t, or includes no nucleotide
  misc_feature (398)..(398): n comprises a, c, g, or t, or includes no nucleotide
  misc_feature (413)..(413): n comprises a, c, g, or t, or includes no nucleotide
  misc_feature (416)..(416): n comprises a, c, g, or t, or includes no nucleotide
  misc_feature (445)..(445): n comprises a, c, g, or t, or includes no nucleotide
  misc_feature (447)..(447): n comprises a, c, g, or t, or includes no nucleotide
accagcaagctggggctgtcacttctgtgaggcgccttgaagaagacaagccaaacctttgaacattaggaaatgctagaaattcagacaagagacatatgtccccttaaaatatgtaaatgtgctagaataaggtcagtctgccgcctttgttataaaaaccgtggcctcccctggggccttcggtgatggtttacacgtgtgcattgtgctgttttctccctcggccagctggtcgtggacctgaacttgccattgccacacccagaccttgcccttaggagcccccaaagtagagttgcgacgccggtgttgttggtgtgacaattatgcaatcctgtgtcccgctaggngttatnctacaaacaggattttaagggttaagnnggttcaagggnggaagatctaaaaanagngttaaaatcaaaactgttttctttgggananaaaaaaaaaaaatgtttttatattg

SEQ ID NO: 5477 - DNA, 515 bp, Canis familiaris
  misc_feature (421)..(421): n comprises a, c, g, or t, or includes no nucleotide
  misc_feature (485)..(485): n comprises a, c, g, or t, or includes no nucleotide
  misc_feature (494)..(494): n comprises a, c, g, or t, or includes no nucleotide
aactaggtgatgtatgttggtagcttgtgtgaccaggcaaggaagctggaatatgatggatagaacactgtatactgacttccagttgtgtagttcactgtatactttacaacaataaatttaatatgagataaataatacataaaactaatatgatatagagctcagacagtcaccacaatctaaatatggataattctgattggcaggattgaggtgtctttgtgggaggggtggaccttgaaattcagcagaattttaacaggtagagctttattgaaggacatagcaggtggaaagtacattctagggatgcctgggtggctcactggttgaatgtctgcgttggccctgggtgtgcccctggggtccaggatggagtcccacattgggctccctagggggagcctgcttcttcctntggctgtgtctctggcactctctgggggctctcatgaataaataaatctaaaaaaaaaaaaaanggcgggcgnttttaaaggatccaagcttac

SEQ ID NO: 5478 - DNA, 510 bp, Canis familiaris
  misc_feature (429)..(429): n comprises a, c, g, or t, or includes no nucleotide
  misc_feature (500)..(500): n comprises a, c, g, or t, or includes no nucleotide
ccaccagggttccacggctgccaccaagccagggtccagggtttcccgggacccccctcaggtcctcctggcctagcgccagggacagagagggtggccactgagggctgtctggggccaagagaaggtagcccccagggtgcctagggtgccccccaccccacgttccccctgtccctttagtcgctgaccccaggccttaggtcgggatgtgcaaccctggacatgtgtcctccagcctagtggatcagcctgggagggggccatttccctggtgagccagctagcctgtggctcacctgtccaccctggggttaggggtctcgctgccctccatagctagggcgggggctggccccgggagcacgggcactgttcccaccccatgtcccccggggccgtgactgtccctgctcgtgttgtggcggntcaccccgtggggcttgtgtgcacacttgtccggagccttcaacgtttgctgtcaaagcttactaaaatancctggtcccg

SEQ ID NO: 5479 - DNA, 516 bp, Canis familiaris
  misc_feature (439)..(439): n comprises a, c, g, or t, or includes no nucleotide
cagataatctctctttttttagaacttggaaagttattacttactattaagcctggagctttgatagttctaaaaggttactagtgcctccagagtcactcagctctatttccagagcaactctcctagcagtggacatccctcttccctccaggtcttgtctcttcctggaatgtccacaagcagcagatacagctggtctccccacagctgctgaaaggaaccctggtgtgacctctcagcacagaaactggtcttcccgatgtgagcaggcttccggggaacacagaatccacatgaccttaagattatctacaactccatcgtggtgctgttgtcttccaggctcactggtccctcctcggccagcggctggggcctcctcaccagtggtggagagaggttcttttcaacaacctgtttattcaaaggaaagagnttcttggacttcccccaatgggtgttcctcaacaagaagtgggaaggtgatcaaggctggtgtagcaatccggtttt

SEQ ID NO: 5480 - DNA, 498 bp, Canis familiaris
  misc_feature (388)..(388): n comprises a, c, g, or t, or includes no nucleotide
  misc_feature (417)..(417): n comprises a, c, g, or t, or includes no nucleotide
  misc_feature (472)..(472): n comprises a, c, g, or t, or includes no nucleotide
  misc_feature (497)..(497): n comprises a, c, g, or t, or includes no nucleotide
gcagccttgaggcaccctgcccttccccccaggtccctctctccctgcagtttataaagtgagactgttcctagtctcacccagcaaccactgcccggcctcactccaggctgagggctcatgtctgctcctgaaccactgcaagcctgagaatctgtggaaggtcacttctcaactacagaaatttgagttttgaagaattggaattacttccttgctgttgttttttggcttaaatttttgtctttgaacttgaaatcttgaccctaagaaagaggagcaggagtgtcaggctcctcctggtctttccagtttagaaaaggcactgggccaggtagggaccacaggagccgaggtctgcctgcccctgtctttttttaccctcggntctgtgttacaagagttgctggagacagnttcagatgattatttaatttgtaaatattgtcaaaatttaatagcttaaaattgnatatacagcctaataaaaactccant

SEQ ID NO: 5481 - DNA, 647 bp, Canis familiaris
  misc_feature (509)..(509): n comprises a, c, g, or t, or includes no nucleotide
  misc_feature (529)..(529): n comprises a, c, g, or t, or includes no nucleotide
  misc_feature (532)..(532): n comprises a, c, g, or t, or includes no nucleotide
  misc_feature (569)..(569): n comprises a, c, g, or t, or includes no nucleotide
  misc_feature (591)..(591): n comprises a, c, g, or t, or includes no nucleotide
  misc_feature (607)..(607): n comprises a, c, g, or t, or includes no nucleotide
  misc_feature (610)..(610): n comprises a, c, g, or t, or includes no nucleotide
  misc_feature (634)..(634): n comprises a, c, g, or t, or includes no nucleotide
ccgaggtggccgtcgggtctgaaaagagcggcgggagccgagcgtttcctccccggctgcccgggaggcgcggcgggcgggcctgccggggggcccggctgcggagggctccctggcgcccggatcccgccacaaagggcttcgccgacccgcagcggcgcgtgtggccaccgggagcatcccctggggccgcaggagccgagggcgatgcccctcctaaccccacagacccaagaggacggcgactacagcctggtggccagccttgacaacgtcaggcatctctccactatcctgaaggctattcatttccgagatcatgcgacgtgtttcgccactaaaaacggaatcaaggttacggtggaaaatgcaaagtgtgtgcaagcaaatgcttttattcaggctggaatatttcaagagtttatagttcaagaagagtcttgttactttttcgaataaattaactatccttttaaactggttatctatttttggatcaagtcctatgncaagggactttaactggacnttngatgtgttaccaaggtattgggtaccctttgatgctntttttaaaaaaagaggaatggngaaaagtttgaaaatnaanactaagaacccgaggagactttgntttttatttttca

SEQ ID NO: 5482 - DNA, 502 bp, Canis familiaris
  misc_feature (274)..(274): n comprises a, c, g, or t, or includes no nucleotide
  misc_feature (418)..(418): n comprises a, c, g, or t, or includes no nucleotide
  misc_feature (430)..(430): n comprises a, c, g, or t, or includes no nucleotide
  misc_feature (449)..(449): n comprises a, c, g, or t, or includes no nucleotide
  misc_feature (498)..(498): n comprises a, c, g, or t, or includes no nucleotide
ccttttcctcagctaccaccggaacccactacctgagtacctgtcccgtggtctcatggtctcgctgtccacggatgatcccctgcagttccacttcaccaaggaaccactgatggaggagtatagcattgccacccaggtgtggaagctcagctcctgcgacatgtgtgagctggcacgcaacagtgtgctcatgagcggcttctcccacaaggtgaagagccactggctgggacccaactataccaaggagggccccgagggcaatgacatncgccgtaccaacgtgccggacatccgtgtgggctaccgctacgagactctgtgccaggagctggcgctcatacacaggctgtccagagtgagatgctggagaccatcccaaaggaggccggggtcaccaccagcccggggcctnagtgaggccggnccaccgtgtccccttgctnttggaccttgaccacgttttaagcttcgggccctccaaccttttggggntgga

SEQ ID NO: 5483 - DNA, 665 bp, Canis familiaris
  misc_feature (479)..(479): n comprises a, c, g, or t, or includes no nucleotide
  misc_feature (504)..(504): n comprises a, c, g, or t, or includes no nucleotide
  misc_feature (518)..(518): n comprises a, c, g, or t, or includes no nucleotide
  misc_feature (551)..(551): n comprises a, c, g, or t, or includes no nucleotide
  misc_feature (554)..(554): n comprises a, c, g, or t, or includes no nucleotide
  misc_feature (580)..(580): n comprises a, c, g, or t, or includes no nucleotide
  misc_feature (612)..(612): n comprises a, c, g, or t, or includes no nucleotide
  misc_feature (617)..(617): n comprises a, c, g, or t, or includes no nucleotide
  misc_feature (626)..(626): n comprises a, c, g, or t, or includes no nucleotide
  misc_feature (642)..(642): n comprises a, c, g, or t, or includes no nucleotide
  misc_feature (652)..(652): n comprises a, c, g, or t, or includes no nucleotide
gagcctgggacacctgacattcaggggctcgacagagctggtgcctcccaggccctggccccagctggagccctaggatgcccctcacacagaccagtagtgacagcccagttgcttcatggacctcaaaatggctccaaccacagcagtggttagcaaatagcacgttccagtgctcagtgattctgaactaaaggaggcaccatttcagatgatgtcaccattctaagaaaacgcctcattctgcagttccttaacaaatatttctgagtaagtcccaaaaaccaagcactgctctgggtgccaggaatgagcagtggtcaagagagaccatggttgagacgcagtatttgagacctgaaagtagatgagtgggactaaaaaccacagcagaatcgacatgctgtaaacacatggttgtctcgggaggcctctgaagatggggaggagggtttggtcttactagctttctcatctgnggcttagagggaaaccaaaccaacnccccggaggttttnaataaatttaatggattaaatttttctggaatnttncattaaaaattaacttccctttaaanattgggcagtggtaactttttgcccaccgccnggccnaaaagggtnaaaggaaaaagctggncattaactgnttgtttgctggaa

SEQ ID NO: 5484 - DNA, 535 bp, Canis familiaris
gccactgctaggggctgcatcaccatcataggtggtggagacactgccacttgctgtgccaaatggaacacagaggataaagtcagccatgtgagcactgggggtggtgcgagtttagaactcttggaaggtaaagtccttcctggggtggatgctctcagcagtgtttagtactttcctgccttttggttcctgtgcacagtccctaagtcaacctagcacttgctgcatctctccttggcattagctaaaatcttccctcacgtcaagattcaactagtggccaagagatgcagtaccaggaacccttaaacaggcgcacagcatctcaagttcctctttactgcaccctggatttgcctacattcttcaggatcccatttgaatttcttagtgactaaaccattgtgcattctagagtgcatatatttatattttgcctgttagaagaaaatgaactgtgttggcttttctttttgaagaacttattctgatatagctgggcaatggttactactcagatgggaaaaaaaag

SEQ ID NO: 5485 - DNA, 667 bp, Canis familiaris
  misc_feature (374)..(374): n comprises a, c, g, or t, or includes no nucleotide
  misc_feature (402)..(402): n comprises a, c, g, or t, or includes no nucleotide
  misc_feature (410)..(410): n comprises a, c, g, or t, or includes no nucleotide
  misc_feature (449)..(449): n comprises a, c, g, or t, or includes no nucleotide
  misc_feature (463)..(463): n comprises a, c, g, or t, or includes no nucleotide
  misc_feature (472)..(472): n comprises a, c, g, or t, or includes no nucleotide
  misc_feature (491)..(491): n comprises a, c, g, or t, or includes no nucleotide
  misc_feature (497)..(497): n comprises a, c, g, or t, or includes no nucleotide
  misc_feature (504)..(504): n comprises a, c, g, or t, or includes no nucleotide
  misc_feature (545)..(545): n comprises a, c, g, or t, or includes no nucleotide
  misc_feature (550)..(550): n comprises a, c, g, or t, or includes no nucleotide
  misc_feature (552)..(552): n comprises a, c, g, or t, or includes no nucleotide
  misc_feature (579)..(579): n comprises a, c, g, or t, or includes no nucleotide
  misc_feature (593)..(593): n comprises a, c, g, or t, or includes no nucleotide
  misc_feature (596)..(596): n comprises a, c, g, or t, or includes no nucleotide
  misc_feature (605)..(605): n comprises a, c, g, or t, or includes no nucleotide
  misc_feature (624)..(624): n comprises a, c, g, or t, or includes no nucleotide
  misc_feature (630)..(630): n comprises a, c, g, or t, or includes no nucleotide
  misc_feature (640)..(640): n comprises a, c, g, or t, or includes no nucleotide
  misc_feature (657)..(657): n comprises a, c, g, or t, or includes no nucleotide
  misc_feature (665)..(665): n comprises a, c, g, or t, or includes no nucleotide
acggcatcccacctgtcccagcaggcagatttgaggagcatcgtggaggagattgaggatcttgttgctcgcctcgatgaactgggaggtgtgtatctccagtttgaagaaggactggaaataacagcattatttgtggctgccacctacaagctcatggaccacgtggggactgagccatccattaaggaggatcaggtcatccaactaatgaatgcaatcttcagcaagaagaactttgaatcactctcagaagccttcagtgtggcctcaagctgcagctgcgctctctcaaaatcgctatcatgtgccagttgtagttgtgcctgaagggactccttccgacactcatgaacaggctatccttcggctgnaaggtcaccaatgttctatctcagcctntgactcangccactgttaaactagaacatgcttaaatctgttgcttncaaaagccactgtncttcaaaanacgttttttaccccttgangggatngttttgnactaaactttatgaaaggcaaaatttccaggggtttttttnacttntnttgcaaaaggggaaggggacaaccgtncaattgcaaaaggntanagcttaaangtaaaaattccctgaagtnggatcnaaaggtgacnttccttgggaaaggganaaaattgncc

SEQ ID NO: 5486 - DNA, 661 bp, Canis familiaris
  misc_feature (496)..(496): n comprises a, c, g, or t, or includes no nucleotide
  misc_feature (509)..(509): n comprises a, c, g, or t, or includes no nucleotide
  misc_feature (524)..(524): n comprises a, c, g, or t, or includes no nucleotide
  misc_feature (561)..(561): n comprises a, c, g, or t, or includes no nucleotide
  misc_feature (571)..(571): n comprises a, c, g, or t, or includes no nucleotide
  misc_feature (583)..(583): n comprises a, c, g, or t, or includes no nucleotide
  misc_feature (592)..(592): n comprises a, c, g, or t, or includes no nucleotide
  misc_feature (614)..(614): n comprises a, c, g, or t, or includes no nucleotide
  misc_feature (625)..(625): n comprises a, c, g, or t, or includes no nucleotide
  misc_feature (630)..(630): n comprises a, c, g, or t, or includes no nucleotide
  misc_feature (650)..(650): n comprises a, c, g, or t, or includes no nucleotide
cctctcaagtccgagtttgtgatccttcgagatgagaaatggggtggaaacaaaacctataccgtttacttggacctagaaaaggactttgctgatgaggttgtacaccctggagacctcaagaattctgtcgaagtcgccctgaacaagttgttggatcctatccgggaaaagtttaatactcctgcactgaagaaactgccagtgctgcctacccagatccctcgaagcagagtaaggccagccagggagcggggaagggccaacgggtgcatgacatcagacagagagcctgtcagtgggcttcagggaaaggtcggtctcaaactgagagccctagaagccagggggtctgaagtgcaaggatatcctaccccattaactcctggaatggaacttgagtcatcttgatctaggtctgggcgatactgtgaagtgattacatcctgttgtatgaaagtcttctggtgtgagatcatactatgatgctttactnaatgttctttggntagagaccactgggntagaccatgaggtaccaactggtcaggcaaacttggncagttcttanggaagttatttnaagtttggntaaacctttccaatcttttgangggtttattgncctcnctatcatgaggtggaattanatgggggtttg

SEQ ID NO: 5487 - DNA, 428 bp, Canis familiaris
  misc_feature (370)..(370): n comprises a, c, g, or t, or includes no nucleotide
  misc_feature (422)..(422): n comprises a, c, g, or t, or includes no nucleotide
cccctcctctcattaaagaccaacacaaattagcatttcagacatacagatcattcttcattcctgtctaaagagcagactttatctcacaagttctcaaactttaagttgccatagaattacttatagagcgctttaaaaatgcagattctcaggtctccaaacctgctggatcataatcttttcaggtggtgctgggaatttgcatttaatatgtgctccagatgatctgaacatgggtcaatcactagtcacactttgcgaaccattgccttatctgttcttgaaggaaaaaacaccattagatcattctttcctatggacaaataaccttaggattgattccattgctcttgcctcccttagtggnctcggttacaggataattatgtatgtatgtatcttctttcccactagactgngagctc

SEQ ID NO: 5488 - DNA, 424 bp, Canis familiaris
  misc_feature (241)..(241): n comprises a, c, g, or t, or includes no nucleotide
  misc_feature (266)..(266): n comprises a, c, g, or t, or includes no nucleotide
  misc_feature (269)..(269): n comprises a, c, g, or t, or includes no nucleotide
  misc_feature (294)..(294): n comprises a, c, g, or t, or includes no nucleotide
  misc_feature (331)..(331): n comprises a, c, g, or t, or includes no nucleotide
  misc_feature (408)..(408): n comprises a, c, g, or t, or includes no nucleotide
tcgccgtggcaactccgagcggcaatgacgccctgactcctccaggagtgcccacctcaggagtgcccaccggctcacccagcccaggctcagatctcctaccttcggcagagccggctcctggagcagcacccccgccgccaccaccaccaccaccaccgccccactttccagctcctcctcccagcaggaagccccgccttcagcacccccactggcctcacccatccctggcagcttngatcccccgcccccgcccccaccgntgncgggaggcttgcgccccacccccgncgcaccgtgcttccggtgcagatggaccaagtgcctncgcgctcaccgcttcaggaggtccctctgatgctcctggagggtcggcccaaagatgggccgggagtaaaggccaanaaacaatacagacaag

SEQ ID NO: 5489 - DNA, 308 bp, Canis familiaris
gctttccgggcctcgggaggggggatgcacatcacatcctgtctggaattcaggggaaacaccaggacaacccctgaaacgaggccggtgaaaaggagattggcctgctgggcaacctccagacacctgacctcattggaggtgtccagggcatcttgttcctcacctgccacggagagaagaccacattaagaacagctcagaggaatgcttgtgccacagttttcctagttttaaggatttaaaaaccactttcatcatccatactccccagccggttcactgcaagttcccctgcttgcacacct

SEQ ID NO: 5490 - DNA, 522 bp, Canis familiaris
  misc_feature (464)..(465): n comprises a, c, g, or t, or includes no nucleotide
  misc_feature (482)..(482): n comprises a, c, g, or t, or includes no nucleotide
  misc_feature (500)..(500): n comprises a, c, g, or t, or includes no nucleotide
  misc_feature (516)..(516): n comprises a, c, g, or t, or includes no nucleotide
ctgacgggaggatggaagggctggtggctcagtgctccgcgaggctgttgcagcaggaaaaagagattaagtctctgactgctgaaatagatcggttaaaaaactgtggttgtttagaagattctccagatttggagcagttgcgagaagaaaatttaaaattaaagtatcgactaaaaatccttcgaaagagtcttcaagcagaaagaaccagaccaactaaaaatatgattaacatcaatagccgactacaagaagtctttggttgtgccattaaggctgcatatccagatttggaaaatcctcctctcatagtgacaccaagtcaacagcccaagtttggggactaccagtgtaatagtgctatgggtatctctcagatgctcaaaaccaaggaacagaaagttaatccaagagaaattgctgaaaacattaccaaacaccttccaacaatgaatgtgttnnaagagttgaaatgccgncctggtttattatgtccnctaagaaaggcttttntacaac

SEQ ID NO: 5491 - DNA, 521 bp, Canis familiaris
  misc_feature (424)..(424): n comprises a, c, g, or t, or includes no nucleotide
  misc_feature (493)..(493): n comprises a, c, g, or t, or includes no nucleotide
  misc_feature (516)..(516): n comprises a, c, g, or t, or includes no nucleotide
aaaggattcatttctgtaaattttttcttccctaaccaaaatttaaattgttaaaatctacttatctcattgcctttcaactagaatgcttggataacttttctttatgcatgctatcttctaaaggcaatattttagacataaatattctcaattctgtatttatcaactggagttgccccacctcaagacatttgacaatgcctggagacatttttggttgtcacaactctggaaggaatactactggcatctagtgaacagaggccaggggtgctgctaagcatcctccgacacacaagacagcccccctcaacaaagaattaattgtccaacacaaaatgtcaataatgttgaggttgagaaaccatcacaaagtctgtttggatattgatttataactctgaatacaaactcataaaangcttctcataaaaacctctacaacctggtcctcacttggtatattatacaaggacacactttccttttntttgtggcagatgggggcaattnttagg

SEQ ID NO: 5492 - DNA, 402 bp, Canis familiaris
  misc_feature (311)..(311): n comprises a, c, g, or t, or includes no nucleotide
  misc_feature (378)..(378): n comprises a, c, g, or t, or includes no nucleotide
actctccccaaaataaataaatcttttaaaaaataaaataagagcacctaggtggctcagttaagtgtctgcctccggctcaagtcatggtcctggaatcctgggatcgagccccacatggggctccctgctcagcagggagtctgctgctccctcccctctgctcattcgtgttctcgctctctcaaataaataaataaaattttaaaataataataaaaatttaaaataaaacagcaacaccctacttctctgtatcctttccagctggatttttctccatagtacttattaccacctaaaatatgttngttttctctctcctgtccccactttttttttaaagattatttatttattcatgagagaccaacaganagaaagagagggcaggagacacag

SEQ ID NO: 5493 - DNA, 307 bp, Canis familiaris
cagagatgagtaaatagtgatagacctagaagtagaaagttatttggggataaagggcagcatggagttgggggtgatgattagctcagtatggtggcaggccattagaggatataaagaagggatccctgggtggcgcagcggtttggcgcctgcctttggcccagggcgcgatcctggagacccgggatcgaatcccacatcgggcttctggtgcatggagcctgcttctccctctgcctgtgtctctgcctctctctctttctctctctgtgactatcataaataaataaacatttaaaaaaaa

SEQ ID NO: 5494 - DNA, 501 bp, Canis familiaris
  misc_feature (370)..(370): n comprises a, c, g, or t, or includes no nucleotide
  misc_feature (396)..(396): n comprises a, c, g, or t, or includes no nucleotide
  misc_feature (413)..(413): n comprises a, c, g, or t, or includes no nucleotide
  misc_feature (426)..(426): n comprises a, c, g, or t, or includes no nucleotide
  misc_feature (477)..(477): n comprises a, c, g, or t, or includes no nucleotide
cactgaatctacatttcacaattaaattctttttatgtattaacagatatctttccattaatttttttagattttacttaataatatgagagctttgtacagtggcattatcgtagccaatgaggttcatccgaggtgcaattattgctaattgaaaacttattcatctgagggagaaagcatgagccacggtgagggtcacagagagagaaaggagaagcactctcctggcagtcatggagcctgatgtggggcttgactgggggcttcatctgccaccctgagatccatggcctgagccaaagtcagctgcttaaccaactgagccatctaggtgcttcatatctttccatttatttctatctttagnttcttttttttttttttttctttagnttcttttatcaaactgntgtactttgcagngaactgattcacttccttgactaaatttattaaggatttttttaatttaanggttttaaatttatttatttatga

SEQ ID NO: 5495 - DNA, 582 bp, Canis familiaris
  misc_feature (332)..(332): n comprises a, c, g, or t, or includes no nucleotide
  misc_feature (409)..(409): n comprises a, c, g, or t, or includes no nucleotide
  misc_feature (508)..(508): n comprises a, c, g, or t, or includes no nucleotide
  misc_feature (513)..(513): n comprises a, c, g, or t, or includes no nucleotide
  misc_feature (515)..(515): n comprises a, c, g, or t, or includes no nucleotide
  misc_feature (544)..(544): n comprises a, c, g, or t, or includes no nucleotide
  misc_feature (556)..(556): n comprises a, c, g, or t, or includes no nucleotide
agtgtcagatgtacctggcgcacgagcgggcgccccgcagcgcccaccgcttcatcactgagaaggctgtgttctcccgctgggccaagaagaggcctattgtgtttgcccacccatcatggaggacccagtagccccgtcacccagccagccgcagcgccttccccaggcctctgttccacactccaccaaaaacatttaatttatggatcctgtctcctgccacatgcctactggacctaaggtccctttgtgccctaccctggggacacttggagccatcctaggacttgagggggagaagaggctgtggcgaccttggcgccctcctnaccccactccctgagtcatccaaatcttcatcccttctctgggtctgtcaagtggcctttgccctggggccgatggnccccactaacaacattacaatttttgatcttgcaaaagccttggtcttcttaaaactccccttttatttgctttggggcccactttccaagccggtgcnttgtnanggaaatttgaactttggggttttttgggnaaaggggctttnaattggactgtaaggccattttttga

SEQ ID NO: 5496 - DNA, 515 bp, Canis familiaris
  misc_feature (402)..(402): n comprises a, c, g, or t, or includes no nucleotide
  misc_feature (472)..(472): n comprises a, c, g, or t, or includes no nucleotide
  misc_feature (489)..(489): n comprises a, c, g, or t, or includes no nucleotide
  misc_feature (501)..(501): n comprises a, c, g, or t, or includes no nucleotide
  misc_feature (506)..(506): n comprises a, c, g, or t, or includes no nucleotide
agtctctccacctacacccctgtgcgcccctgccacactgatgactcaagatgaggctggcaaacgttactagaaacatccctggctcaggcactctctctctcaggaggcacagccaggccacatgctcgtgttgtgccagtgagccagccacggagcaaaaaacggtttgtttttaacctcctctgtctggatcacaacatgagagtatgctagatgccccctgcttgctcagtaagcctgcccagccctagtccgtgctcccagcggacagtgcaatgcttgtagaagtaggagggagcctagtcttcactgggaagcacaagaagcaaaggaaagtcccaaagtgcctcatgcaaaaggaggccctgttccctggagccagggtgtattacgaagccnagacttgggatctgagatgccttgaacttttgttgaaaagattttttgtttgggaaactaaccaacattncccacccccaaccttanggcaaatggtantgttnaaaaaggtt

SEQ ID NO: 5497 - DNA, 635 bp, Canis familiaris
  misc_feature (456)..(456): n comprises a, c, g, or t, or includes no nucleotide
  misc_feature (488)..(488): n comprises a, c, g, or t, or includes no nucleotide
  misc_feature (536)..(536): n comprises a, c, g, or t, or includes no nucleotide
  misc_feature (559)..(559): n comprises a, c, g, or t, or includes no nucleotide
  misc_feature (563)..(563): n comprises a, c, g, or t, or includes no nucleotide
  misc_feature (565)..(565): n comprises a, c, g, or t, or includes no nucleotide
  misc_feature (592)..(592): n comprises a, c, g, or t, or includes no nucleotide
  misc_feature (603)..(603): n comprises a, c, g, or t, or includes no nucleotide
gctgcctgcctgccactgagggttcccagcaccatgagggcctggatcttctttctcctttgcctggccgggagggccttggcagcccctcaacaggaagccctgcctgatgagacagaggtggtagaggaaaccgtggctgaggtggcagagggacctgtgggagccaaccccgtgcaggtggaagtaggagaatttgatgaaggtgctgaggaaactgaagaggaggtggtggctgaaaacccctgccagaaccaccactgcaaacatggcaaagtgtgtgagctggatgagaacaatactcccatgtgtgtgtgccaggaccctaccagctgccctggtcccattggcgactttgagaaggtatgcagcaacgacaacaagacctttgactcttcctgccacttctttgccaccaagtgcaccctggaaggcaccaagaaaggccacaaactncacctggactacattgggccttgcaatacatncccttttgctggacttcgaactgactgaattccttttggcatgcgganttggttaaaaacgtctggtaatntttncnaaaggataggacaacaccttttaccanaacaaaacttnaatgaaaaaatcacaaaacaaaacctgggggt

SEQ ID NO: 5498 - DNA, 609 bp, Canis familiaris
  misc_feature (426)..(426): n comprises a, c, g, or t, or includes no nucleotide
  misc_feature (480)..(480): n comprises a, c, g, or t, or includes no nucleotide
  misc_feature (499)..(499): n comprises a, c, g, or t, or includes no nucleotide
  misc_feature (501)..(501): n comprises a, c, g, or t, or includes no nucleotide
  misc_feature (537)..(537): n comprises a, c, g, or t, or includes no nucleotide
  misc_feature (549)..(549): n comprises a, c, g, or t, or includes no nucleotide
  misc_feature (559)..(559): n comprises a, c, g, or t, or includes no nucleotide
  misc_feature (562)..(562): n comprises a, c, g, or t, or includes no nucleotide
  misc_feature (582)..(582): n comprises a, c, g, or t, or includes no nucleotide
  misc_feature (594)..(594): n comprises a, c, g, or t, or includes no nucleotide
  misc_feature (600)..(600): n comprises a, c, g, or t, or includes no nucleotide
aaaaaggaatattctctggacacgagaggaaaattcattcttagtattgcatatagccctgatgggaagtatctggccagtggagccatagatgggatcatcaatatttttgatattgcaactggaaaacttctgcacacgctggaaggccatgctatgcctatccgttccctgacattctccccggattctcagctcctggtcactgcatcagatgatggctacatcaagatctatgatgtacaacatgccaatttggctggcacgctgagtggccatgcatcatgggtgctgaatgttgcattttgtcctgacgacacccactttgtgtccagttcatctgataaaagtgtgaaagtttgggatgttggaacaagaacctgtgttcacaccttcttcgatcaccaagatcaggtctggggagtnaaatacaatggaaatggctcaaaaattgtgtccgtgggcgatgaccaggaaatncacctctattaatgcccgntnaacaccaacttcaaggctgggggcaggtatgaattncgaccttttacntttaaaaaanaanaggttttggaacaaaacttnaaattggaaatnggtttngtcatcctt

SEQ ID NO: 5499 - DNA, 610 bp, Canis familiaris
  misc_feature (460)..(460): n comprises a, c, g, or t, or includes no nucleotide
  misc_feature (473)..(473): n comprises a, c, g, or t, or includes no nucleotide
  misc_feature (504)..(504): n comprises a, c, g, or t, or includes no nucleotide
  misc_feature (517)..(517): n comprises a, c, g, or t, or includes no nucleotide
  misc_feature (540)..(540): n comprises a, c, g, or t, or includes no nucleotide
  misc_feature (583)..(583): n comprises a, c, g, or t, or includes no nucleotide
  misc_feature (600)..(600): n comprises a, c, g, or t, or includes no nucleotide
  misc_feature (604)..(604): n comprises a, c, g, or t, or includes no nucleotide
tgtcccatgacctttgtcgccaaagggcgccgcaaagcagaggctgagaataaggcggcagccctggcctgcaagaaattgaagagcctgggcctggtggaccgcaacaacgagccgcttacccatgccatgtataacctggcctccttgcgtgagctgggtgagacccagcgccggccgtgtaccatccaggtgcctgagcccatcctccgaaagatagaaaccttcctgaaccattaccctgtggacagttcatggatctccccagagctccggctgcagagtgatgacatcttgcccttgggcaaggactcggggcccctgagtgaccctattacaggcaagccctacgtgcctctgtcagaagcagaggaagtacgtctgagccagaacttgctggagctgtggcggcggcgagggccagtctggcaggaggttcccagctcctgtggaccacatngggacaacatctnaatggcatcgacagaaccggtggtggtaatntttggggacaccngcttggggaaagacaaacgcatncccagttattgttggaccgtttttgagcaaggcctggcgcccnttcaatgtaattattantaancccgcc

SEQ ID NO: 5500 - DNA, 541 bp, Canis familiaris
  misc_feature (512)..(512): n comprises a, c, g, or t, or includes no nucleotide
gatttgtttccttcaagtttcaggactaggctccaggggaatgtatttgcttgaaatatgacctttgagtcaaagggggcattgctaggggatcattcaattttataggcatctaattttcttcctgggaatcattagacctttattatttttttttcattagacctttaaaatgaatactcactcttgtaagccagtaggattttgtttctgcccccaacgtgtgccttggagcatagctttcaagctggtgctctggtttggagctccaagcatcctaacacccctacttctgagtcataatagcagaaagggatccacaaatcatatagaaacattaatagagaaaatgatgcagtagagtcaagggaagaactggattctgctgacagttggaatgtgatgaagattctgtgaagcagagagaatgcagaaaggatgtcatgtagataataattctcctatccaagtggtaggaattttctctactttaattgacatccctataattntaaagaaatcccagcacttttgatgggaa

SEQ ID NO: 5501 - DNA, 488 bp, Canis familiaris
  misc_feature (429)..(429): n comprises a, c, g, or t, or includes no nucleotide
  misc_feature (447)..(447): n comprises a, c, g, or t, or includes no nucleotide
  misc_feature (449)..(449): n comprises a, c, g, or t, or includes no nucleotide
  misc_feature (481)..(481): n comprises a, c, g, or t, or includes no nucleotide
ataacaaaaataattaaacatccagtaaatggatgaaggaagtatttgaaatttgtaacctggctctgggtacttttctaggaaggccatacacttaccggaagttatttgagttttgtgatgcatcattgacttgggagagggtgaaggagaccacacttttctctgacatcttccatggtagtcattttcagcacactggctctgctagttggtatggtggaagggcaccatactaacagactcggaggctgactcctaatcccatcaccaacacttagcaggtatatgatcatgggcaattcattcaattgcctgacaattatagactacatagggggaagagcactggatttggagtcaagaaacctggacacttggcttcacactttcttagctgggtgactttggggcaagccacttagtctntcaagcctaaaaatcttnanctatattataaatgggaataatatttttaatnactacct

SEQ ID NO: 5502 - DNA, 616 bp, Canis familiaris
  misc_feature (518)..(518): n comprises a, c, g, or t, or includes no nucleotide
  misc_feature (533)..(533): n comprises a, c, g, or t, or includes no nucleotide
  misc_feature (542)..(542): n comprises a, c, g, or t, or includes no nucleotide
  misc_feature (581)..(581): n comprises a, c, g, or t, or includes no nucleotide
  misc_feature (586)..(586): n comprises a, c, g, or t, or includes no nucleotide
  misc_feature (608)..(608): n comprises a, c, g, or t, or includes no nucleotide
caaagagattagaaatattcgaataacatatatattggcattaaactatctgattattagaggtctgattccaaataggacaaaatattcttcttagggcaagaagccaggcaacttacttactggtttaaattcaataaagagcagaaaaattctaaaatcgaatagcaaattcaaacactaaaattaatcctggtgaggccctttgttgcagcatgttgctactatccccacgtgtcatgaacgtttgacaaattgccttagtgacagtaggagctcaaaaaaagagccttatcagacaatataagcctgatataacttctcattataagccctatagaatgtgcaaatgcagaatatcttatacctgaaagtaattttgcctttcttaatatgtttatggcaccaaaattattaggaagatgtgactactatctggaaagtgtaatgaactaaactcactttctttaccccaattttgtgtgtttgcattggtagggtaatactttatagatcanccccaaatacaagtnactttttgnaattcatagttctttgaaaacataaaaaacatttaattnaatgntcaaaacctggggccctcactnttcaatga

SEQ ID NO: 5503 - DNA, 481 bp, Canis familiaris
tgctttagatgggcaagattttgagaaagaagatcggaaagctttataatttctcttaaataataacaaaaacactccagccgcatactcaaatgttttagtctggaatctgatccctagctctgcccagcttctttacacaggtcaaaagaggaaacagcagctgaggaaatgccaggcccaggtgagggcccagcggaggggacgtcagcctgctgggttctcattccttccgttgtatgtaagtcataggtgagttgactctttatccaagagagtgaggtagacagagagacacatagaaagcatgtggtgagcgcttgagaagccaacccgtccccggaacattctggaatcctaccacagagggctgcttacctcccttgccattggccgtagagactgagtctagctgagtagaatggtccaaccacagctgtcaaggggccagtcagcacacacagattacggttgctatgtg

SEQ ID NO: 5504 - DNA, 493 bp, Canis familiaris
  misc_feature (462)..(462): n comprises a, c, g, or t, or includes no nucleotide
  misc_feature (475)..(475): n comprises a, c, g, or t, or includes no nucleotide
gtttgacaacctgactgtcgcagaacacctgtatttctacgcacagttgaagggcttgtcccaccacaagtgtcctgaagaagtccagcggatgctgcacgtcctcgggctggaggacaagcgagacgccctgagcaagttcctgagtgggggcacgaagcgcaagctctccatcggcatcgccctcatagcaggctccaaggtgctgatgttggacgagcccacctcgggcatggacgccatctccaggagggccatctgggacctcctgcagcagcacaagagcgaccgcaccgtgctgctgaccacgcacttcatggacgaggccgacctgctgggggaccgcgtggccatcatggccaagggggagctgcaatgctgcgggtcctcgctgttcctcaagcagaagtatggtgcgggctaccacatgacgctggtgaaagagcctcactgtgacccgangctgtcacccggntggtgcaagaacacgttc

SEQ ID NO: 5505 - DNA, 631 bp, Canis familiaris
  misc_feature (348)..(348): n comprises a, c, g, or t, or includes no nucleotide
  misc_feature (483)..(483): n comprises a, c, g, or t, or includes no nucleotide
  misc_feature (536)..(536): n comprises a, c, g, or t, or includes no nucleotide
  misc_feature (558)..(558): n comprises a, c, g, or t, or includes no nucleotide
  misc_feature (577)..(577): n comprises a, c, g, or t, or includes no nucleotide
  misc_feature (585)..(585): n comprises a, c, g, or t, or includes no nucleotide
  misc_feature (602)..(602): n comprises a, c, g, or t, or includes no nucleotide
tttcctgctgagtcagcaagcagacctccctgagcaggagctcaactctgcaagggagcaggcctctctcctgatccgacaggcactcaccatgttccctggagtcctcctacctttgcttgagtactgcagcgtgcggccagatgccgctgtcgccactcaccgcttctttggaccggatgctgagataagccaaccccctgccctgagccagctggtgagcctgtacctcggaaggtcacacttcctctggaaggagcccgccaccatgagctggctggaggagaacgttcgtgaggttctgcaggcggtggactctggagaccctgcggtggaagcgtgtgagancaaacggaaggtgctctaccagcgtgcgcccagaaatatccaccgccacgtggtcctgtccgaggtcaaggaagctgttgctgcctccccccggatgtgaccacccaatctgtgatgggggtcgacctctgctcnttggaaacatctattctactgagacaaaaaggttgagtcccgtcagccatggnaacaaattgactctttttcggncctgtggctaatacatatnaagggganaggttgaagatgaaggntgggtttaacaaacaaggttgaaggtgtg

SEQ ID NO: 5506 - DNA, 545 bp, Canis familiaris
  misc_feature (497)..(497): n comprises a, c, g, or t, or includes no nucleotide
  misc_feature (501)..(501): n comprises a, c, g, or t, or includes no nucleotide
  misc_feature (514)..(514): n comprises a, c, g, or t, or includes no nucleotide
  misc_feature (525)..(525): n comprises a, c, g, or t, or includes no nucleotide
  misc_feature (538)..(538): n comprises a, c, g, or t, or includes no nucleotide
cgtgccgtcaaatattcacccagtggtcactccatcctgtaagattacagtcccagtacatccttaagggcagatacctcatcttgttagctttggttggtcactctcctactcacggggtgatggtgaatccccaagaagattcttctcttcctccggcagacctgggaaacccctcagagaaggggtctggaagagaagtcaactgaataccatctccatattgattttcagaattgactctaaaactctgtgcagaatcttcactttgttgggattgtatcttgacattcctagtatgttatttttattaaactggagtgtgtgctgcctttcaggtacaacttttgtgtaataagagccagtgcattaagtttatatagactactttctatgcaagactgagatatggaatagataacaagaggtcggatagttgggtaccgtagacaatgagcatgttctcagaatggaagccccatcggatgtgggttganggangataaggtttgtntttgttttccncccctaatttcgnccgccta

SEQ ID NO: 5507 - DNA, 515 bp, Canis familiaris
  misc_feature (487)..(487): n comprises a, c, g, or t, or includes no nucleotide
  misc_feature (501)..(501): n comprises a, c, g, or t, or includes no nucleotide
aagagagcctgaggagctactgggaggataacaagaactccctggtccgctacctcgagcagatacaccggggagttaaaggctttgtgcgcgaccttcaggggaacccgatcgccaacgcaaccatctccgtggaaggaatagaccacgacgtcacatctgcaaaggatggtgattactggcgattgcttgtacctggaaactataagctcacagcctcagctccaggctatctggcaaccacaaagaaagtagcagttccttacagccctgctgttggggttgattttgaactggagtcattttctgaaaggaaagaagaggaaaaggaagaattgatggaatggtggaaaatgatgtcagaaactttaaatttctaaagaagcttctaattagcagcttttaatcaatctatattatatagtatgatgtaacgtggccattttcttttaaaatttgggcaataattaacaatgatttattttgnaatcatttaaatantaatagatcctacc

SEQ ID NO: 5508 - DNA, 502 bp, Canis familiaris
  misc_feature (429)..(429): n comprises a, c, g, or t, or includes no nucleotide
  misc_feature (432)..(432): n comprises a, c, g, or t, or includes no nucleotide
  misc_feature (439)..(439): n comprises a, c, g, or t, or includes no nucleotide
  misc_feature (470)..(470): n comprises a, c, g, or t, or includes no nucleotide
  misc_feature (487)..(487): n comprises a, c, g, or t, or includes no nucleotide
  misc_feature (493)..(493): n comprises a, c, g, or t, or includes no nucleotide
agaggaccgagaagatcttccgccaaatggacacgaacaacgacggcaagctgtccctggaggagttcatccgcggagccaaaagcgacccgtccatcgtgcgtctgctgcagtgcgaccccagcagcgcctcccagttctgagcgagaggacccaggttccccctcctccctgccttcactggccctctcccggctctcagcttcctctcccttgtgtctgtccagcctgggggtcagactgggctcccccagggcctgcattccggggtctatggagaagggaaccccgcggtagccccaatgcccaagcaagcaagcggtcaagcacctcccgtcgaggcagtagctccctgaggccgtggttgagacgcaagctctggctgggtcaagccttctcttaccattcttctggcccccccaaacccgnccntacccgnagcttaaagttcttcccgagccccacccagnttttagtagcttttccntagggnggaggggga

SEQ ID NO: 5509 - DNA, 556 bp, Canis familiaris
  misc_feature (471)..(471): n comprises a, c, g, or t, or includes no nucleotide
  misc_feature (497)..(497): n comprises a, c, g, or t, or includes no nucleotide
  misc_feature (544)..(544): n comprises a, c, g, or t, or includes no nucleotide
actatactgaagaagaggatcgttttctaatctgtatgcttcacaaacttggatttgacaaagaaaatgtttatgatgaattacgacagtgtattcgcaactctcctcagttcagatttgactggtttcttaagtctagaactgcaatggagctccagaggaggtgtaataccttaattaccttgattgaaagagaaaacatggaactagaagaaaaggagaaggcagagaaaaagaagagaggaccaaaaccttcaacacagaaacgtaaaatggatggagcacctgatggtcgaggaagaaaaaagaagctgaaactatgaatacatatttgtttcataatcactaactttaaaccagtagttctttaatttacgggtcttcataagatgtactgtcaatactcaattgttatgtcattcaaagacatcaggttcatctgtttactaagctagaaacatagtatgtagnttcacttttttaaatgcaacagctgngctgaaattttttatcattacacttgagtaataaacagcttcatttnttaaaaaaaaaa

SEQ ID NO: 5510 - DNA, 494 bp, Canis familiaris
  misc_feature (381)..(381): n comprises a, c, g, or t, or includes no nucleotide
  misc_feature (394)..(394): n comprises a, c, g, or t, or includes no nucleotide
  misc_feature (419)..(419): n comprises a, c, g, or t, or includes no nucleotide
  misc_feature (452)..(452): n comprises a, c, g, or t, or includes no nucleotide
  misc_feature (465)..(465): n comprises a, c, g, or t, or includes no nucleotide
  misc_feature (478)..(478): n comprises a, c, g, or t, or includes no nucleotide
  misc_feature (481)..(481): n comprises a, c, g, or t, or includes no nucleotide
aagtgaaattttttctggcataataggattattaagcttattcaccaaatatatattttataaagaacatcactcagaacaatcataaggttactatacttagaaatagtacagggttttgaaagtcagcagttagtaatgattagtgaaacgccgtacagagacaagacaaatgtgtagcatttgagcagtctttcactgggaaggcgggcacctgcatggaaacagattgggttaaaaaagttcttttgcaaagacttactggagttgaggatgcattttttcctttggaataataatatatatggtaatttgattttcaggcaaacccaaaatgtattaagaaatggatatatatttcatggattttttagagggacnctggtattagttnttagcagatctaaatttccagtaanaagctatagcttttcttttccttggtgtacatngtgttagtagggnacccctcttttgngcntgtcaggattaac

SEQ ID NO: 5511 - DNA, 535 bp, Canis familiaris
  misc_feature (476)..(476): n comprises a, c, g, or t, or includes no nucleotide
  misc_feature (493)..(493): n comprises a, c, g, or t, or includes no nucleotide
aatgagaaaagaaaatataatcaatgatcttagcgataagctgaaaagtacaatgcaacagcaagagcgagataaagatttgatagagtcactctctgaagatcgagctcgtttgcttgaggaaaagaaaaaacttgaagaagaagtcagtaagttgcgtagtagcagttttgttccttcagcatacgtagctgcagccccagaactttatggagcttgtgcacctgaactcccaggtgaaacagagagatcagcaatggaaacacaagatgaaggaaaagtggattcagcaatggagacaagtatgatgtctgtacaagaaaatatccatatgctatctgaagaaaaacagagaataatgctgttagaacgaacattacagttgaaagaagaagaaaacaagcgattaaatcaaagactgatgtctcagagcatgtctttccgtatcctcaaggcattcttgaaaaaatagctanttagagattttcaaggngggaaaattgggcctattaatcttaaaaaggccctggaaaat

SEQ ID NO: 5512 - DNA, 639 bp, Canis familiaris
  misc_feature (475)..(475): n comprises a, c, g, or t, or includes no nucleotide
  misc_feature (539)..(539): n comprises a, c, g, or t, or includes no nucleotide
  misc_feature (560)..(560): n comprises a, c, g, or t, or includes no nucleotide
  misc_feature (565)..(565): n comprises a, c, g, or t, or includes no nucleotide
  misc_feature (581)..(581): n comprises a, c, g, or t, or includes no nucleotide
  misc_feature (613)..(613): n comprises a, c, g, or t, or includes no nucleotide
  misc_feature (622)..(622): n comprises a, c, g, or t, or includes no nucleotide
  misc_feature (631)..(631): n comprises a, c, g, or t, or includes no nucleotide
aataagattaacagctgactagtctttagaaacagtaggggtcaggagatagttggatgatatagtcaaagtgctgaactagtaaccaagaattccatatccaccttggaattttaaagacattggcaaacaaaaaacagaattcattgcttttagagccctgtaagaaaacaaggaaaggaaacacttgaggctgaaagcaagtgacttcagataaatccacatgaaaacaaagaacactagtgaaggtaggtaagcagttataaaatatagtactttttctcttaactgatttaaaaagcaattaattacatattttacacactatattgatggcatataacatatataatgtgtaatatatttgccaataatagcacaaagaagatagatgggaagaaagttgggggcttagaaaatggcacaaggtagcaactcaaatccacaagaaccaattaaaaagaacccaaaatgnttaataagaatggtggtataacaaacacttatttttttacaacacttagacatatattttgttnttctttcactttttaaagatntaaanggaattaaaaataatntgattatggtgattggatatataaaagggctnttttttctntgatatatnttcaaaag

SEQ ID NO: 5513 - DNA, 598 bp, Canis familiaris
  misc_feature (440)..(440): n comprises a, c, g, or t, or includes no nucleotide
  misc_feature (462)..(462): n comprises a, c, g, or t, or includes no nucleotide
  misc_feature (495)..(495): n comprises a, c, g, or t, or includes no nucleotide
  misc_feature (502)..(502): n comprises a, c, g, or t, or includes no nucleotide
  misc_feature (515)..(515): n comprises a, c, g, or t, or includes no nucleotide
  misc_feature (525)..(525): n comprises a, c, g, or t, or includes no nucleotide
  misc_feature (549)..(549): n comprises a, c, g, or t, or includes no nucleotide
  misc_feature (575)..(575): n comprises a, c, g, or t, or includes no nucleotide
  misc_feature (581)..(581): n comprises a, c, g, or t, or includes no nucleotide
cctcggtggaaacagataagaagtttattgtgtccttgctactctgccttttggattggtgcatggcattgccagtgaacacccttctccacccagtgtccacggtggccctggaggagcagcatgcatccagagctcctttgctggattatatctatagggtcctgcactgctgtgtttgtggctcaagcacatacacccaacagagtcactatacactgaccctagccgacctgccgtgctgcacagcctagtcagtgaaaaccacgacaacgtacatgcggaggctcccgagctgtcctccgaggtgttccggagcccaaacctacagctctttgtgcttaacgacagcaccctcatctcctaccttcaacaccctccgaagggcctgcggggggcttcccaaggggcacctgtcaaaacgttccaataattgtgcnggatatcttaagggaagtactnttgggatggaagggtttggattggacctttganggcttgnttacacccacagnacaaatcaangtttttgatttgggttggaacctnaactttggaacttaaaaaaatttttnaaatgnggggggaaaaattcttg

SEQ ID NO: 5514 - DNA, 521 bp, Canis familiaris
  misc_feature (52)..(52): n comprises a, c, g, or t, or includes no nucleotide
  misc_feature (119)..(119): n comprises a, c, g, or t, or includes no nucleotide
  misc_feature (133)..(133): n comprises a, c, g, or t, or includes no nucleotide
  misc_feature (170)..(170): n comprises a, c, g, or t, or includes no nucleotide
  misc_feature (206)..(206): n comprises a, c, g, or t, or includes no nucleotide
  misc_feature (209)..(209): n comprises a, c, g, or t, or includes no nucleotide
  misc_feature (232)..(232): n comprises a, c, g, or t, or includes no nucleotide
  misc_feature (265)..(265): n comprises a, c, g, or t, or includes no nucleotide
  misc_feature (318)..(318): n comprises a, c, g, or t, or includes no nucleotide
  misc_feature (328)..(328): n comprises a, c, g, or t, or includes no nucleotide
  misc_feature (341)..(341): n comprises a, c, g, or t, or includes no nucleotide
  misc_feature (372)..(372): n comprises a, c, g, or t, or includes no nucleotide
  misc_feature (404)..(404): n comprises a, c, g, or t, or includes no nucleotide
  misc_feature (410)..(410): n comprises a, c, g, or t, or includes no nucleotide
  misc_feature (455)..(455): n comprises a, c, g, or t, or includes no nucleotide
  misc_feature (473)..(473): n comprises a, c, g, or t, or includes no nucleotide
  misc_feature (497)..(497): n comprises a, c, g, or t, or includes no nucleotide
  misc_feature (511)..(511): n comprises a, c, g, or t, or includes no nucleotide
tgcagtggcaagaagacccagaggcccccctcctgtctcttgaacggccgtnggggctaccggagagggcaaggatggtggaggctttctgtgctacctggaagctgactgacagccanaactttgatgagtncatgaaggctctaggtgtgggctttgccaccaggcangtgggaaatgtgaccaaaccaaccgtgatcatcggncangagggggacaaagtggtgatcanaactcagtgcacgttcaagaacacagagattantttccacctgggagaggagtttgatgaaaccactgcagatgacagaaactgtnagtctgttgntagcctggatggngacaaacttgttcattgtcagaaatgggatngcaaaaaaacaaattttgtaagaaaaattaangatggnaaaatgggtatgactcttactttttggtgatgtggttgctgttcncccgtttgagaagcatanaaaggctcctgatttggggttggnaaaaactctcccgnttttctgtta

SEQ ID NO: 5515 - DNA, 337 bp, Canis familiaris
catctatatggaaatccctgacttaaatagcatctgctcttctattaccctctctgtctggctgtatgtctggtgttctcaatgcttttctagtaactgttggataataactagatctcctgtaattttgtagtagttcatgaccaatctctgtgactcgcttagctcaaacctaaggcaccgtttccgaagaccttctgaagagctccgataaattgaccaggctcacaactgtttctgaggaaaggaaattcacactgtgcgttttagagtatgcaagaagaatataaataaataaataaataaataaatattctccatggagaatttgaacaaa

SEQ ID NO: 5516 - DNA, 322 bp, Canis familiaris
tgtataggtagatccagactgtatgatgttgttttcggggctaaaggggagaaattgaaaagtgttgtactctttttctaaagtgttgaagtctttctaacgtagctactttttcttgttgcatcttttctacttcatgcacccggggtgctgggttaatggctagtactgtattggctctgtgaaaacatgtttgtgaaaagagtatgtagtggcttcttccaaactgttagatgctgaatatctgttcacttttaaatcccaattctgtcccgatcttaccagatgctactgtacttgaatggttaataaaactgcacag

SEQ ID NO: 5517 - DNA, 640 bp, Canis familiaris
  misc_feature (504)..(504): n comprises a, c, g, or t, or includes no nucleotide
  misc_feature (544)..(544): n comprises a, c, g, or t, or includes no nucleotide
  misc_feature (595)..(595): n comprises a, c, g, or t, or includes no nucleotide
  misc_feature (602)..(602): n comprises a, c, g, or t, or includes no nucleotide
  misc_feature (617)..(617): n comprises a, c, g, or t, or includes no nucleotide
tcagtgatgccaggagtgtacttctggaagcaatacgaaaaggtattcagctacgcaaagtagaagagcagcgtgaacaggaagctaaacacgaacgcattgaaaatgatgttgccaccatcctgtctcgccgtattgctgtggaatatagtgattcagaagatgattcagaatttgatgaagtagattggttggagtaagaaaaatgcattgataaatattacaaaactgaatgcagacgtcctttgtggtgcttgttctttgaaaatgtttggtcattccagtgttttgctttcttttccttatggtaaataacccttttcctccataatttttgatttctaagaaaatattagcatacatttcaaactaaatgttttacagtggcttatcttttttattttttccctgaaaagataatttggtcaaataaaccactaagtattaagcatggcaggccgttggtagagtagcaaattcaagtttttgatatatcttaattgngcacttgtgaatttactttaaagaaagcaactgagattgnaatcttgagggcgctgttctattaatgagcctattccttttctgatgtttnaaaaaanaaaactgccttgttnttgaatccctagaaaggcattag

SEQ ID NO: 5518 - DNA, 456 bp, Canis familiaris
gaatctaggggaattaggaatttagaactatagccatggttatgccactgattaattgcatcattgttaataagaaaaatattaagaaaaatgaaattaacccaaatgtccatcaataaggtattagtaaattatatagtaatttaataaattgccacataataaaaattatatgatgtatctatataataaaatactatataaaattattgtagtagatctaaatgtatactcatagaatgatattcaagatattaaaacatggggaaaagttacaaaatactgttttctatttttgttttaaaatatatttatttttacatgtatgaaaaaaattcagaaagcacctgggaagctcagtcagttaagcatctgccttcagctcagttcatgatctcggggtcttgagatcaagacccacattgggctccctgctcagcggggagcctatttctt

SEQ ID NO: 5519 - DNA, 534 bp, Canis familiaris
  misc_feature (459)..(459): n comprises a, c, g, or t, or includes no nucleotide
  misc_feature (463)..(463): n comprises a, c, g, or t, or includes no nucleotide
  misc_feature (498)..(498): n comprises a, c, g, or t, or includes no nucleotide
  misc_feature (512)..(512): n comprises a, c, g, or t, or includes no nucleotide
  misc_feature (516)..(516): n comprises a, c, g, or t, or includes no nucleotide
  misc_feature (528)..(528): n comprises a, c, g, or t, or includes no nucleotide
ataatagtaatattggcaaggcataattggtgaatggcttgagcttataaagcatccttgtgacatgttctgttatgttagactaagatggaaagcaagtactcatgtggtcagaatttgctgtttgtctattggaatagacctaaatggtgaggattaagaaggggacttctactttgttttctaaaaaagaatatattataaataatctgaagctaaaatgctaaaattgctagcattacttaattcagggtggcagatacttgatttacagattactctctgtactttctgaaacttttttctaagcaaaaagcattttaaaaacaagatgattgttattaatctgaacacaagttttcattgataaaaatgggtaaatttaaagaaaacaaattgagtaatacagtcaattatccagtgttggtttattatggccctgttaatctgatcttcaantggngggtctttaattttttccccttaatcaaactgagncattctggggttgnttgnccttgaaagctntaagga

SEQ ID NO: 5520 - DNA, 633 bp, Canis familiaris
  misc_feature (472)..(472): n comprises a, c, g, or t, or includes no nucleotide
  misc_feature (500)..(500): n comprises a, c, g, or t, or includes no nucleotide
  misc_feature (513)..(513): n comprises a, c, g, or t, or includes no nucleotide
  misc_feature (528)..(528): n comprises a, c, g, or t, or includes no nucleotide
  misc_feature (541)..(541): n comprises a, c, g, or t, or includes no nucleotide
  misc_feature (548)..(548): n comprises a, c, g, or t, or includes no nucleotide
  misc_feature (601)..(601): n comprises a, c, g, or t, or includes no nucleotide
  misc_feature (631)..(631): n comprises a, c, g, or t, or includes no nucleotide
ggcatcatttggtttattttatggatctttttagttagtgaaactccagagactcacaagacaatctcccgccaggaaaaagaatatattctttcatcattaaaaaatcagctttcatcacagaagtcagtgccatggatacccatgctaaaatcactgccgctttgggctattgtagtagcacatttttcttacaactggactttttacactttattgacgttattgcctacttacatgaaggagatcctaaggttcaatgttcaagagaatgggcttctatctgcactgccttactttggctgttggttatgtatgatcttgtctggtcaagctgctgacaatttaagggcaaaatggaatttttcaacaatatgtgtccgaagagtttttagcctaataggaatgattggacctgcggtattcctggtagccgctggatttataggttgtgactattcattggccgtgnggtcttaaccatatcacaacactgggangcttttgctcttntggattaacatcaancatctggatatgntccttcnatgctggatcctctgggcatcacaaatcattgcacttttcaggaatggtgggncttcattgttaaagttgaccctgtacactnta

SEQ ID NO: 5521 - DNA, 640 bp, Canis familiaris
  misc_feature (382)..(382): n comprises a, c, g, or t, or includes no nucleotide
  misc_feature (452)..(452): n comprises a, c, g, or t, or includes no nucleotide
  misc_feature (474)..(474): n comprises a, c, g, or t, or includes no nucleotide
  misc_feature (489)..(489): n comprises a, c, g, or t, or includes no nucleotide
  misc_feature (548)..(548): n comprises a, c, g, or t, or includes no nucleotide
  misc_feature (573)..(573): n comprises a, c, g, or t, or includes no nucleotide
  misc_feature (602)..(602): n comprises a, c, g, or t, or includes no nucleotide
  misc_feature (604)..(604): n comprises a, c, g, or t, or includes no nucleotide
  misc_feature (610)..(610): n comprises a, c, g, or t, or includes no nucleotide
atcttcattttatagctatggaaattctcagagaggttaagggtattcattcagtaactgtgttttgagtttatactgtgtgctaggccttgttctaggtactgtggatacagcactggcaaaaacattaaaacaaagcggaacaacaacaaaaatccaccgccaggggtttgatggggagcttgtctgcacagctcctaaaggacagagctggggtttggactttgagagcttgacctcacagcccatgtgctgcaccactgagctgtgcagccgtcccgtttgtttttatgtccatagtttccctcttctcttaccaactcttgggaacttaccatctgtctcttcagcatctcaacacattttctcacctggttcttgnctttccacattcatcatttatatttacctttcatgttcacaatcatggacaggggaagctttcattccgngtctttaggacaagttaccttntggtggttttgaggnatgtcacaccatttttatttttatttccttttttccctttcaccatcttttttaacctnttttcttttgcctttggggccctantccctgaccacctccttctgggccaggtntntgttanacccaaggcaaagaatgttgggaaaaagct

SEQ ID NO: 5522 - DNA, 549 bp, Canis familiaris
  misc_feature (476)..(476): n comprises a, c, g, or t, or includes no nucleotide
  misc_feature (500)..(500): n comprises a, c, g, or t, or includes no nucleotide
  misc_feature (503)..(503): n comprises a, c, g, or t, or includes no nucleotide
  misc_feature (517)..(517): n comprises a, c, g, or t, or includes no nucleotide
  misc_feature (533)..(533): n comprises a, c, g, or t, or includes no nucleotide
gaagagagtgaggatggggaagaggaggatgacatcaccagtgccgagtcggaaagcagcgaggaggaggagggggagcacggggaccagcagaacgtgaacaggcagcaacagctagagtgggatgactccaccctcagctactgagccacgaggccgcccccccacctgcttcctgcttcaggagactctgccgtcacgtgtcctcccgtccccagggtccacggtgtacaaattcattctggccagtaggtctacagaccctccctgtcgccgcccacgcgcctgtgcttggtgtgtaggcccccccaccccgctcctaagttatgtgggaaactgctgctcgctccccacggctcacgctgtgcggccccctcgcgcctctggagaagctgcgatgaccggactcgttggcaaagggttcaaattgctcactcccacctcgtaatcctcttctcctttttttttttttaagntttatttttttccaactatgcatnttntaaaagggcaaatngggggtttaatttttnatgacaaacttgcttt

SEQ ID NO: 5523 - DNA, 632 bp, Canis familiaris
  misc_feature (451)..(451): n comprises a, c, g, or t, or includes no nucleotide
  misc_feature (479)..(479): n comprises a, c, g, or t, or includes no nucleotide
  misc_feature (497)..(497): n comprises a, c, g, or t, or includes no nucleotide
  misc_feature (506)..(506): n comprises a, c, g, or t, or includes no nucleotide
tcttcaggtgtgatagacctttttggggatgcatttggaagtagtgcttctgaaccccaacctgcacctcaggctgcttctagttcatcagcatcggcagacctactagctggatttgggggttcttttatggccccttctccatcaccagtgactccagctcagaataacctgctacagcccaattttgaggcagcttttggaacaacgccttcaacttctagcagcagctcctttgatccatcagtgtttgatggtttaggcgatctactgatgccaaccatggcaccagccgggcagcctgcacccatttcaatggttccacctagtccagcaatggcagcaagcaaagcccttgggagtgaccttgactcatctcttgccagcttaataggcaatcttggaatttctggtaccacatccaaaaagggagatcttcagtggaatgcangagaagaaaaagttgactggtggagccnactggcagccgaaagagnccccgcaanctggtcagcaagtgtccaccaaggcacctttgcaaggagtggacctccaccagttcggttctctgtggcggggcccatttgtggaaagctggacaggattggaagctctgtggacggctgccataa

SEQ ID NO: 5524 - DNA, 470 bp, Canis familiaris
  misc_feature (407)..(407): n comprises a, c, g, or t, or includes no nucleotide
  misc_feature (444)..(444): n comprises a, c, g, or t, or includes no nucleotide
ctagggacagaactaggagccaaaagaaggtagagggggatggtaagaggccagaggaacactgacaaggtcaagcagctcctccaaccttgcaggcagggtcccccctgaaagcactggccaacagaagagcacagcagggcctcgaagccatcccctcagtgtactctgccttatgcatgatgggcttcttgaaatcggcttgaggtgcccacgtgctgcctgccaaacctagaaactatgggccttaggttgaaaaggtggttttgctgaagcctaccaagagcaatgtcaggtagtgctcagccccggtggtgctcagcaaacatgagtgcatcctcccttcgtccccacctgccttccttttctagtccctggcacagagctgcaagatcagaagaccccantgggagaggagaggccaggctcctttgtgcacttctnacacttggccagatctttccattttt

SEQ ID NO: 5525 - DNA, 567 bp, Canis familiaris
  misc_feature (181)..(181): n comprises a, c, g, or t, or includes no nucleotide
  misc_feature (466)..(466): n comprises a, c, g, or t, or includes no nucleotide
  misc_feature (468)..(468): n comprises a, c, g, or t, or includes no nucleotide
  misc_feature (473)..(473): n comprises a, c, g, or t, or includes no nucleotide
  misc_feature (506)..(506): n comprises a, c, g, or t, or includes no nucleotide
  misc_feature (531)..(531): n comprises a, c, g, or t, or includes no nucleotide
  misc_feature (539)..(539): n comprises a, c, g, or t, or includes no nucleotide
ctcccagtaccttgatggaccagaaccatcaattgaggttttccagccatcgaataaggaagggtttgggctgggtcttcagctgaaaaagatcctgggtatgttcacttcccaacaatggaaacatctcagcaacgatttcttgaagacccagcaggaaaaaaggcacagttggttcaanggcaagtggtaccatcaagaagttccgagctggcctcagcatcttctcacccatccccaagtctcccagtttccctatcatacaggactccatgctgaaaggcaaactgggtgtaccagagcttcgagttgggcgcctcatgaaccgttccatctcttgcactatgaagaaccccaaagtggaggtgtttggttccctcccagccccaagtcaagtggtcactgcaagaacatccccactctggaatatggattccttgtccagatcatgaagtatgcagagcanangattncaacattgaatgagtactgggtggtgtgtgacnagaacatgttttcaaaacgggtccntgcttaanccactgctggctcgggagctgggggttt

SEQ ID NO: 5526 - DNA, 595 bp, Canis familiaris
  misc_feature (469)..(469): n comprises a, c, g, or t, or includes no nucleotide
  misc_feature (491)..(491): n comprises a, c, g, or t, or includes no nucleotide
  misc_feature (523)..(523): n comprises a, c, g, or t, or includes no nucleotide
  misc_feature (536)..(536): n comprises a, c, g, or t, or includes no nucleotide
  misc_feature (563)..(563): n comprises a, c, g, or t, or includes no nucleotide
  misc_feature (567)..(567): n comprises a, c, g, or t, or includes no nucleotide
  misc_feature (587)..(587): n comprises a, c, g, or t, or includes no nucleotide
tttgaaaacctgcagaggaggacgtccagtgttggagatttaatggttccaattctctgtacacacaaatcttgctctaagtgacgcagctcgatgcgggcaagtgagccttcctggctcagagcagaaagtgggagccatggtgccttcgaggcttctttcagtaggaccgcggcccttgcttgggagcgtgtggcgctggactcaggtcgggctgctctcggccagctgtgcagactgcgccaagcaccaggagccccctaggaagaaactgctctccgagaaaaaactgaaaaaacattttgtggaccatcgccgagtgctcgtccgagggggccgtggcggcgacggggcgagctgcttccacagtgagccccggaaggagttcggaggccccgacggtggtgacggaggcagcggtggccacgtggtcctgagagctgaccagcaagtcaaagtcgctgtcctnaatgctttcgaggtaccaaggnttccaccgaaaggcttgccgcaggaaaaactngttttgacggacnggacttttctttacttccggtccttgnggcncattattgaaggagggaaanaaattttg

SEQ ID NO: 5527 - DNA, 484 bp, Canis familiaris
cacaatccgccaggtttgcaaaccccttcgcacccctcaaaacactctagagctccagcctcgatttacttttgtcttctaccccacctcattaattggctctgaattagccacctcccctcgtccctcgagtctccgagcttctctcgcctgctaccatcctgagttccgccatccccgaggtggttcaagttggttggcttcccttagttctcttcctgtgccaggccagtagcctttagatcatgcccggaggtgagtaggggactgggtgacgggtagaacagttggataacggtagggtcaggcttccaagaataaggaaatggaacaatcggaccaatctgttcacagctaagcttgcccagagtccagaggaagggagcgtgtgcattaccgaagcccttatcactaagaggaacttggccttccctgaggatgaaggatctgtcggagaagatggtttacactttttgttgaactg

SEQ ID NO: 5528 - DNA, 641 bp, Canis familiaris
  misc_feature (531)..(531): n comprises a, c, g, or t, or includes no nucleotide
  misc_feature (590)..(590): n comprises a, c, g, or t, or includes no nucleotide
  misc_feature (605)..(605): n comprises a, c, g, or t, or includes no nucleotide
ttcagagacaagttattggaactatgactaagacatcagagaagaaaggttgctgggatccttgcctttgtgaaaatgtgctctacacagcccaacttgctgcctggaggagatggagctgctgcttccaaggagtcttgcagaattggataagaggcatattacagggggccattaaagactgaaatcctgaagagctctcatggaatcctttgtaccataagggaagagactcagatcagatttgatttgatatagaaaaaataatgaaccgtttttactgtttctgagtgttgtaactaaataaagttcatatggactccagcaggaagtgaataaataatagagatttcaataatgaattgttcatatacacctaaatcttctattgcacttgcttgagatggagaagagaaaaggcatttcccttttccctgggtgtctgttcctttttgacaagggaagtgaaaagaaatactatagattctttggttgctttaaggaagaacattcttaaccctacaaatggtnttaaagtgcatgcttgtattatccaatggtattataaatgtttaggcaaccccatggcncaccggtttgcgccnctccacctgggggtgacctgggacctgggtccatcc

SEQ ID NO: 5529 - DNA, 628 bp, Canis familiaris
  misc_feature (485)..(485): n comprises a, c, g, or t, or includes no nucleotide
  misc_feature (523)..(523): n comprises a, c, g, or t, or includes no nucleotide
  misc_feature (544)..(545): n comprises a, c, g, or t, or includes no nucleotide
  misc_feature (550)..(550): n comprises a, c, g, or t, or includes no nucleotide
  misc_feature (592)..(592): n comprises a, c, g, or t, or includes no nucleotide
  misc_feature (619)..(619): n comprises a, c, g, or t, or includes no nucleotide
  misc_feature (622)..(622): n comprises a, c, g, or t, or includes no nucleotide
actcatcgcactgtcagataattaacaaaacatctaattacttataattatatgctacatacatactaatatataaaattcaagggcaaatctgcatgatttcacacttcaaaaagagctacattgggacggagcagaaagacttcaagttttttcattcttctcccctcccagcccaccacgcaaaggctacaggagtacaatagttcagaccaaggacagagaagtacaaatttaaatgattaatcttcatttttcaaatgcaaactcccactcaccagtagtctcttcaagaagttctataaacttcaaatccacactcaaccctggatagaaggtcaacttttcaaatggcctcaaaataaggactgcaccaccaatagaacatttgttccttgaaggttctacatgttatgagatacgagaagggtgacacagtcaagggtagcacagatctgctccttaaacaagggtttggttttgtncagttaacttcaaattctttcctaggttctgaatggcnaagaaggcaaacttctacatnnttttnttagctggtacgtgcactaactgagatttttctagatctcangggggcactggaattgggcctggcaanggnaaaaaa

SEQ ID NO: 5530 - DNA, 506 bp, Canis familiaris
  misc_feature (198)..(198): n comprises a, c, g, or t, or includes no nucleotide
  misc_feature (297)..(297): n comprises a, c, g, or t, or includes no nucleotide
  misc_feature (358)..(358): n comprises a, c, g, or t, or includes no nucleotide
  misc_feature (393)..(393): n comprises a, c, g, or t, or includes no nucleotide
  misc_feature (449)..(449): n comprises a, c, g, or t, or includes no nucleotide
  misc_feature (458)..(458): n comprises a, c, g, or t, or includes no nucleotide
  misc_feature (477)..(477): n comprises a, c, g, or t, or includes no nucleotide
  misc_feature (483)..(483): n comprises a, c, g, or t, or includes no nucleotide
aatggtttagcaccaggttccccacgaacgtgcgttgcgtgacgggcgagggggcggccccctttccggccgcgccccgtttcccgggacgaggggctctccgcaccggaccccggtcccgacgcgcggcggggcacgccgcgccacgcggggcgcgcgcggcggcccgccggcggggacggcgggggaccggctatncgaggccaaccgaggctccgcggcgctgccgtatcgttccgcctgggcgggattctgacttagaggcgttcagtcataatcccacagatggtaagcttngccccattggctcctcaagccaagcacatacaccaaatgtctgaacctgcggttcctctcntactgagcaggattaccatggcaacaaccacattnttcagtagggtaaaaactaactgtttaacgacggtctaaaacccagcttacgtttncctattaantggtgaacaatccaacgcnttggtnaaattttgtttaaaattgattgg

SEQ ID NO: 5531 - DNA, 556 bp, Canis familiaris
  misc_feature (448)..(448): n comprises a, c, g, or t, or includes no nucleotide
  misc_feature (466)..(466): n comprises a, c, g, or t, or includes no nucleotide
  misc_feature (487)..(487): n comprises a, c, g, or t, or includes no nucleotide
  misc_feature (494)..(494): n comprises a, c, g, or t, or includes no nucleotide
  misc_feature (519)..(519): n comprises a, c, g, or t, or includes no nucleotide
  misc_feature (521)..(521): n comprises a, c, g, or t, or includes no nucleotide
  misc_feature (540)..(540): n comprises a, c, g, or t, or includes no nucleotide
ggacccggtgtctgctcctgtcgcctgcgcctgctaccccgcagccaccatgcgtgagtgtatctcgatccacgttggccaggcaggtgtccagatcggcaatgcctgctgggagctctattgcctggaacacggcattcagcccgatggccagatgccaagtgacaagaccattgggggaggagatgactccttcaacaccttcttcagtgagacgggcgctggcaagcatgtgcccagggcagtgtttgtagacctggagcccacagtcattgatgaagttcgcactggcacctaccgccagctcttccaccctgagcagctcatcacaggcaaggaagatgctgccaataactatgcccgagggcactacaccattggcaaggagatcattgaccttgtcttggaccgaattcggaaactggctgacaagtgcacgggtcttcanggcttttggttttcacancttttgcgggggaactggttntgggttnacttccttgctgattggaacgtctntntttcgattatgggagaagncaacttgagtttcatt

SEQ ID NO: 5532 - DNA, 366 bp, Canis familiaris
  misc_feature (4)..(4): n comprises a, c, g, or t, or includes no nucleotide
  misc_feature (27)..(27): n comprises a, c, g, or t, or includes no nucleotide
  misc_feature (31)..(31): n comprises a, c, g, or t, or includes no nucleotide
  misc_feature (61)..(61): n comprises a, c, g, or t, or includes no nucleotide
  misc_feature (93)..(93): n comprises a, c, g, or t, or includes no nucleotide
  misc_feature (104)..(104): n comprises a, c, g, or t, or includes no nucleotide
  misc_feature (153)..(153): n comprises a, c, g, or t, or includes no nucleotide
  misc_feature (188)..(188): n comprises a, c, g, or t, or includes no nucleotide
  misc_feature (199)..(199): n comprises a, c, g, or t, or includes no nucleotide
  misc_feature (254)..(254): n comprises a, c, g, or t, or includes no nucleotide
  misc_feature (273)..(273): n comprises a, c, g, or t, or includes no nucleotide
  misc_feature (282)..(282): n comprises a, c, g, or t, or includes no nucleotide
  misc_feature (291)..(291): n comprises a, c, g, or t, or includes no nucleotide
  misc_feature (325)..(325): n comprises a, c, g, or t, or includes no nucleotide
  misc_feature (330)..(330): n comprises a, c, g, or t, or includes no nucleotide
  misc_feature (341)..(341): n comprises a, c, g, or t, or includes no nucleotide
aatnatagggcgggttgaaagagctgntaangtaagtatcagaatgctgtggagacctggnagggttaggtataatgtcatttattgtaattnagttttttgtntgaccctaaccgtaaccttttttgtaatatgtgttaaatcacatatttntctttaattacgtcccaatcttcaggtttacagtntttagcttcgncatgtacatggcccttccgtgtacatggatgggcaggggaggttactaaaagatnctttacacaataaagtatnatgatcatnataaatganggaaggtccttattatcacacaccttaaaacacnggtanatcagaaactncattgtactctctttctgtgttttg

SEQ ID NO: 5533 - DNA, 614 bp, Canis familiaris
  misc_feature (540)..(540): n comprises a, c, g, or t, or includes no nucleotide
  misc_feature (559)..(559): n comprises a, c, g, or t, or includes no nucleotide
  misc_feature (565)..(565): n comprises a, c, g, or t, or includes no nucleotide
  misc_feature (576)..(576): n comprises a, c, g, or t, or includes no nucleotide
acatttgttgacagccctcctttgcttggtagattggactcagagagacaaaaagttagtctacttatgtgcatgctagcatcatgtccttaggtaaaggtctgcctctctggttgccaaatactgatcatgatgctcatgacttagaggttctgaagaaccttgtcccccttggtttcctgagtcaaggttaactaactgccatgcaggcaaaaccctacaaaagcacagttctggtagtaaactgcatagttgtccatagaaagagcactagaggcacaggaatggtcagtgtacagctttggggttgcagaaaggcaactgatgaagcacagatcccacatatgtgaagggagtatgacctctacctaataggctttgtgtgcatattttgagtgactgaagatgagatcaactaatgcaatatacacttgcctcttagaacacacattctgtctaattatcactaaatggaatgctgtggcatggatagtacctgtacccctttctctttgcaaggacagaggaaatgaccatgtncttcggggatcctgagtgncccttnttttacaaaanaggtgaacctattgatcctgtgagggacaaaccattaa

SEQ ID NO: 5534 - DNA, 627 bp, Canis familiaris
  misc_feature (379)..(379): n comprises a, c, g, or t, or includes no nucleotide
  misc_feature (439)..(439): n comprises a, c, g, or t, or includes no nucleotide
  misc_feature (490)..(490): n comprises a, c, g, or t, or includes no nucleotide
  misc_feature (492)..(493): n comprises a, c, g, or t, or includes no nucleotide
  misc_feature (508)..(508): n comprises a, c, g, or t, or includes no nucleotide
  misc_feature (527)..(527): n comprises a, c, g, or t, or includes no nucleotide
  misc_feature (540)..(540): n comprises a, c, g, or t, or includes no nucleotide
  misc_feature (555)..(555): n comprises a, c, g, or t, or includes no nucleotide
  misc_feature (597)..(597): n comprises a, c, g, or t, or includes no nucleotide
  misc_feature (612)..(612): n comprises a, c, g, or t, or includes no nucleotide
  misc_feature (614)..(614): n comprises a, c, g, or t, or includes no nucleotide
ctatgacttcatcggggagttcatgaaggccagcgtggatgtggcggacctgatcggcctcaaccttgtcatgtcccggaacgcaggcaagggggagtacaagatcatggttgctgccctgggctgggccaccgccgagctcattatgtcccgctgcatccctctctgggttggagcccggggcattgagtttgactggaagtacatccagatgagcattgactccaacatcagtctggtccattacatcgtcgcatctgcccaggtctggatgataacacgctacgacctgtaccacacttttcggccagcggtcctcctcctgatgttcctcagcgtctacaaggcctttgtcatggagaccttcgtccacctctgntccctggcagctggacaagcactgctggcccggcaagtggtgacagggcttgttggcctnaacaccctggccttttacgtaagccgtcgtaaacggcactctaaggttggngnnccccaaaaataaaanaccctttccttgctccggnttaaggaaaaaanaattttggaacgttnaaaaaaaaaaaaaagggggggcgttttaaggatcaagttacntcccgggatggaagnanaattttttaaggg

SEQ ID NO: 5535 - DNA, 589 bp, Canis familiaris
  misc_feature (484)..(484): n comprises a, c, g, or t, or includes no nucleotide
  misc_feature (524)..(524): n comprises a, c, g, or t, or includes no nucleotide
  misc_feature (531)..(531): n comprises a, c, g, or t, or includes no nucleotide
  misc_feature (575)..(575): n comprises a, c, g, or t, or includes no nucleotide
  misc_feature (579)..(579): n comprises a, c, g, or t, or includes no nucleotide
aaaggaacgtgttgatctttgatttaggaggtggcacttttgatgtgtccatccttactattgaagatgggatctttgaggtcaagtccacagctggagacactcacttaggtggagaagactttgacaacagaatggtcaaccattttattgcagaattcaagcgcaaacacaagaaggacatcagcgaaaacaagagggctgtccgccgtctccgtactgcatgtgaacgggctaagcgtacactttcttccagcacccaggccagtattgagattgattctctgtatgaaggaatcgacttctatacctctattactcgtgcccggtttgaagaattaaatgctgacctcttccgtggcaccctggaccctgtagagaaagctcttcgagatgccaagctggacaagtctcagatccatgacattgtcctggtgggtggttctacccgtatcccaagattcaaaaacttctgcaagaattnttcaatggaaaggaactggataagaacataaccctgatangctgttnttatggtgcaacttgtcagcagccatttttttggggcaaatttnaaangtcaaaattg

SEQ ID NO: 5536 - DNA, 542 bp, Canis familiaris
  misc_feature (490)..(491): n comprises a, c, g, or t, or includes no nucleotide
  misc_feature (506)..(506): n comprises a, c, g, or t, or includes no nucleotide
  misc_feature (516)..(516): n comprises a, c, g, or t, or includes no nucleotide
aacctccagaacaaccgtctgacttcccgagggctcccggaggaggcgtttgagcatctgaccaatctcaattacctgtacttggccaataacaagctgaccttggcaccccgattcctaccaaacaccctgatcagtgtggactttgctgccaactatctcaccaagatctatgggctcacctttggccagaagccaaacttgaggtccgtgtacctgcacaacaacaagctggcggatgctgggctgccggacaacatgttcaatggctccagcaatgtcgagatcctcattctgtccagcaacttcctgcgccacgtgcccaagcacctgccgcccgcgctctataagctgcacctcaagaacaacaagctggagaagatcccaccaggcgccttcagtgagctgagccacttgcgtgagttgtacctgcagaacaactacctgacgacgaaggcctggacaatgaaaaccttttggaacttttcannccggaaaaccggatntgtcaaaaanaacttttttggttccggaagggttgc

SEQ ID NO: 5537 - DNA, 628 bp, Canis familiaris
  misc_feature (357)..(357): n comprises a, c, g, or t, or includes no nucleotide
  misc_feature (488)..(488): n comprises a, c, g, or t, or includes no nucleotide
  misc_feature (502)..(502): n comprises a, c, g, or t, or includes no nucleotide
  misc_feature (547)..(547): n comprises a, c, g, or t, or includes no nucleotide
  misc_feature (555)..(555): n comprises a, c, g, or t, or includes no nucleotide
  misc_feature (578)..(578): n comprises a, c, g, or t, or includes no nucleotide
  misc_feature (590)..(590): n comprises a, c, g, or t, or includes no nucleotide
gctctgctggtgcccaaggtcctcctggtcccagtggtgaagaaggaaagagaggccccaatggtgaagctggatctgctgggccctctggacctcctgggctgagaggaagtcctggttctcgtggtcttcctggagctgatggccgagctggtgtcatgggtcctcccggccctcggggtgccaccggccctgctggtgtccgcggtcccaatggagattctggtcgccctggagagcctggcctcatgggaccccgaggttttcctggtgcccctggtaatgttggcccagctggtaaagaaggtcccatgggtcttcctggtattgatggcaggcctggaccaattggcccancgggagcaagaggagagcccggcaacatcggattcctggacccaaaggccccactggtgatcctggcaaaaatggtgataaaggtcatgctggtctttgctggtgctcggggtgcttcaagtcctgatggnaacaatggtgcttnaaggaccttctggacacaaggtgtcaaagtggaaaaggtgaacanggtccttnttggtcctcaagctttcaaggtnttgctggccccnaagtccagttgtgaaattggcaaacaagaaaaaggggt

SEQ ID NO: 5538 - DNA, 525 bp, Canis familiaris
  misc_feature (395)..(395): n comprises a, c, g, or t, or includes no nucleotide
  misc_feature (508)..(508): n comprises a, c, g, or t, or includes no nucleotide
  misc_feature (520)..(520): n comprises a, c, g, or t, or includes no nucleotide
caagcgcggagtggggagggaaagaaaaaaaggaatagagacactctcaagcagatttcactgattgcagagaccagtgcaccatgagatcatgagatcgtgaccagaactgaaaccaagagttggacgcttaacctactgaaccactcaggtccccatttgtgggatttttagatgtggcctagtttctggccatatttctactgtctgcgcttaaggaaatcaagtggaaaccctgaattttgaaaaaaggatctttcttcatttagcagttcagctggaggtggtatagaaatccctccacctgcaaaaatcttgctaagactttaaagctcaccttctaatcacatcctctatgtagcattcttctgaacttttctttctgcccttgactncaaactgaattaatcctactcctctgttatatgtggggattaataccactgctttttatagtacttaagaatgggatattataataacttatttttctggccttggataaatnatccttacactntttta

SEQ ID NO: 5539 - DNA, 601 bp, Canis familiaris
  misc_feature (506)..(506): n comprises a, c, g, or t, or includes no nucleotide
  misc_feature (518)..(518): n comprises a, c, g, or t, or includes no nucleotide
  misc_feature (533)..(533): n comprises a, c, g, or t, or includes no nucleotide
  misc_feature (563)..(563): n comprises a, c, g, or t, or includes no nucleotide
  misc_feature (579)..(579): n comprises a, c, g, or t, or includes no nucleotide
ttgcaaagaatactcattgcagcagccttcctcattatcagaaattaaagaaatttctgaataaattggcagaagaacgcaggcagaagaaggaagcttaagatgtgcaagaagcttaacgatttcaaagaaaataatggttctttgtttttaatgttaaccttttttaaatacaatactgatagttagaagaaaactattgtactcttttgttttagtggaaaaataatagatgtctgttcatgtgttaagtgttatagcaaaaatacatatacggttaagttaatgaagaattttgttttatcagaaatggtaacagaccgaagtactttgtagagactgactcgtaagctacttaaagacaacttgcaccaagaaaaaagatgtagaatcattcagagaaatgaaatttagttccaagcttcaaagaaatgtcaaaacttttgattccattcaataaaagaacaaaacccattggatttttattactttcatctggaacattncacattttaatntgagccttgcagacntttcttttggggttggaacttttttggtgntttttatttggggatntccttatttgaaatggcaatta

SEQ ID NO: 5540 - DNA, 534 bp, Canis familiaris
  misc_feature (433)..(433): n comprises a, c, g, or t, or includes no nucleotide
  misc_feature (441)..(441): n comprises a, c, g, or t, or includes no nucleotide
  misc_feature (502)..(502): n comprises a, c, g, or t, or includes no nucleotide
  misc_feature (519)..(519): n comprises a, c, g, or t, or includes no nucleotide
tgagcttggtcttgaattcactttgatttggccatgtcatgtactacgaacattccacaggaggccgtcattcttctgtcttttatcagttttatttcaggggtatagagcttgtggaaaagttgtggatacataattcagttatacttaaaaaaaaatatcttgagaaaattccaaaccaaaactgattaaaatgagtcattattggatggagggaaacacttgtcatagcagagagcttgtttagaatcacacgtgctcagttggagaaataagccctctggggagtggagcttttctcagcttctgtaacaatcttttataaaaggctcaaggaaggaacatacggaaatatgtccaagtctagagataacactaaattctcccaagtaatgtaaagccaagaggggaaagtaaggcagagtgccaggcngaaatatngaaaagagaaaaacaacacttgaggggtttatttaattttactttttaaattattaaaagncccggaggggaaaaganaaaggcaaaccaaaa

SEQ ID NO: 5541 - DNA, 570 bp, Canis familiaris
  misc_feature (404)..(404): n comprises a, c, g, or t, or includes no nucleotide
  misc_feature (508)..(508): n comprises a, c, g, or t, or includes no nucleotide
  misc_feature (520)..(520): n comprises a, c, g, or t, or includes no nucleotide
  misc_feature (537)..(537): n comprises a, c, g, or t, or includes no nucleotide
ttggatagcatgtcttttttctgttaattagttgtatactctggcctctgtcatatcttcacaatggtgctcttttcatggggtattagccattcagttacagaagatgatttgaagatcttgatttgtttcagaatgatgcatatttcacattttccagtttggttatcacttgtttggggttgtaccagaagggtctagagaatgattctttgattatgattctctaacaaaggaatattgaacgttaaacattgcaaataacatttaaaattggctagttccatacatctactagattttctccaaattattctgctctttgaagaaacagaattgatgaatttgaacctcaattggaataacctatttgattgatctttttaagctagtggggggggggngattttatttagcagtgttaacttggtgtgttaaagtcagatttaacatcagggtattcttagtataaaccacatacgggatggcccagccatcaactattcanttggtaagcttncatggaaatggaaaggnggaaagagttggaaacctgaataattcccaggt

SEQ ID NO: 5542 - DNA, 426 bp, Canis familiaris
  misc_feature (419)..(419): n comprises a, c, g, or t, or includes no nucleotide
ccgctgcgcgatgactgcccgtcggtcgtgcagtactctgaagaaattttagaagaggtcacggccttggagcagcaccggggattggacccagcccatggagaagctgcgtgagcagatgtcctcggagtccctgtgcccatcctctgtgcaggagccccgacggagcaaggatgagaaaactgacacccaggaagcagaagtaacttacccagggtcatcctgctggtaatggcagagctggaattcgaattcagatccgcttggttcccaatcgctcccacccccatcccattccgtgcacggattccaagagcctgcaagttcctgtcttcttttcatccctgaattgctcccaccagcctaagctgagcatggggcgtccggtggtgctgactttagacaacaaggacatgaangggttca

SEQ ID NO: 5543 - DNA, 641 bp, Canis familiaris
  misc_feature (481)..(481): n comprises a, c, g, or t, or includes no nucleotide
  misc_feature (485)..(485): n comprises a, c, g, or t, or includes no nucleotide
  misc_feature (492)..(492): n comprises a, c, g, or t, or includes no nucleotide
  misc_feature (510)..(510): n comprises a, c, g, or t, or includes no nucleotide
  misc_feature (524)..(524): n comprises a, c, g, or t, or includes no nucleotide
  misc_feature (545)..(545): n comprises a, c, g, or t, or includes no nucleotide
  misc_feature (573)..(573): n comprises a, c, g, or t, or includes no nucleotide
  misc_feature (580)..(580): n comprises a, c, g, or t, or includes no nucleotide
  misc_feature (595)..(595): n comprises a, c, g, or t, or includes no nucleotide
  misc_feature (618)..(618): n comprises a, c, g, or t, or includes no nucleotide
gatgttggactgtgatatagtataaaactgataaaagtatcacttcccccgtggaagcaaagcctcagcccttagtatcaggtgctggtctctttccctcctacccactccaggggcctaaggcacttcagcagagttccagagctcttcaaaactcagtttgaaaccactttatcagacattccctggtgttcctttaggccagtactctgtaaatctggatgtcatttgcatttatctaagatttattttgtgatgtactttaatatcagtaagtttctttaaatatatattagctgcatttttttctgatgactaaacaagaagcatattaaattgtcatgaactcaggatacttctaaatgtttgctgctacaatgaaatttgccattggtctttaggtttttttagtattattgggggggggcggataatgaaacatcaaacatgataaatgatcctgtatgtgcccatgcttcancttnaagactnggggttctgaaaacaacntttccaaattgganctgaaggaaatttggctactnaccagtctactatggttttatcctgcanaaaactnaagatgtccatcaanaaacataaaatttccttggctgngatgattgaaccacctaaatttt

SEQ ID NO: 5544 - DNA, 626 bp, Canis familiaris
  misc_feature (417)..(417): n comprises a, c, g, or t, or includes no nucleotide
  misc_feature (439)..(439): n comprises a, c, g, or t, or includes no nucleotide
  misc_feature (450)..(450): n comprises a, c, g, or t, or includes no nucleotide
  misc_feature (513)..(513): n comprises a, c, g, or t, or includes no nucleotide
  misc_feature (559)..(559): n comprises a, c, g, or t, or includes no nucleotide
  misc_feature (561)..(561): n comprises a, c, g, or t, or includes no nucleotide
  misc_feature (580)..(580): n comprises a, c, g, or t, or includes no nucleotide
attgttgataatgctgctataaacatcggggtgccctgtacatgtatcccttcaaatctgtatttttgtatcatttgggtaaatacctactaggcaattgctggatcatagggttccatttcttaatttaggacattaaatatgaatagaagtggttttcttggtagaaagaaaatattctctgagttggagaagtctttacaattaagtcttaatgaccttttttattacaagtggaattttcctctccttgaagcttattgtcacatgtatctttaatgccagctttgcttctagaattgcttgaagtcctctctttctggtgggagtgcatcactcacttgcaactccatttattaggctgtgccaaaaaagctgtgccctaacctgtgtgaggtgacctcccatgcacacatnctacttatgtaagatgattctntagaatgggtnctgggaaaagactttcacaaatttttgacaggctgtaaataaccaccaatatacaatctttgntcttcattgctgggcacaagaatctatgccgctagacattatgtgngntgaaatgaactcatggtgnaacctttttggttatttacgggaaagacttaactttactttgcttt

SEQ ID NO: 5545 - DNA, 640 bp, Canis familiaris
  misc_feature (244)..(244): n comprises a, c, g, or t, or includes no nucleotide
  misc_feature (373)..(373): n comprises a, c, g, or t, or includes no nucleotide
  misc_feature (413)..(413): n comprises a, c, g, or t, or includes no nucleotide
  misc_feature (428)..(428): n comprises a, c, g, or t, or includes no nucleotide
  misc_feature (433)..(433): n comprises a, c, g, or t, or includes no nucleotide
  misc_feature (466)..(466): n comprises a, c, g, or t, or includes no nucleotide
  misc_feature (477)..(477): n comprises a, c, g, or t, or includes no nucleotide
  misc_feature (503)..(503): n comprises a, c, g, or t, or includes no nucleotide
  misc_feature (530)..(530): n comprises a, c, g, or t, or includes no nucleotide
  misc_feature (534)..(534): n comprises a, c, g, or t, or includes no nucleotide
  misc_feature (540)..(540): n comprises a, c, g, or t, or includes no nucleotide
  misc_feature (565)..(565): n comprises a, c, g, or t, or includes no nucleotide
  misc_feature (571)..(571): n comprises a, c, g, or t, or includes no nucleotide
  misc_feature (582)..(582): n comprises a, c, g, or t, or includes no nucleotide
  misc_feature (601)..(601): n comprises a, c, g, or t, or includes no nucleotide
  misc_feature (606)..(606): n comprises a, c, g, or t, or includes no nucleotide
  misc_feature (613)..(613): n comprises a, c, g, or t, or includes no nucleotide
aactctgtcggataacgtgaatttgccccagggagtgagaacaatctacaccattgatggactcaagaagatttccagcctggaccaactggtggaaggagagagctatgtgtgtggctcaatagagcccttcaagaaactggagtacaccaagaatgtgaatcccaactggtcggtgaatgtcaagaccacctctgcttcccgggccgtgtcctcactggctactgccaaagggagcccttcngaggtgcgggagaataaggatttcattcggcccaagctggtcaccattatcagaaagtggggtgaaagccaccaaaagctgtcaaggattcttgttgaacaagaaaacccgcacattccttttgagcanggtctcacttgacataactgatgcgatcaaactggactcnggaagtggtaaacgnctgtntccctaaatgggaaacaagtgatgtgccttcangacttttttgngacgatgacattttattgatgtgggncggaaaaattccgtaccaggatgattnttgntaaatnaaagtggtaaggaaaaaaaaagttnaaaccnggggaaattgnggagttttcaaatagttgnccagncaaaatntttaaccccaagttccaataagttaga

SEQ ID NO: 5546 - DNA, 520 bp, Canis familiaris
  misc_feature (441)..(441): n comprises a, c, g, or t, or includes no nucleotide
  misc_feature (446)..(446): n comprises a, c, g, or t, or includes no nucleotide
  misc_feature (459)..(459): n comprises a, c, g, or t, or includes no nucleotide
  misc_feature (469)..(469): n comprises a, c, g, or t, or includes no nucleotide
  misc_feature (482)..(482): n comprises a, c, g, or t, or includes no nucleotide
  misc_feature (489)..(489): n comprises a, c, g, or t, or includes no nucleotide
  misc_feature (513)..(513): n comprises a, c, g, or t, or includes no nucleotide
aggaaggtgttactcactcctaaagtgaatattacgtgaactgaaatgagcatgcattttcttgtatgatattgactagcactagacatgtcatggtcctcatggtgcatataaatatttaacttaacccagattttatttatgtatttactttttcttcaaaatcaatatggcggctataaaactaaaattcctatatcccttaattgaatgagggccataaccctatgagctttcttctttgctttaggggcttagatttggaattgtcagtgattttatatatgaaaacaaatgtcaagttcacaacttttatgttgtaaaagttgtgtaagtacatgtcaaaagaaatgtagaatagatacaagtcaagaaagagggcatctaaaagttgtataaaacatgagtgattcatccagaaaagtgaacaagttatatgcnttcantggaaagaaattnaaggtttttntaaaaaaagggcnaatggcnggaaattggtaatggaatttggtncctcttt

SEQ ID NO: 5547 - DNA, 343 bp, Canis familiaris
  misc_feature (291)..(291): n comprises a, c, g, or t, or includes no nucleotide
caaggaaagactacatggccttggagactaaaaccccttttgaagcaatataccagtattcccccactagacataggtcactgccaagcatcagggccactcaggttcagaggttagtcagggtcaacactcagggtcattacaagtcatgggatccttggcatccactctagtctctaacccctgggacaggggtaccttttgctactttggttgtagccactcccccacctctgcctgcctccttagctgcctcaggtgagcagctcttggagggagtgggcagcccanactctgtggcacctggggcctgacgcctgggaataaactgtgtcctttataa

SEQ ID NO: 5548 - DNA, 493 bp, Canis familiaris
  misc_feature (449)..(449): n comprises a, c, g, or t, or includes no nucleotide
tagaaaagattgatgaaaccaagagccaatttatttttttcttttttggaaagataaacaaaatagagcaaactttagctagacctaccaagaaagagaggacgcaaatcatagaatggcaattcaaagagatgacattacaatgatgccacacaaataaaagggatcataatagactacttctaacaattacataccaagaagttgcacaacctagaataaatagaaaaattgctagaaacacacagcctatccaaactgagtcatgttgaaatagaaaatctgaacagatcgatcgctactaaggagattaaatcaatcaccaaaaacctcccaacaggggcgcttgggtggctcaagtcagtgaagtgtctgcctttggctcatgttgtgatctggggaccctaagatcaagccctgcattgggcttcccgctgacaagactttgnttttgctttggccttttttttaaatggaaaataaaatttaaaaa

SEQ ID NO: 5549 - DNA, 594 bp, Canis familiaris
  misc_feature (277)..(277): n comprises a, c, g, or t, or includes no nucleotide
  misc_feature (338)..(338): n comprises a, c, g, or t, or includes no nucleotide
  misc_feature (381)..(381): n comprises a, c, g, or t, or includes no nucleotide
  misc_feature (400)..(400): n comprises a, c, g, or t, or includes no nucleotide
  misc_feature (462)..(462): n comprises a, c, g, or t, or includes no nucleotide
  misc_feature (468)..(468): n comprises a, c, g, or t, or includes no nucleotide
  misc_feature (477)..(477): n comprises a, c, g, or t, or includes no nucleotide
  misc_feature (488)..(488): n comprises a, c, g, or t, or includes no nucleotide
  misc_feature (509)..(509): n comprises a, c, g, or t, or includes no nucleotide
  misc_feature (588)..(588): n comprises a, c, g, or t, or includes no nucleotide
  misc_feature (590)..(590): n comprises a, c, g, or t, or includes no nucleotide
cttccgcagcgacggggcccatttccaaaagaactacaccttgacgacaggggtagatttggtggtgaagacggtgccagtccctgacacgggggacagtgtggaactcttcatttttgactctgccggcaaggagctgttttctgagatgctggataaattgtgggagagtcccaacgtcttgtgtctcgtctatgatgtgaccaacgagcagtcctttgccaactgcggcaagtggctggagaaggctcggtcacagatgccaggcgcctcgctnccaggtgtgttagtggggaacaagaaaaacctggccagccggcgagcagtggattcagctnaagcccggtcgtgggccctgggccaagggctggaatggtttgnaacattcgtgaaggagatngagaactaccaaaccccctttcactgctggccaacagtttcaccaactgtcccggagaaggnggaggntttcaagcnctgtgttaggncccgggaggctggggatttgncatggttccggttcttcggatgagaaaagttggattgcctgaacctcaaatatttgcaggtttaataaatggaaatttngnccaa

SEQ ID NO: 5550 - DNA, 521 bp, Canis familiaris
  misc_feature (471)..(471): n comprises a, c, g, or t, or includes no nucleotide
  misc_feature (500)..(500): n comprises a, c, g, or t, or includes no nucleotide
  misc_feature (514)..(514): n comprises a, c, g, or t, or includes no nucleotide
ctctttaaacactatacaaagatgtttcttttataaataggaggacagtgtgcacatgtttgcatggaacagtaccatttatacctgttgtcccctcatagtgataaaagcatcccttttccctttgatagtgtctcagtgtgagggtcaatttaggtgccttagataccgaaaccacaagatcgtttaaatatttgctgaggggcagaccccggtggctcagcggttaggcgccgcctgcagcccggggtttgatcctggagacccgggatcgagtcccacatcaggctccctgcatggtgcctgcttctccctctgcctgtgtctctgcctctctctctctagctgtgtctctatgaataaataaataaataaataaatatttttttaaaaaatctttaaaaaaaaaaaaaaagatgggtttcattagaaagaaaccatcagatgggttcattagaacccttaggaatnttgaaggccaattttgggtttgggaaaanaggaactaaacctntgggttc

SEQ ID NO: 5551 - DNA, 471 bp, Canis familiaris
  misc_feature (440)..(440): n comprises a, c, g, or t, or includes no nucleotide
  misc_feature (457)..(457): n comprises a, c, g, or t, or includes no nucleotide
ccagctcccgctcgaatctgatgctgtggaatgcttaaattaccaacactataaaggaagtgactttgactgcgagttgagactgttgattcatcagagtctggcaggaggaattattggggtcaaaggtgctaaaatcaaagaacttcgagagaacacacagacaacaatcaagcttttccaggaatgctgtcctcattccactgacagagttgttcttattggaggaaaacctgatagggtggtagagtgcatcaagatcatccttgatcttatatcagagtctcccatcaaaggacgtgcacagccttatgatcccaatttttatgatgaaacctacgattatggtggctttacaatgatgtttgatgaccgcgtggacgccctgtgggatttcccatgccggggagaagtgggtttgacagaatgccttctggtcngggtgggcgtcctattncctccttccaaaaa

SEQ ID NO: 5552 - DNA, 464 bp, Canis familiaris
tgcactttctaacaaacattagagttagaatagtcacttaaggagctttgtagaagtccaaggtttgggatggccagctatgtggtgtatgcttattctcctatcaaaaaaggacattaattctttctcttagctgattagtaatgcagttgcttttatacttcttttttaaaacttccatccaccaaaagaaatctattttgcactataaccaagcatatacatactacatacaaatattaatagaagcaagatttgcatgaaatgcttacttgcactctttctaatgctctgatctattttattaaaaaattttgagtcttggccagctaaagttgatttgtgcctagtggtgagttgcactctgcagtttgaaaagcactctaaaaaaagtgtgtgactacacttaaggataatgttccccaactgcatgccatgaacttgtagaaagcctacttcaaaat

SEQ ID NO: 5553 - DNA, 465 bp, Canis familiaris
  misc_feature (165)..(165): n comprises a, c, g, or t, or includes no nucleotide
  misc_feature (293)..(293): n comprises a, c, g, or t, or includes no nucleotide
  misc_feature (390)..(390): n comprises a, c, g, or t, or includes no nucleotide
  misc_feature (392)..(392): n comprises a, c, g, or t, or includes no nucleotide
caggggcctccttggcagcaggagctgtccttttgttgttgggtgccaggaaagggcctccagcctctacagcttcaaggaatgggcaaggggagggtaggaagagggagctgtgtatcaaaatgactccccccccccccaccctacctttcctccctgacccanggctggtgaggagtggggccccaaggtgagagggaacggtgctgctttatttgaaatgttttcttacctcattccctgccccaggaaggggcccagcctcaccctcctggggtggccccatgttcctnccgcctaccctgccccactgccctagcagggcaagtccaagttcccaactgctgcttgctacccccctccttaccttgcccaagcttcagttctctntngatgcttctgcctcaacgcctgccctgttttcccttcttaacccgttttaagttattaatttgtacttgtggg

SEQ ID NO: 5554 - DNA, 470 bp, Canis familiaris
  misc_feature (97)..(97): n comprises a, c, g, or t, or includes no nucleotide
  misc_feature (105)..(105): n comprises a, c, g, or t, or includes no nucleotide
  misc_feature (124)..(124): n comprises a, c, g, or t, or includes no nucleotide
  misc_feature (126)..(126): n comprises a, c, g, or t, or includes no nucleotide
  misc_feature (163)..(163): n comprises a, c, g, or t, or includes no nucleotide
  misc_feature (197)..(197): n comprises a, c, g, or t, or includes no nucleotide
  misc_feature (276)..(276): n comprises a, c, g, or t, or includes no nucleotide
  misc_feature (302)..(302): n comprises a, c, g, or t, or includes no nucleotide
  misc_feature (356)..(356): n comprises a, c, g, or t, or includes no nucleotide
  misc_feature (365)..(365): n comprises a, c, g, or t, or includes no nucleotide
  misc_feature (384)..(384): n comprises a, c, g, or t, or includes no nucleotide
  misc_feature (398)..(398): n comprises a, c, g, or t, or includes no nucleotide
  misc_feature (408)..(408): n comprises a, c, g, or t, or includes no nucleotide
  misc_feature (433)..(433): n comprises a, c, g, or t, or includes no nucleotide
  misc_feature (439)..(439): n comprises a, c, g, or t, or includes no nucleotide
  misc_feature (446)..(446): n comprises a, c, g, or t, or includes no nucleotide
  misc_feature (467)..(467): n comprises a, c, g, or t, or includes no nucleotide
gctgttccagctgcctctgacctaagtgatgagtgggatgataccaaattagagagtgttagccagattaagacccccacactaggagacaacatanagactcangtgggaatggaaatgtctnanacagcccaagagatcgataatgaccctatggaaggtntggaaaagggcaaacctgtgacaagaggctgcanatgtggctctggggctgtcagaaggggaagcacacttggggacagccctgttaatggcgcatggggaggagcgatcatntgccgtcaccgatcagaatttctttnttcccacaagtcctatggaagataggaaagtctctgttgtgagcctcttccaanatactgcanacttcatggagtctactanaggaaaatgatccnatgttttttnttagaagaccactgtttccattttnagaaanttgaatntttaggctccttcaacccttntgg

SEQ ID NO: 5555 - DNA, 410 bp, Canis familiaris
ggccttgttggggcatctgtgctggtggtgtgcgtgtcggtgaccgtctttgtgtggacatgctgccaccagcgggcagagaagaagcacaagaccccaccatataagtttatccatatgctcaaaggcatcagcatatatccagagaccctcagcaacaagaagaaaatcatcaaagtgcggagagacaaagatggcggtgggagggaaggtgggcgcgggaatgtgctggtggatgcagcagaggctggcctgctgggcccagacaaaggtcctggaggacctagctctggatcttgtatagaccagttacccatcaaggtggactatggggaagaactgaggagccccattgcgagccttacccctggggagagcaagaccacttctccatcatcttcagaggagga

SEQ ID NO: 5556 - DNA, 645 bp, Canis familiaris
  misc_feature (340)..(340): n comprises a, c, g, or t, or includes no nucleotide
  misc_feature (346)..(346): n comprises a, c, g, or t, or includes no nucleotide
  misc_feature (399)..(399): n comprises a, c, g, or t, or includes no nucleotide
  misc_feature (414)..(414): n comprises a, c, g, or t, or includes no nucleotide
  misc_feature (432)..(432): n comprises a, c, g, or t, or includes no nucleotide
  misc_feature (441)..(441): n comprises a, c, g, or t, or includes no nucleotide
  misc_feature (507)..(507): n comprises a, c, g, or t, or includes no nucleotide
  misc_feature (513)..(513): n comprises a, c, g, or t, or includes no nucleotide
  misc_feature (569)..(569): n comprises a, c, g, or t, or includes no nucleotide
  misc_feature (581)..(581): n comprises a, c, g, or t, or includes no nucleotide
  misc_feature (600)..(600): n comprises a, c, g, or t, or includes no nucleotide
  misc_feature (615)..(615): n comprises a, c, g, or t, or includes no nucleotide
  misc_feature (635)..(635): n comprises a, c, g, or t, or includes no nucleotide
  misc_feature (637)..(637): n comprises a, c, g, or t, or includes no nucleotide
tttgcagagccacgccagcgcaggcagggcccccggctctgtgctgctgccctgtgtgggcgttcagcacatggtgactttgtggacattccgcaaacaagtcagcaatcgatgatacgggtttcctggtgccgcgaccacctcgaacacagactggaaggcccggcggtccagctcctcctctatctggtgtctgtaaaagtccgtggccaccaggcagaagaggttaacgtcacttgttccagcttgcccatcctgctgataacgtggggaaggactgccgagacccacgggctggtggaaagcactgacaaaaaaacaagaagaggcttcacacggncatggncactggcgttctttgtgtgaaagttggacaaagacagcattgacccaatcttnggaccattggacgantggccggtgctttgcaanagtcttggnaaaacctttatataccaacggtgggccaatgaacttgtggggtaccggcttgttgggttggacaanaaaatnttcaatgacttttgttatgacgtcttgggggggggaagaagtattttaaaaattgnggaaggatccgngccaccattttgggtttanaaggggaaccctttnttaccttttaaaaagtaaanancaccttca

SEQ ID NO: 5557 - DNA, 320 bp, Canis familiaris
  misc_feature (212)..(212): n comprises a, c, g, or t, or includes no nucleotide
  misc_feature (276)..(276): n comprises a, c, g, or t, or includes no nucleotide
  misc_feature (301)..(301): n comprises a, c, g, or t, or includes no nucleotide
  misc_feature (309)..(309): n comprises a, c, g, or t, or includes no nucleotide
aacttgtgaaactagaaatcaactatgagaggacaatatacaaagaacataaatacacggaggttaaataacaagctaataaacaatggatgggtcaactaagaaatcaaaaaggaaattaaaaaatgtatggagagaaatgaaaagaaacacacaatggccaaaaatctttgggatgaagcaagagctgttctaagagggaagatacagcnatacaggactatgtcaagagccaaaaaaccctcaaagaaacagcctaaatttacaaataaaggnggtaggaaaacaacaaataaaaccnaacactantaccaaggaaa

SEQ ID NO: 5558 - DNA, 480 bp, Canis familiaris
  misc_feature (448)..(448): n comprises a, c, g, or t, or includes no nucleotide
  misc_feature (451)..(451): n comprises a, c, g, or t, or includes no nucleotide
gaaggtgtaaatgtggaacgttacaaacagattgttttgactggcatattggagcaagttgtgaattgcagggatgctttggctcaagagtatctcatggagtgtattattcaggttttccctgatgaattccaccttcagactttgaatccttttctccgggcctgtgctgagttacaccaaaatgtaaatgtgaagaacataatcattgctttaattgatagattagctttatttgctcaccgtgaagatggacctggaatcccagcagatattaaactttttgacatattttcacagcaggtggctacagtaatacagtctagagaagacatgccttcagaggatgttgtatctttacaagtctctctaattaatcttgctatgaagtgttaccctgatcgtgtggactatgttgataaaagtctagaaactacagtggagatanttnataactcaaccttgacataatggttccag

SEQ ID NO: 5559 - DNA, 366 bp, Canis familiaris
  misc_feature (123)..(123): n comprises a, c, g, or t, or includes no nucleotide
  misc_feature (327)..(327): n comprises a, c, g, or t, or includes no nucleotide
  misc_feature (346)..(346): n comprises a, c, g, or t, or includes no nucleotide
  misc_feature (357)..(357): n comprises a, c, g, or t, or includes no nucleotide
aacacaaggtgcataggagaatgttttctcaaaagggagagaatctcctggagaagggtgtttgctttttgctctggtgaaactctgacctctgcgcgcagagaccgctttggtgaccgtctnccacccaagacacacatgtctgcgttactcatgaagcagtgaagttgaaagtaacctgtgttgctcataaaatgtgaaagaaagcacaagtttgcaagtgtgtaaagtcttttctgggtgtgacacacctgtgtccaagttagaactttatagtaccaacctcataattactggcgctgagccccactcacccttttagttctntggagcggggaaagaatantggaaaagctnttctttatt

SEQ ID NO: 5560 - DNA, 583 bp, Canis familiaris
  misc_feature (400)..(400): n comprises a, c, g, or t, or includes no nucleotide
  misc_feature (459)..(459): n comprises a, c, g, or t, or includes no nucleotide
  misc_feature (474)..(474): n comprises a, c, g, or t, or includes no nucleotide
  misc_feature (510)..(510): n comprises a, c, g, or t, or includes no nucleotide
  misc_feature (515)..(515): n comprises a, c, g, or t, or includes no nucleotide
  misc_feature (540)..(540): n comprises a, c, g, or t, or includes no nucleotide
  misc_feature (558)..(558): n comprises a, c, g, or t, or includes no nucleotide
acgcgtgggcggacgcgtgggggaggaagaggtggacccccgcatccagggagaactggagaagttaaaccaatccacggatgacatcaacagacgggagacggaactcgaggatgctcgtcagaagttccgctctgttctggttgaagcaaccgtcaaactggacgaactggtgaagaaaattggcaaagccgtggaggactcgaagccctactgggaggcgcggagggtggcgaggcaggctcagctggaagctcaaaaagccacacaggacttcagagggccacagaggtgctccgtgccgccaaggaaaccatctcctggcttaacaacggctgctggaggatgacaagcgacagttcgacttccgctggcaagagatgctgaatcacccacccanaaggtcatggaggcgggcagaccaaaaacgaggagcgagcttgtgcacaaggagacggnggccggtcaaccaancatgggccgatgcggcagttgagaagaaactaaganagccntaacaagtcaagcttattttaactnaggcaaatctacttcagnttggcaattaaaaaaaatgggtgac

SEQ ID NO: 5561 - DNA, 313 bp, Canis familiaris
ctattaataattcatttctgtcaaactgtaagagtagattcatatttttttttagtttttaacattggactgttatttcatttagagttctctatctctaaatatttatttagagaatgattttaaaagggaatgatatgcttgtttaaatgaaagagaaaagctgtagtaaactgtgttaattggtaatgactatttatcgtcgatactctgtagctgtgtaagttttgacaaatagtgtatctcgtggaatcagtggttagcattgccgctattatatttactcattttatcattataaatgtgcttagtt

SEQ ID NO: 5562 - DNA, 623 bp, Canis familiaris
  misc_feature (480)..(480): n comprises a, c, g, or t, or includes no nucleotide
  misc_feature (484)..(484): n comprises a, c, g, or t, or includes no nucleotide
  misc_feature (512)..(512): n comprises a, c, g, or t, or includes no nucleotide
  misc_feature (515)..(515): n comprises a, c, g, or t, or includes no nucleotide
  misc_feature (534)..(534): n comprises a, c, g, or t, or includes no nucleotide
  misc_feature (551)..(551): n comprises a, c, g, or t, or includes no nucleotide
  misc_feature (565)..(565): n comprises a, c, g, or t, or includes no nucleotide
  misc_feature (593)..(593): n comprises a, c, g, or t, or includes no nucleotide
  misc_feature (604)..(604): n comprises a, c, g, or t, or includes no nucleotide
attccctactgagtgcgggggctcaatcttacgacctcaagatcatgacttgagctgaaatcaagagtcaggtgcttatcggactgagccccctagacacccctactagaaatagattccaagaaacatttctttcagaaaggtctgttactgtgtagcatacgttggcaaacttcttgaataaagggatggattgtaaatatgtcaggctttgtgagctgatgtagcagccagagacaagcatatgtgagcgggtgtggttgggtcccagggaaactggacttgggaaagtgcagtagccccacttccacatgtggaatggatatggttcagggtcatatttccccaaggatggatgcaggaggactgtagaagtccagagggtgttttggtttggtttggtttgtttttttgccatgtacttggatggtgcaatgctatcaaattgattcaactgctggacaagttgtgtaaagatgntgangtgtaccaactagtgaatagggcttganaanatcaggcatttggaaaaanaaaaggttaggttgatncccccccaggaatnatgaaacatcaacaattcaccaaacaanaagtttatggntcacacaactagtttggaa

SEQ ID NO: 5563 - DNA, 264 bp, Canis familiaris
catgaagcccggcacgatgggaatcagagtccgggatctgggcggctctgtgtaagtgggctgattagcagccaaagtcatttttaacatgctcctttttctctactctttgctaggacctggttggcaaattacttagctgttattaaaaaaaaaaaaattaagagaaagagaggggaaaggaacaaaaggaatatctccctgaattctttttctgcttcagacaatacgcttcattctgcctccccagcaaggacaggagca

SEQ ID NO: 5564 - DNA, 367 bp, Canis familiaris
  misc_feature (133)..(133): n comprises a, c, g, or t, or includes no nucleotide
  misc_feature (165)..(165): n comprises a, c, g, or t, or includes no nucleotide
  misc_feature (323)..(323): n comprises a, c, g, or t, or includes no nucleotide
  misc_feature (351)..(351): n comprises a, c, g, or t, or includes no nucleotide
  misc_feature (360)..(360): n comprises a, c, g, or t, or includes no nucleotide
gggaaatcagacggagtgccagtcagggtcaggaggcttcagggagacagtagcacttgagcaggcttttttgtagaatgagcaagagttctccaagcagacgaggcaaggaggaggcggaggagtgtcgcanagacaggaacagcacgttcacagacacatcantccacggtctcccacctttcactggggttccagaccccacaggcaatatcccaagattccaaggccttattcaacaaacaagccagatgcaaaccaaaccataattcatttattggcataagtatgctttctctggagaaccctagcgctggatgcanacgctcggttaaaggttcccagagtctnacaggtttncaagccc

SEQ ID NO: 5565 - DNA, 651 bp, Canis familiaris
  misc_feature (428)..(428): n comprises a, c, g, or t, or includes no nucleotide
  misc_feature (448)..(448): n comprises a, c, g, or t, or includes no nucleotide
  misc_feature (460)..(460): n comprises a, c, g, or t, or includes no nucleotide
  misc_feature (486)..(486): n comprises a, c, g, or t, or includes no nucleotide
  misc_feature (489)..(490): n comprises a, c, g, or t, or includes no nucleotide
  misc_feature (516)..(516): n comprises a, c, g, or t, or includes no nucleotide
  misc_feature (520)..(520): n comprises a, c, g, or t, or includes no nucleotide
  misc_feature (563)..(563): n comprises a, c, g, or t, or includes no nucleotide
  misc_feature (568)..(568): n comprises a, c, g, or t, or includes no nucleotide
  misc_feature (602)..(602): n comprises a, c, g, or t, or includes no nucleotide
  misc_feature (616)..(616): n comprises a, c, g, or t, or includes no nucleotide
  misc_feature (637)..(637): n comprises a, c, g, or t, or includes no nucleotide
  misc_feature (643)..(643): n comprises a, c, g, or t, or includes no nucleotide
agccagtcagcagctgagtggtggttatggaggcggctatggcggccagagcagcatgagtggatgaccaagttttacaggaaaactccagtgattttcaatcaaacattgcataggcagccaaggagcagtgagcagcagctactacagtagtggaagccgtgcatctatgggagtgaacggaatgggagggatgtctagcatgtccagtatgagtggtggatggggaatgtaactgatcctgatcactgactcttggtcaacgttttttaaagaaaaaaaagtttaacagttttgcaatacaagcttgtgattgatgcttattactctaagtgggaatcaggattgttttaaagacttaaggttcaagtatttttgaacacaaacattcatctaggatgtaacacctgagtaaactagaactggtnaacaattttcaacttttctntaattctattgnaggaaggacctaataagcaagaaagnggnnttaggttaaacaagttgaattttgtnaaangtggttttttacccgttaattgaaccttttgggatcctttttnaaaanatcctttttttaaaaccaatataggacttgtgtntacaattaaaaggnacacattggcaggtggtaatntagttnattaaaaa

SEQ ID NO: 5566 - DNA, 295 bp, Canis familiaris
  misc_feature (231)..(231): n comprises a, c, g, or t, or includes no nucleotide
agcctggccgagtaccacgccagggccagcgagcagctgagcgcgctcggcgagaaggccaggcccgcgctcgaggacctgcgccagggcctgctgcccgtgctggagagcttcaaggtcagcctgctggctgccatcgacgaggccaccaagaagctgaacgcgcagtgaggcgccccccccccgccccgtccgtctgtccgcccgcccggccctcggaacaaacgcttnccacgcgggacgcccgtgtcgggcgcgcgggtttggaggccgcggctgtgatttttaaacaata

SEQ ID NO: 5567 - DNA, 403 bp, Canis familiaris
ttttgtaccttaacacttattcttgatggcatctgtcagatactaggcgagatcagacatgggaatttttccaaaagtcctttaatttacctggtgacctcaccaggtacttacaaaatctgagtggttttaatatctagaaaactaaattccagaacaacctacagaaatgtaaacccttgtttgtcaaagacccttgggtggatctgcagccagggtggcccgggcctgcctggggccaggtgagtgtggccactgggcgcagctggagggacggacagatggacagcagtccgaaggtttgcccctttgagcaggactgccaagctcacgtgcacaagcctccttcagcctccatgtccagccctccgtcctctgtgtctgtgtgaggttgaacaataaa

SEQ ID NO: 5568 - DNA, 618 bp, Canis familiaris
  misc_feature (378)..(378): n comprises a, c, g, or t, or includes no nucleotide
  misc_feature (422)..(422): n comprises a, c, g, or t, or includes no nucleotide
  misc_feature (434)..(434): n comprises a, c, g, or t, or includes no nucleotide
  misc_feature (452)..(452): n comprises a, c, g, or t, or includes no nucleotide
  misc_feature (467)..(467): n comprises a, c, g, or t, or includes no nucleotide
  misc_feature (500)..(500): n comprises a, c, g, or t, or includes no nucleotide
  misc_feature (537)..(537): n comprises a, c, g, or t, or includes no nucleotide
  misc_feature (556)..(556): n comprises a, c, g, or t, or includes no nucleotide
  misc_feature (584)..(584): n comprises a, c, g, or t, or includes no nucleotide
  misc_feature (589)..(589): n comprises a, c, g, or t, or includes no nucleotide
  misc_feature (598)..(598): n comprises a, c, g, or t, or includes no nucleotide
ccctgcagaccaagactgcggccctcggccaccgcgtcctcacgccccttcctcccgacggcctcctcagtggtcctgccccatggccacccctccttgactgttaggaccagagtatgaagaagtaagatataaatatgtatacatatataaatatatttttaattacgtgtcgtgtcacagtggctccagacgtacggtttgccgagtttatcccactgcttgaaagtgcttcctggccaatccaaataacaatttaagctgtttttctaaatgcaggttgctgctactctttgggatatggaaggaaaacgttttaaaaaaattttttttaaaggaaataacagtaaagtataaaatctgtgactctgaggccgncttccaagggagaccactcaaacaggaacccaagggcaggagtnggtgccccgcanacccagcccttcctgggncagacaccccctttnggctgacaaggaaggccgattcaagttgacctntgaatgactcgatgggaggcaaaatggtattgatttntgaggtggcccccggtttnttgccatgaggaggcaggccccattgangtganctgttccgntgtcccccccggcaaaaaaa

SEQ ID NO: 5569 - DNA, 623 bp, Canis familiaris
  misc_feature (458)..(458): n comprises a, c, g, or t, or includes no nucleotide
  misc_feature (495)..(495): n comprises a, c, g, or t, or includes no nucleotide
  misc_feature (541)..(541): n comprises a, c, g, or t, or includes no nucleotide
  misc_feature (549)..(549): n comprises a, c, g, or t, or includes no nucleotide
  misc_feature (552)..(552): n comprises a, c, g, or t, or includes no nucleotide
  misc_feature (581)..(581): n comprises a, c, g, or t, or includes no nucleotide
  misc_feature (608)..(608): n comprises a, c, g, or t, or includes no nucleotide
  misc_feature (620)..(620): n comprises a, c, g, or t, or includes no nucleotide
gcttctgtgattggaagagaggtagaaggcacctgtggctcagtcagaagagcatgccacacttaatcttgggttgggggtttaagccccacgttgaggatagagaatacttaaataaaacctaaaaaagaaaaaaaggaagagaggtaaaagggttccttgaggaacctcaatcttgtgacttttggtacacttgtatagaacgtatatggccttgcctttgtggtattgtgctgcactatacgccttggcatatgaacacctgttgttttacagaacatcaagcttaataatacttaaatattttgaggatgaaggttaagatcattaagctgaaattcagagcctaccatgatatccttggcagattactggttccactattgtttctttacttgaataagaatgaatgaggttgaaaagtaacagaaaagaaactggcttttcatacaatgcantattaacttcccaagggatgcccacacggggcttaantccaggaccctgaaacatacctggctgaagtaaatcttaaccggtnacccctanggnccttgtgtcactgtaaacaccgcctttanattggctattgaacataaatactttgngtgaattacttnttt

SEQ ID NO: 5570 - DNA, 430 bp, Canis familiaris
  misc_feature (112)..(112): n comprises a, c, g, or t, or includes no nucleotide
  misc_feature (413)..(413): n comprises a, c, g, or t, or includes no nucleotide
aagactagctaggccctttgcctccaaccgacgccgtgcctgccgcccgcctgggaccccaccagggccgggagatcccgctctccccccccgccccgccccgccccaccgncgggcaccgacgccccaactttttacgcgcggcctgcgccccgcgactggctgtcgggctcctgtcctaaggggcgtgcgcgtcctccgggtgccggccgcgccccatcctctcggcgggcccctgctccgggaaccgctgaggggctggcgtgagccaggatcggccgggcctcgcctgtgcagtgctccgagtccatcctcggggaggggacggagcctcaaaaggccaggcttccatttcaaaagtcaaggcaagccttgtccttgtcgttccgcacgcgggggcgcgtggcgggtcngcgggcgacagcccgcg

SEQ ID NO: 5571 - DNA, 525 bp, Canis familiaris
  misc_feature (477)..(477): n comprises a, c, g, or t, or includes no nucleotide
  misc_feature (479)..(479): n comprises a, c, g, or t, or includes no nucleotide
  misc_feature (482)..(482): n comprises a, c, g, or t, or includes no nucleotide
  misc_feature (510)..(510): n comprises a, c, g, or t, or includes no nucleotide
agcggagcgggtccagggctcggctgagggcgctgagggcgcgggcggagcgcggcacggagccatggcgcaccagacgggcatccacgccaccgaggagctgaaggagttcttcgccaaggcacgggctggctctgtccggctcatcaaagtcgtcatcgaggatgagcagcttgtgctgggtgcctcacgggagctggcgggctgctgggaccaggactatgacaggaccgtgctgccgctgctggacgcccaggagccctgttacctgctctaccgcctggactcacagaatgcccagggcttcgagtggctcttccttgcttggtcacctgacaattctcccgtgcggctgaagatgctgtatgcggccacacgggccacagtgaagaaggagtttgggggcggccacatcaaggatgagctctttgggactgtgaaagacgacctttctttgctgggtaccaaaaacaattntngtnctttgcaagggcccgcccaattgacttnggttgaaaaaaactt

SEQ ID NO: 5572 - DNA, 617 bp, Canis familiaris
  misc_feature (406)..(406): n comprises a, c, g, or t, or includes no nucleotide
  misc_feature (413)..(413): n comprises a, c, g, or t, or includes no nucleotide
  misc_feature (444)..(444): n comprises a, c, g, or t, or includes no nucleotide
  misc_feature (520)..(520): n comprises a, c, g, or t, or includes no nucleotide
  misc_feature (531)..(531): n comprises a, c, g, or t, or includes no nucleotide
  misc_feature (564)..(564): n comprises a, c, g, or t, or includes no nucleotide
  misc_feature (582)..(582): n comprises a, c, g, or t, or includes no nucleotide
agagggcatggccagacccaccttggaaccgaaggtgaactgcactggggaaaagtgtggggaagcagagaagacaagaggcagcacggggcgagggacgagtttcacagcagaggttttccctcccaagggaacccctgcttctgggccttttccctgggttttaaagaaatgggcaaagtggtagattggaggttgtacctctgcacggtgactgctggacagggaatcacacaacacggcgcgagttcagagtatttgtttaatggctgtgcctacgaattacttgagtaggtaatcatgtaacagtggaagcgcatccgctaaaaggattatcgaggcttcagatcggaggtggaaagagtatacgtttgatttttttgctttggcaacacaaaaggaagtngggcctnaggaaaaattttaggagaaaccggccgtcanaaggacaaaggtttgacgcttaagaagaaggggggccaacgatgtgtccggttgccatgaaccccaacaacagcancaccaaaatanatggaatggtgcatattgaaaaatattagcatncctgtaatggaactgttntaggggagggtgtttttcaataaggcttcttttct

SEQ ID NO: 5573 - DNA, 634 bp, Canis familiaris
  misc_feature (422)..(422): n comprises a, c, g, or t, or includes no nucleotide
  misc_feature (456)..(456): n comprises a, c, g, or t, or includes no nucleotide
  misc_feature (463)..(463): n comprises a, c, g, or t, or includes no nucleotide
  misc_feature (471)..(471): n comprises a, c, g, or t, or includes no nucleotide
  misc_feature (521)..(521): n comprises a, c, g, or t, or includes no nucleotide
  misc_feature (525)..(525): n comprises a, c, g, or t, or includes no nucleotide
  misc_feature (552)..(552): n comprises a, c, g, or t, or includes no nucleotide
  misc_feature (560)..(560): n comprises a, c, g, or t, or includes no nucleotide
  misc_feature (563)..(563): n comprises a, c, g, or t, or includes no nucleotide
  misc_feature (608)..(608): n comprises a, c, g, or t, or includes no nucleotide
  misc_feature (629)..(629): n comprises a, c, g, or t, or includes no nucleotide
ttaatagagtcagtgaacttaattctgtaaaagcagtgtctttgggtagaagttttgacgaaaaaggagacattgatggagaggatcaggtttgtgtctcagaaataaacagaatgagtaccagaggtttcagtactgaaaagcaacgccttccaacattgcaacaggatgaatttttaaaatcaagtgttcagtcaaagccttggagtttggcagactcagctgataatttagaagccagcataagagaagacgagtataaaactgaggaaaaacttgatttatttacttcaaagtgtgctgacctgtgtatggattctattaaaacttctgatgccgatgatgaagttggttcttccaaagaagaaagtaaaaagtttacttattcccaaagccccagttttgatcccacagaagaaagnggtctggatgattctattaagtgtaaaaaatggnggcaggngtaatggntttgtgacttgcatgatcctaacgaggatgagtttggggacttggcccanccgnggtgcaactcccctttcgttcctggtnctaagatnaanggcgattcctttgaagagtctaaacctttcaaatttatgaccagngtgcttgggaattgggtcaanctgtt

SEQ ID NO: 5574 - DNA, 622 bp, Canis familiaris
  misc_feature (338)..(338): n comprises a, c, g, or t, or includes no nucleotide
  misc_feature (431)..(431): n comprises a, c, g, or t, or includes no nucleotide
  misc_feature (477)..(477): n comprises a, c, g, or t, or includes no nucleotide
  misc_feature (491)..(491): n comprises a, c, g, or t, or includes no nucleotide
  misc_feature (498)..(498): n comprises a, c, g, or t, or includes no nucleotide
  misc_feature (521)..(521): n comprises a, c, g, or t, or includes no nucleotide
  misc_feature (539)..(539): n comprises a, c, g, or t, or includes no nucleotide
  misc_feature (549)..(549): n comprises a, c, g, or t, or includes no nucleotide
  misc_feature (558)..(558): n comprises a, c, g, or t, or includes no nucleotide
  misc_feature (580)..(580): n comprises a, c, g, or t, or includes no nucleotide
  misc_feature (601)..(601): n comprises a, c, g, or t, or includes no nucleotide
  misc_feature (608)..(608): n comprises a, c, g, or t, or includes no nucleotide
ccagcaatcagtcagatggaactcaagaatcctctgagtccccagatgttgtggacagacaccaaaccatggaggtgtcctgttaagcagatgctcctcccctggaccatgcaagtccaccctctttcaaccaaccactccataatataacatttcatccagcaaactggcatttatctttaactcctgcatggccactgacactctctggtatcctggatttatcattctcactgcctgcccaccctcctttttgtatgtaccaaggaccacttccttaccattactgtaacattctagcatctttatctgatcaagatttccatatcttctcttgncagctttttctcgtgctttcccaactacgtatctgacaaagaatcttttgatcctgatggatgtggtgtgagcaccccgtgtctggggtttgnggtgggcataagtctgtgaatttagatggctttcttggagagcttntgcaaagaaaaccngaaactnaaaacaaaggggaactttttttnatttcaatggattttaanggaaaatcanaacaggttntaggtgggtaggcccttcattntttttggttccaatggtcaanagattgnaaagtacttaacag

SEQ ID NO: 5575 - DNA, 575 bp, Canis familiaris
  misc_feature (373)..(373): n comprises a, c, g, or t, or includes no nucleotide
  misc_feature (419)..(419): n comprises a, c, g, or t, or includes no nucleotide
  misc_feature (506)..(506): n comprises a, c, g, or t, or includes no nucleotide
gggtaggcatggcaacctctgtgggttgggccactcatgtcatgctctacaagtgagcttgttggacactccaagccctgggcctgcgtgccctgctctggcccagcggcagaggcatccagcaccaccatgacagcaggtgttattctcagcggagtttccctgaaccacatgccattttgttttaaggaaaaatgctccttttatagtaaaagcaacacctgtaccacctcttcaccattgttgctttgggaatgagaatgagccctagatggcggtgagccctgagcccatttggaggtgctcggtagtggccttacacatcctcagagtgcatgctcctctctatcaagtcagggtccccacagccccnggatgtaccctgctgccccccacagccctgaccacctggtgtcctnaaggctggcaagactgcaacgagggcttcttgggtgtgcttgcaaacccaagttggtgtaacgtttctggctgatgcttaataccanctttacaaaaaatttaacgtcccacttgggcgaaaagaagtctaagacttaccaaagttttgatggggt

SEQ ID NO: 5576 - DNA, 333 bp, Canis familiaris
  misc_feature (78)..(78): n comprises a, c, g, or t, or includes no nucleotide
cctgtggcccccacccccacggacccttgctgctttaggcacttctggcttggtctgtggccttcattaaaaagtgtnagactaactttgtcactggtcccaaggagacacttttaaccactgagtgtactcattggagataatattgaataatacgccctgttttttgggagtttgggaggaaggggaataggtttgagaccttcgtttgtgtggtagggcctggaggagaaagcccttgggcaggaatgggcttcacttactcccccacctactcccaacacccagtagatggttttccataataaactgggatttcttttgcaaaaaaaa

SEQ ID NO: 5577 - DNA, 486 bp, Canis familiaris
  misc_feature (408)..(408): n comprises a, c, g, or t, or includes no nucleotide
  misc_feature (414)..(414): n comprises a, c, g, or t, or includes no nucleotide
  misc_feature (474)..(474): n comprises a, c, g, or t, or includes no nucleotide
aaggaagtaccaggaagctgagcttctgaagcacctggcagagaaacgagaacacgagcgggaagtgatccaaaaagccattgaggagaacaacaactttatcaagatggctaaggaaaaactggctcagaagatggaatccaataaggagaaccgggaggcccaccttgctgccatgttggaacggctgcaagagaaggacaagcacgcggaggaggtgcggaaaaacaaggagctgaaagaagaggcctctaggtaaagcccagaggccaaagaagtttccagaacagccggacagctccagcagctccgcagttcctgaggcagcctagtcggccgtcggctgctctcccagcactggggtttggggggaggggggtggccaggggtgtttcctctgcttttggngtttgnatatgtaaagaattgccagtgaagccatcctatttggttttggggaacaattattgggtnggaaaagggaaa

SEQ ID NO: 5578 - DNA, 611 bp, Canis familiaris
  misc_feature (438)..(438): n comprises a, c, g, or t, or includes no nucleotide
  misc_feature (465)..(465): n comprises a, c, g, or t, or includes no nucleotide
  misc_feature (482)..(482): n comprises a, c, g, or t, or includes no nucleotide
  misc_feature (514)..(515): n comprises a, c, g, or t, or includes no nucleotide
  misc_feature (540)..(540): n comprises a, c, g, or t, or includes no nucleotide
  misc_feature (557)..(557): n comprises a, c, g, or t, or includes no nucleotide
  misc_feature (559)..(559): n comprises a, c, g, or t, or includes no nucleotide
  misc_feature (568)..(568): n comprises a, c, g, or t, or includes no nucleotide
  misc_feature (586)..(586): n comprises a, c, g, or t, or includes no nucleotide
gtgatagtgatggtaactgacgcctttcattctgttcgatttacaccgaacaagccagcatctgatcaaaagcattacctaaaatcttccttaaactattgaaaggtgctttgatgattttctcctttggtttgtagaattagaactgagcttttgacaaagcgcttagagttgccatcacttttctgtggtcaaactactgatacttgcttttctttataaggaaatattgcctaaggatgtctgctgtttgttttcagaagttttccagtgggaatgctgtctgcgttatgtctgaatgtgcaagtgcgtattttgtttgttgctgttggtttttgttgttttgttttgttagatgttcctctcactagccttgtgttcgcactggtaagctttacttgtctcctttgccaatcaaatgttaaagactatgggggncttttttttttttttttaaataaacgngcattgggcatctattnaatctttgacaagggttcaagaatgacttcannggggttttggaaacaactaatattnttggtttggggttcccnanaattatttnaaagttaattgtgggctntaatccaccggccctttaaaatgac

SEQ ID NO: 5579 - DNA, 445 bp, Canis familiaris
  misc_feature (417)..(417): n comprises a, c, g, or t, or includes no nucleotide
  misc_feature (434)..(434): n comprises a, c, g, or t, or includes no nucleotide
tcagatccgtccctgatttggttgttttgttgctgtggcggcagaatgtgctatgaaacacataaaagaaattctccatgtgcgccctagtgacagcctccctcttctccctgcgtgctgtgaacacaccacactgcacttctgcaggcctagctcacagagctggttgcaccaggttgcctttccatgtcctgtccggagttgggtgtgaattgctgaattagctgctattctttatggagtcacaattaagctttttcttacccttttcaatgggaaagctatggggggcgggggtaaagaggaaattgagagtgcttatctttgttgaaaatattaaaacttttctgtgacaggatacaagcaaattgtaattaaatataaaccagaaccagagctacctctaagtagtggttnctcaagcacaaaagctntaagcatatga

SEQ ID NO: 5580 - DNA, 604 bp, Canis familiaris
  misc_feature (213)..(213): n comprises a, c, g, or t, or includes no nucleotide
  misc_feature (238)..(238): n comprises a, c, g, or t, or includes no nucleotide
  misc_feature (265)..(265): n comprises a, c, g, or t, or includes no nucleotide
  misc_feature (291)..(291): n comprises a, c, g, or t, or includes no nucleotide
  misc_feature (304)..(305): n comprises a, c, g, or t, or includes no nucleotide
  misc_feature (391)..(391): n comprises a, c, g, or t, or includes no nucleotide
  misc_feature (399)..(399): n comprises a, c, g, or t, or includes no nucleotide
  misc_feature (409)..(409): n comprises a, c, g, or t, or includes no nucleotide
  misc_feature (423)..(423): n comprises a, c, g, or t, or includes no nucleotide
  misc_feature (425)..(425): n comprises a, c, g, or t, or includes no nucleotide
  misc_feature (444)..(444): n comprises a, c, g, or t, or includes no nucleotide
  misc_feature (465)..(465): n comprises a, c, g, or t, or includes no nucleotide
  misc_feature (488)..(488): n comprises a, c, g, or t, or includes no nucleotide
  misc_feature (502)..(502): n comprises a, c, g, or t, or includes no nucleotide
  misc_feature (506)..(506): n comprises a, c, g, or t, or includes no nucleotide
  misc_feature (531)..(532): n comprises a, c, g, or t, or includes no nucleotide
  misc_feature (584)..(584): n comprises a, c, g, or t, or includes no nucleotide
  misc_feature (592)..(592): n comprises a, c, g, or t, or includes no nucleotide
gaggacttcaaattacaggaccaagccctaaaggaaagcatcccatttgctgtaattggcagcaacactgtggtagaggccagagggcggcgtgttcggggccggctctacccctggggcatcgtggaagtggaaaacccaggacactgcgactttgtgaagctgaggacaatgctggtgcgtactcatatgcaggacctgaaggatgtgacncgggagacacattatgagaactatngggcacagtgcatccagagcatgactngtctggtggtgaaagaaaggaattgnaacaaactgactnnagagaagtggtactgacttccccatccctgctgtccaccagggacagatccagaaacagagaggctgatccgagaagaaagatgangagctgcngcggatgcangagatgcttgcatnanaattcaaagacagatgaangagacccattagttttcaatnctggggtattttaaatcttcttntttgtcttgccaangccnggcccttccagaccagttttgttanncccttgtagttctggcactttgctttaaatcctgttgcctcccagagcttanagggaaanaagtttataaat

SEQ ID NO: 5581 - DNA, 638 bp, Canis familiaris
  misc_feature (450)..(450): n comprises a, c, g, or t, or includes no nucleotide
  misc_feature (469)..(469): n comprises a, c, g, or t, or includes no nucleotide
  misc_feature (480)..(480): n comprises a, c, g, or t, or includes no nucleotide
  misc_feature (485)..(485): n comprises a, c, g, or t, or includes no nucleotide
  misc_feature (494)..(494): n comprises a, c, g, or t, or includes no nucleotide
  misc_feature (508)..(508): n comprises a, c, g, or t, or includes no nucleotide
  misc_feature (533)..(533): n comprises a, c, g, or t, or includes no nucleotide
  misc_feature (548)..(548): n comprises a, c, g, or t, or includes no nucleotide
  misc_feature (554)..(554): n comprises a, c, g, or t, or includes no nucleotide
  misc_feature (595)..(595): n comprises a, c, g, or t, or includes no nucleotide
  misc_feature (634)..(634): n comprises a, c, g, or t, or includes no nucleotide
  misc_feature (637)..(637): n comprises a, c, g, or t, or includes no nucleotide
aaaaaaagttggctataagtaagagagggcacatctgaaggtttctgataagatttacttaaataagacaaaatagtagtgaacttttataccccatttacatcaatggacaggtcatcgaaacagaaaatcaacaaggaaacagtggctttgaataacactttggaccagatggatttaacagacatattcagaacattccatcctaaaacagcagaatacacattcttctcaagtgcacatggaacattctccagaatagataaaatactgggccacaaaacaagtctcaagaaattcaaaaacactggagtcattccatgtgtcttttctgaccacaacactacaaaaactagaaatcaatcataagaaaaatttggaaagagaacaagtacaaggagggtaaataacatatgccaaataatgaatagatcaatgattaaagggctnaatgtgagaactggaactnttaaaattctnaaaanaacccaggngggaattttttttnattggcctttaaaagaattttttanaatggctcctggggncggggnaataaagccaaaatggctcctcaaataaaaagtttccttgngaggaaccatcaccaactccaagatggttttgttggtgnaang

SEQ ID NO: 5582 - DNA, 606 bp, Canis familiaris
  misc_feature (489)..(489): n comprises a, c, g, or t, or includes no nucleotide
  misc_feature (545)..(545): n comprises a, c, g, or t, or includes no nucleotide
  misc_feature (562)..(562): n comprises a, c, g, or t, or includes no nucleotide
agttaacattccagaaaaacttgggcaggcaagtttttagaactgcccccactatgctgcagtagattatctttctgttggagattttctactgcatttcaatcccattatggtgaaaacatttctggattgaaaaaaatatatataagtgcatgcaatttgatctgagtatcaacccaagtctaggaatttgcaatgaaaaacattctaatgaaaaatgctctattcatagaaccgaaggttttatctgggccttctagttttgctaatgagaaaagagtagctacaatgttatttaaatccatgctaggccaaagtgccaaattaaaatcatgtattgaggtttttattccagatcatttactctcctccttctaatcacactctacaataaaaattaggggggagggataatacacacatatatcttgcttcaaggggaaggaaggatgattaaatccttttactttcttaacttttttgttatgnaacttaaggcttggtcaaaaccttatttgagtcggggtttgcaaactgaatggaanaacccttttggaaaaanacttcaaacttaaaaaaaaaaaaaaagggggccgtttaaggatc

SEQ ID NO: 5583 - DNA, 560 bp, Canis familiaris
  misc_feature (339)..(339): n comprises a, c, g, or t, or includes no nucleotide
  misc_feature (395)..(395): n comprises a, c, g, or t, or includes no nucleotide
  misc_feature (417)..(417): n comprises a, c, g, or t, or includes no nucleotide
  misc_feature (428)..(428): n comprises a, c, g, or t, or includes no nucleotide
  misc_feature (448)..(448): n comprises a, c, g, or t, or includes no nucleotide
  misc_feature (459)..(459): n comprises a, c, g, or t, or includes no nucleotide
  misc_feature (478)..(478): n comprises a, c, g, or t, or includes no nucleotide
  misc_feature (489)..(489): n comprises a, c, g, or t, or includes no nucleotide
tttttaagtccgagtgctcaaatgaacccaagtgtgcaggcatccctggtccaaggggcccagtttgaccctgaccttaacgtgaattagaagggtcaggccacattgtctgggctccaaagccccagtaccaccaccaccacccagaacttgtgtgaccttgggaaagttgacttcaccctgattcttttcataggagtaacgtgaggatgataacagtgcctgctgcagggtgagatgaagtttgaggtgagaagcatttaataagatgctccccaaaatgtactactacactgtccagaggaggaaacagagtcaggatggcaatgcagtgtgtangagggcctgcgagcagccaaggtcaagaagtcagggccccacgcttgggttctctnttcctgtggagtggtaggtcanggtgctacctnttccctgtttgcctctgcangtaagtggtangcttgtcccttaaggcttntagtggggtanggattggtccaacactggcgcaccattggccacaagggtaaattaattgatgagtaaggaaagcccgggag

SEQ ID NO: 5584 - DNA, 538 bp, Canis familiaris
  misc_feature (469)..(469): n comprises a, c, g, or t, or includes no nucleotide
  misc_feature (484)..(484): n comprises a, c, g, or t, or includes no nucleotide
  misc_feature (502)..(502): n comprises a, c, g, or t, or includes no nucleotide
  misc_feature (507)..(507): n comprises a, c, g, or t, or includes no nucleotide
  misc_feature (522)..(522): n comprises a, c, g, or t, or includes no nucleotide
  misc_feature (532)..(532): n comprises a, c, g, or t, or includes no nucleotide
caactttgtgataacaaatttaaaaaaaattgaaaacaaatttaaaaaaagttgaaaacctcagtgtatcaatagaaaaataaattatgatatatttttcagtggaatatatgcatcagccagatctgcatttattaatgtagataaatcttgaaaacacagttgcagaataagagtcccatgtcttaaaatatactgtatattgttatactttgcgcacacacacaaacaaccccaacccccccatgaataattaattatgaaacatggaaggagatgacacagatgatagtgattgcttttggggaggaatggggatgggaatgggtacacaggaaacttgagctgtatctgtaacattttcttttaaaaacatgtaaaaaatatgacaaaataacaaccatgtattaaatctgaatgataggaacatgaaatgtgttatataagagacacataagtgcactgcttnattatggaaatccanccccccattggcctggantcatnttccaacttttgccnctcatttttntggggg

SEQ ID NO: 5585 - DNA, 330 bp, Canis familiaris
  misc_feature (22)..(22): n comprises a, c, g, or t, or includes no nucleotide
  misc_feature (43)..(43): n comprises a, c, g, or t, or includes no nucleotide
  misc_feature (109)..(109): n comprises a, c, g, or t, or includes no nucleotide
  misc_feature (313)..(313): n comprises a, c, g, or t, or includes no nucleotide
acctgggcgtgcgggggttgtntagcgtttgcgcgaagttgangacaccgcgggcacagtgactggccccaggccgtggactaggaggccagaagatctttcccacggngcagcgctgagatggatccgctcagggcccagcagctggctgccgagctggaggtggagatgatggccgatatgtacaacagaatgaccagtgcctgccacaggaagtgcgtgcctccccactacaaggaagcagaactgtccaagggcgagtccgtgtgcctggaccgctttgtcttcaaagtacctggaacatcctttaagncgggatgggcaaaaagg

SEQ ID NO: 5586 - DNA, 511 bp, Canis familiaris
  misc_feature (36)..(36): n comprises a, c, g, or t, or includes no nucleotide
  misc_feature (39)..(39): n comprises a, c, g, or t, or includes no nucleotide
  misc_feature (42)..(42): n comprises a, c, g, or t, or includes no nucleotide
  misc_feature (363)..(363): n comprises a, c, g, or t, or includes no nucleotide
  misc_feature (371)..(371): n comprises a, c, g, or t, or includes no nucleotide
  misc_feature (430)..(430): n comprises a, c, g, or t, or includes no nucleotide
  misc_feature (448)..(448): n comprises a, c, g, or t, or includes no nucleotide
  misc_feature (479)..(479): n comprises a, c, g, or t, or includes no nucleotide
  misc_feature (488)..(488): n comprises a, c, g, or t, or includes no nucleotide
cccttcgtctctgggatctcacaacgggtaccatcncangangatttgtaggacataccaaggatgtgctgagtgtggccttctcctccgacaaccggcaaattgtttctgggtcgcgagataaaactatcaagctatggaataccctgggtgtatgcaagtacaccgtacaggacgagagccattcagagtgggtgtcttgtgtccgattttcacctaatagcagcaatcccatcattgtctcctgtggttgggacaagttggtcaaggtatggaacctggcaaactgcaagctgaagaccaatcacatcggccacacgggctacttgaacaccgtgaccgtctcttcggatggatcttttntgtgcttntggagggaaaggatgggcaaaccatgcttgtggggatcttcaatgaaggcaaagcaccnttttacactttgatgggnggagacattattaatggcctatgctttaatnctaaacgancttggtttttgctggcaaggggc

SEQ ID NO: 5587 - DNA, 598 bp, Canis familiaris
  misc_feature (465)..(465): n comprises a, c, g, or t, or includes no nucleotide
  misc_feature (497)..(497): n comprises a, c, g, or t, or includes no nucleotide
  misc_feature (504)..(504): n comprises a, c, g, or t, or includes no nucleotide
  misc_feature (528)..(528): n comprises a, c, g, or t, or includes no nucleotide
ttgtggactcctggagtaatgttcacttttttgtgtccttggaaaatttaaattgctctaacaatgttacacagaaatgagctcatgacatttaacatactgtattttaattgtcaactttaattattaagttactgtgaaacagatatgccatttaactacagtgaaactgaaaattgcaggttttcaaatatttttccttgttggatctggaaaaggaattctattttgttctacacagaaaaacatgatacagttaatctttgaaaagttcttaggtaacatattcatccattagaaaagaagcagaaatactgagaagtgaaagatattatcagtcaactctggttttaaactgaaaccatcccagcatatttcacatggaattttaaaaaataagttaataattcagctcctgtcaacaagagcctttgaaacatgcattttcactagttggtatctagnctaggatgaaaaccaaaacaatatcagatcgncattacnctttaaatttggagctggctaaangtggccttagaaaaggggggcataatgctggatctccaactttatagaaaattggtcaaataaagattgg

SEQ ID NO: 5588 - DNA, 618 bp, Canis familiaris
  misc_feature (456)..(456): n comprises a, c, g, or t, or includes no nucleotide
  misc_feature (478)..(478): n comprises a, c, g, or t, or includes no nucleotide
  misc_feature (516)..(516): n comprises a, c, g, or t, or includes no nucleotide
  misc_feature (552)..(552): n comprises a, c, g, or t, or includes no nucleotide
  misc_feature (603)..(603): n comprises a, c, g, or t, or includes no nucleotide
  misc_feature (606)..(606): n comprises a, c, g, or t, or includes no nucleotide
aatatctaatgctaacagaagagaaacaatctaaattccagtaaacataaaccttaatttaagtatgcacgtcattatcttctcctgtaaaacaatttctgtctttaaaggtactggccatgaagaggggaaaccccagagctataaacaaactgattgggttggtccgaaaagcaactctcagccgagcagacccgactgtgataaaggagatcctggagaagaagctgtcatcgtgagccattttgggtccctgagggagagtgggcggcccgtgactgagaaccagagcctgggacacctgacattcaggggctcgacagagctggtgcctcccaggccctggcccagctggagccctaggatgcccctcacacagaccagtagtgacagcccagttgcttcatggacctcaaaatggctccaccacagcagtgggtagcaaatagcacgttncagtgctaatgattctgaactnaaggaggcaccatttcagatgatgtcaccattttaagnaaaacccttattttgagttcctaacaaaaattttgngtaagtccaaaaaccaagccttgttttggtgccagaatgacaatggtcaanaanacatggttgaac

SEQ ID NO: 5589 - DNA, 491 bp, Canis familiaris
  misc_feature (27)..(27): n comprises a, c, g, or t, or includes no nucleotide
  misc_feature (369)..(369): n comprises a, c, g, or t, or includes no nucleotide
  misc_feature (444)..(444): n comprises a, c, g, or t, or includes no nucleotide
  misc_feature (479)..(480): n comprises a, c, g, or t, or includes no nucleotide
tacttggagagcaaagtaaaaatttgntaatttaaaactgctgtagattgtgccagtgatagtgatctgcacattaaatttgctgttcattttttaatgaagtgatttttttaattggagtatagttgccagacaatgttacattagtttcaggttcaatttctacttttggacgcattatttgaggtccattggaattttaagaaaataatgagtgaatagtggctttagattactctcaggaacactagcggtgttctttgaggctctttcaaagactggagggaaggaagggaaagaaactgggcagtggggctcaagatcgtccacccccaacccccactcctcctttattatatgtttacattnctttgttacttgtggaaatctaagactcagaatgaaagacaatacaactgggcttcattagtgggttgattggtncccaataagggatggcaccaaagggaaaaaaaagnncttgaagttgg

SEQ ID NO: 5590 - DNA, 517 bp, Canis familiaris
  misc_feature (432)..(432): n comprises a, c, g, or t, or includes no nucleotide
  misc_feature (444)..(444): n comprises a, c, g, or t, or includes no nucleotide
  misc_feature (472)..(472): n comprises a, c, g, or t, or includes no nucleotide
  misc_feature (478)..(478): n comprises a, c, g, or t, or includes no nucleotide
  misc_feature (496)..(496): n comprises a, c, g, or t, or includes no nucleotide
  misc_feature (502)..(502): n comprises a, c, g, or t, or includes no nucleotide
aaagtgtttatttcaaaagatgatgtgtatttcagaagatagtgatgctgatactgaatattattgttttcaggacaaactaaacccattaggaaggaatcctgagaactattaataagccgcatagacccttgtattgctcccctccctctcttgcttctttctcgttcaaaagcaggcacagctggagttccattaatgagtgtcagcgagatcagatgggttttttccagaccacagaccatcagttgtcatgacaatttgatgtggttctttaggtcatatgttgcctgtaactatcacaccaacttatttcttccttaggatgggggaatgttgggtgtcaaccagcctttcctatgatcgttcgtgattctgtctgttttctcagagaattttattgccatccaattggtacagagacggctcttnatctagactttntaacaaagatataaaatgcagtgatatngcactnaaaaaaaaatttttcttntttggnggggttccatgaatt

SEQ ID NO: 5591 - DNA, 590 bp, Canis familiaris
  misc_feature (450)..(450): n comprises a, c, g, or t, or includes no nucleotide
  misc_feature (479)..(479): n comprises a, c, g, or t, or includes no nucleotide
  misc_feature (492)..(492): n comprises a, c, g, or t, or includes no nucleotide
  misc_feature (509)..(509): n comprises a, c, g, or t, or includes no nucleotide
  misc_feature (520)..(520): n comprises a, c, g, or t, or includes no nucleotide
  misc_feature (539)..(539): n comprises a, c, g, or t, or includes no nucleotide
  misc_feature (550)..(552): n comprises a, c, g, or t, or includes no nucleotide
  misc_feature (562)..(562): n comprises a, c, g, or t, or includes no nucleotide
cagagacggctggtgagggaggagggactgcttaaggcgacagcagataagtttttcttaaaaaaaaaaaagctaggaattaaagcaatctttaggaaacgtaaatagggataatacttcttgagatattgcttagcattaaattcgtagagtagtattgtaatcttaaaaagagcttaaaaggaaagcaatgaagattttaaagagtagcttgagaaagaaaatgctctttgtagaaaaagacggaggttaagagatgaagcttaatggagtggaaagaaatctaattttagaagaattgttgagaggactgcaaagtccgggattcaataaatccttaaatctgagggcagcctttcaggttgtcgttgaaatgtaaatgacctaagtagagcctaaatgttttagacccggttgtagatggtaaagatttaaaaaggttgtcttttnaaaagcttactttgaaggggtttaagagnccttcaaaatctngggtaagggatgggtanttggcccctanacttaagctaatccttgtnaacttgcaaannnttattagggngggatgaaaattgagaaattaaaaatga

SEQ ID NO: 5592 - DNA, 593 bp, Canis familiaris
  misc_feature (413)..(413): n comprises a, c, g, or t, or includes no nucleotide
  misc_feature (451)..(451): n comprises a, c, g, or t, or includes no nucleotide
  misc_feature (459)..(459): n comprises a, c, g, or t, or includes no nucleotide
  misc_feature (473)..(473): n comprises a, c, g, or t, or includes no nucleotide
  misc_feature (478)..(478): n comprises a, c, g, or t, or includes no nucleotide
  misc_feature (488)..(488): n comprises a, c, g, or t, or includes no nucleotide
  misc_feature (516)..(516): n comprises a, c, g, or t, or includes no nucleotide
  misc_feature (583)..(583): n comprises a, c, g, or t, or includes no nucleotide
agggcactgaagcaacttcccattctaacgcacaatcctcaagcccctttttccctccacacctactgtagtctgcagaaacctcttccctgaggtggaagagaactcagaggggaaaagtcagctatcctcctgttatgcatgattgtgttttaaaagcacaaaaagaaaccttaccctccatcctggcctgaatggccatctttgcccttctgaggtggggacttgatcctcaacatcccaaaatagcccctgccacacttatgttcttggaacattcttgatgctggaagccagggccagagttcccagtattggcctgaagtgtggctgacctggtcctaccccagctggggagatgggttggaggtgtctggccaacagactgagaggagggaggaggtcccatccanaggacaggatgactgagcagagcggggagccatactgnttttcctnatttgtgaaaaaanttctnaaaattgccnttccatttaggtaaaaaaatttgttaancccggccagggccatggctttatgggcaaggacttgaagggcccttaagccaaattgatcctaactnaaaaattgtg

SEQ ID NO: 5593 - DNA, 589 bp, Canis familiaris
  misc_feature (420)..(420): n comprises a, c, g, or t, or includes no nucleotide
  misc_feature (425)..(425): n comprises a, c, g, or t, or includes no nucleotide
  misc_feature (451)..(451): n comprises a, c, g, or t, or includes no nucleotide
  misc_feature (454)..(454): n comprises a, c, g, or t, or includes no nucleotide
  misc_feature (469)..(469): n comprises a, c, g, or t, or includes no nucleotide
  misc_feature (477)..(477): n comprises a, c, g, or t, or includes no nucleotide
  misc_feature (516)..(516): n comprises a, c, g, or t, or includes no nucleotide
  misc_feature (560)..(560): n comprises a, c, g, or t, or includes no nucleotide
  misc_feature (570)..(570): n comprises a, c, g, or t, or includes no nucleotide
gtgtccctaaaaccctgagcagctggcaggggtcatggccaccaaggagagcgcctctgtggcccatggctgggacgtcagcacgttggaccttcctcccctaccccccacgtagctggagccaaatcctgcttcagtggaggaaaatgtgcccttggcgcttgtggaagccagatgccccctcccctccatggacctggccctcgaggtgagagtgttgcctactttatttctcggagatgaacctggctgaggttatttctcgtcttctctgatttcctcttggccagtttcggcccagggctgttggagcccctgccccttcaagggaagcaagcagactcctctttctgggccccaagccctagggctgcatggccaaccagagggaaggcaggtggacattggcgggcctgggtnctttnggcacttgggttggagaactggcctnaanggcaaggcaacttgngccgtctnattttacattaaggtaacccctggctttggagggccgtngggtaactttaaaggccacccttggacacggagccaagtggccnttttaggaanaaacaagctggttttcttt

SEQ ID NO: 5594 - DNA, 628 bp, Canis familiaris
  misc_feature (453)..(453): n comprises a, c, g, or t, or includes no nucleotide
  misc_feature (473)..(473): n comprises a, c, g, or t, or includes no nucleotide
  misc_feature (503)..(503): n comprises a, c, g, or t, or includes no nucleotide
  misc_feature (530)..(530): n comprises a, c, g, or t, or includes no nucleotide
  misc_feature (572)..(572): n comprises a, c, g, or t, or includes no nucleotide
  misc_feature (575)..(575): n comprises a, c, g, or t, or includes no nucleotide
  misc_feature (582)..(582): n comprises a, c, g, or t, or includes no nucleotide
  misc_feature (613)..(613): n comprises a, c, g, or t, or includes no nucleotide
  misc_feature (616)..(616): n comprises a, c, g, or t, or includes no nucleotide
cactgttttttttcctctgattgcatcagcatatatacaatatacctatataacaaaattcagtgtcaagctttcttatgcaagggatttaccccaccccaccccataaaaaagaacctagttccatgggtctttccgagtagattatcaagggatgatagaaaagattttaacaagtcatcctaagaaagcctcacctgcagagccgcatgcgtctgcacacagttttaggctttgtaaattggggtgaggtgggccagcatgaaagctagggctcctggtctgggctgtagagaatggagcgccagggcacacgggtggggtgacagcaccgtccggagaccctggggggctggtcctaggctttcccactaccttgctatgtgacctttggtagagttcatttcccaggtctcggttttcttatttgtgaaagtgacaggggagatcatntggccccaaaagtgagactntacctatgctttcttcttaactggaaaacnaaaaggggcggaactgaggggtcaggnggaaatgtgtgcaattgaccttgcaaaggggcaggcccttgncanactttgnttaggaaaggcacaggaggatgttaacatantanactgggaccctg

SEQ ID NO: 5595 - DNA, 325 bp, Canis familiaris
gtttttgttttcctcttccagtcaacaaaacggaatattccgatgctttttgtccggggagatggtgttgtactagttgctcctccattaagagttggctgaaacaaagaatttatcgtgtatggaatataggagattttgtatgattgcctctttaaatgtagaagacatccaaaagagaaacctgcgttcattttgatattaagaaatgaccaaggattcttccactcctgaattgagttgatttgcagataactcaaaaattcttaagctaaagggcattttaatttttttccaactctttcaataaatgtgatcaccagga

SEQ ID NO: 5596 - DNA, 478 bp, Canis familiaris
  misc_feature (421)..(421): n comprises a, c, g, or t, or includes no nucleotide
  misc_feature (435)..(435): n comprises a, c, g, or t, or includes no nucleotide
  misc_feature (450)..(450): n comprises a, c, g, or t, or includes no nucleotide
  misc_feature (469)..(469): n comprises a, c, g, or t, or includes no nucleotide
cggcgcgcgggcgggaagcgaggaggcgggcgggcgggccagcgacgagcgcggagagaaaaggcgcgagcggccgagagggcacccgggccggacacctagctgctgccgccgccgccgagccgcccctgtgcttactgactgatccacgtcagggccaccgccatgtcgagccggggcggaaagaagaagtccaccaagacctcgcggtccgccaaggcaggagtcatcttccctgtggggcggatgctgcgctacatcaagaagggccaccccaagtacaggatcggcgtgggggcgcctgtgtacatggccgctgtcctggagtacctgacggcggagattctggaactggctggcaatgcagcaagagacaacaagaagggacgggtcacgccccggcacattctggttggctgtngccaatgacgaaanagctcaatcaacttnttaaaagagtcaccataancaggggggg

SEQ ID NO: 5597 - DNA, 530 bp, Canis familiaris
  misc_feature (396)..(396): n comprises a, c, g, or t, or includes no nucleotide
tctgacattcatcagctgtgtgccaagaactttctgggccccacagtagataccagcgaacacatcaggtgacctgtcctcccgccactcacattccagtgagacgtgccgtaaacaagaaaactgctgatggcgatgagtgccctgtaaactaaacagggtgatgtgacatcgactgctggtggcatcggagctgagacctagagggacgaaaaggagtcgggcaggtcaagggctaccgctgctctggaagtcaggaagtcaggctcagtgagggacacagcccagatttctcttttcaggggcagttgcagaccccgacgctgtcttctccttgcctggaaagaaccgtgaggacttggagggccattctgagggggctggcagtggacagtncaccaaaccatccaatacaggtttaccctgcaacttgggctttcagaaaccaatagtgagtgagtagggcttttggtagaaccctttcttcattgccatgccttggttaacttgaagcccttgggttttgaaaa

SEQ ID NO: 5598 - DNA, 635 bp, Canis familiaris
  misc_feature (467)..(467): n comprises a, c, g, or t, or includes no nucleotide
  misc_feature (493)..(493): n comprises a, c, g, or t, or includes no nucleotide
  misc_feature (496)..(496): n comprises a, c, g, or t, or includes no nucleotide
  misc_feature (517)..(517): n comprises a, c, g, or t, or includes no nucleotide
  misc_feature (531)..(531): n comprises a, c, g, or t, or includes no nucleotide
  misc_feature (544)..(544): n comprises a, c, g, or t, or includes no nucleotide
  misc_feature (559)..(559): n comprises a, c, g, or t, or includes no nucleotide
  misc_feature (600)..(600): n comprises a, c, g, or t, or includes no nucleotide
tcgggaggaagacggagctggctgcccagcccgcgggcccattagggggtgcagctatgggcgctgtcgccgtggattgttattttgtgtcagtaagtaatccataaagtgccaacatgggaaagaaacggacaaagggaaaaactgttccaattgatgattcttctgaatctttagaacctatgtgcagacacattagaaaaggactggaacaaggtaatttgaaaagggctttattgaatgtggaatggaatatttgccaagattgtaagacggacaataaagtaaaagataaatctgaagaagaaacggaagaaaacccttcagtttggctatgtcttaaatgtggccatcagggctgtggcagagattctcaggagcagcatgccttgaagcactatatgacaccaagatctgaacctcattgtctgggtctcagtttggacaactggagtgtatggtggtanctatgtgatgatgagggccagaattnagntcaaacaaaattgggtcaagnggttgatattttanaaacaagctggcnttacacctccaaatnacaaaagatggtaatgttgactttgaaataaaaatttaaanggggcaaaatgaccaaagcggagaaaaggaaacat

SEQ ID NO: 5599 - DNA, 440 bp, Canis familiaris
  misc_feature (424)..(424): n comprises a, c, g, or t, or includes no nucleotide
  misc_feature (431)..(431): n comprises a, c, g, or t, or includes no nucleotide
aggtcgggctgggccacggccccagcgggaaacaggagcttctcggaaattaggcgacggcagagcgggagcctgggtggcctccacgaaccacctgtttccccccagagcccagcaggaggggccagggagacgcttgtctcagagcgggactggaggagttttctgggtggcctcgcagtgtcaccctgtcacacatcccacggcagtgcacattgcagatactaacccttggtggacggatgacccgccgtccgctggcatcctagacgccgacgtgtgtagagaacaggcttcggagcgccttcttcccgcccgctgacccagaggcaggggccgggcctgggcagccctgggagccgagacaggggctcctccgaatcgtgccttttctaactggaactgacatttcctgcacttcctngtaacgnactgatccc

SEQ ID NO: 5600 - DNA, 439 bp, Canis familiaris
gtgaccctgctggtggaccgggacggcttgtacaagatgagccgcctgtacatcactccggacgggtttttcttccgagtccacatactggccctggacgactccagctgcaataagccgtgtccagaatttaaacctggcagcaggtatatcgtgatgggccacatctaccataagagacgccagctccctacggctctgctccaggtcctgagaggacggctccgacccggagatggactgctcaggagcagcagcagctatgtgaagagatttaatcgaaaaagggacgggcaagtgcaagatgcagttcacacccagtgcatctgaatcgtcctatccttgggcttttgggagagacttggcattcaacaacaagatggggaagggcctgtcttcacgtaatgggggtctttctgtggagtaagggcccataact

SEQ ID NO: 5601 - DNA, 499 bp, Canis familiaris
  misc_feature (385)..(385): n comprises a, c, g, or t, or includes no nucleotide
  misc_feature (453)..(453): n comprises a, c, g, or t, or includes no nucleotide
  misc_feature (458)..(458): n comprises a, c, g, or t, or includes no nucleotide
  misc_feature (468)..(468): n comprises a, c, g, or t, or includes no nucleotide
  misc_feature (484)..(484): n comprises a, c, g, or t, or includes no nucleotide
agatgtgagattgtatagagatgaagtgtcatcacatcatgtgcatggtgcggaacctgctgttttatctatttattgtgccgtgtttacagttttttgtacactgtaccttcattggttcctgtgctgtagtaaatgtgttaggtagctgtggactccttggtattttgtaaatggtataacataacttggttcccctctgggtccctgagttttctgtgtatcatgtgaaaaaaatggtgacatacatacagaattttacaaaaaaaaaaaaaaaaaggcatcagtttttaaaaaatggggaatgtactgttaaatggggatcttcctggtctactatcattaggacaagtaacaagctaaaaatgaagtctgttgaatcttnccatccccacttgcccacagagctatgtgggtagtttctggtacttaaaagcactaatgttatgttgntggtntacaaacagnccaatagtcccatttntttcccaccaaaaaa

SEQ ID NO: 5602 - DNA, 543 bp, Canis familiaris
  misc_feature (438)..(438): n comprises a, c, g, or t, or includes no nucleotide
  misc_feature (508)..(508): n comprises a, c, g, or t, or includes no nucleotide
  misc_feature (524)..(524): n comprises a, c, g, or t, or includes no nucleotide
atctatgttggttcacctgtagtgttttttaaagtgtggtcagaggccacgatagaatgtatcccttccaagtgtagtgataaatctgtgtttttctttgaagtaagtcattttaaccaaatgttcggtcataatcatttataagaagtacctatatcaaaggaatttaaaaaaaaaaaagcaatcagtattactggaccaaaattggtgtttgttttaaccttgactcttcttttgattatttctaatgctacaagaatgctgtaaagtgtcttttaaaatgctgtagcctgacaagacatttttgtcagtgtataaaaaattaggtagtatcgtgcactgatttgaccattgtgaaatcttttctcagtgtaagtgcatttctaataaaatttatgagtgaaacaatctttgtacaacgactagtcatgcatcatncgtaattttacaagttcttgtagtaggtagcggggtatttactaagggtatctgtggcatggatatgcantctggaggaataattnaattgggggtttggttctt

SEQ ID NO: 5603 - DNA, 423 bp, Canis familiaris
  misc_feature (382)..(382): n comprises a, c, g, or t, or includes no nucleotide
aagctctgttgaggaagtaaataccatctagaaaatgaggtgtgggtataaaaccaccaatagtgggctaaagatgtagtagcctcaacttgaggtctccttcttccctcctgaggaatcaaatgattcagtgtgagtcacagaagctaggccacgtcaaatcaggcctcctccaggtgccctcctgctgtgcagacttttttagcttcttgttcctttggcacatcgatgtttgtgtgtgttataatgggatcagtctcatgatgagcaccatgatgacatagaatttccatgtcattgttaatgtgctgttcttgtcttctgtccccttctgttattgaatcaaacagaagtattctgctgtttctctctgcaacatctncacagaagtcctaaaaagtcatcaatgccactgaggaactt

SEQ ID NO: 5604 - DNA, 511 bp, Canis familiaris
  misc_feature (342)..(342): n comprises a, c, g, or t, or includes no nucleotide
  misc_feature (456)..(456): n comprises a, c, g, or t, or includes no nucleotide
  misc_feature (485)..(485): n comprises a, c, g, or t, or includes no nucleotide
  misc_feature (487)..(487): n comprises a, c, g, or t, or includes no nucleotide
  misc_feature (492)..(492): n comprises a, c, g, or t, or includes no nucleotide
agttgttcaaaaaggagtctgaacaaatgtgttcaaacaggaaagtatgtttattttcagataaggggaatttacatttcagttaagcatcagactctttggtaaatgttgagggttttcttccctctgtatcattaagttattggatcacatttactaatacatttaatatcataaaagtcaaaatcagaatctctaatatttgatgttttcgttttctcccagtccagtaattcctgtatgggaaaactgaatttgtgtgaaaagttagtcaagtatgaattctttgcactttcccaaatttacttaaattacttaatgcttttaaataaaagcaacggnctttatttatttatttatttatttatttatttatttatttatttatttatttttcttaacacatcaagggtatgtcattattactcaaagcagctttggcatatatttcctggnttttaacaataaaaacttcatttttattncntcccntaaaaaccaaaaatgggca

SEQ ID NO: 5605 - DNA, 439 bp, Canis familiaris
  misc_feature (360)..(360): n comprises a, c, g, or t, or includes no nucleotide
  misc_feature (373)..(373): n comprises a, c, g, or t, or includes no nucleotide
acatttgaataaagcccagaaattggtaaggaagaaaaaccgggggagagagctttttaggtagagggaacagcagatgcaaaggccctgaggtaggaccatacttaatctcttccaggagaggcagaaagaccagattgcctggggcaggagactgaggaagcaagtggggtggggtgaggtctgagaaggaacagggaccaggtgatgcaggactaggcgggctatggtgaggattttttggcttttccttggaatgcaatggaagccagggcagggtggggcgctctgagctcagggaccccgatctgacttaggtgttggcaggatccctgagactggggtgtggggagaccacanagcggcttgcttncttgcgatggttcaaacaggtgacagtggtggacaagaaccggggaggaaggcctgaaaggaagtg

SEQ ID NO: 5606 - DNA, 586 bp, Canis familiaris
  misc_feature (417)..(417): n comprises a, c, g, or t, or includes no nucleotide
  misc_feature (463)..(463): n comprises a, c, g, or t, or includes no nucleotide
  misc_feature (475)..(475): n comprises a, c, g, or t, or includes no nucleotide
  misc_feature (490)..(490): n comprises a, c, g, or t, or includes no nucleotide
  misc_feature (558)..(558): n comprises a, c, g, or t, or includes no nucleotide
  misc_feature (562)..(562): n comprises a, c, g, or t, or includes no nucleotide
gctgaggcagtggcatcatggaggccccctggggctggctggcgctctgcgtgctggccacctccctcgcatctgctgtgacccaggacgtgtgccgagccctagacgggagggatggggctgcagggacacccggccgacccggacggccaggcctcaagggggagcaaggggagccaggggctcctggcatgcggacgggcatccggggccttaaaggggaccagggggatcctgggccccctggaaaccctggcaacatgggcttccctgggcccagcggcctcatggggctccctggcataccaggacggagaggccccaagggcaaccccggaaacatcagggaccaagccgcgaccggccttctcagccataaggcgcaacccacccacgggtggcaacgtggtcatcttngacacggtcatcaccaaccaagagggcccgtaccaagaaacacttnggccgggtcatntgcgccgggccccgnttctactacttaattttcaagtgggggccaagggggaaaattggcttgtccaacgggggcctccggangggnccaaatccgggcttcttggggttt

SEQ ID NO: 5607 - DNA, 607 bp, Canis familiaris
  misc_feature (275)..(275): n comprises a, c, g, or t, or includes no nucleotide
  misc_feature (404)..(404): n comprises a, c, g, or t, or includes no nucleotide
  misc_feature (425)..(425): n comprises a, c, g, or t, or includes no nucleotide
  misc_feature (456)..(456): n comprises a, c, g, or t, or includes no nucleotide
  misc_feature (486)..(486): n comprises a, c, g, or t, or includes no nucleotide
  misc_feature (494)..(494): n comprises a, c, g, or t, or includes no nucleotide
  misc_feature (531)..(531): n comprises a, c, g, or t, or includes no nucleotide
  misc_feature (533)..(533): n comprises a, c, g, or t, or includes no nucleotide
  misc_feature (557)..(557): n comprises a, c, g, or t, or includes no nucleotide
  misc_feature (600)..(600): n comprises a, c, g, or t, or includes no nucleotide
ctccctgatcctcccacagacaccccagagagaggaagcccctttggggtggggaggtgagggatttcatctcaacacaggctgagaatgaggggagggggcttttttttctttctttctttccttttttttttttttttttttggaacatgttaggagttaatgttgcaaagagtagtttacatcttcactttctgaagacacttgaatttaggaccgacttatctgtgacaggcatgccaggagcggccagagccatcaaggcttgccgcttnctaccccccacactcccgtgggggtccaagatctgagacacaaagcagcagcctgcccaaacctttctgctcatcctgtacccttccatgattggtccatgccagtacgacctttgggcattgaacatnaaaaggtttgtgtaccttggnccttgccaaggggcaagtttttttttgcctntttttgaacttggaacaaatgccttaccantaaaaagnggttgcttggccttccccaacctggacccccaagggntnaaatcaagtgtggagccttatttnaaaagttttaatttttttttgttcacttggactttttacccanccaaccc

SEQ ID NO: 5608 - DNA, 666 bp, Canis familiaris
  misc_feature (448)..(448): n comprises a, c, g, or t, or includes no nucleotide
  misc_feature (450)..(450): n comprises a, c, g, or t, or includes no nucleotide
  misc_feature (487)..(487): n comprises a, c, g, or t, or includes no nucleotide
  misc_feature (506)..(506): n comprises a, c, g, or t, or includes no nucleotide
  misc_feature (514)..(514): n comprises a, c, g, or t, or includes no nucleotide
  misc_feature (549)..(549): n comprises a, c, g, or t, or includes no nucleotide
  misc_feature (553)..(553): n comprises a, c, g, or t, or includes no nucleotide
  misc_feature (564)..(564): n comprises a, c, g, or t, or includes no nucleotide
  misc_feature (606)..(606): n comprises a, c, g, or t, or includes no nucleotide
  misc_feature (629)..(629): n comprises a, c, g, or t, or includes no nucleotide
  misc_feature (632)..(633): n comprises a, c, g, or t, or includes no nucleotide
  misc_feature (656)..(656): n comprises a, c, g, or t, or includes no nucleotide
  misc_feature (660)..(660): n comprises a, c, g, or t, or includes no nucleotide
atgtcaagacaaagaagggaatccagctcccgagtacacctggtttaaggatggcgttcctttgtcagagaatccaaaacttggctcccaaagcaccaacagctcctatacaatgaatacaaaatcgggaactctgcaatttaacactgtttcaaaactagacagtggagaatattcctgtgaagcccgtaattctgttggacatcgcaggtgtcctgggaagcgaatgcaagtagatgatctcaacatcagtggcatcatagcagctgtagtagttgtggccttagtgatttctgtttgtggccttggcgtgtgctacgctcagaggaaaggctacttttccaaagagacttcgttccagaagagtagttcttcatctaaagccaccacaatgagtgaaaatgatttcaagcatacaaaatcttttataatttaaaaagaaattcancntttagagacgccaaaacacaagtggttcacaaggttnttaaagggttttaaaactntgtttggnttacattgcaaagaggtccttgaagagaggaagtngganttcgggataanttttattgattgtaaattacttgaaatggtattttaaaaaanagttttgcagccctaaataaaantanntggcttttatgttgggctaagtnaaanaaaaca

SEQ ID NO: 5609 - DNA, 645 bp, Canis familiaris
  misc_feature (412)..(412): n comprises a, c, g, or t, or includes no nucleotide
  misc_feature (437)..(437): n comprises a, c, g, or t, or includes no nucleotide
  misc_feature (457)..(457): n comprises a, c, g, or t, or includes no nucleotide
  misc_feature (475)..(475): n comprises a, c, g, or t, or includes no nucleotide
  misc_feature (491)..(491): n comprises a, c, g, or t, or includes no nucleotide
  misc_feature (516)..(516): n comprises a, c, g, or t, or includes no nucleotide
  misc_feature (526)..(526): n comprises a, c, g, or t, or includes no nucleotide
  misc_feature (565)..(565): n comprises a, c, g, or t, or includes no nucleotide
  misc_feature (596)..(596): n comprises a, c, g, or t, or includes no nucleotide
  misc_feature (598)..(598): n comprises a, c, g, or t, or includes no nucleotide
  misc_feature (618)..(618): n comprises a, c, g, or t, or includes no nucleotide
  misc_feature (621)..(621): n comprises a, c, g, or t, or includes no nucleotide
gttgaggacttaaacttggcaaagcaatctgagtaaacacagtaaatactatctttatttttagttagctacagagacttagattcccctgatacctcatgccatggtctctgcaaggcccttcagttttagtctacagcgcagttatgacacccatgcctcacacaccatagtgtgttgggaatcggttaaccttcgatgacagcggtctcctctgttgcctctgccacagatactcatgcttgttgatcaggcataggtgtacaggtatccctgtcagacctgtgatgatagtgattgttagcattaatttccctacatggtgttgatctataaatcccactctctttcttgctttttttcctctccactttttttgatatctgttcatactgctgaatatatacctggnttattgcttttaactagactgtcgngatcccatggtacacaaaantcttggttattccctagnggtaggacagcatatnaaacaatttctggtttggtacaaanggccttgaantttggccctacaaaagctggttacctgctatgattttgngggacaccatgaaaggctgaggggttttggntnctggaggtcctcgatggtgnggnattgggggtaactggggctgagga

SEQ ID NO: 5610 - DNA, 673 bp, Canis familiaris
  misc_feature (487)..(487): n comprises a, c, g, or t, or includes no nucleotide
  misc_feature (498)..(498): n comprises a, c, g, or t, or includes no nucleotide
  misc_feature (522)..(522): n comprises a, c, g, or t, or includes no nucleotide
  misc_feature (524)..(524): n comprises a, c, g, or t, or includes no nucleotide
  misc_feature (552)..(553): n comprises a, c, g, or t, or includes no nucleotide
  misc_feature (643)..(643): n comprises a, c, g, or t, or includes no nucleotide
  misc_feature (652)..(652): n comprises a, c, g, or t, or includes no nucleotide
caccacccacaccaccctggagcactctgattgtgccttcatggtagacaatgaggccatctatgacatctgtcgtagaaaccttgatattgagcgcccaacctacactaacctcaaccgccttattagccagattgtgtcctccatcactgcttccctcagatttgatggagccctgaatgtggatctgacggagttccagaccaacctggtgccctatccccgcatccacttccctctggccacatatgcccctgtcatctctgctgagaaagcctaccatgaacagctttctgtagcagagatcaccaatgcatgctttgagccagccaaccagatggtgaaatgtgaccctcgccatggtaaatacatggcttgctgcctgttgtaccgtggtgacgtggttcccaaagatgtcaatgctgccattggcaccatcaagaccaagcgcagcattcagtttgtagactgggccccactggctttnaaagtgggcantaattacaagccttccactggggnancccgggggagaactgggccaaagacaannagcttttgtgcttgtttagcaaaacccaaaccattgttaggcctgggcttgctggacccaagtttacctgatgttgccaagcggcctttnttactggtntttgggtaagggatgaggaag

SEQ ID NO: 5611 - DNA, 662 bp, Canis familiaris
  misc_feature (412)..(412): n comprises a, c, g, or t, or includes no nucleotide
  misc_feature (419)..(419): n comprises a, c, g, or t, or includes no nucleotide
  misc_feature (455)..(455): n comprises a, c, g, or t, or includes no nucleotide
  misc_feature (465)..(465): n comprises a, c, g, or t, or includes no nucleotide
  misc_feature (504)..(504): n comprises a, c, g, or t, or includes no nucleotide
  misc_feature (507)..(507): n comprises a, c, g, or t, or includes no nucleotide
  misc_feature (537)..(537): n comprises a, c, g, or t, or includes no nucleotide
  misc_feature (564)..(564): n comprises a, c, g, or t, or includes no nucleotide
  misc_feature (609)..(609): n comprises a, c, g, or t, or includes no nucleotide
  misc_feature (622)..(622): n comprises a, c, g, or t, or includes no nucleotide
  misc_feature (631)..(631): n comprises a, c, g, or t, or includes no nucleotide
  misc_feature (634)..(634): n comprises a, c, g, or t, or includes no nucleotide
tttcgagatggtcagctgctgccaagctccaactacagcaatatcaagatctacaacaccccctccgccagctatttggaggtgaccccagactctgaaaatgatttcggaaactacaactgtactgcagtgaaccgcattggacaggagtctttggaattcatccttgtccaagcagacaccccgtcttcaccatccatcgaccaggtggagccgtactctagcacagcacaggtgcagtttgatgaaccagaggccacaggtggggtgcccatcctcaaatacaaggctgagtggagagcactgggcgaggaagtgtggcatttcaagtggtatgatgccaaagaagccaacatggagggcatcgtcaccattgtgggcctgaagcccgagaccacatacgctgtgcggntggcggncctgaatgggaagggcctgggtgagatcagcacggncttcgagttnaagaaacaagcagtccgggaacccaacgcactaaacttnaanggcaaatggcgaggatggaactttttaagngaaccttttaagcaggatgacgggggntcccataaacctacttggtcaagtccgacgaagtgtcttcggggnggaaccaaaaatnggttccgtntgnagggccacgtatgctaagtcctggatgg

SEQ ID NO: 5612 - DNA, 529 bp, Canis familiaris
  misc_feature (330)..(330): n comprises a, c, g, or t, or includes no nucleotide
  misc_feature (405)..(405): n comprises a, c, g, or t, or includes no nucleotide
  misc_feature (435)..(435): n comprises a, c, g, or t, or includes no nucleotide
  misc_feature (474)..(474): n comprises a, c, g, or t, or includes no nucleotide
  misc_feature (493)..(493): n comprises a, c, g, or t, or includes no nucleotide
  misc_feature (506)..(507): n comprises a, c, g, or t, or includes no nucleotide
aggcagcgggggatccggaagtcaacaccatgtcgagtctgcacaagagcaggattgcagatttccaggatgtcctgaaggagcccaccatcgtcttggaaaagcttcgggaactcagttttagtggcatcccctgtgagggcggactgcggtgcctctgctggaagattctcttgaactacctccccttggaaagagcctcatggacctccatcctggccaagcagagggagctatactctcagttcctgagggaaatgatcatccagcctggtattgccaaggccaacatgggtgtgtccagggaggatgtgacctttgaagaccatncactcaaccccaaccctgacagccggtggaacacgtatttcaaggacaatgaggtgctgctgcagattgacaaanacgtccggaggctgtgcccaaatatatcgntctttcagagaggcaccgagtacccttggctttttattntggacccccaaaatgaagnttgagaacctttnnaaagcggtgggacaagacaacc

SEQ ID NO: 5613 - DNA, 517 bp, Canis familiaris
  misc_feature (443)..(443): n comprises a, c, g, or t, or includes no nucleotide
  misc_feature (496)..(496): n comprises a, c, g, or t, or includes no nucleotide
  misc_feature (502)..(502): n comprises a, c, g, or t, or includes no nucleotide
tgttatagcaaaaatacatatacggttaagttaatgaagaattttgttttatcagaatggtaacagaccgaagtactttgtagagactgactcgtaagctacttaaagacaacttgcaccaagaaaaaagatgtagaatcattcagagaaatgaaatttagttccaagcttcaaagaaatgtcaaaacttttgattccattcaataaagaacaaaaccaattgtatttttattactttcatctgaaacattccacattttaatctgagccttgcagacttttcatttggagtttgaagcttttttggttgctttttatttggagatcttcactaatatgagattggcaattaaaaagcaggtgcagttttcttttaatgtcatgctgttgtttaggtaataagaaatactaagtaattggctttagatttttgtaattttttnccataagttcctgctagatttcgtattctagtagtcaatgtattttcaggggnaatgtnaaaaaatttcccgtc

SEQ ID NO: 5614 - DNA, 625 bp, Canis familiaris
  misc_feature (229)..(229): n comprises a, c, g, or t, or includes no nucleotide
  misc_feature (492)..(492): n comprises a, c, g, or t, or includes no nucleotide
  misc_feature (518)..(518): n comprises a, c, g, or t, or includes no nucleotide
  misc_feature (546)..(546): n comprises a, c, g, or t, or includes no nucleotide
  misc_feature (555)..(555): n comprises a, c, g, or t, or includes no nucleotide
  misc_feature (599)..(599): n comprises a, c, g, or t, or includes no nucleotide
  misc_feature (601)..(601): n comprises a, c, g, or t, or includes no nucleotide
  misc_feature (610)..(610): n comprises a, c, g, or t, or includes no nucleotide
ttgctacttcttgcacttgaatcaacaaaagtacttttgaaaatgtgggtggccttcagtcttgttgaaaagaagatagccatctttgggatgcttgcctggctcagccgttgagcctctgccttcctttggctggctcggggtgtgaccctggggtcctgggatggggtcctgggatggagtcccacattgggcttcccgcaggaagcctgcttctccctctgccagngtgagaggcagacgcttctctctgtgtgtctcatgaataaattaatttaattaaaaaaacgaagatagccatcttctttacttcttagctgtaaagcattttcatgtttagatttataaacaacaattagaactagcaaatcaaacacattggacttcttaaatgtatacaatgtatgtcaattgtatctcagtaaaactggaagaaaaaagaattagcaattcaatgaatttttcctctctacatcatgatttcctttcagntatatttgcatatacattccctttancatttgttgactcccaacataatcaagngtttttganccaaacatcaaaaaagatggcaaatttttcaaatttttttggangnttaaggtcnttgttccaaaaattg

SEQ ID NO: 5615 - DNA, 650 bp, Canis familiaris
  misc_feature (448)..(448): n comprises a, c, g, or t, or includes no nucleotide
  misc_feature (472)..(472): n comprises a, c, g, or t, or includes no nucleotide
  misc_feature (487)..(487): n comprises a, c, g, or t, or includes no nucleotide
  misc_feature (496)..(496): n comprises a, c, g, or t, or includes no nucleotide
  misc_feature (503)..(503): n comprises a, c, g, or t, or includes no nucleotide
  misc_feature (512)..(512): n comprises a, c, g, or t, or includes no nucleotide
  misc_feature (549)..(549): n comprises a, c, g, or t, or includes no nucleotide
  misc_feature (630)..(630): n comprises a, c, g, or t, or includes no nucleotide
catcgcagtggagaccgcatagagcccagttcagggctagaagctagcagccctaccatggcattccccaggcccctgctggtgctagccctgctggcatgggttgttctggctgaccaagaatcatgcaagggccgctgcacagagggcttcaatgctgacaggaagtgtcagtgtgacgagctctgctcttactaccagagctgctgcgaggactacgtggccgagtgcaaaccccaagtgactcgtggggatgtattcgctctgccagaagatgagtatggggtcattgacgatcatgaggggaccagagaacagagcgtctcacacagctggagagtaccaccctgagccctggcctacaggcccagtctgaaaagtttcctgcccaggtacctattctgatccctgaggaagaggcttcaggacccgggcagggggaccttantggtttgaggcccttgatcaaganattttttaatcccancaaaaggangagcttntttatgggnaaaccctttgacgcctttaattgacctcaagaatggnttccttttttgccttccgagggcagtacttgttttagcttggttgaaaaggcaatgagacctggtacccaagcttttccanatgtttgggcattgagggcc

SEQ ID NO: 5616 - DNA, 457 bp, Canis familiaris
  misc_feature (399)..(399): n comprises a, c, g, or t, or includes no nucleotide
  misc_feature (401)..(401): n comprises a, c, g, or t, or includes no nucleotide
  misc_feature (435)..(435): n comprises a, c, g, or t, or includes no nucleotide
  misc_feature (442)..(442): n comprises a, c, g, or t, or includes no nucleotide
ggcgccaggcttgggcagctcggcgaggccgtggacgcgtcgccccgcgaccagcatctctggctttgtgagaccccggaccaggcccctgcctcgtccagaatgaaggtgtttctccctgtgctgctggcggcccttctgggcgcggagcaagcccactgcctggtgtgcttctcatgtacgaatcagaacagcaacttctactgcctgaagccgaccgtctgctccgactcggacaactactgtgtgacggtgtccgcatccgccggcatcgggaacctggtggacttcggccacaccctgaacaagggctgctccccgatctgccccagccccagcgtcaacctcggcgtggcgtccgtgggcacctactgctgccagagcttcctgtgcaacatnancacggcgggcccgggggctgcgggccagcgcttncgcttgntgggccttgggctct

SEQ ID NO: 5617 - DNA, 676 bp, Canis familiaris
  misc_feature (367)..(367): n comprises a, c, g, or t, or includes no nucleotide
  misc_feature (476)..(476): n comprises a, c, g, or t, or includes no nucleotide
  misc_feature (485)..(485): n comprises a, c, g, or t, or includes no nucleotide
  misc_feature (504)..(504): n comprises a, c, g, or t, or includes no nucleotide
  misc_feature (542)..(542): n comprises a, c, g, or t, or includes no nucleotide
  misc_feature (545)..(545): n comprises a, c, g, or t, or includes no nucleotide
  misc_feature (565)..(565): n comprises a, c, g, or t, or includes no nucleotide
  misc_feature (575)..(575): n comprises a, c, g, or t, or includes no nucleotide
  misc_feature (600)..(600): n comprises a, c, g, or t, or includes no nucleotide
  misc_feature (631)..(631): n comprises a, c, g, or t, or includes no nucleotide
  misc_feature (643)..(643): n comprises a, c, g, or t, or includes no nucleotide
  misc_feature (650)..(650): n comprises a, c, g, or t, or includes no nucleotide
  misc_feature (675)..(675): n comprises a, c, g, or t, or includes no nucleotide
aaggtttcctggcagcgctgcagggagatccacctcaggcagagcgcgtcctgctggccctgcggcgttacctgcgagcagagcagaaggaacaaaggcacacactgaggcactaccagcacgtggctgctgtggatcctgagaaggcccagcagatgcgcttccaggtgcagacccatcttcaagtaattgaagagaggatgaaccagagcttggggctgcttgaccagaacccccgcctggctcaggagctgcggccccagatccaggagctcctccactctgagcacctgggtcccaatgaattggaagtccccgccccagggggcagcagtgaggacaagagtgggctgcagcctctggattncaaagatgcagacacccccgtggctctttcaaaagggtccacagaacaagatgctgcatcctctgggaaagaaaaaatgtcccccttggagcaataccaagcgaaaagngaatgtgtntggttccaaggggttttcntttcacttattcggagaattaaaaaagaaaacttggancanccgggaaagggttttcccanaggcccggtntggtttgttgatatgggaaaaaggnggggggtccctgatggcctttccttgtggtnttgggcaggaanaaacctntggggttttaaccatgggggggggng

SEQ ID NO: 5618 - DNA, 462 bp, Canis familiaris
ggcccacagactctgctccctgctgtcagctggccaacaggtgccctaccctgctgacgtcacagtatttattgttctcaaaatggctgaggggagctcttcaccactgggggccccctctctgcccctagttggagctgtccctgtcagactcccctcccctttaggaattgacttcagaagggcgggtgagtggggaggctcccagacggaaggggtgggggtcacctgtcccaaagagaaggcctagtcagctgagctgcccctgtgtccctccttgccacccaggtccaggatgggggcaggacggccttaacactgtttctggttatgctatgttcctctattcaattgcaaaaagcaaatgctccacgtggggcccaggctgcccaccaccttggggtcctcactgagtggcaagtgcagcccccttcgcatcctttgattaaacttggaaccact

SEQ ID NO: 5619 - DNA, 300 bp, Canis familiaris
agatgcgccccggtgcagtcttcagctcagtttagctggggctaagaggaggtgctgctggttctcaagtggactaggccccctggcaaagttcaaggaccaccatggtctcagagacttggtaaccccagcctcctcttccaggccttgtccacccatcgacatctacctgagagagggtgaggcccagcaccatgtagaccatcctcacctgccattcagggactaggtctccagctcctgtcctgttccctcctatcctaggcctcccagcctccaggctgcaagactctggcatat

SEQ ID NO: 5620 - DNA, 491 bp, Canis familiaris
  misc_feature (234)..(234): n comprises a, c, g, or t, or includes no nucleotide
  misc_feature (314)..(314): n comprises a, c, g, or t, or includes no nucleotide
  misc_feature (338)..(338): n comprises a, c, g, or t, or includes no nucleotide
  misc_feature (379)..(379): n comprises a, c, g, or t, or includes no nucleotide
  misc_feature (412)..(412): n comprises a, c, g, or t, or includes no nucleotide
  misc_feature (438)..(438): n comprises a, c, g, or t, or includes no nucleotide
  misc_feature (444)..(444): n comprises a, c, g, or t, or includes no nucleotide
  misc_feature (450)..(450): n comprises a, c, g, or t, or includes no nucleotide
  misc_feature (487)..(487): n comprises a, c, g, or t, or includes no nucleotide
ttcttgcctgataacttctcgcctgccaagcccaagccctccaaagagctgaaacctctactaggttccgcggtactagggttgctgctggtgttggccgcagtggtggcctggtgctactacagcgcctctctacgcaaagcagaacgcttgcgcacggagcttctggacctcaaccgaggaggcttctccatccgcaaccagaagggcgagcaggagccggaacccttcgtnacagcgatgtctactcctccgacgccgcattcggaggcatcctcgagcgctactggctgtcgtcgcgtgcggctgccatnaaggtcaacgactcagtgcccttncacctgggctggaacagcaaccgagcgctcgctgtggttgnaggcacgctaccacaacacgccctacaagtcanctgcgggcgggttctgccgtccagancttaantaccgngtgtgcgttggttttgacgtaatttcaatcataaaanaaaa

SEQ ID NO: 5621 - DNA, 357 bp, Canis familiaris
  misc_feature (246)..(246): n comprises a, c, g, or t, or includes no nucleotide
  misc_feature (335)..(335): n comprises a, c, g, or t, or includes no nucleotide
agttctctgcttctccgggaggccccattcttcctcgccggctgggctcttggccttctgaaggtcacctgcctttgagggggcgccgtcggaaggatgtccttcctctctcagctgccctgggcttctctttttcctcttcctcctttctacccgctcatccaaagcccctaggtgcatctagccccgcacacccgcgacagggatggagaccctagggtggaggaaagtcctccgtgccatttncacacctgtgccggcctcttccccctcgaggccccgtcgggggagggagaggtagtagcgggggtcgaaaccccccaaacctcgaaganttcattttctggcactccccct

SEQ ID NO: 5622 - DNA, 458 bp, Canis familiaris
taagtatttgagaataaagcctaaatagtaggtctctgaactgtggaacccactcaagggagataagatatgagactcaaactgagagttttatatccatttcaccaagaggagctgtgagctcagagtttaatgtgaataaagctagatgagtgtagagaaacaatattagttcattagatcactcactcctttcttaaaagttcagatgtgtcttctagataatcttaagtcatcctgtctagttggtatgctttaaattgtgtggtgctctgtattgtgaaactttaagaatattttgaagcatatgtagtatatgcattgctacttgtatatatgtgtaagaatgtgtatatgtgtgagagcaagagagaaaactcaaggaagagtctcctgtttgtcttaagacctgttcatactggtatatactggtgagacttctcaccactctggtctgg

SEQ ID NO: 5623 - DNA, 561 bp, Canis familiaris
  misc_feature (456)..(456): n comprises a, c, g, or t, or includes no nucleotide
  misc_feature (505)..(505): n comprises a, c, g, or t, or includes no nucleotide
  misc_feature (547)..(547): n comprises a, c, g, or t, or includes no nucleotide
tacaaaaaatacttaagaacattgacatagtaaaacacgagtactttatggccaagagatttggtctttaaatactgcttttgttttctgactcctgtgattgacttacatttaatttgaaaaagttttgtcctttggccaaagaaaaattgcctattcatgaccactagactgaaatacatagtaaagtaaaaataaaagaaaaagcataataatatggctttcaatcatataggaaaatgatatgcagttgatcctcccttttcacaggttccatatttgtgaattctactcactaaaatgtatttataagcccaaattaatacatgcggaacttgtacattcattcatggacacatgcacagtgatgaaaaatttgagtctcctggtgtgcatgctcttagctgagatcaagcaagatgatgcctgccttgctgtttcagctcaaatactgtnaacgagtgtcctcccattctatttaatatcacaattttcttaattttgngcctctaagttgatgattctgctggttaaaaaaggcccccanaatgggtggggtgc

SEQ ID NO: 5624 - DNA, 546 bp, Canis familiaris
  misc_feature (422)..(422): n comprises a, c, g, or t, or includes no nucleotide
  misc_feature (444)..(444): n comprises a, c, g, or t, or includes no nucleotide
  misc_feature (454)..(454): n comprises a, c, g, or t, or includes no nucleotide
  misc_feature (495)..(496): n comprises a, c, g, or t, or includes no nucleotide
  misc_feature (503)..(503): n comprises a, c, g, or t, or includes no nucleotide
tctgtgcacagaaacaagaataaacaagatgttgaagagtgtattcttgtttctgtgcacaggtttataattataactgtgtcaaaatgtgtattcaaaatagctattacattatctttgtggaattatggttaaatactttcatcttaatgttttcaaatgttccttataatagtgttctgataacaaagtttattatgtttgtttccattacgagcataatacatacccagaggaaaaattggaaaatgcagtaaattagaaaagaaaaaagtcacccatatacccaacacccaacaactactgttaacatcttgatctatttcctccatcttgttttagtgcacaagcttgtgattatactggtattaaatatgtatgcataaagtctaaaaaaatatggaaaataattaaaataatgntggcattgtgggattatgggtnaaaatattgnctcaaaattcctggaaggacctttggggtttgggataaaanntaaggangaattctccatccaaaagtaatacatactatagcaactgggaa

SEQ ID NO: 5625 - DNA, 421 bp, Canis familiaris
  misc_feature (236)..(236): n comprises a, c, g, or t, or includes no nucleotide
  misc_feature (279)..(279): n comprises a, c, g, or t, or includes no nucleotide
  misc_feature (322)..(322): n comprises a, c, g, or t, or includes no nucleotide
  misc_feature (327)..(327): n comprises a, c, g, or t, or includes no nucleotide
  misc_feature (340)..(340): n comprises a, c, g, or t, or includes no nucleotide
  misc_feature (351)..(351): n comprises a, c, g, or t, or includes no nucleotide
  misc_feature (373)..(373): n comprises a, c, g, or t, or includes no nucleotide
  misc_feature (387)..(387): n comprises a, c, g, or t, or includes no nucleotide
cttcaggggagaggcagtagatgaaatccccccgctctgcggtgggcagcgtgggggtgctctggtggggggccgggcaggggctgctgggacctcagctgggagggggggtgtccctgctcagacctgctcagacttgctgctgcctctagctgggactcgcctgttctgggctctggaggactcctgcgcccaaggcctaggaggggccgcatcttgcagcccctgagtctcantcccttggtgtggggtggggacctgacagcagaaggaaccttncaccaagtgtgggtccgtggcaccccctgctggtgtgtcttancatanctctggagcaganccctgagcaancctgagtcctgtggctggtggnttcaaaaacaccgnacccgaagacaccacacccgcacctggggggctg

SEQ ID NO: 5626 - DNA, 650 bp, Canis familiaris
  misc_feature (497)..(497): n comprises a, c, g, or t, or includes no nucleotide
  misc_feature (516)..(517): n comprises a, c, g, or t, or includes no nucleotide
  misc_feature (538)..(538): n comprises a, c, g, or t, or includes no nucleotide
  misc_feature (622)..(622): n comprises a, c, g, or t, or includes no nucleotide
tttgagtatgtctttgctcaaatgtcatttgggctccagcatttagaggaatgccaatcctagtgatgcttctgttatttttaatatggaaggaactgaaccaaaacagttatcaaattttatctcaccattttatatttgacttgctgattcatgagtaatgattgttgatgaatatacatttgcttgactcactaatggggacagttgtaaagcagatatatgctagatttttacttccaacattatgtttttagcaggttgtcaatgaaaccatctctattgatcttttaccccagaattgactaggttttgctgaactgactgggtgtttgtaaacatgaccttaaccagtgactaaaatgtcagatggctgctgtattattcagttggtgtatgttgaatatacatgtctcccttatgtttttaattgggtatgcaaaaaatggttaatttaagtagactaaaaattttaatattttacctggataacccancaccaaaactaataagtgnnccattccaatttgaagtagcntcatccattaatttactttttggatatcaggctttcaatttttttatataatattaaaaccatcccatttaaaaatgacagagngggtcacttggcttaaactgaccaaaat

SEQ ID NO: 5627 - DNA, 448 bp, Canis familiaris
  misc_feature (368)..(368): n comprises a, c, g, or t, or includes no nucleotide
  misc_feature (387)..(387): n comprises a, c, g, or t, or includes no nucleotide
  misc_feature (395)..(395): n comprises a, c, g, or t, or includes no nucleotide
  misc_feature (401)..(401): n comprises a, c, g, or t, or includes no nucleotide
  misc_feature (416)..(416): n comprises a, c, g, or t, or includes no nucleotide
  misc_feature (423)..(423): n comprises a, c, g, or t, or includes no nucleotide
ctgaggtcttcactccacccctgccccagccacagggtcccagcgtggggactacaggccacctgccctctctggggtctacagcacccccagctggaaagacaggaagaagctaattagggcctcttcctccgcactgacccccagttcagtccaggaggggacctgctggcccgtctccctcaaccccctggcgcgtcgggctcgtgaatgccacccagccagtccccggaccccggcctcgtcctgtgccgacgcccccccgccctgaccgtgctaactgtgtgtacatatataccgacatatatgtatattaaacccgcactgccatgcctgccctctcgtggtgtcgagcataccttcttgtntaggcccgggcggggctgnggggaggncacagncagaggactgccggngaggtcnctttggagttaaaacgggagaccgc

SEQ ID NO: 5628 - DNA, 645 bp, Canis familiaris
  misc_feature (411)..(411): n comprises a, c, g, or t, or includes no nucleotide
  misc_feature (431)..(431): n comprises a, c, g, or t, or includes no nucleotide
  misc_feature (546)..(546): n comprises a, c, g, or t, or includes no nucleotide
  misc_feature (574)..(574): n comprises a, c, g, or t, or includes no nucleotide
  misc_feature (602)..(602): n comprises a, c, g, or t, or includes no nucleotide
  misc_feature (634)..(634): n comprises a, c, g, or t, or includes no nucleotide
tactggacttcatcaaaatgagaaacttttgctgtgtaaacaaatcaagaggatgaaatttttgacagaacttatttgcaaaccatatgtctgatcaaacttgactatataaagtcaacagtaaaaaacccatccaatcgaaaatgagcaaaagacgcgaatagacatttcactaaagaggatgtatggatggcaagtaagcacatgaagagatgttgaacttgagtagtcatcagggaacgcaaatgaaaaccacaatgaattatgattacatgcttatcagaatggctaaagaaaaaatagcaaaaataccagatgctgtcgagtgtacaaactggatctctcgtaccttacttataggaatgttaaatggtacagctactctacaaaagagtttgggaatttctaatnaagtcaaacatccttgtatnatacaccccacgattacactcctgggtatttatcccaaataatggggaagcttttgttggcccaaaaatttgcccaccaatatttttagaggtttttttgtataagttaaaactnggaataccccaatgtctgcattcgaggnggggtcaaaccaaaatttgactgggggncctactttcaatggggggaacggccacttttnttacaaacttg

SEQ ID NO: 5629 - DNA, 480 bp, Canis familiaris
  misc_feature (291)..(291): n comprises a, c, g, or t, or includes no nucleotide
  misc_feature (336)..(336): n comprises a, c, g, or t, or includes no nucleotide
  misc_feature (350)..(350): n comprises a, c, g, or t, or includes no nucleotide
  misc_feature (378)..(378): n comprises a, c, g, or t, or includes no nucleotide
  misc_feature (391)..(391): n comprises a, c, g, or t, or includes no nucleotide
  misc_feature (434)..(434): n comprises a, c, g, or t, or includes no nucleotide
  misc_feature (441)..(441): n comprises a, c, g, or t, or includes no nucleotide
  misc_feature (457)..(457): n comprises a, c, g, or t, or includes no nucleotide
  misc_feature (465)..(465): n comprises a, c, g, or t, or includes no nucleotide
gctgctactggccgggcctgctgcgtgtgcgcgagccccgctgtgctgcatgcacccccttgccctgtggacagcctggaggtgatggcctctcagtttcccatgagccacagggagaggggcctgccaggcagaggggcggccagcacccaggcctggggcaggagagggtgtggctgctgtggccggtggtggggagaccccagatcctgtggggtgctgggaacgcgagagggcgggaaggagcccaagtcccccgtctgcgggagctgggggacaggcgtggcccangtggggaacaggaggcgagcgcagtgatgggtcccgctgctcctngtccccggggcatnccgaaaaagcaaggctggggcctgggcnaggcaatgcgganggaccaaggagcccacctgcacgggtagcggacccccgacagnttttggncgcgtttttgggcacnacgccacnggacaagttggggaa

SEQ ID NO: 5630 - DNA, 382 bp, Canis familiaris
tctttcatagttcttcattattgcctagccccaaagacaggagaaagcaagccaggttccaggagctctaaagtcagagaatctaagaaatggtgggggttagctgatgggaaaaggcagtcagtacagatggcagaatgctccagaaatattcttcattctgctataacagatgagcttaatgaacttggctattcttaagttcaaatatggcagttttcagcttgttctattaagatatgtctccaagagtcaggactcttccatttgtaacttgaatatattaatatttgaatcatagtccaaaagtaattgaaatatttgttaggtaaccattgacacatgattaccgccaaagaatgaggaggtttgcgcataagaa

SEQ ID NO: 5631 - DNA, 468 bp, Canis familiaris
  misc_feature (67)..(67): n comprises a, c, g, or t, or includes no nucleotide
  misc_feature (305)..(305): n comprises a, c, g, or t, or includes no nucleotide
  misc_feature (410)..(410): n comprises a, c, g, or t, or includes no nucleotide
  misc_feature (445)..(445): n comprises a, c, g, or t, or includes no nucleotide
  misc_feature (459)..(459): n comprises a, c, g, or t, or includes no nucleotide
  misc_feature (466)..(466): n comprises a, c, g, or t, or includes no nucleotide
ctctgagtaaggtgaacatactgttgggctttttttttttttttttctttttttttgggatactggngatgactaaatctaaattcttttgaatgtccatcatgtcttgaatgctgctggcttcttcggtggcaggtctcctgagaggcagggagctaagcagatgatgtccctgaggaaatcatcttcgtgaagatggattttgtaaaatgttgggtacatgcaggtctgtgtgattcatgtgatcccgaggaggaagaactggtctttaaagcagggtttcccagagtgcattccagatcatntgggggtgcttgtcacgggcacggtctcgggtctcgccacagacccgcaggatccgagttctgggtggcccagggagtctgtctttcaccaacattccaagtggnttcgtcactgaaagttgggacccaaatctgaggangtgtcccaaaaggncagaaanag

SEQ ID NO: 5632 - DNA, 180 bp, Canis familiaris
ggaatggtaaatgtttataccattttgttcactgtatttagcagacataactgtctaatagttactgaatcatgatgtaaagaaatgtgataatattcaggtatgtgctttctgaatgtttcaaattacaatctgtgagcactgttgacacccacaggagataataaaattacctgtgca

SEQ ID NO: 5633 - DNA, 649 bp, Canis familiaris
  misc_feature (489)..(489): n comprises a, c, g, or t, or includes no nucleotide
  misc_feature (493)..(493): n comprises a, c, g, or t, or includes no nucleotide
  misc_feature (524)..(524): n comprises a, c, g, or t, or includes no nucleotide
  misc_feature (583)..(583): n comprises a, c, g, or t, or includes no nucleotide
  misc_feature (615)..(615): n comprises a, c, g, or t, or includes no nucleotide
  misc_feature (625)..(625): n comprises a, c, g, or t, or includes no nucleotide
  misc_feature (647)..(647): n comprises a, c, g, or t, or includes no nucleotide
acagtgcttgaatatacagccttaacaatgttaatcatctccctggatcatggtattgaattgttttctacattgaaaagaagtatgcaaaggttttttttcccctcatttttccctttaaatcataaattttgtcactttatcatgggaaagctttcacaaggaacaggattaggtaaagacctaacatgtttaagtttaatcagagattagaggtttacaatgttttctacatgtctaccttcaaagacatgtttggaaacttatgccctagaaaacacaaatgaaaacactgtagaatagattctggaatgtttgagattatactggtgaagctgtatcaatttgctattttaaaatacagtatctgatacaggagccatgtgtatgaattgcaatcatgacatgacattttatataattatatagatcccccagtaggtattttagcttcatttaccaataaaatttttacaaacattttactgntttnggaatcacaaaggatttcatcatttccctangttggatctttaattattggcccccttaaagacccaccttcctaaacaaaaatgaagtntccttaggcccatttgagacattaaaatctgnatatagggcntataataaatccattaacattntt

SEQ ID NO: 5634 - DNA, 343 bp, Canis familiaris
cttaagcgggttccgcatccggcatggaggcctatgcaggactctgtctcacagccctgagatcgtgacctgggctgaaatcgggagttggacacttggccaactgagctacccagatgctcccccaaaatcgttttttgttcgttttttttttttttttttaagattttatttattcatgagagacacagagagagaggcagagacataggcagagggagattcaggctccctgtgaggaacccgacgtgggactcaatccggggactcctggatcacgccctgagccgaaggcagatgctcaaccgctgagccacccaggcgtccttcaaagtctgttttt

SEQ ID NO: 5635 - DNA, 449 bp, Canis familiaris
  misc_feature (359)..(359): n comprises a, c, g, or t, or includes no nucleotide
  misc_feature (404)..(404): n comprises a, c, g, or t, or includes no nucleotide
  misc_feature (412)..(412): n comprises a, c, g, or t, or includes no nucleotide
  misc_feature (432)..(432): n comprises a, c, g, or t, or includes no nucleotide
  misc_feature (443)..(443): n comprises a, c, g, or t, or includes no nucleotide
cagtgaagtatagcacctgcccaaatacgctcataatgtgagaaaaattgcacttgccagattgtgctgatcatttccaagttgacacaatgaagtgacatctgtgctgaagcagtaacctgccatttgctgtcagcatttttgagtcaactcagaaaaagtccattctccccaattccagtagagtcagaaggtcctccaaggcctatttctagacaggctgaaagcaaagattcattgcttgacattttgctgtggctgcctctagtgaattatgtaaaataaatcccactgttagttttctcaatccaggctgtgtgtccacaagcaaatcagaaaagtgagatgcacaatcccangtcttttgtgcactcaattaacttttaattatgcccacagaagtnggaaaganaaaatagaattttttttttnctatttcggantcaaac

SEQ ID NO: 5636 - DNA, 576 bp, Canis familiaris
  misc_feature (391)..(391): n comprises a, c, g, or t, or includes no nucleotide
  misc_feature (439)..(439): n comprises a, c, g, or t, or includes no nucleotide
  misc_feature (452)..(452): n comprises a, c, g, or t, or includes no nucleotide
  misc_feature (471)..(471): n comprises a, c, g, or t, or includes no nucleotide
  misc_feature (493)..(493): n comprises a, c, g, or t, or includes no nucleotide
  misc_feature (505)..(505): n comprises a, c, g, or t, or includes no nucleotide
  misc_feature (542)..(542): n comprises a, c, g, or t, or includes no nucleotide
  misc_feature (572)..(572): n comprises a, c, g, or t, or includes no nucleotide
gggtggcctgagctgcctctcacagcacagggcctggggcagctagtgggagtgaggccttgctgtgtcaacctgcctctgcctctgcaccctccttcttcagagggttttaagccaaaccaacagcctcttcatgtgaaacatcttcaaggtgggaacagggcctcctctggctttgctagcaataactgaccttcagtttatctttctgaaggagcagggactcggcacagaattcactttaaacggggctgaaggagtgtccctcctgtatgtgaaaagaaatttgttttattcttcattctgactttttaactttggctcacttccagttaatttggatgaaagtaattttctacttggaggtcaaggagggcaaggacatcatttntcatcggcacgatgctaggtatgtctgcctttatttggacgtcattgncattaagttcttntgggctttaatgggaactnttttgttaggtttcaacaagtncccaaactttanaaaccaaaaccgcctgcagccaaaaatttcctttaanttttgggcttaaaggccaaaaggttgacanaaaa

SEQ ID NO: 5637 - DNA, 632 bp, Canis familiaris
  misc_feature (424)..(424): n comprises a, c, g, or t, or includes no nucleotide
  misc_feature (448)..(448): n comprises a, c, g, or t, or includes no nucleotide
  misc_feature (499)..(499): n comprises a, c, g, or t, or includes no nucleotide
  misc_feature (542)..(542): n comprises a, c, g, or t, or includes no nucleotide
  misc_feature (570)..(570): n comprises a, c, g, or t, or includes no nucleotide
  misc_feature (576)..(576): n comprises a, c, g, or t, or includes no nucleotide
  misc_feature (605)..(605): n comprises a, c, g, or t, or includes no nucleotide
  misc_feature (609)..(609): n comprises a, c, g, or t, or includes no nucleotide
  misc_feature (617)..(617): n comprises a, c, g, or t, or includes no nucleotide
attgaagatactaacattgtcaagtgcagagattttatttgatttttaaccacttcccatgtgttgatacataacaccttttgcattatttcttatgttttgagaagaaaaatagctttttatactttttagttttgatttcggtaactagtttaactacaggtaaccttcaaagggaccattgtacattttgaacaatagacagagatggtatcacgaggactcttcttgaaatatggaaatcccgtctggagatcagtggccacgttaccacaggccctggttcatattttcatcaatctaaggtgcagtttctaaatttgtaagagtaggtgtaaaaaaaaaaagtgcttcttatctttgttaacattgtattttttttttcttgatgtatttctctcttgattactcatgtttatgttgngagcacatggaaacagtgatgctnatgcatggctagttgcctttttaagattggtgacaccagacttaccttttnaagcttaatataaagacaattttactgggaaatactactgggnactattggaaaaaggacttttgggattnaacaangggtggattggaactttaatttgtaatgngganattaatancttttgaagggggtt

SEQ ID NO: 5638 - DNA, 441 bp, Canis familiaris
  misc_feature (372)..(372): n comprises a, c, g, or t, or includes no nucleotide
  misc_feature (381)..(381): n comprises a, c, g, or t, or includes no nucleotide
  misc_feature (414)..(414): n comprises a, c, g, or t, or includes no nucleotide
  misc_feature (417)..(417): n comprises a, c, g, or t, or includes no nucleotide
  misc_feature (440)..(440): n comprises a, c, g, or t, or includes no nucleotide
tctcctgacctctgacggaacgggtgctgctgaagacgccccaggctgttgtcaacaggctgccgctcctaggagagaacatgggcacccggctggggaaggctgctctcgcgtagacgaggagctcgctccgccagaggcacatggaggggaaggacttcatggcgatttaactcctctggaaggaagcagcgcagaaatgaaaggatcggtggacgtgagaagcacgcagaaggaagatcgtgcttctcgcccgtggagctcctctggcggtgaagtgcaatgtggttttgtgagtgaaggtacagtggacacgcctgcaggagacaaggaacactcatccacgggaggtgatggaagtatgtgaatctnctttacagntacctttgtcgcatccgtctttgtaacaatcgncgncctcttttcataattaaaatagnt

SEQ ID NO: 5639 - DNA, 537 bp, Canis familiaris
  misc_feature (221)..(221): n comprises a, c, g, or t, or includes no nucleotide
  misc_feature (264)..(264): n comprises a, c, g, or t, or includes no nucleotide
  misc_feature (273)..(274): n comprises a, c, g, or t, or includes no nucleotide
  misc_feature (426)..(426): n comprises a, c, g, or t, or includes no nucleotide
  misc_feature (481)..(481): n comprises a, c, g, or t, or includes no nucleotide
  misc_feature (484)..(484): n comprises a, c, g, or t, or includes no nucleotide
  misc_feature (510)..(510): n comprises a, c, g, or t, or includes no nucleotide
  misc_feature (516)..(517): n comprises a, c, g, or t, or includes no nucleotide
taacttgaatttaaaaaagcacctgagaggtgtctatgcatcaatgaattggaaagaaagctgctcatttgttttgttaatcgcctcaggatatctcttttaaaataagctgttttaagaggaacagaagggaaatctgctacctagtcttacacagtgtgaacctcagagagagcttctgatacccctaactataggggaagaatgagggagaaggagcngttaggatgtttaggaacttaacttttcaagaatagggaaggngtcaagccnnccttgggccagcaggttttttacctgcattgttacctgcctttctcacccaggaaatcaaccctgtacttgtttccctctttgaagcaagtgtcttggttgactaatactattttattgtaactttaaaaatgaaagttattgttctaaatntatagcaggtgccttatttttggtttttgagtcaaaccattccattatttgaaanttnccctgggtttacttttaaccattggntttaanntaattagggttttggggctg

SEQ ID NO: 5640 - DNA, 477 bp, Canis familiaris
  misc_feature (318)..(318): n comprises a, c, g, or t, or includes no nucleotide
  misc_feature (386)..(386): n comprises a, c, g, or t, or includes no nucleotide
  misc_feature (388)..(388): n comprises a, c, g, or t, or includes no nucleotide
  misc_feature (403)..(403): n comprises a, c, g, or t, or includes no nucleotide
  misc_feature (446)..(446): n comprises a, c, g, or t, or includes no nucleotide
  misc_feature (458)..(458): n comprises a, c, g, or t, or includes no nucleotide
ggttactaaacatttacggagtgaaggaagaatgcattttcttaagagtagtagtcttattagttgagtaaacaatttatgcaatgcacatctttgaatgtatatgcacacatgtgtacatgtaagtataatatatttagaaagcagacacatgacattttttcatgctggtgacctggcgttgtccacaggtccactcaagttacctggctgtctatcttctgcctgacccctgaaacgacgcctgcggctacgattgcgtcgctggggtttttttttcactatcatctgtaattgcaaagtttaccatgaactatnctgacaaaaacaaaaacaaaacaaaaaaatttctttccttcaaagatttaagaaagggtaagagaatngnttaattaaacagggnagataaaacaacatacattctggcaagaaaataattttgtagntttaagcctttnaaagagattaaaaatggaa

SEQ ID NO: 5641 - DNA, 681 bp, Canis familiaris
  misc_feature (511)..(511): n comprises a, c, g, or t, or includes no nucleotide
  misc_feature (523)..(523): n comprises a, c, g, or t, or includes no nucleotide
  misc_feature (535)..(535): n comprises a, c, g, or t, or includes no nucleotide
  misc_feature (547)..(547): n comprises a, c, g, or t, or includes no nucleotide
  misc_feature (570)..(570): n comprises a, c, g, or t, or includes no nucleotide
  misc_feature (575)..(575): n comprises a, c, g, or t, or includes no nucleotide
  misc_feature (583)..(583): n comprises a, c, g, or t, or includes no nucleotide
  misc_feature (599)..(599): n comprises a, c, g, or t, or includes no nucleotide
  misc_feature (621)..(621): n comprises a, c, g, or t, or includes no nucleotide
  misc_feature (629)..(629): n comprises a, c, g, or t, or includes no nucleotide
  misc_feature (641)..(641): n comprises a, c, g, or t, or includes no nucleotide
cttgcgagcgggcttcttcgtttcgcgcgcgcgacagaaaggcgattgaaaaatgggtgatgttgagaagggcaagaagatttttgtttagaagtgtgcgcagtgccatactgtggaaaagggaggcaagcacaagactgggccaaacctccacggtttatttgggcggaagaccggtcaggcccctggattttcttacacggatgccaacaagaacaaaggcatcacctggggagaggagaccctgatggagtatttggagaatcccaagaagtacatccctggaacaaaaatgatcttcgctggcattaagaagacaggggaaagagcagacttaatagcttatctcaaaaaagctactaaggagtaatagttggctatcgccttatttattacaaaacaaaaatgtctcatgactttttttttatgtgtaccatatttaaattgatctcattgaccagaattcaaatcatgagtggctgatagaaaggtctttttggacagtcctganttaaataaaatngctttgggggtnaaagaatttgancaagttttttgaactttgatagnaattntggttaanaagggcttttacttgntttcccttttaaaaaaatgatnggaatggnttaaaatgtgtngcttttacagaatgggaaagcccctttaatttataatggt

SEQ ID NO: 5642 - DNA, 470 bp, Canis familiaris
  misc_feature (440)..(440): n comprises a, c, g, or t, or includes no nucleotide
  misc_feature (450)..(450): n comprises a, c, g, or t, or includes no nucleotide
  misc_feature (456)..(456): n comprises a, c, g, or t, or includes no nucleotide
gttgtctccgcgagccgagcccggcccacacagaagcaattatgtctaagggacctgcagtcgggatcgatcttggcaccacctactcctgcgtgggtgtcttccagcacgggaaagtggaaataattgccaatgatcagggaaaccgaaccaccccaagttatgtcgccttcacggacaccgaacgattgatcggtgatgctgcgaagaatcaagttgcgatgaaccccaccaacacggttttcgatgccaagcggctgattggacgtagatttgatgatgctgtcgtccaatctgatatgaagcattggcctttcatggtggtgaatgatgctggcaggcctaaagtccaagtagagtacaagggggagaccaaaagtttctattcagaggaggtgtcctctatggtcttgccaaaatgaaagaaattgcagaggctnccttggaaanttgttncaatgcaagtttca

SEQ ID NO: 5643 - DNA, 529 bp, Canis familiaris
  misc_feature (344)..(344): n comprises a, c, g, or t, or includes no nucleotide
  misc_feature (409)..(409): n comprises a, c, g, or t, or includes no nucleotide
  misc_feature (439)..(439): n comprises a, c, g, or t, or includes no nucleotide
  misc_feature (465)..(465): n comprises a, c, g, or t, or includes no nucleotide
  misc_feature (485)..(485): n comprises a, c, g, or t, or includes no nucleotide
  misc_feature (497)..(497): n comprises a, c, g, or t, or includes no nucleotide
  misc_feature (506)..(506): n comprises a, c, g, or t, or includes no nucleotide
tgttggtcaccggggccagcagtggcgtgggcctcgcgctctgcaagcggctgctggaggaggtggatgtcagcaacctgcagtcggtcatccgggcctccagcgagctcaagcaaagagattagactacgtctatctgaacgctgggatcatgcccaatccacagctgaatatcaaagcacttttctgtggcctcttttcaagattcaggaactggaacctcttctctgtcacagggacagtccctcccagctcatctggacatcgtctcgcaatgcaaggaaatctaattttcaccttgaggacattcagcacagcagaggccaggagccttacagctcctncaaatatgcagttgacctgctgagtgtggcgctgaaccggaacttcaacccacggggtctgtctncaccgtggtgtgcccgggtaccatggtgancaacatgacctacgggattctccctnccttggtgtgggaccctgtnctggccaataantatggttgntttcgctttttttgaaaatgctt

SEQ ID NO: 5644 - DNA, 469 bp, Canis familiaris
  misc_feature (134)..(134): n comprises a, c, g, or t, or includes no nucleotide
ccagaaagctgcatgatgcttgggccctggcgtgcctgaagcatgggatccctgtaggtgcccttccatgcttagcgtgtcacccagggcgtggggaggaggacgtggggttaccctggccgtgcggaccgcanccttcctgtgctgcgcaggggcccgctgacagcaccgtcctctgtaggctcccgtccacttacagaagggaaacaggcagccagaagtgggccggggtggggctgacactgggcgtcaggcccctgtgactccagggacgaagtccctttctcagccaagactcctcttcccacagaagctgatgtcacgtccccgtgacgtcccagaggtgggggcagcagggcggccacaagagccagactcggagcatccaacgtccggggtgtccttccagggagcaccgcagggccatgctgggaacacgttccccttacacttcatctaaagtgccctt

SEQ ID NO: 5645 - DNA, 438 bp, Canis familiaris
  misc_feature (290)..(290): n comprises a, c, g, or t, or includes no nucleotide
  misc_feature (392)..(392): n comprises a, c, g, or t, or includes no nucleotide
  misc_feature (424)..(424): n comprises a, c, g, or t, or includes no nucleotide
cggcagcgcgagagggcgtggcgggaaaggctgggcggcccggaagatggagccgcagcttgggctccacgagctgctgcacgttttctcctttttggaggcccgggacctgctccgcgctgcccaggtggacaaggtctggaatgaggtttcaaggaccaaagaactgtggaggtgagtgaaggaaaagccaaacgtggtcaggagagtgttccaggtgaggggtgtcctggataagtgttctgagcactgcatttctggctttgacgagtacacaagaaaggaccatncaagcacctagcagcaggaaaccacctcccccagtcacgaggcctgtgatactcttttttaaatggcaactgtgtctgagacgctggtcatcatataaaagnccctcaaatgaccttgggcccacaaacatggnaaagagtactatct

SEQ ID NO: 5646 - DNA, 453 bp, Canis familiaris
  misc_feature (419)..(419): n comprises a, c, g, or t, or includes no nucleotide
  misc_feature (439)..(439): n comprises a, c, g, or t, or includes no nucleotide
caatgaacgggcaacggcaaaggaaatcagggatgagtatgtggaaacgctgagcaagatctacctgtcttactatcgctcttacctagggcggctcatgaaagtgcagtatgaggaagttgccgagaaggatgatctaatgggtgtggaagacacagcaaagaaaggattcttctcaaagccttccctccgcagcaggaacaccatcttcaccctggggacccgtggctctgtcatctcccccactgaactggaggcccccatcctggtgccccacactgcccagcggggagaacagaggtatccatttgaggccctcttccgcagccagcactacgccctcctagacaattcttgccgtgaatatcttttcatctgcgaattctttgttgtattccggctcggctgcacatgatctntttcatgctgcatgggtcgnacccttggcattga

SEQ ID NO: 5647 - DNA, 621 bp, Canis familiaris
  misc_feature (406)..(406): n comprises a, c, g, or t, or includes no nucleotide
  misc_feature (467)..(467): n comprises a, c, g, or t, or includes no nucleotide
  misc_feature (469)..(469): n comprises a, c, g, or t, or includes no nucleotide
  misc_feature (480)..(480): n comprises a, c, g, or t, or includes no nucleotide
  misc_feature (492)..(492): n comprises a, c, g, or t, or includes no nucleotide
  misc_feature (519)..(519): n comprises a, c, g, or t, or includes no nucleotide
  misc_feature (526)..(526): n comprises a, c, g, or t, or includes no nucleotide
  misc_feature (546)..(546): n comprises a, c, g, or t, or includes no nucleotide
  misc_feature (552)..(552): n comprises a, c, g, or t, or includes no nucleotide
  misc_feature (569)..(569): n comprises a, c, g, or t, or includes no nucleotide
  misc_feature (576)..(576): n comprises a, c, g, or t, or includes no nucleotide
  misc_feature (591)..(591): n comprises a, c, g, or t, or includes no nucleotide
  misc_feature (601)..(601): n comprises a, c, g, or t, or includes no nucleotide
  misc_feature (615)..(615): n comprises a, c, g, or t, or includes no nucleotide
aatccaccttaaaaataaattttgatgtccaagacatcactaaaatatttcagtttaaagaccatatgtggtgttaatggactgtggtgcttctactatttaaaaacaactttcatacttcagatgtttttgagaagaggggaatgtagaggaggaggcagaacagggaggagttgtttgaatgagttacagtcttcatgtctgttctgttcagagggggcacttccaaggggagccttagatggagccttctaagagaaggcaggaagttgtgagtatattgtgtgtatcatgagggaatgaactcttcatcaagataggattgtgaaggctgaactataaaactcagcagtgacaggatcctcagataacaattcttggtgacagagtaatacagctgggctgntttttaaaaatataaacacaaaccatttttattttttgattattacattaaaagtataagngnatcttatgtgncccgggctgggnaggcttttttttttttttttaaagggnatggggntaatttaaggtaactttggncctaanaaaatgaattgggaccnttccctnaaagggtaatagggnaaaaaaagtnccattcatcctttnggtttg

SEQ ID NO: 5648 - DNA, 677 bp, Canis familiaris
  misc_feature (463)..(463): n comprises a, c, g, or t, or includes no nucleotide
  misc_feature (501)..(501): n comprises a, c, g, or t, or includes no nucleotide
  misc_feature (518)..(518): n comprises a, c, g, or t, or includes no nucleotide
  misc_feature (544)..(544): n comprises a, c, g, or t, or includes no nucleotide
  misc_feature (547)..(547): n comprises a, c, g, or t, or includes no nucleotide
  misc_feature (574)..(574): n comprises a, c, g, or t, or includes no nucleotide
  misc_feature (603)..(603): n comprises a, c, g, or t, or includes no nucleotide
  misc_feature (616)..(616): n comprises a, c, g, or t, or includes no nucleotide
  misc_feature (662)..(662): n comprises a, c, g, or t, or includes no nucleotide
  misc_feature (670)..(670): n comprises a, c, g, or t, or includes no nucleotide
agggactggggagggtggcctgggtgatgagagccctcacccccttgccctcagcggcagtgtctggagctcataccgcaagagctgcgtcgacatggtcatgaagtggctggtgcctgagagcagtggccgctatgtcaataggatgaccaacgaggcgctgcataaaggtaggctccatgacctgttgacggtcagaactaaggcccttatctggtgctatgccaggcctagagcaggtgcgattcatatattcctgaatggagtccactggccatgctagtggataccaggtaactggggtgaaggaagggctggctcagaggggacctggcaggtgtggcacctggggacccccagccagtccattcatttgctctgtagatgtctactgggtggctgcaggtgggaggcccacagggtaactcaaggtcactgccttctggaacctggggcccaagtncagtcaggggaaaaaggaccccttgccccaccaagctngggctggaaacttccanggttaacccttgacccttccttgaanggngcttacttgaaggttttggcggcaagngagcgatcccatggattggctttgagggnccggccgttttgnaattattcaaatacttccgggctgggagtggccgcttcttggagcnttcccggntggcggc

SEQ ID NO: 5649 - DNA, 463 bp, Canis familiaris
catgaagggaagaccatcgaaggaaattttctctcctgtggtaccgaattaccaggtggcctacccagactgcagccccatcatgatcctctccgaagcctccctggcggatctgaataccaggctggagaagaaagtgaaaatggaccagttcagacccaatattgtggtgacaggctgtgatgctttcgaggaggacacctgggatgagctcctcattggcaacgtagaaatgaaaaaggttttgtcttgccccaggtgcatcttgaccaccgtagacccagatactggaatcatagacaggaaggagcccctggaaaccctgaagagttaccgcctgtgtgatccttcggagaagcaaatatacaagtcatccccactctttgggatctattattcagtggagaaaattggcagcttgcaagttggtgacccggtgtatcggatgggttcatggactggg

SEQ ID NO: 5650 - DNA, 504 bp, Canis familiaris
  misc_feature (417)..(417): n comprises a, c, g, or t, or includes no nucleotide
tcatcatctccgtcttcgtgctggccctgtacctgcatgcccagcaagtggagtccaccgcccgcctggacttcctctggaaactgcaggccacggaggagaaggaggagatggaggagctgcaggcctacaaccggcggctgctgcacaacatcctgcccaaggacgtggctgcccacttcctggcccgcgagcgacgcaacgacgagctctactaccagtcgtgcgagtgcgtggctgtcatgttcgcctccatcgccaacttctccgagttctacgtggagcttgaggccaacaatgagggtgtcgagtgcctgcggctgctcaatgagatcatcgctgactttgatgagatcatcagcgaggatcggttcaagcagctggagaagatcaagaccattggcagacctacatggncgcttaagcctcaatgacttttacataccaaaaaggggggcagaaccacaataaaagccctgggttgactttgccttgaagttatgg

SEQ ID NO: 5651 - DNA, 659 bp, Canis familiaris
  misc_feature (374)..(374): n comprises a, c, g, or t, or includes no nucleotide
  misc_feature (411)..(411): n comprises a, c, g, or t, or includes no nucleotide
  misc_feature (439)..(439): n comprises a, c, g, or t, or includes no nucleotide
  misc_feature (453)..(453): n comprises a, c, g, or t, or includes no nucleotide
  misc_feature (489)..(489): n comprises a, c, g, or t, or includes no nucleotide
  misc_feature (493)..(493): n comprises a, c, g, or t, or includes no nucleotide
  misc_feature (540)..(540): n comprises a, c, g, or t, or includes no nucleotide
  misc_feature (552)..(552): n comprises a, c, g, or t, or includes no nucleotide
  misc_feature (563)..(563): n comprises a, c, g, or t, or includes no nucleotide
  misc_feature (575)..(575): n comprises a, c, g, or t, or includes no nucleotide
  misc_feature (602)..(602): n comprises a, c, g, or t, or includes no nucleotide
  misc_feature (609)..(609): n comprises a, c, g, or t, or includes no nucleotide
  misc_feature (612)..(612): n comprises a, c, g, or t, or includes no nucleotide
  misc_feature (651)..(651): n comprises a, c, g, or t, or includes no nucleotide
agggagaactgaccctgccctttgggctccttgggcttcttggctgagctctgggaggtgggcaggggctggggactcatacccctgagaacagatggcttgttgggtgtacactggttacacggtgggaaactcaggagtacctttgccttcagggggaatgcggggccggaccctgaatcctcggaccatttacccagtgttgccaagactccttgctctcctgcccttgtcctgtcagaagcgatttcactgcataagctacagccaggacctctcggcagacactgctgaatttccagagaagatgagtaatgggatgttgaagaacagcagagatgaggccgtggcagtgcctgaagaaagctcagctnaccaggggaacaggcccaccttcattcttcaaaaganctcacttgtgatctgggctcaagatccnatgctagaaggcantctgtatataagatgagtaaaatgatgtaccatgtngggncatcaaaggctggttatttagcccaccaaagaccttgtttttaggtntttggcttgaanaaaaactttcntttacgggaagnttaaggcaggaaaagggttttacttgnccttggnagnttttttttaaagaacagctttgggggaaaggatttgttnaaaggggt

SEQ ID NO: 5652 - DNA, 487 bp, Canis familiaris
  misc_feature (421)..(421): n comprises a, c, g, or t, or includes no nucleotide
  misc_feature (430)..(430): n comprises a, c, g, or t, or includes no nucleotide
  misc_feature (454)..(455): n comprises a, c, g, or t, or includes no nucleotide
  misc_feature (475)..(475): n comprises a, c, g, or t, or includes no nucleotide
  misc_feature (481)..(481): n comprises a, c, g, or t, or includes no nucleotide
aagaggagacccgcgtgatgtttgagaagatggcgaaatacatcggcgagaacctccagctgctggtggacaggccggacggcacctactgtttcaggctgcacaacgaccgggtgtactacgtgagtgagaagatcctgaagttggccgccaacatctccggggacaagctggtgtcgctggggacctgcttcgggaaattcaccaagagtcacagattccggttgcacatcacagccctggattacctcgcaccctatgccaagtataaagtgtggataaagcctggagcagagcagtctttcctgtatgggaaccatgtgttgaaatcgggactgggtcgaatcactgaaaatacttgccagtaccagggagtggtggtgtactccatggcagacgtccctttgggttttggggtggnaagcaaaanctacacaagaattgcaggaaagtnnaccccatggggattgggggnttttanttaaca

SEQ ID NO: 5653 - DNA, 454 bp, Canis familiaris
  misc_feature (88)..(88): n comprises a, c, g, or t, or includes no nucleotide
  misc_feature (221)..(221): n comprises a, c, g, or t, or includes no nucleotide
  misc_feature (291)..(291): n comprises a, c, g, or t, or includes no nucleotide
  misc_feature (304)..(304): n comprises a, c, g, or t, or includes no nucleotide
  misc_feature (364)..(364): n comprises a, c, g, or t, or includes no nucleotide
  misc_feature (371)..(371): n comprises a, c, g, or t, or includes no nucleotide
  misc_feature (410)..(410): n comprises a, c, g, or t, or includes no nucleotide
atagtattctaacgacagtcaccatgctgtaccttagaatcctagaactggttcattttacaacttgttcatcattggccaatgtctntccatttcctccagcccctggcaacaaccagtctactctatttttatgagttctactattttttttttaagattccacattatgactgagatcttacaatctttggctttctttctttgctgatttcactcanccatagggtcctgcagattcatccatgttgttgaaacagcaagatttccttcttttttttatgggtaaanactggtcttttgnatatttggggggggggatatatatatatatatattgcaaaggaagatatatagatatgtngggatgnatattacattttctttattcatatatcaggggcacttangttggtttcacatcttggcttttatgaataatactgcaataaac

SEQ ID NO: 5654 - DNA, 494 bp, Canis familiaris
  misc_feature (183)..(183): n comprises a, c, g, or t, or includes no nucleotide
  misc_feature (205)..(205): n comprises a, c, g, or t, or includes no nucleotide
  misc_feature (224)..(224): n comprises a, c, g, or t, or includes no nucleotide
  misc_feature (317)..(317): n comprises a, c, g, or t, or includes no nucleotide
  misc_feature (336)..(336): n comprises a, c, g, or t, or includes no nucleotide
  misc_feature (366)..(366): n comprises a, c, g, or t, or includes no nucleotide
  misc_feature (385)..(385): n comprises a, c, g, or t, or includes no nucleotide
  misc_feature (404)..(404): n comprises a, c, g, or t, or includes no nucleotide
  misc_feature (418)..(419): n comprises a, c, g, or t, or includes no nucleotide
  misc_feature (441)..(441): n comprises a, c, g, or t, or includes no nucleotide
  misc_feature (445)..(445): n comprises a, c, g, or t, or includes no nucleotide
  misc_feature (448)..(448): n comprises a, c, g, or t, or includes no nucleotide
  misc_feature (478)..(478): n comprises a, c, g, or t, or includes no nucleotide
atggcccgacgccgccctaccagccgctcgtgccccagacggcggcgccgcacaccggcttcaccgaatacttcagcatgcacacggccgggggcaccgcacccccggtctgagcaccctagcccaccccgccccatgggccgcgcgccgggccccggccgggctccggatccccgctctatnccggccccagggctctgccatnccaggcctttccgaccctncccaccccgcgcgcccaggtaggggtgcgtactggcccgccccctcttccgttccccgacttttgtgccaaacggtcccgcgggaagccggtnttcccgtccccttcctaanccctgccccgagcggggccggattttgggntcccgttgttcgagactangggcccctggccccttcgnaaacttttgattcnncggaccccgaaaaacaatgacnaatngcnggaccttgcccgggaattttcaagaatttngggaaccccaacattt

SEQ ID NO: 5655 - DNA, 400 bp, Canis familiaris
caggctccatgcagggagcccgttgtgggactgttttctattcagtcatttttattaaaaaaaagtaacaagatttttaaagaggtcatgtgtttttaggcctaataattttgaaaattaataaaatctcttaaactgaagattgtaaaaacagtacttttttagaaagcatgtgtgatttgtttgaagtagctttgaaatctcttacttactttcttttttttctttttagatacaaaaatggatcgtaaagacaaattgtttgtcattaatgaggtaattttagatagtagttcaagtaaaatataggaacactgtttaggaataaaaatattttgggacgctaaagatgttcattatacaataagttattcaatgacttttaaattggtttgtaaaa

SEQ ID NO: 5656 - DNA, 661 bp, Canis familiaris
  misc_feature (462)..(462): n comprises a, c, g, or t, or includes no nucleotide
  misc_feature (484)..(484): n comprises a, c, g, or t, or includes no nucleotide
  misc_feature (493)..(493): n comprises a, c, g, or t, or includes no nucleotide
  misc_feature (509)..(509): n comprises a, c, g, or t, or includes no nucleotide
  misc_feature (512)..(512): n comprises a, c, g, or t, or includes no nucleotide
  misc_feature (536)..(536): n comprises a, c, g, or t, or includes no nucleotide
  misc_feature (553)..(553): n comprises a, c, g, or t, or includes no nucleotide
  misc_feature (561)..(562): n comprises a, c, g, or t, or includes no nucleotide
  misc_feature (602)..(603): n comprises a, c, g, or t, or includes no nucleotide
  misc_feature (645)..(645): n comprises a, c, g, or t, or includes no nucleotide
  misc_feature (657)..(657): n comprises a, c, g, or t, or includes no nucleotide
gaaaaaaaaaatcatgctgaaatacacataggggtgcatgcatccctttgagttactgtttttgcattctatggataaatactgggtaatgtgatttttttgggtctttgggtggttctatttttaattttttaggaaacctctgtagtgttttccacagtggctgcaccagtttgtattccctgcaacagtacacaagggttcctttttctgcacatccttgccaatgcctgttgtttcctgtgattttgtttttagctgttttgacaggtgtgaggtgatattagaatggactgagtttttaatcctgtccaatggatgatgatattacccctagatattatcatatttagtaattttattttgtttttctatgtgttaagccaagagtaataaatctctctgccccttatatgaccctcttcccttggcttgacttatcattatcttcgatctttttgnagtatgctggctaacttggtanggctactgncaaaagaaaccaaatnttntacacttttttggtaaaaaaaagntggaataaaaaatgggntttatttnngggcaaatggggtaggaaggttttaaaaagaaagggaatnntaattggggggtttaactggattgccaaaaaaaagtcctggntttaaaaatttnatta

SEQ ID NO: 5657 - DNA, 1089 bp, Canis familiaris
cggccgcagcttcccagggctgccatgggctccaggcttctctgctgtgtggcccttttctcctgggagccggcccccgtggagtctgaggtcatccaaactccaagacacatgatcaaagtcaagaggacagacagtgacctgagatgtccttatctctggacactatctgtgtactggtaccaacaggccttgatggtccgtttaccggtttctcattcagtcatcatagtcaaaaaagaaacatccggtcaagattctcagtgcagcagttcagtaactacagcatcccagcttgagatgaactccctggagccaggagactcagccctatatctctgtgccagcagcgggtacagtgagagctacgagcggtatttcggagccggcaccaggctcacggtcctcgaggatctgcagaaggtcacccctcccacggtcacagtgtttgaaccatcagaagcagagatctcgcggacccagaaggccacactcgtgtgcctggcacggggcttctaccccgaccacgtggagctgagctggtggaatgactccagctactgtctgagcagccggctgagggtctctgcctccttctggcacaacccgcgcaaccacttccgctgccaagtccagttctatgggctcggggacgacgatgagtggaagtacgatagagtcaaacccatcacccagaacatcagtgctgaggcctggggcagagcagactgtggcttcacctcggtgtcctaccatcagggcgtcctgtctgccaccatcctctatgagatcctgctgggcaaggccacgctgtatgctgtgctggtcagcatcctggtgctgatggctaaggtcaagagaaaaggttcctgagaccagctccaaaagtgcatcctgagatgatcatgagcctcaccctcaattctccttcgcacgcttccagtctgcgtttctaaaagagttattctctctctacctcttatcaccttcctgctgggatatctgtcccctctctctgcttccctgcagactgagctcctcaagcctgatcctgaaatagactaaaacaataaaagtgtcctgccaggc

SEQ ID NO: 5658 - DNA, 1089 bp, Canis familiaris
gcagcacccctggacacaacagtttcccagactccaagatacctcatcgcgcacgtgggatcgaagaagttactaaaatgtgagcaaaatctgggccataatgctatgtactggtataagcaagacctcaagcaactgctgaagatcatgtttatctactttaatcagggactcaatctaaatgaatcagttccaggtcgtttctcacctgagacactgacaagctcattaacttcatgtcgactcctgaacagtgactctgctgtgtatttctgtgccagcagcccgaccactacgatggagcagcactttgggccagggacccggctcaccgtcctagaggatctgcagaaggtcacccctcccacggtcacagtgtttgaaccatcagaagcagagatctcgcggacccagaaggccacactcgtgtgcctggcacggggcttctaccccgaccacgtggagctgagctggtgggtgaacgggaaggaggtcacgagtgggttcagcaccgacccgcagcccgacaaggagaggcccagcgagaatgactccagctactgtctgagcagccggctgagggtctctgcctccttctggcacaacccgcgcaaccacttccgctgccaagtccagttctatgggctcggggacgacgatgagtggaagtacgatagagtcaaacccatcacccagaacatcagtgctgaggcctggggcagagcagactgtggcttcacctcggtgtcctaccatcagggcgtcctgtctgccaccatcctctatgagatcctgctgggcaaggccacgctgtatgctgtgctggtcagcatcctggtgctgatggctaaggtcaagagaaaaggttcctgagaccagctccaaaagtgcatcctgagatgatcatgagcctcaccctcaattctccttcgcacgcttccagtctgcgtttctaaaagagttattctctctctacctcttatcaccttcctgctgggatatctgtcccctctctctgcttccctgcagactgagctcctcaagcctgatcctgaaatagactaaaacaataaaagtgtcctgccaggc

SEQ ID NO: 5659 - DNA, 1032 bp, Canis familiaris
gcggccgcgagatgcctgcttccatgggaggccctgccctgctgtggctagcgctgctgctctcctctccaggtgtcatgtcatcagataccttgaaacctacagtgtccatgaacccgccatggaatacaatattgaaggatgacagtgtgactcttacatgtactgggaacaactcccttgaagtcgactctgctgtgtggctccacaacaacactacttggcaagagacgacttcacgtttggacatcaataaagcccaaatccaggacagtggggagtacaggtgtcgggaaaatagatccatcctgagtgatcctgtgtacctaacagtcttcacagagtggctgatccttcaagcctctgccaacgtggtgatggagggtgagagcttcctcatcaggtgccatagttggaagaatttgaggctcacaaaggtgacctactacaaggatggcatccccatcaggtactggtacgagaacttcaacatctccattagcaacgtcacaaccaaaaacagcggcaactattcctgctcaggccagatccagcagaaaggctacacctctaaagtcctcaacattattgtgaaaaaagagcccaccaagcaaaacaagtactccgggctacaattcctgatcccgttggtggtgattctgtttgctgtggacacaggactgtttatctcgaccaagcagcagttgacagtgctcttgcagattaagaggaccaggaagaacaaaaagccagaacccggaaagaactgatgccgctgcttaagaaacatcagcatcagcaatcgcttctccatcgtcagacgtcagctcacgatgcacacgggaaggtctgcagtcatggctttgcagaactgcttcattcaaccaactcaaactgattaagtggcatgtgatagtaggtgctcaataaacggcagttagataaataaaagaatgagtagggtcatttattggcacctggcaaagacaagtgccatttgaataaaacagctacgaaagcggccgcgaattc

SEQ ID NO: 5660 - DNA, 561 bp, Canis familiaris
ggcaagcacaactcggcacccatgttcatgctggacctgtacaatgccatggcggtggaggagggcggcgggccagccggccagggcttctcctacccctacaaggccgtcttcagcacccagggcccccctctagccagcctgcaagacagccacttcctcaccgacgccgacatggtcatgagcttcgtcaacctcgtggagcatgacaaagagttcttccacccacgttaccaccaccgggagttccgattcgatctctccaagatcccagaaggggaagctgtgactgcagccgaattccggatctacaaggactacatccgggaacgcttcgacaacgaaacgttccggatcagcgtttaccaggtgctgcaggagcacttgggcagggagtcagacctgttcctgctggacagccgcaccctctgggcctcggaggagggctggctggtgttcgacatcacagccaccagcaaccactgggtggtcaacccacgacacaacctgggcctgcagctctgcgtggagaccttggacgggcagagcatcaaccccaaa

SEQ ID NO: 5661 - DNA, 478 bp, Canis familiaris
agaggacgacggcgatgagcaggagcgccatgtggcccgggtcatcgtccccgataagtacattcccctcaagacgaaccatgacatcgccctgctgcacctgcgcacacccgtggcctacaccgaccatgtggtgcctctgtgtctgcccgagaagaccttctccgagaggacgctggccttcatccgcttctcaaccgtcagcggctggggccagctgcttgacaggggcgccacggccctccagctcatggccatcgacgtgcctcgggtgatgacccaggactgccaggagcagtcccgcaggagaagtggctcccccgccatcactgagaatatgttctgtgccggctacctggacgggagcaaggacgcctgccagggggacagcgggggcccgcatgccacgaagttccagggcacatggtacctgacaggtgtcgtcagctggggggagggctgtgcggccgaaggccac

SEQ ID NO: 5662 - DNA, 960 bp, Canis familiaris
atggcagccaagggaggcaccgtcaaaccagcgtcaggattcagtgccaccgaggatgcacagaccctgaggaaggccatgaaggggcttggcaccgacgaagatgccatcatcagcgtccttgctccacgcaacacgtcccagcgccaggagattagaacggcctacaagagcaccatcggcagggacctgatggacgacctgaagtcggagctgagcggcaacttcgagcgggtgatcgtggggatgattacgcccaccgtgctgtacgacgtgcaggaactgcgcagggccatgaagggatctggcacggatgagggctgcctcatcgagatcctggcctcgcgaacgcccgaggagctccggtgcataaaccagacctaccagctccagtacggccggagcctcgaggacgtcattcgctccgacacgtccttcatgttccagagggtgctggtgtcgctgtcggccggtggcagggatgaaggaaattttctggacgatgctctcatgagacaggatgctcaggacctgtatgaggctggagagaagaaatggggaacagatgaggtgaaatttctgactgttctctgctcccggaaccgaaatcacctgttgcatgtgtttgatgaatacaaaaggatatcacagaaggatattgagcagggtattaaatctgaaacatccggtagctttgaagatgctctgctggccatagtaaagtgcatgaggaacaaatctgcatactttgctgaaaggctttataaatctatgaagggcttgggaacagatgataacaccctcatcagggttatggtgtctcgagcggagatcgatatgatggacatccgggagagcttcaagaggctttacggaaagtctctgtactccttcatcaagggtgacacatctggagactacagaaaggttctgctcattctctgtggaggagatgattaa

SEQ ID NO: 5663 - DNA, 1138 bp, Canis familiaris
cgaaacaatctgtgcctttctcatcagtagcatccattcattctctcttttctccacagcgcctacgacagcttaccacccctgaccccagcctgccacagcccaagcaacacctgtatctggatggtggtaccagccaggactgcgggccttccccaacaaaggagggactaatagttggggagaaggagacccacttgtaggatgtggccagcagccaggtggctattgagccaagaacctcctctgtcagggccactgcagtgacagcctttacctctgccccttacccagtccagctatgaacctctgcaatgtctgtgtgtgtcctcagccagaggccaggctgctctctcctcagcagggcagctcttctggtgggcgagatgtggtcctgctgcaatacgccatcctgttggaacacaccttcttatttataaagaagggtggttttttttgagtccaccatctgatctaacacattacactgtgtgggagctcccactgcagggacattccagcttcctatacttatgtgttgggagggtagccctgacgggagtacatatcacacattgactcggagatcccgatggaacacaacatgttggaagtgacaactgaacgcaccatattggattctgacattcccttagaggggttccttcatgaggcttagtgttctggagtccgtggggaaggaactagagaaacaaaaagccttcatgagccatcattgtcttgagttttcctggaggcttcttgaggtgtccctagtcccacacgcctcttgcaatgttgtcctccactcacggagcactggatggaagggactcagaggtgatccctaggctgttctttgaacagctttgaacagcttagggtgcctgtactatgcccaggcagacatcactaatcgatgacagagtctctccgacctcacaggccttccaaatatagtgctctaggcagctccattggccaccccactttggtccaacctctggactttgtgggtgaggagactgaggactaaagagagagtgactttttcaagttcacatagctatgcctaaaacctggcctccttgttctcaggccatggttctttccattatgccctcctgccttggttaac

SEQ ID NO: 5664 - DNA, 1330 bp, Canis familiaris
gtcttgccaagggtcatgcagtagggctttagagcgtaggacagatctaaagtactatgaagatcaacagaagcaacttgaacaagtcattgccaaagacttacttccacctaaagacaggcaatacttaccactgctaaaaacgagcccagctccaaatatgcttcctggggactacaagagccagcttcaggaggcccctctggagtggaaggcactcatggaaatgaagcagatgaaaatgactctagagaggcttgatagagatgggaatgcccgaggagacactccatctcatggaacaggatcagtgcctgaaagccccaggaaccctgggagctccacccctggaagtgctggcacttggaaccctggcagcactggacctggcagtgctggtccttggagctctgggagcaccaggcctggcagcactgggcctggtagtgctggtacttggagcaccaggcctggcagcactgggcctggcagtgctggtacttggagctccgggagcaccgggcctggcagcactggaccaggcagtaccggtacttggagctctgggagcaccgggcctggcagcactggaccaggcagtaccggtacttggagctccgggagcaccgggcctggcaacactggactgggcagtactggcacttggagctccgggagcaccgggcctggcaacactggaccgggcagtactggcacttggagctctggaagttctgactccgaaagctttaggccaggtagcgtagggcatgggaacaccaggcctaccaacccagagtgggggacatttgaagaggtgtcaggaagtgtgactccagggttaaagaatgagttccacacaggtaaactggtcacttctaaaggagagaaagagcttcttattggtaatgagaaggtcacctctggtagcacaaccaccactcgtcacgcatgctctaaaactgttactaagaccgttataggtccagatggtcgcaaagaagtgacaaaagaagaggtaaactccgaagatggttctgattgtggtgacttatcccatacttttgctggcagcctagatgatctccatgctaggcaccctgatctagagcgtttctttggcacctcaattgtcaaaacacctccaggtatatttttaccctcgcgtaaagagtttgaacataagacccacattatgggctcagattctgacatattcacaaacatagggacacctgagttcccttccagtggtaaaacttcaagtcacagcaaacaatttgtgaccagtagtacgacttacaacagaggagactccgcatttgaaagc

SEQ ID NO: 5665 - DNA, 1251 bp, Canis familiaris
  misc_feature (575)..(575): n comprises a, c, g, or t, or includes no nucleotide
atggcgttcttgattcttgtgactttggccctagcatctgctcactattctggtgagcactttgaaggtgagaaggtgttccgcgtcaatgttgaagatgaaaatcatatcaacttactccatacattggccagcaccacccagattgacttctggaaaccagattctgtcacacaaatcaaacctcacagtacagctgacttccgggttaaagcagaagacattttgacggtggaggattttctgaagcagaatgaactacactatgaggtattgataaacaacctgagattggtgctggaaggtcagtttggcaggcaggtccctgcaactggacacagttatgagaagtacaacagatgggaaacgatagaggcttggacccaacaagtcaccagtgagaatccagaccttatctctcgcagatccatcggaaccacatttgaaggacgcactatatacctcctcaaggttggcaaagctggacaaaataagcctgccattttcatggactgtggtttccatgccagagaatggatttcccctgcattttggcaatggtttgtgagagaggntattcgcacctatggacaagagatccacatgacagaacttctcgacaagttagacttttatgtcttgcctgtgggcaatattgatggctacgtctacacctggaccaagaaccgaatgtggagaaagacccgctccactcaggttggaactaactgtgttggcacagaccccaccagaaattttgatgctggttggtgcaaaattggagcttctcggaacccctgtgatgaaacttactgtggacctgctgcagagtctgaaaaagagaccaaggccctggctaatttcatccgcagcaacctctcttccattaaagcatatctgacaatccactcatactctcaaatgatgctctacccttattcctatgattataaactcacagagaacaatgctgagttgaatgccctggctaaagctactgtaaaagaacttgccaccctgcatggcaccaagtacacatatggcccgggagctacaacaatctatcctgctgctgggggctctgatgactgggcttatgatcaaggaatcaaatattcctttacctttgaactccgggacaaaggcagatacggctttgccctccccgaatcccagattagtccaacctgtgaggagacactgttggccatcaagcaccttgccagatacgtcctgcaacatctgtactag

SEQ ID NO: 5666 - DNA, 434 bp, Canis familiaris
cgggctctgactctccctgtggtctgcctgggacctccgtcctcgcctcgcctcgcctcgcctcgcctcgcctgggctcgagatggaccccgactgctcctgctccaccggtggctcctgcacgtgcgctggctcctgcaaatgcaaggagtgcaaatgcacctcctgcaagaagagttgctgctcctgctgccccgtgggctgtgccaagtgtgcccagggctgcatctgcaagggtgcgtcggacaagtgcagctgctgtgcctgatgtgtgagaacacctgttcctgatgtatatagagcaagcaacatgtacaaacctgcagttttaaagcatttttttcatatcactctgacttgttttctacattcccgtttgtataaaatacatgaattaaattaaaaattgttgaatttaaaaaaaaaaaaaaaaa

SEQ ID NO: 5667 - DNA, 318 bp, Canis familiaris
cagcccaaggcctccccctcggtcacactcttcccgccctcctctgaggagctcggcgccaacaaggccaccctggtgtgcctcatcagcgacttctaccccagcggcgtgacggtggcctggaaggcaagcggcagccccgtcacccagggcgtggagaccaccaagccctccaagcagagcaacaacaagtacgcggccagcagctacctgagcctgacgcctgacaagtggaaatctcacagcagcttcagctgcctggtcacgcacgaggggagcaccgtggagaagaaggtggcccccgcagagtgctcttag

SEQ ID NO: 5668 - DNA, 330 bp, Canis familiaris
aatgatgcccagccagccgtctatttgttccaaccatctccagaccagttacacacaggaagtgcctctgttgtgtgtttgctgaatagcttctaccccaaagacatcaatgtcaagtggaaagtggatggtgtcatccaagacacaggcatccaggaaagtgtcacagagcaggacaaggacagtacctacagcctcagcagcaccctgacgatgtccagtactgagtacctaagtcatgagttgtactcctgtgagatcactcacaagagcctgccctccaccctcatcaagagcttccaaaggagcgagtgtcagagagtggactaa

SEQ ID NO: 5669 - DNA, 372 bp, Canis familiaris
atcacctgtctggttgtggatctggccaccatggaaggcatgaacctgacctggtaccgggagagcaaagaacccgtgaacccgggccctttgaacaagaaggatcacttcaatgggacgatcacagtcacgtctaccctgccagtgaacaccaatgactggatcgagggcgagacctactattgcagggtgacccacccgcacctgcccaaggacatcgtgcgctccattgccaaggcccctggcaagcgtgcccccccggatgtgtacttgttcctgccaccggaggaggagcaggggaccaaggacagagtcaccctcacgtgcctgatccagaacttcttccccgaggacatttctgtgcagtggctg

SEQ ID NO: 5670 - DNA, 229 bp, Canis familiaris
gcctcgcgcagccatggtaaggaggtttcttcgggagctctcggggtccatcagcttccatccttccagggctgggggttcccagggctccggggttcatgcagagggtggccgggtggaggcaaagggactgcagcctgcgagttggcccaggagagcgagggcgagtaccggccccggagcaaggggaaatcggagcggctggcgggaaagcctcggtgtctggccc

SEQ ID NO: 5671 - DNA, 933 bp, Canis familiaris
cctgagaagatgcattgtcttcctctcaccctgctgctccttctcctatgttccagagcagaagctgaggagatcatcgggggcacagagtccaagccacactcccgcccttacatggcccacctggaaatcctcactctccggaatcacctggcgtcttgtggtggtttcctgataaggcggaacttcgtactgacagctgctcactgtgcaggaaggttcataatggtcaccctgggagcccataacatacaaaagaaagaagacacgtggcagaagcttgaggtcataaaacaattccctcacccaaaatatgatgaccttactcttcgccatgacatcatgctactgaagttgaaggagaaggccaacctgaccctggccgtggggaccctccccctctcaccccagttcaacttcgtcccacctgggagaatgtgccgggtggctggctggggaaaaagacaagtcaatggatcaggctctgacactctgcaagaggtgaagctgaggctcatggacccccaggcctgtagacactacatggcttttgaccacaacctccagctgtgtgttggcaatcccaggaagacaaaatctgcatttaagggagattcagggggccctcttctgtgtgctggggtagcccagggaattgtgtcctatgggcagaatgatgcaaagccccctgctgtcttcacccgaatctcccactaccggccctggatcaataaggttctgaagcagaataaagcctgaatggagcctgggcaagcctgaggggaaatctggaaccagacctgagcaggctctctgccacttactctggagctgcctctagtctctactgaggccccactacatccctcagacccaagagggctcctccaggtcacagagtcctcagtaaacctcaataaagatccagcttcc

SEQ ID NO: 5672 - DNA, 2575 bp, Canis familiaris
aattcccgggccaggagggacacaggagagggaccaaatctgcttctctgctccccacttctctcaaccagtcctccgagagtcttcaagccgctttcctgcactcaatctttctgggaaagtaaaaggagacttttcccagatgaagagaacacacctgttcatcgcggggctctacctgctggcctcctgccgggcagaagaggggctcaacttccccacgtatgatggcaaagaccgtgtggtcagtctcactgagaagaacttcaagcaggttttgaagaaatacgacgtgctttgcctctactaccacgagtccgtgtcttcggacaaagtcgcgcagaaacagttccagctgaaggaaatcgtgctcgagcttgtcgcccaggtcctggagcataaagatataggctttgtgatggtggatgccaagaaagaagccaagcttgccaagaagctgggttttgatgaagaaggaagcctgtatgttcttaagggtgatcgcacgattgagtttgatggcgagtttgcagctgacgtcttggtggaatttctcctggatctaattgaagatcctgtggagatcatcaacagcaaactcgaagtccaagcctttgaacgcattgaggaccagatcaaactcattggctttttcaagagtgaggagtcagagtattataaggcttttgaggaggcagctgaacacttccaaccttacatcaaattttttgctacctttgacaaaggggttgcaaagaaattgtccttgaagatgaatgaggttgacttctatgagccatttatggatgagcccattgccatccctgacaaaccttacacagaagaggagcttgtggagtttgtgaaggaacaccaaagacccaccctacgtcgcctacgcccagaagacatgtttgaaacatgggaagatgatttgaacggcatccacattgtggcctttgcagagaggagtgacccagatggctacgagttcctggaaatcctgaaacaggtggcccgagacaatacagacaaccctgacctgagcatcgtgtggattgacccggatgactttcctctgcttgttgcctactgggaaaagactttcaagattgacctattcaagccacagatcggggtggtgaatgtgacagatgccgacagtgtctggatggagattcctgatgatgatgacctgcccacagctgaggagctggaggactggatcgaggatgtgctttctggaaagataaacactgaagatgatgacaatgaagagggggatgacggggatgatgacgaggacgacgacgacgatgatggcaataattctgatgaggagtctaatgacgacagtgatgatgatgatgagtagccccgaccccgggtgatgggtgaaaacacaatcacagctgcccactaccatgcagacagcaccagggggcagcgagcagccccagcctccgcgcaccagctccttctccctttcccatgccttttcccacccccttctcaccgggagctgttccactcagcaaacgcctctaaacccagtaatcccactcagcagggactagtggggaattattcccatgtggactgtcttgattgtcttggaaaagctcttgttctttgccagaccgtcactggtcatggcaaggccggaacctggcggtctggggacaataatcctctgacacctcaactcaagtctacttgtccttgacgtgataataacagaattgacagccggcaaactcaaagcagattgtgacctcacagtccgagcccagggagacccacgattcatccatttagcttcgtgcctagaacatcagtgataatccctccttcaagcgagaggttccctcttaggaaaggctcagccttggaaacaagtgtataaatcaggttttcttggctctattaaacgtactatttcaagggtatgtcagaccattatgaattcagatccaagggtttggatagctatcaggaggccttgatacacatgcgtacaaacgtcaccatcatttctagcacgttgggacatgggatgggaggtcgatttgctttcttaatttcttgtcagtggcaagtctcacattatacacaaggggctgggggaactgtaaggatgaaagattttaaatattttttctctagggttcatgcccttgattgagtcagctggcttcttagcctgagctgggatctggatacacttttctgttgctgctagtgggtrrrtccattgggagtggaagttggtttatccagaggtcaatcaatgctccatttgtcagccctcccacacttgagcaggacaatagctagagttcagaatggtgccccgaggcactgagaaaatcccaaagtgccttccaaactatctaaaagttccattgtgctcagtagttttagcattaagtgtgctgatattatgatgttctaatttattttctcaatcttttaacacatgtgtaagacactgtgcaaattctttggaaatagggtaattcttttatggaatagtagccaactaactctgtcattaaacttatactttgaaaat

SEQ ID NO: 5673 - DNA, 1177 bp, Canis familiaris
ggcgggcgggcggcgcgggccacgggcgccatgaacacggtgctgtcgcgggcgaactcgctgttcgccttctcgctgagcgtgatggcggcgctcacgttcggctgcttcatcaccaccgccttcaaggaccggagcgtcccggtgcggctgcacgtctcgcggatcatgctaaaaaatgtagaagacttcactggacctagagaaagaagcgatctgggattcatcacgtttgatataacagctgatctagagaatatatttgattggaatgttaagcagttgtttctttatttatcagcagaatattcaacaaaaaataatgccctgaaccaagttgtcctttgggacaagattgttctgcgaggtgataatccaaagctgctgttgaaagacatgaaaacaaaatattttttctttgacgatggaaatggcctcaagggaaacaggaacgtcactttaactctatcttggaacgttgtaccaaatgctggaattctacctcttgtgacaggatcaggtcacgtatctgtcccatttccagatacatatgaaataacgaagagttattaaattattctgaatttgaaacaacatatttttatacttaatgaatcatatcttgtttttctctttccttgcatcttcatttgttttgttttgttttgtttggtataagaactaattatcaaaaggcatatttgaagggaaaggctaatgtgctacgtaaacctgattttacaaacagaacacacacagaagggtcaccagaggggagtattataaaaataagacaactacataataaagctttgtaaaaaaaaaatatatgaggtattccctgtatgtccatgattctttatggaatataaagtgagcatgaagagtagttagaacttttaggtgcctgtggagttctaagagccgtattttatgccttgcattcatcagatgtgattcagaagtggacattctcttttagggtttgtctcattactggaaaaatttaaatgacacctggtttataaaatagccaaaagtgatggaattttattccatttgtcttaggaatgccccataatgcttgtttttcttacaggggactagcaactttctccacttaaagactaaatacctctttatatgctgtaaatcattctaactcattttaaagtct

SEQ ID NO: 5674 - DNA, 820 bp, Canis familiaris
agtgtggaccagaagatagaaggtccagtccttgctgaaagacaggtctgtctgttctgctttcatctcctttccgttcttcaacaaatcaatttcaatctctggtggatggaaccctgacacgtagcagttcaggaaggccggggctccgcagccgcctgtgacacccgggagccggcgggccgcctgggcccctggagagcccgccatggtgcgcgcgggcgccgtggggacgcacctcccggcgtccggcttggacatcttcggggacctgaggaagatgaacaagcggcagctctattaccaggttttaaactttgccatgatcgtgtcttctgcgcttatgatctggaaaggcttgatcgtcctcaccggcagtgagagcccgatcgtggtggtgctcagtggcagtatggagcccgcctttcacaggggcgaccttttgttcctgacaaacttccgggaagaccctattagagctggcgaaatcgtggtctttaaagtcgaaggacgagacattccaatagttcacagagtgatcaaagttcatgaaaaagataatggagacatcaaatttctgactaaaggagacaataatgaagttgacgacagaggcttgtacaaagaaggccagaactggcttgagaagaaggatgtggtgggaagagccagagggtttttaccatatgttggtatggttaccataataatgaacgactatccaaaattcaagtatgctcttttggctgtaatgggtgcatatgtgttactaaaacgtgaatcctaaaaagagaagaagttcctgagaccagattgaaat

SEQ ID NO: 5675 - DNA, 565 bp, Canis familiaris
ctcccgtccgacccccccaggtgcctgtggacctatgagatccagttctccgcggatggagaagtgtacacgcccatcagcaggaagccatccacctttaacctgtttgtgttcagcccaggtgtgcttgccaccctgtgccctgcccttagcagccccgtttctgggcctcagccgcgtcccctagggtgcggcccagggtttgccgagcccggagctacggagctctagaccctggggtgggcccaggggggcacacatcaacaggtgtgtttgcctcctcagagtcagccgtcacctctggctcctaccgggttcgagcggtggactactgggcccgaccgggccccttctcgacccgcgtgcactacgtggaggtccctgcaccgtcagggccgccgcggcccagtgactgtgagcggtgctgacctcggagccgcggaggccaggcgctgagatgggcctccaaggaaggccctcgtccgccggggatggacgcagcccgtccgtgggctccgctccttctgtgctgtctcactcccttaaagtgcctttgcgctcacca

SEQ ID NO: 5676 - DNA, 1128 bp, Canis familiaris
aaaggccccgcccctccccgcggcccccgcccccagagaccacccctccacaaaaggccccgccccttccccgcccccacggagccctgcccctcgcctcgaggccacgcccccgcaacaggccccgcccctccccgaggccccgcccccagcgacacccccacaaggccccgcccccacgggccccgccccctcaccccgaggccccgccccgccgctccgcggccccagaacccacccacgtggtgtgcgacccggaggcggaaccggccggcgcggcgtagacccgggctcccggagcgctgtggggacgcgccccccgcccccgcccccgcccccgcgcccgcgacccccgcccggccatgcggccccccggcccccgcgcccccgggctggcgctgctggccgcgctgctggcggcgccccgggccctcgcagaggccccgcacctggtgctcgtggacgcggcccgcgcgctgcggcccctgcggcccttctggaggagcaccggcttctggtgagggctccgcgggggaaactgaggcccgacaggcccggcccgggttctggggccccgtggcctgcgggagagccgcggccccgccctcgcggctgcacccgggcccgcgggaggggcagggcccgggaccgtccaggggcaggcgccgtgacctcggccgtcctggggtgaccgcaccccacccccccccaccccccccccaccccggccccagctgcggccccgcccaggggagaaggagcagggtgctgccggggggtgctcgcccctccgagccccggtcttccgtaaacacgagactccaccacagccttcctgctcttggggtcattttattccggggaggaggggggttggcaggcactgccgggccgctgctggagcctggcgtcctgggcctcccgggccgtcgggggcactaatgcccgccccctcgctctgccccagcccccccctgccgcacagccaggctgaccgctatgacctcagctgggaccagcagctcaacctggcctatgtgggtgctgtccctcacgggggcatcgagcaggtccggacccactggctgctggagctcatcacggccaggtgagtggtgggcagctggg

SEQ ID NO: 5677 - DNA, 672 bp, Canis familiaris
atcctcctcttagaaaattttccatagaaccacaggggcaaattccatttgagaaagtgaatgctgtattttataaagcagagagatgtggagccgagcacacagcatccttctttcaaaaagtacaatcagaaaagagagttttaccttacagggctgtgaagataagtgaaaatcagacggaattctactgtgaataatatgatatgtggcaaaggaactctactcttggtatagttaggagaagattttaatccaaaggctttgcatctgtacggaggaccgaggagatactgaaagagatttgcagatccactgttttttaggcaggaagaatgctcgttaaatgcagaacgctgctctggctcatgtgtttgctccgaggtgtaggttttgttcgactgacgtatcagatagtcagagtggttaccacaccgacgttgtagcagctgcataataaatgactgagagaatcatgttaggcatgcccacctaacctaacttgaatcatgcgaaaggggagctgttggaattcaaatagactttctggttcccagcagtcggcagtaatagaatgctttcaggaagatgacagaatcaggagaaagatgctgttttgcactatcttgatttgttacagcagccaacttattggcatgatggagtgacagg

SEQ ID NO: 5678 - DNA, 183 bp, Canis familiaris
cgataggtgctactaaatgaatgaactgtaagcacatcatgctatgtgaaaaaagtcagataccagactacatatgtacaattccatgtatatgaactatctagaagagggagatccacagaggaagaaagcagttcagcagtttcctggggttggctgagagttgactgcaaatagatcatg

SEQ ID NO: 5679 - DNA, 114 bp, Canis familiaris
acattgacgagtgcctctcaagtccttgtttgaatggagccacctgcgtggacgccatcgactctttcacatgcttatgccttcccagctaccgaggggacctgtgtgagatcg

SEQ ID NO: 5680 - DNA, 366 bp, Canis familiaris
tcacatctcttctacctggcactgtgcttgctcaccttccccagccccgccacagctgggcctgagacgctctgcggggctgagctggtggacgctcttcagttcgtgtgcggagacagggggttctacttcaacaagcccacagggtacggctccagcagtcggagggcacctcagacaggcatcgtggatgagtgctgcttccggagctgtgatctgaggaggctagagatgtactgtgcacccctcaagcctgccaagtctgcccgctcggtccgtgcccagcgccacaccgacatgcccaaggctcagaaggaagtacatttgaagaatgcaagtagagggagtgcaggaaacaagacctac

SEQ ID NO: 5681 - DNA, 3500 bp, Canis familiaris
tggcggcaccgggcaccatggggaaggcagagaattacgagatgtactcggtagagctgggtcctggccctgggggggacatggcagccaagatgagcaagaagaaggcgggcaagggaggaggcaagaagaaggagaaactggagaacatgaagaaggagatggagatcaacgaccaccagctgtcggtggcggagctggaacagaaataccagaccagtgcgacaaagggcctgtctgccagcctggccgcagacctgctgctgcgggacgggcccaacgccctgaggccgccgcgtggtacccccgagtatgtcaagttcgcccggcagctggcaggtggtctgcagtgcctcatgtgggtggctgctgccatctgcctcattgcctttgccatccaggccagtgagggtgacctcaccaccgacgacaatctgtacctggcactggccctcatcgccgtggtcgtggtcaccggctgctttggctactaccaggaatttaagagcaccaacatcatcgccagcttcaagaacctggtgccccagcaagcaactgtgatccgagatggggacaagttccagatcaacgcagaccagctggtggtgggcgacctggtggagatgaaaggcggggaccgagtgccagccgacatcaggatcctccaggcccagggctgcaaggtggacaactcctcgctgaccggagagtccgagccgcagacccgctcgcccgagtgtacacacgagagccccctggagacgcgcaacatcgccttgttctccaccatgtgccttgagggcacagcacaaggcctggtggtgaacacgggtgaccgcaccatcatcgggcgcattgcgtcgctggcttcgggagtagagaatgagaagacccccatcgctattgaaatcgaacattttgtggacatcatcgcaggcctggccatcctcttcggcgccacgttttttgtggtggccatgtgcattggttacaccttcctgcgggccatggtcttcttcatggccatcgtggtagcctatgtgcccgaggggctgctggccactgtcacggtctgcttgtccctgacggccaagcggctggccagcaagaactgtgtagtcaagaacctggaagccgtggagacactgggctccaagtcagtgatctgctcagacaagacagggaccttgactcagaacagcatgactgtgtccaatctctggttcgacaaccacatccacacggctgacaccacggaagaccagtcagggcagaagtttgaccagtcctcggagacctggcgggcgctatgccgcgtgctcaccctctgcaaccgggcggccttcaagtcgggccaggacgctgtgccggtgcccaagcgcatcgtgatcggggacgcgtccgagacggcgctgctcaagttctcggagctgaccctcggcaacgccatgggctaccgcgagcgcttccccaaagtctgcgagatccccttcaactccaccaacaagttccagctgtccatccacacgctggaggacccgcgcgacccccggcacgtgctggtgatgaagggcgcccccgagcgcgtgctggagcgctgtagctccatcctcatcaagggccaggagctgccgctggacgagcaatggcgggaggccttccagactgcctaccttagcctggggggcctgggggaacgcgtgctcggtttctgtcagctgtacctgagtgagaaggactacccgcctggctatgccttcgatgtggaggccatgaacttcccaactagtggcctgtgctttgcgggacttgtatccatgatagacccgcctcgggccaccgtccctgatgctgtgctcaagtgccgcacggcgggcatccgggtgatcatggtgacgggtgaccaccccatcacggccaaggccattgcagccagcgtgggcatcatttcggagggcagcgagacagtggaggacatcgccgcccgcctccgggtgcctgtggaccaagttaataggaaggatgcccgcgcctgcgtcatcaatggcatgcagctgaaggacatggacccgtccgagctggtggaggcgctgcggactcaccccgagatggtgtttgctcgtaccagtccccagcagaagctggtgatcgtggagagctgccagagactgggtgccatcgtggccgtgaccggggatggggtgaacgactccccagccctgaagaaggccgacatcggcgtggccatgggcattgccggctcggacgctgccaaaaatgcagcggacatgatcctgctggatgacaactttgcctccatcgtgacaggcgtggagcagggccggctgatctttgataacctgaaaaagtccatcgcctacacgctgaccaagaacatccccgagctgacgccctacctcatctacatcaccgtcagcgtgcccctgcccctcgggtgcatcaccatcctcttcatagagctctgcaccgacattttcccgtcggtgtccctggcgtatgagaaggcggagagtgacatcatgcacctgcgcccacggaacccaaagcgagaccgattggtcaacgagcccctggctgcctactcctacttccagatcggtgccatccagtcatttgctggcttcacggactacttcacggccatggcccaggagggctggttcccgttgctgtgtgtggggctgcggccgtactgggagaaccaccacctacaggatctgcaggacagctacggccaggagtggacattcgggcagcgcctgtaccagcagtacacctgctacaccgtgttcttcatcagcatcgagatgtgccagatcgctgacgtcctcatccgcaagacacgccgcctgtctgccttccagcagggcttcttcaggaacaggatcctggtgatcgccatcgtgttccaggtctgcatcggctgcttcctgtgctactgccccggaatgcccaacatcttcaacttcatgcccattcggtaccagtggtggctggtccccatgccctttggcctcctcatcttcgtctatgatgagattcggaaacttggagttcgctgttgcccagggagctggtgggatcaggagctctactattagaggaaccatccctgcaccccccgcagcagaggtggggggcatgggacccgctgggccgccactggaacatcaaagcgaccaggagccctggcacctgtgtcagctcctgcagcccacggcgccccgaccttggagggccctccccgctccccttccccatccacagagagcccaccccgtcagggcggtccctgggccaggtcctggtctgaagagtggggagggggggtgttggcaggagtggggcgctggctgttcctgtgaggcgggtctgcactcggggtgcccagagggctccccagggtactgcttcaatacacacctgtgccgcgtgatagtaataaaccagctacactgacgaaaaaaaaaaaaaaaaaa

SEQ ID NO: 5682 - DNA, 681 bp, Canis familiaris
gaatgtcctgccctgctccttttgctgtctttgctgctgcttcctctgggcctcccagtcctgggcgccccccctcgcctcatttgtgacagccgggtcctggagagatacatcctggaggccagggaggccgaaaatgtcacgatgggctgtgctcaaggctgcagcttcagtgagaatatcaccgtcccagacaccaaggttaatttctatacctggaagaggatggatgttgggcagcaggccttggaagtctggcagggcctggcactgctctcagaagccatcctgcggggtcaggccctgttggccaacgcctcccagccatctgagactccgcagctgcatgtggacaaagccgtcagcagcctgcgcagcctcacctctctgcttcgggcgctgggagcccagaaggaggccatgtcccttccagaggaagcctctcctgctccactccgaacattcactgttgatactttgtgcaaacttttccgaatctactccaatttcctccgtggaaagctgacactgtacacaggggaggcctgcagaagaggagacaggtgaccaggtgctcccaccccaggcacatccaccacctcactcactaccactgcctgggccacgcctctgcaccaccactcctgacccctgtccaggggtgatctgctcagcaccagc

SEQ ID NO: 5683 - DNA, 769 bp, Canis familiaris
atggcctctcgggtgaccgccctgctcctgccgctggccctgctgctccgtgccgcggcggccagcgggcccagccggttccgcatgacgccgccgaaggtggtgggacagctgcacgcgcaggtggagctgcagtgccaggtgctgctgtccaccgcggcgccgggctgctcgtggctctaccagaggaatgagccagccgcccgccccgtcttcctcatgtacatctcccagagccgggccaagccggccgagggcctggacaccaagcacatctccggccagaagaagaccgacagcacctacagcctcaccctgagccgcttccgcaaggaggacgagggctactatttctgctctgtcctgagcaactccattctgtacttcagccccttcgtgccggtcttcctgccagtcaagccccccactacgccggcgccgcggccacccacgcgggcgcccaccaacgcgtccaagccggtgtctccgcgcggggagacctgccggcctgcggcgggcagcgcagtgaaaacaagtgggttagacttcgcctgtgaaatctacatctgggcacccctggctgggacctgcgccgtccttctcctgtcactggtcatcaccatcatctgcaaccacaggaacagaagacgtgtttgcaaatgtcccaggcccgtggtcagaccaggaggcaagcccagtccttcagagaaatatgtctaacatggagatggatcctgtgtggcagccactacaagaccaaatagaattc

SEQ ID NO: 5684 - DNA, 163 bp, Canis familiaris
cctgaacagcgctggctaccttcttggcccacatgccattgacaaccacagatcatttcatgagaagcctggcctcactggcaaacgggaactcccacctgaagacgaaggaaggtcaggaggctttgccgggccgctgtcgctgtcagagaatgccgctgtg

SEQ ID NO: 5685 - DNA, 174 bp, Canis familiaris
cgcttaagtttctctctccctctgctcctcccccaccccaccacaatctctctcataaatacatacatacatacatacatacatacatacatacatacatacatacatacatacatatataaatatttttaaaataataaagaaagggaaaagtgacagccggctgtggatttg

SEQ ID NO: 5686 - DNA, 1748 bp, Canis familiaris
ccagccccaattatgacagtggctaccggagagccagcggacgaggctgccgccctccccgggcacccgcaggacacctacgaccccgaggcagaccatgagtgctgcgagagggtggtcaccaacatctcggggctgcgtttcgagacccagctcaagaccttagcccagtttccggagaccctcttaggggaccccaagaagcggatgaggttctttgaccccctccgaaacgagatctttttcgtacggaaccgccccagctttgatgccattttgtactactaccagtccgggggccggctgagacggcctgtgaacgtgcccttagacattttctccgaagaaattcggttttacgagttgggagaagaagcgatggagatgtttcgggaagatgaaggctacatcaaggaggaagagcgtcctctgcccgaaaatgagtttcagaggcaagtgtggcttctctttgaatacccagagagctctggacctgccaggatcatagctatcgtatctgtcatggtgatcctgatctcgattgtgagcttctgcctggaaaccctgcccatattccgggatgagaacgaggacatgcacggtggcggggtgaccttccacacctactccaacagcacaatcgggtaccagcagtcaacttccttcaccgaccccttcttcatcgtagaaaccctctgcatcatctggttctcgtttgaattcttagtgaggttctttgcctgtcccagcaaagccggcttcttcactaacatcatgaacatcattgacattgtggccatcattccctacttcatcaccctggggacggagctggctgagaagccagaggatgcccagcaaggccagcaggccatgtcactggccatcctccgtgtcatccggttggtaagagtctttaggattttcaagttgtctagacactccaaaggtctccagattctaggtcagaccctcaaagccagcatgagagaattgggcctcctaatattctttctcttcattggggtcatccttttctctagtgctgtctatttcgcagaggccgatgagcgagagtcccagttccccagcatcccggatgccttctggtgggcagtcgtctccatgacaactgtaggctatggagacatggttccaactaccattgggggaaagatcgtgggttccctgtgtgcaattgcaggtgtgttaaccattgccttaccggtccccgtcatagtgtccaacttcaactacttctaccaccgggagacggagggggaggagcaggcccagtacctgcaagtgacgagctgcccaaagatcccatcctcccctgacctgaagaaaagtagaagtgcctctaccattagtaagtctgattacatggagatccaggagggagtaaacaacagtaacgaggactttagagaggaaaacttgaaaacggccaactgcactttggctaatacaaactatgtgaatattaccaaaatgttaactgatgtctgattgaaacctattaacgtactctcagctccatggaactaatgcagatactgcataatagcctgcattgtagtaacatgttctacagtgtgtatctggttctgcatggaaagcaatagtcgtgcaagtgacttttgatcttttgcatttttgatttagaacacagaatatctatccatggctttcatgcaatcttcatcaccggcttagggtttcaacagggagtcacagtgagcaga

SEQ ID NO: 5687 - DNA, 587 bp, Canis familiaris
gcggggcctgagccagtttctccggccgccgggctttggagcacttcagcgagcgctcgttcgccgtcggtgtcagcgtcgggcgccgtccagcctgcagcatgcctggtccgacccccagtggcactaacgtgggctcgtcggggcgctctcccagcaaagcagtggccgcccgggcggccgggtccacggtccggcagagaaaaaatgccagctgtgggacaaggagcgcaggtcgcaccacctcagcgggcactgggggcatgtggcgattctacacggaagactcacctgggctcaaggttggccctgttccagtattggttatgagtcttctgttcatcgcttctgtatttatgttgcacatttggggcaagtacactcgttcatagattcggctacatccatctgtctgtcatctgaagaagaaggaaaaaaaactcaacatatcttggaccaaaagcatagtgatttcctgttagtgagaaagaaatattctgttagcttattgttttgcaaggacttaacacgaattggttttccggaatcagtttttttctatggctaataaactttttaattcattt

SEQ ID NO: 5688 - DNA, 389 bp, Canis familiaris
tgaggaggcggcggcaggcatcatggatcaggtaatgcagttcgttgagccaagccggcagtttgtgaaggactccattcggctggttaaaagatgcactaaacctgatcgaaaagaattccagaagattgccatggcaacagcaataggatttgctataatgggattcattggcttttttgtgaaattgatccatatccctattaataacatcattgttggaggctgaatacctttttaaaagagtctttcatcttggggattggtgaataattgatacgagaagctcatgaagtaaaaatgtgcctaatatgtttcgtgtttttctttgatgtttttttttgtcttccaagatgttttgtatttgtaaattaaaataatttcaaaat

SEQ ID NO: 5689 - DNA, 229 bp, Canis familiaris
tccctgcgtggaacctgcttctccctctgcctgtgtcactgcctctctctctctctctctctctgtgtgtgtgtgtgtgtgtgtctcgtgaataagtaaataaaatctttaaaaaaaaaaaaccttcttgtttaaaattcaagttagttaacgtatagtgtagtattggtttcaggggtagaatttagtgattccttacttacatataacccccagtgctcatcccagc

SEQ ID NO: 5690 - DNA, 1405 bp, Canis familiaris
agtggtccgcctccgccagaacgcagagcagtgctgcccggagtacgagtgtggtatgtgtcccgccctgggcatttctccagggtcctgaccctggccctggccccaggtgacccatgcggcaggtgcagaaaggtgtgggtgggctcaggcacagggtgctcaaaaggaggtgggtaagggctgactctctctccccgccctaccccaccaaatagcaagagtcaccttcggaaagtaggatttgcttcctaggaaacttctgcagtgaattattaaatgtaaggtttgagagcattaaacaaacaaacaaacaaaaagaatgggggtaatctctggtgggcagtagtgcagagatttactgaagaaaaagccatgccaaagtaacccatgtgccttttcaataaattcagagtagactagatatagagaaggccacacacagggtcaccttgatttcagcaagttattcgtcaaaaggtttcattataggcttgcaaactccatggtgagtaatgggctgaataaatagtgtaatgagatgaatccagagctgatggaattatggttaacaggagaggaaatctccagtgccccgttgctgtcctgtccaatgtgtttattaattgtacggatggagacataaagcacaggcgtgtcaagttggcagtgatgcaaatctttgagggagagcaaatagatcaagggatagtctacagggtctaaaaaagaatgaaatcatctagaaatttatgtatgctgatgaaatttataaggcatgaataaagtcccacatagaaggagatgtggcttgagaaaaacttgtggaaaataggtcttagcatgctaacaatagagagaactgggggcattatttacctcaggcccctcattttatagaagggattaaacttctacaatgtgccagacactttgcctccattatttcatgacaccctgagactgagcctgggaggtagaccttcccaccttgcagaagatgagaccgaggcccagagaggtcaagtgatttggctgagatctgaaaatcccagcagtgacaagagtaatcaacacgagcttatcataggaatcggatctatctttctatctgtctctctatctacctacctatcactcctccccttctctacctccacctctaacttcatctcatccctaccatgtacctcaaacagtagaagtctggaggaataggaataggaataggaataggaataggaataggaataggaataggaatgttgggtcacaatagtacccttgctgacctctgagtgggcatctctctttcctggcctcagtgtgtgacctggtgagctgtgacctgcccccggtgcctccctgcgaagatggtctccagatgaccctgaccaatcctggt

SEQ ID NO: 5691 - DNA, 102 bp, Canis familiaris
gggcaccatcaaaagcaattccggaggagatgcttaccatgtagtgtgaccgtttctccccggaggagatcaggaacatgggcagccttccctccagatgtg

SEQ ID NO: 5692 - DNA, 1261 bp, Canis familiaris
attacttcagctgtgcactcaaacagccatgcagcagttcaggagcaaaataattggatgtggtcctggtttggtaactcacagcctaagactcaggatcacacggcaacagcaacaacagctttgaggagctctagtggtacaactcccaaaacagcaaccaagaggcgagaagcccaggattggctttcatggtggtttcaaccatcagagtccaagaatcatcttcacacaacaacaataatggctggtacggattcaagtatcatctcagcaggctgggaaccaactgaagaaaatgaagatgaaagagacaaacaccccagttattctggatcaggcattgatgatgatgaagattttatctccagcaccattccaaccacaccacggctttttagccacccaaaacagaaccaggattggaccccgtggagcccaggcgaatcgaatccagaagtattacttcagactactacaaggatgactgatgtggacagaagtggcaccagtgctaatggagaaaactggacccgcgaaccacactctcctctcattcaccatgagcaccatgatgaagaggaggcccagcatgctacaagcacaaccgaggcaatccctagtagtacaatagaagaaacagctacccagaaagagcagtgggttgagaatggatggcatgggaaatatccgcagtcaccaaaagaagactctcattcaacagcagggacagctgccacagcccaagacagccatccagatcaaaaaacgacaacgcagagtcaagaggacagctcctggacttatttctttgacccaatctcacatccaatgggaccaggtcatcaaacggaaagatggatggatatggactccagccatagtcccacaagtcagccttctgcagatccgaacacacatttggtggaagacttggacaggataggacctctttcaatgacgactcagcaaagtcatactcagagcttctccacatcacctggaggcttggaagaagataaaaaccatccaacggcttctactccaactagcaatagaactgatggcagaggtggaagagaaggtggacatcttcccgaagactcagctccttcagtggaagcttctccttctcactcgccagccacaaatgaatacaggaccctcatcccggtgacccccgctaagacggggttccctggagttactgaagttaatattgctggagattccaattctaacgttattcatttcctttcag

SEQ ID NO: 5693 - DNA, 156 bp, Canis familiaris
catacttacctggcaggggagataccatgatcacgaaggtggttttcccagggcgaggcttatccattgcactccggatgtgctgacccctgcgatttccccaaatgtgggaaaactcgactgcataatttgtggtagtgggggactgcgttcgcg

SEQ ID NO: 5694 - DNA, 305 bp, Canis familiaris
aggtctgggacccacctcccctgagctgacactgagcttgaatctgaaagagcaggctgccaaggtctaaagcagcagaagctggtatgggtggtggatcctgaggggggaacggttgcagtgtctctgagtgacaaggacaaagtctgctgcatccagcctcaatgtttcatccccagtggtcatcaagtcctgccaaagttcttgcattcacgctgggcgggatcttaggccttctgcttctaattggctttgcgtcttctgctgtgttaagactctgcccaaggcccagcagcagcggatct

SEQ ID NO: 5695 - DNA, 2355 bp, Canis familiaris
ctaaatagaaagctatttatttcctatagaaaaacacaagaaaggaagggaggaggagatgtgctgcggagctggggaccagtagaaaaacttgctgccaagaaggacattttggaggttttgttcactggaaggcggtgtctctgggatcccaactcccagatctttattgaagattggaatagaattaaattagggccatggggacacagaaggtcacggtgtctctgatctttgccctctccattgctacaataggctctttccagtttggctataataccggagtcatcaatgctcctgaaacgataataaaggactttctcaattacaccttggaagagaaatcggaaaaccttcccactgaagtgttactcacttccctctggtccttgtctgtggccatcttctctgttggtggtatgattggctccttctctgttggactctttgtcaaccgctttggcaggcgcaattcaatgcttatggtcaacctcttggctgtcgctggtggctgccttatggggttctgcaaaatagcgcagtcggttgaaatgctgatcctgggccgattgattattggcctcttctgcggcctctgcacaggttttgtgcccatgtacattggagagatctctcccactgccctacggggcgcgttcggcactcttaaccagctgggcatcgtcatcgggatcctggtagctcagatcttcggtctgaaagtcatcatgggaactgaagagctttggcccctgctcttgggcttcaccatcattccagctgtcctgcaaagcgccgcccttccattttgccccgagagccctagatttttgctcattaacagaaaggaagaggagaatgctaaggagatcctccaacgattgtggggcacccaggatgtgagtcaggacatccaggagatgaaagatgagagtgctaggatggcacaagaaaagcaagtcactgtgctggagctcttcagatcgcgcagctaccggcaacccattatcatttccatcatgctccaactctcccagcagctctctggaatcaatgctgtgttctattactcaacaggaatcttcaaagatgcaggtgttgaggagccaatctatgccaccattggtgcaggggtggtcaatactatcttcactgttgtctctctgtttctggtggaaagggcagggaggagaactctacatatgattggccttggagggatggctgtttgttccatccttatgaccatctcgttgttattaaaggataactataattggatgagctttgtttgtattggggctatcttggtcttcgtagccttctttgaaattggcccaggccccatcccctggtttattgtggccgaactcttcagccagggaccccgcccagctgcaatggcagtggctggttgttccaactggacctccaattttctggttgggctgctctttccttctgctgcattctacttaggagcctatgtatttatcattttcactggcttcctcatcgtcttcttggtcttcaccttcttcaaagtccctgagacccgtggcaggacttttgaggaaatcacccgagccttcgaagggcaggggcaggatgccaacagagcggagaagggccccattgtggagatgaacagcatgcagccggtgaaggagaccgccactgtctaagccatgcctccttcccgcctccctcccaacatggaaaaaccacctctcccggatgagggagaaatcgaatcaggttgtaaccaggactgtttactgaatagctagctacttgattcctttctcttccccacacactccatgagcactcagaagaacccaatgctggagttagttgtatcttcaatgagtttgaacgttcattctggacattctcttctgtttagaagagaccaagtgaacctaccttcatttcaggaggaactggccacttgccatatgacaacattgtcagctcttcctacctggggttctggtaggtcctcaccgggccaataggggaataagagtgaggtgcagcaccccccccacacacacacacacacacacacacaccagacctcccaggaagcatatctacataagtgtggagggctgagagggattaaatagaagcacccctcctcgcttccatacagctctgcagagcaaattaacttgagtttattatcttatcttctggttttattgcataaatatttatttttttaagtgtaaagtaattttaccaaataatgcaaacataaggaaattgaggttagagttagagggaggtgcttaaagagaggtttatagggtagaagatttgatacgggagaggtcaaggtgc

SEQ ID NO: 5696 - DNA, 1789 bp, Canis familiaris
agtgacctagcgtgtcattctgacccaggtctcggcatatgaactgcatgaccttgggctgtcactgaccatctctatgcagtttcctctagtgcaaagaaaaaatagccctcaccctgcctgtgaggccatgtaaggggtccagacagcactggcccaccagctcacagagtgtcctgtgtcacagagtccaaaaccagccccagtgtgttcccgctgagcctctgccaccaggagtcagaagggtacgtggtcatcggctgcctggtgcagggattcttcccaccggagcctgtgaacgtgacctggaatgccggcaaggacagcacatctgtcaagaacttcccccccatgaaggctgctaccggaagcctatacaccatgagcagccagttgaccctgccagccgcccagtgccctgatgactcgtctgtgaaatgccaagtgcagcatgcttccagccccagcaaggcagtgtctgtgccctgcaaaggtcagagggcaggctggggaggggcaggggccccacatcctcactctgaccctccacttggagttctggccccaaggacactccacggggaggacagtgggctgctgggctgagctcccagcaagtggccaaggtggggcctccatgaaggacctggagggtggcagggggcaggcaggcagagggtgcacactgacctgttccaatctctctctctctctctctctctctctctgctcctgaagataacagtcatccgtgtcatccatgtccctcgtgcaatgagccccgcctgtcactacagaagccagccctcgaggatctgcttttaggctccaatgccagcctcacatgcacactgagtggcctgaaagaccccaagggtgccaccttcacctggaacccctccaaagggaaggaacccatccagaagaatcctgagcgtgactcctgtggctgctacagtgtgtccagtgtcctaccaggctgtgctgatccatggaaccatggggacaccttctcctgcacagccacccaccctgaatccaagagcccgatcactgtcagcatcaccaaaaccacaggtgggcccagaccctgcccgtgaggcactgcttggcacacaaaagtttgtgaggcaactcctaagcctgcttccttcctctagcccctgggcttgggtgctcccacccacattttacaaagggaaactgtggcatggggtgctatggggaagaaggctcttcccccaccccagatccctgacctggctctctgtcctgcagagcacatcccgccccaggtccacctgctgccgccgccgtcggaagagctggccctcaatgagctggtgacactgacgtgcttggtgaggggcttcaaaccaaaagatgtgctcgtacgatggctgcaagggacccaggagctaccccaagagaagtacttgacctgggagcccctgaaggagcctgaccagaccaacatgtttgccgtgaccagcatgctgagggtgacagccgaagactggaagcagggggagaagttctcctgcatggtgggccacgaggctctgcccatgtccttcacccagaagaccatcgaccgcctggcgggtaaacccacccacgtcaacgtgtctgtggtcatggcagaggtggacggcatctgctactaaaccgcccaatcttccctccctaaataaactccatgcttgcccaaagcagccccgtgcttccatcaggccgcctgtctgtccatattcggggtctgtggcatactgaggcaggggtagagctc

SEQ ID NO: 5697 - DNA, 1928 bp, Canis familiaris
cagagcagatacccaggtcaacagcgggcctggcatatgatggggtgacagtccccaaggcaggcactgacactggccctgtccccacagccaccagccaggacctgtctgtgttccccttggcctcctgctgtaaagacaacatcgccagtacctctgttacactgggctgtctggtcaccggctatctccccatgtcgacaactgtgacctgggacacggggtctctaaataagaatgtcacgaccttccccaccaccttccacgagacctacggcctccacagcatcgtcagccaggtgaccgcctcgggcaagtgggccaaacagaggttcacctgcagcgtggctcacgctgagtccaccgccatcaacaagaccttcagtggtaagccagggttgggctggcccacatgacactggagggagaagggacaggctgggcgggagtggtaggagaggggtggtgggcgggcccgaatgccgccatggctggtaacgcccagcacatgtggggctggggctgacacatgagtcccgtgggctcagagacaccactgccacatggctgcctctacttctagcatgtgccttaaacttcattccgcctaccgtgaagctcttccactcctcctgcaaccccgtcggtgatacccacaccaccatccagctcctgtgcctcatctctggctacgtcccaggtgacatggaggtcatctggctggtggatgggcaaaaggctacaaacatattcccatacactgcacccggcacaaaggagggcaacgtgacctctacccacagcgagctcaacatcacccagggcgagtgggtatcccaaaaaacctacacctgccaggtcacctatcaaggctttacctttaaagatgaggctcgcaagtgctcaggtatggcccccctgtcccccagaaacccagatgcgcgaggctcagagatgagggccaaggcacgccctcatgcagcctctcacacactgcagagtccgacccccgaggcgtgacgagctacctgagcccacccagcccccttgacctgtatgtccacaaggcgcccaagatcacctgcctggtagtggacctggccaccatggaaggcatgaacctgacctggtaccgggagagcaaagaacccgtgaacccgggccctttgaacaagaaggatcacttcaatgggacgatcacagtcacgtctaccctgccagtgaacaccaatgactggatcgagggcgagacctactattgcagggtgacccacccgcacctgcccaaggacatcgtgcgctccattgccaaggcccctggtgagccacgggcccaggggaggtgggcgggcctcctgagccggagcctgggctgaccccacacctatccacaggcaagcgtgcccccccggatgtgtacttgttcctgccaccggaggaggagcaggggaccaaggacagagtcaccctcacgtgcctgatccagaacttcttccccgcggacatttcagtgcaatggctgcgaaacgacagccccatccagacagaccagtacaccaccacggggccccacaaggtctcgggctccaggcctgccttcttcatcttcagccgcctggaggttagccgggtggactgggagcagaaaaacaaattcacctgccaagtggtgcatgaggcgctgtccggctctaggatcctccagaaatgggtgtccaaaacccccggtaaatgatgcccaccctcctcccgccgccaccccccagggctccacctgctgggagggaggggggctggcaagaccctccatctgtccttgtcaataaacactccagtgtctgcttggagccctgggcacacccatttcttgggggtgggcagggttgcagagcagggatgtcttggcacagaagggtcccccagggtgt

SEQ ID NO: 5698 - DNA, 1370 bp, Canis familiaris
ggcagagaaacaggcagaggcagaagcaggatagtaaacaaagagttataccctactctttagctctactgacctcccaacaaatcacagaagaaaatgaccataagtggagtcccagtgctaggatttttcatcatggctttcctgatgggtcctcaggaatcatgggctgtcaaagaggagcacgtaatcatccaggctgagttctatctgacccctgacccatcaggcgagttcatgtttgacttcgatggtgatgagattttccacgtggatatggaaaagaaggagacggtgtggcgccttgaagaatttggacgttttgccagctttgaggcccagggtgccttggccaacatagctgtggacaaagctaaccttgacacaatgataaagcgctccaaccacaccccgaacaccaatgtacctccagaggtgactgtgctctcaaacacccctgtggaactgggagagcccaacatcctcatctgtttcatcgacaagttctccccaccagtgatcaatgtcacgtggcttcgaaatggaaaccctgtcaccacaggagtgtcagagacaatctttttgcccagagaagaccaccttttccgcaaattccactatctccccttcctgccctcagccgaggacgtttatgactgcaaggtggagcactggggtttggatgaacctcttctcaagcactgggagtttgaaccaccaacccccctcccagagacaacagagaatgtggtgtgtgccctgggcctgatcgtgggtctggtgggcatcattactgggaccattttcatcatcaagggcatgcgcaaggtcaaagctggtgaacgccgagggcctctttgaggcactttcaggggttccaaagtcaaaggtttaagggagaagacgaatgaatctgaaaaaagagcttaaaataataatcttaactctttagtaactatgcgtgtcctgctacaggcaatggagtttcctagagagaagatcagtgaagaaatttatgcttcaatagctttataaacctggcaatactccaactgttcacctcactgaggacaaccatttttttgcattttccagacttttagatattctaagaaaaatgatgtcttcctgatctgatatctagttattctctctttgctgacccttcttggatccgttttcctccattttctaccatcattttaatatcaccatgcaatgcctctggaatagaccccataggatcttttctctactacggaaccttgtgaatgttcgaaacagatatctcttctacacttagtgctttggtttcttcaaattgtgattgtgatttttttttaacacaataaactatttgatggatctga

SEQ ID NO: 5699 - DNA, 1911 bp, Canis familiaris
aaattgccatttgaaatctttattagttagcaaaaaaatctaacataatcatcagagttttaagtagtagtgacagaagataaaaatgcctccatatcccaaattaacatctccgtataccaagtagctaacctttattgttttacaactaaagtcagggtttttattttcagagacagattctgcaaacttgacattaagcgaggttggcatggttagatgtggagctagtgtagttgcagaaggtgtggcagcacagctgtggtctctggtggagctgaggaagacagtggagctagtgtagttgcagaaggtgtggtctctggtggagctgaggaagatggtggagctcctgtagttgcagaaggtgtgggtggagccagctgtggtctctgatatactattgcgccaccatgtcgtcaataattctgtttagtagattcatatatataagaaatcaggaaattttattttggccaggagctgaagttggttgtttagtagtagtagtttgagtggtgaccgaagtagtagtctggtagtgtgagtggcagctgaagtttcagaagtgtcaggtgcaagagtagttggggaagaattaggtgtgggaattgggcagctgcgtgggatggaggctagtgtagttggcagaaggtataaattccgcttcctcgctcactgacgcgccgcgtcggtcgttcggctgcggcgacggtatcaggctcactcaaacggcggcggtaataccgtattccacagaagaaacccattgtctcacatccttttttaagaacagtttgtaacatgggcttattaaaccctgggaaccgcaagttgggcaaataaaggtcaacataataactcataccataagttttgcagaatatgtctatcagtcagcaacctctgagaactaccaaggctctgtctaggtcacataggtcatgactagcccacccacacctcctgcaactacaccagctccaccatcttcctagctccaccagagaccacagctgccccacccacactctgcaactacaccagctcacatttctagtccacagccacagtgcaataaatatcaggggataacgcaggtagaacatgtgagcaaaatgccagcaaaatacgtggatccaaagagttattttgaaccccagacctgcatctggattgtgggatagaggcatttttcttgttaataggtctgttgtggtgaataattagattgaaagattaatgaagtgcttaatcggtcaggcgtatcaggcgtttccccctggaatctccctcttcgctctcctgttccgaccctgccgcttaccggataactgaccgcactttccttcccttcagaagcgcctttctcatagctcacgctgtaggtatctcaggttaagttagtccgcgttcttaccacttatttccggcctatttgagtcatattaaaaagaaatgccagaaattttccggcattataggtcagacttgccagacaatatccatgcgatcacgttgactgactttacggagtttacaagaaatgctacggtaacctatatagttgccacctatgcgtcactaaaaaaagaggtaaatcgaaggaatcgaggactttataggtacattgagaactgagctggaaatgccctgagctggaaatgccgaaaatgttctagttacgatgccattggatatatcaaggtggtatatccagtgattttttctccattttagcttccttagctcctgaaaatctctgccaagctcctcgagaaaccacttgtctcacatccttgttttaagaacagtttgtaaccataaacttatttaaaaccctgggaaccgcaagtgggcaaacaaataaagaaccccggaacgggtgcggggtgttcaagaatgtccatt

SEQ ID NO: 5700 - DNA, 1865 bp, Canis familiaris
gagacccggaagcggcggcgccccctgggggaagatggcgccctcggggctgaaggaggtggtgggggaaaaaattctgaatggagtcattcggagtgtcaaaaaggatggggagtggaaggtactcatcatggaccatccaagcatgcgcatcttgtcctcctgctgcaagatgtcagacatcctagctgagggcattactattgttgaagacatcaacaaacgccgagaacccatccccagtttggaggccatttatttgctcagccccacagagaagtcagtacaggctctgatagcagacttccgggggaccccgaccttcacctacaaagcagcacacatcttcttcactgacacctgccctgagcccctgttcactgagctgagccgttcacgtctagcgaaggtggtgaagacgctgaaggagatccacctggccttcctcccctacgaagcccaggtgttctccctggatgccccccacagcacctacaacctctactgccccttccgggtgggggagcgggcacggcaaattgaggccctcgcccagcagatcgccacgctgtgcgccacgctgcaggagtacccagccatccgctaccgcaagggcccagaggtcacggctcagctggccaatgccgtcctggccaagctgaatgccttcaaggctgacaatcccagtctgggagagggccccgagaaaacccgctcgcagctactcatcgtggaccggggggccgaccctgtgtccccgctgctgcatgagctcacattccaggccatggcctatgacctgctgaacatcgaacaggacacatataggtacgagaccacggggctgagtgaggcccgggaaaaggctgtgctgctggatgaggacgatgacctgtgggtagagctgcggcacatgcacatcgccgatgtgtccaagaaggtcacggagcttctaaagacgttctgtgagagcaagaggctgaccacggacaaggccaacatcaaagacctgtcccacatcctgaagaagatgccgcagtaccagaaggagttgaacaagtattctacgcacctgcatttagcggacgactgcatgaagcacttcaagggttcggtggagaagctgtgcggggtggagcaggacttggccatgggctcagacacagagggtgagaagatcaaggatgccatgaagctgatcgtgcctgtgctgctggatgcagccgtgccagcctatgacaagatccgggtcctgttgctctacatccttctgcggaacggtgtgagtgaggagaatctggccaagctgatccagcatgccaatgtgcaggcacacagcagcctcatccggaacctggagcagctggggggcacggtcaccaaccctgggggcccggggacctcaagccggctagagcggagggagcgcttggagcccacctatcagttgtcccgctggaccccagtcatcaaggacgtgatggaggatgccgtggaggaccggctggaccgcaagctctggcccttcgtgtccgaccccgcccccacgtccagctcccaggctgctgtcagcgcccgctttggccactggcataagaacaaggccggcgtggagatgcgggcagggccccggctcatcatctatgtcatgggcggcgtggcgatgtcagagatgagggctgcctatgaggtgaccagggccaccgatggcaagtgggaggtgctcattggctcctcgcacatccttacccccacccgcttcctggatgaccttaagacgctggaccagaagctggaggacattgccttgccttgaccgcccccactcccttcccagagaaataaattcctcccttctctctgcc

SEQ ID NO: 5701 - DNA, 578 bp, Canis familiaris
tgccgctgctgcctgcggagcctcccctagaggttgaccagccgtcctccggctcggcttccccgcgccgccgagatgctgtcctgccgcctccagtgcgcgctggccgcgctgtccatcgtcctggctctgggcggtgtcacctgcgcgccctcggacccccgactccgccagtttctgcagaagtccctggctgccgccgcggggaagcaggaactggccaagtacttcttggcagagctgctgtctgaacccaaccagacagagaatgatgccctggaacctgaagatttgtcccaggctgctgagcaggatgaaatgaggctggaactgcagagatctgctaactcaaaccccgccatggcaccccgagaacgcaaagctggctgcaagaatttcttctggaagactttcacatcctgttagctttattaattattgttgtccatataagacctctgattcctttcctccaaacctcatcccacttccctaatcccccaatcctcagcaagacccttgcattagaaattgaagactgtaatacaaaataaaattatggtgaaattatgaaaaac

SEQ ID NO: 5702 - DNA, 1638 bp, Canis familiaris
cctggtggctcggtggtttggcacctgcctttggcccagggcatgaccctggagtcctgggatcaagtcccatgtcgggcttcctggatggagcctgtttctccctctgccagtgtctctgcctctctctctgggtctttcatgaataaataaataaaatctttaaaaaaaaaaaaaaaaaaaggttattccctaggggaaaagggaggcgagcagagagaaaaaataaatctgccagtgctttataacacacagactattttaatgggtcagtacacatgaagtaatagtatctaggaagtggatttcttaataaatactaagacacatatattgactgtacaacataaaatactcttaaaattaaaatccactgacacagcaagtcaagtaggacagtgttaagcatttatttttcaaaaaggttttatttctattattcttaactattttacagtttctaagtgtcattcccccaacaatctataagatgaccactcctcacaatcaagctcaacctggcccttccaacaattcacatccagaagaatacaagatcgcagcccttgtcttctacagctgtatcttcataattggattatttgttaatgccactgccttatgggtttttagttgtactaccaagaagagaaccactgtaaccatctatatgatgaatgtggcactattggacttaatatttataatgagcttaccctttcggatgttttattatgcaaaaggtgaatggccatttggagagtacttctgccagattcttggggctctcacagtgttttatccaagtattgctctatggcttcttgcttttattagtgccgacagatacatggccattgtgcagccaaaatatgccaaagaacttaaaaacacaggcaaagccatgctagcatgtgtgggagtctggataatgaccctgacaaccaccatcccgctcctactgctctatgaagacccagataaagcctccacaccccccacctgcctgaagatttctgacattacccacttaaaagctattaacatgctgaacttcactcgactgatattttttttcttgattcccctgttcatcatgattgggtgctacttaatcatcattcatagtctccttcacgggaagacatctaagctgaaaccaaaagtcaaggagaagtctataaggatcatcatcacactcatggtacaggtgctcgtctgctttatgcctttccatatctgttttgctttcctgatgctggaaggggatgagaacagttacaatccctggggagcctttaccaccttcctcatgaatctcagcacctgtctggatgtgattctctactacattgtttcaaaacaatttcaggctcgagtcattagtgtcatgctctacagaaattaccttcggagtgtgcgcagaaaaagcttccgatcaggtagtttacggtcactaagcaatgtaaacagtgaaatgctttgaatgataagcaggtttctgtttttaatttctttatattcactttactaactatcctaaggtcactggatattctgtatgatattaccaagccccttctctcctgaaaaaaaaaaaaaaaaaaaaaaaaagaaacttaagaaacacttttgtgg

SEQ ID NO: 5703 - DNA, 594 bp, Canis familiaris
ctgcttggtactggcgagagcggcaagagcacgttcatcaagcagatgcggatcatccatggcgcgggctactcggaggaggacaagcggggcttcaccaagctcgtgtaccagaacatcttcaccgccatgcaggccatgatccgcgccatggagacgctaaagatcctgtacaagtacgagcagaacaaggccaacgcgctcctcatccgcgaggtagatgtggagaaggtgacgaccttcgagcaccggtatgtccacgccatcaagaccctgtgggacgaccctggcattcaggagtgctacgaccggaggcgggaatatcagctctcggactccgctaagtactacctggccgacgtggaccgcatcgccacctcgggctacctgcccacccagcaggatgtgctgcgggtccgagtgcccaccactggcatcatcgagtaccctttcgacctggagaacatcatcttcaggatggtggatgtgggaggacagaggtcagagcggaggaagtggatccactgctttgagaatgtgacgtccatcatgttccttgtagccctaagtgagtatgaccacgtgctggtggag

SEQ ID NO: 5704 - DNA, 919 bp, Canis familiaris
tggagggctggccaagcgctggttggttcctggctggaggttgggctggatcctcatccatgaccgaagagacattttgggcaatgaggtaagagcaatgtggtgaaatggtatgtctagttgtgtgtgtgtgtgtgtgtgtgtgtgtgtgtgattatactttgtatgcacagtggttaggaggtgattttgttgttgtagagttgttttttccctctttgtttttggccctatagttctgagtgcctggaaagatgcccttaagatggtactagttattcctctccagaactcagttttcttatacctggttctgtgaagaagttccatctgcttcttttttttttttaattatttttatttatttataatagtcacacacagagagaggaagaggcagagacacaggcagagggagaagcaggctccatgcacagggagcccgccgtgggattcgatcctggatctccaggatcgtgccccgggcccaaggcaggcgctaaaccgctgttccacccagagatccctccatctgcttctaattttaggatcacaaaaaaaggaaactgtagctctaatcataccaggtattgtttgcaggcttacagtgtgccagtgcttcaaaatatactttttaatttaatcctcataacaaccccacaaggccaggattagtattatctacattttatggttgagaaaaatgaggcactatgatgctgtctaattggcccggagtcacacaggaggtgtgtgacagagctgggcaaaaacccaggtggtctgatccactaggaccatcatttccccagagattaaaaacccaatccccttttttttggtcagaacaaaagtccccaaagctggaatgcttaagggaggctaaataattaatacatttgctggggcactttagatc

SEQ ID NO: 5705 - DNA, 178 bp, Canis familiaris
cctttctcttctggaggaacagcagagacaacagcagcagcagcagcaggcccagcagcagcaggcccagcagcagcagcagcaacagcaggcccagcagcaggctgtgacagcagtgcagcagtcgacatcccagcaggcgacccagggagcctcgggccagacaccacagctcttc

SEQ ID NO: 5706 - DNA, 1198 bp, Canis familiaris
ggccctcgtctccatggggcggctgctgggcgtgggcttgctgggggataggtggcgctcctggggcgagaggctcctggcgctcaggaatcgacttaaagcctccagagaagtagaatctgtagaccttccaaactgccacctcattaaaggaatcgaagccggtgcggatgatattgatatacttcccaatggcctggctttctttagtgtgggtttaaaatgtccaggactccacagcttttccccagataagcctggagggatattaatgatggatctaaaaaaggaaaacccgagggcactggaattaagaatcagccgtgggttcaatttggcttcgttcaatccacatggtatcagcaccttcatagacagcgacgacacagtttatctctttgttgtaaaccatccagaattcaagaatacagtggaaatttttaaatttgaagaagaagaaaattctcttctgcatctaaaaacaatcaaacatgaacttcttccaagtgtgaatgatatcatagctgttggaccagcacatttctatgccaccaatgaccactatttctctgatcctttcttaaagtatttggaaacatacttgaacttacactgggcaaatgttgtttactacagtccagatgaagttaaagtggtagcagaagggtttgatgcagcaaatgggatcaatatttcacctgataaaaagtacatctacgttgctgatatactggctcatgaaatccacgttttggaaaaacaccctaatatgaatttaacgcaattgaaggtacttaagttggatacactggtggataatttatctattgatccttcctcgggggacatcttggtaggctgtcatcctaatggccagaagctcttcatttatgacccgaacaatcctccgtcatccgaggttctccgcatccagaatattctatgtgagaagcctaccgtgactacagtttatgccaacaacggatctgttctccagggaagttctgtagcctcagtatatgataggaagctgctcataggcactttatatcacagagccctgtattgtgaactttgaattgtacttttggcatgcaagcgtgctaacttctttaacacttaattttctatgaattactaattttgtgggaatttaaccacgaaatgggcccagaaatgtctgcatgtatagttagct

SEQ ID NO: 5707 - DNA, 2650 bp, Canis familiaris
atgacggccgccgcgggttcggcgggccacgccgcggtgcccctactgctgtgcgcgctgctggtgcccggcggcgcgtacgtgctggacgactccgacgggctgggccgggagttcgacggcgtcggggcagtcagcggcggcggggcaacctcccgacttctagtaaattatccagagccctatcgttctcaaatattggattatctctttaagccaaactttggtgcctctttgcatattctaaaagtcgaaataggtggtgatgggcagacaacagatggtactgaaccctcccacatgcactatgcattagatgagaattttttccgaggatatgagtggtggttaatgaaggaagctaagaagcggaaccctaatattatactcatggggttgccatggtcatttcctggatggataggaaaaggtttcaactggccttacgtgaatcttcagctgactgcctactatatcatgacctggattgtgggtgccaagcattatcatgatttggacattgattatatcgggatttggaatgagaggtcatttgacatcaattatatcaaggtgttaagaagaatgctgaactatcaaggtcttgatcgagtgaaaatcatagcgagtgacaatctctgggagcccatttctgcttctatgttgcttgactctgagcttttgaaagtgattgatgttataggagctcattatcctgggacccatacagtaaaggatgcgaagttgactaagaagaaactttggtcttctgaagattttagcactttaaatagtgatgtgggtgcaggctgcttgggccgcatattgaaccagaattatgtcaatggctacatgactgccacaattgcttggaatttggtggctagttactatgaacagttgccttatggacgatgtggattgatgactgctcaggagccatggagtgggcactatgtagtagagtctcctatctgggtatcagctcataccactcagtttacccaaccaggttggtattacctgaagacagttggtcatttagaaaaaggaggaagctacgtggccctgacagatggcttaggtaacctcaccatcatcgttgaaactatgagccataaacagtctgcttgtataaggccgtttctgccttacttcaacgtgtcacgtcagttcgctacctttgttcttaagggttcttttagtgaaataccagagctacaggtgtggtatacgaagcttggaaaaccatctgagagatatctttttaaacaactggattctctatggctcctcgacagcagcagcactttcaccctggagcttcaggaggatgagatcttcacactcaccactctcactgtggggagcaagggtagctacccgctgcctcccaagtccgagcctttcccgcaaatttatgaagatgatttcgatgttgattacccattttttagtgaagctccgaatttcgctgatcagactggcgtctttgaatactttacgaacattgaagaccctggagagcatcgtttcacactgcgccaagttctcaatcagcggcccattacttgggctgctgatgcatacaataccatcagtattataggagattacaaatggtccaatctgactgtaaggtgtgatgtttacatagagactcctgagaagggaggcgtgttcattgccggaagagtaaataaaggtggtatcctgattagaagtgccagaggaattttcttctggatttttgcaaatggaacctacagagttacaggtgatctagctggatgggtcatatatgctttaggacgtgttgacgttacagcaaaaaaatggtatacgctcacgttaattattaagggccggctgtcctctggcatgctgaacggcaagactgtctggaagaacatccctgtgagttttccgaagaacggctgggccgccattggaactcactcctttgaatttgcacagtttgacaactttcatgtggaagccacgagataatattcacagagtaccctagaaccactctttggattttctttctttctttttggttttgattcagagccaattcttttggtggatcaatgtgtgagcctcttggaggccaacaatagtgaagagtaaatggggagagaactatatctttgtttgatcttctggaagatattcttagaagtaatgcccaggggaaccagatggatcttaaagattacccgatatgtcccctagaattcaagctgtgcagtggtcctattgttagaagagtggtttgggtggttcccacctcgaagccttggcattcatgctgagatggctctcttcctcgtacgtgcaagggattgtgctgactgcaggaacttgatcatcacaggaacggactgtgtgtctgagtgagcagatggcctcatcccgaggtaatgccacactatagggagctgaagaacactggaagtgctgctttttgaaaaccacttaaacacaataatcttacactctagagagtattttttcttttcctttatatgatgatgcttttaaattataaatatgatgagtggatgatttagaaaatgcctcattaataaactacctctcaagctatttctgcagtaataaatatgagcagattaaaaaaaaa

SEQ ID NO: 5708 - DNA, 1077 bp, Canis familiaris
atgactctggagtccatcatggcgtgctgcctgagcgaggaggccaaggaagcccggcggatcaacgacgagatcgagcggcagctccgcagggacaagcgggacgcccgccgggagctcaagctgctgctgctcgggacgggagagagtggcaagagtacgtttatcaagcagatgagaatcatccatgggtcgggctactctgatgaagacaaaaggggcttcaccaagctggtgtatcagaacatcttcacggccatgcaggctatgatcagagccatggacacgctcaagatcccctacaagtacgagcacaataaggctcatgcacaattagttcgagaagtcgacgtggagaaggtgtctgcttttgagaatccatatgtagacgcaataaagagtttatggaatgatcctggaatccaggaatgctatgacagacgacgagagtatcagttgtccgactctaccaaatactatcttaatgacttggaccgcgttgctgaccccgcctacctgcctacgcaacaagatgtgcttagagttcgagtccccaccacagggatcatcgaatacccctttgacttacaaagtgtcattttcagaatggtcgatgtagggggccagaggtcagagagaagaaaatggatacactgctttgaaaatgtcacctctatcatgtttctagtagcgcttagtgaatatgatcaagttctcgtggagtcggacaatgagaaccgaatggaggaaagcaaagcactctttagaacaattatcacatatccctggttccagaactcttcggttattctattcttaaacaagaaagatcttctagaggagaaaattatgtattcccacctagttgactacttcccagaatatgatggaccccagagagatgcccaggcagctcgagaattcatcctgaagatgttcgtggacctgaacccagacagtgacaaaattatctactcccacttcacatgcgccacagacaccgagaacatccgctttgtctttgctgccgtcaaggacaccatcctccagttgaacctgaaggaatacaatctggtc

SEQ ID NO: 5709 - DNA, 1699 bp, Canis familiaris
cggggccgaacttgcagctgctcttaaagaccctcacccgcgcggtcggagccaattctggacgctccctgactttgaacccttcgtgggacctgaacttgatgccatgggaggttgtgcgggctcgcggcggcgccttttggattcggaggaggaggagaccgccccggaacctcggccccctcggtcttaccataagggagccctttggaagaacgtgatgggtttctggctcctgggcctttgcaacaacttctcttatgtggtgatgctcagcgctgcccatgacatccttagccaccagagggcatctgggaaccagagccatgtggacccagaccctccgcctactgcccacaatagctcatctcgatttgactgcaactctgtctccacggctgcagtgctcctggcagacatcctccccaccctcatcatcaaactgctagctccccttggtctgcatctgctgccctacagcccccgagttcttgtcagtgggatttgtgccgctggaagcttcatcctggttgccttttctcattcagtggggaccagcctgtgtggtgtggtcttggctagcatctcgtcaggtgtgggagaggtcaccttcctctcactcactgccttctaccccagggctgtgatctcctggtggtcctcaggaactgggggagcaggactgatgggagcattgtcctatctgggcctcacccaggctggcctctcccctcagcacaccctactgtccatgctgggtatccccgccctgatgctggccagctatttctttttgctcacatctcctgagccccaggaccccggaggggaagaagaggcagagacatcagcgcggcagcccctgatagacagtgaaaccccagagtcgaagccagactccagctcaaacctctcccttcaggaaaggtggactgtgttcaagggcttgctatggtacattgtccccttggtcctagtttactttgcggagtatttcatcaatcaggggctgttcgagctcctgttcttccggaacacatccctgaatcatgctcagcagtatcgctggtaccagatgctctaccaggctggcgtctttgtttcccgttcttctctccattgctgtcgcatccgtttcacatgggtcctggccctgctgcagtgcctcaacctggccttcctgctggtggacgtgtggttcagcttcctgcccagcatctacctcgtcttcctgatcattctgtatgaggggctcctcggaggtgctgcctatgtgaacaccttccacaacattgccctggagacaagtgaccagcaccgggaatttgccatggcagctgcctgtatctccgacactttgggaatctccctgtcagggctcctggccctgcctctgcacgacttcctttgtcacctgtcttgacactctggcttcccaggacatggaaaacactaacctaggcctacactgacaggcgggcgagcgctggcgcacagcccagagcccactcaccagctctgcttcagacttcccaagggcaagcagcgggggcgtagagaagtgctcaggtcccatcccccctttgagcaagagcccacggtttttggctactcccaggctggcctcggggagtttcttcacagtgtgacttcctcacaataaatgcctgttttaccaattttaaaaaaaaaaaaaaaa

SEQ ID NO: 5710 - DNA, 118 bp, Canis familiaris
gccgacaatactctggtggcggtgaaatcttgccgagagaccctcccacctgacatcaaggccaagtttctacaggaagcgaggtgggtgctaaagtaacgatcccagagctccacat

SEQ ID NO: 5711 - DNA, 819 bp, Canis familiaris
atacttctgccatcatgaatccactcctgatccttgcttttcttggagctgctgttgctacccccacagacgacgatgacaagatcgtcgggggctacacctgtgaggagaattccgtcccctaccaggtgtccctgaatgcaggctatcacttctgcgggggctccctcatcagtgaccagtgggtggtgtccgcggctcactgctacaagtcccgcatccaagtgagactcggagagtacaacatcgatgtcctggaggggaatgagcagttcatcaactccgccaaggtcatccgccatcccaactataacagctggatcctggacaatgacatcatgctcatcaagctctcctcacctgcggtcctcaatgcccgggtggccaccatatctctgcccagggcctgcgcagcccctggcacccagtgcctcatctccggctggggcaacaccctgagctctggcaccaactaccccgagctgctgcagtgcctggacgccccaatcctgactcaggcccagtgcgaagcctcctaccccggccagatcacggagaacatgatttgcgccggcttccttgagggaggcaaggactcctgccagggtgactctggtggccccgtggtctgcaatggagagctccagggaatcgtctcctggggctacggctgtgcccagaagaacaaacctggagtctacaccaaggtgtgcaacttcgtagactggattcagtcgaccatagctgccaacagctaaagccccacccccacctccatccctctaccatcaccatgctaataaagtgtaactgtctgtc

SEQ ID NO: 5712 - DNA, 869 bp, Canis familiaris
acaccccagaccagatccagggagcaaccatgaagacctttatcttcctcgctctactgggagccactgttgctttccccattgacgatgatgacaagatcgtcgggggctacacttgttccaggaattccgtcccctaccaggtgtccttgaactctggctaccacttctgtggcggctccctcatcaactcccagtgggtggtgtccgcggctcactgctacaagtcccgaatccaggtgcgtctgggagagtacaacatcgcagtctctgagggtggagaacaattcatcaatgcagccaagatcatccgccaccccagatacaacgcaaacactatcgataacgacatcatgctgatcaaactgagctctcctgccaccctcaactctcgagtgtctgctatcgctctgccaaaatcctgtccagctgctggtacccagtgcctcatctctggctggggaaatacccagagcatcgggcaaaactatcctgatgtcctgcagtgtctgaaggctcccatcctttctgacagcgtttgccgtaatgcataccctggccagatctccagcaacatgatgtgtttgggctacatggagggtggaaaggactcttgccaaggtgactctggtggccctgtggtctgcaacggagagctccaaggcgttgtctcctggggtgccggctgtgctcaaaaaggcaaacctggtgtctcaccaaaggtctgcaaatacgtgagctggattcagcagaccatcgctgccaactaagcatgcgaccttgtgtaccactctatgcgccatcccctgttggccaattgaatcttccaactatgcttgagaacagtatctaaataaaccattttgttc

SEQ ID NO: 5713 - DNA, 831 bp, Canis familiaris
tctggagagtcactggacgaagccatgtggctgcgctgtttggccctcgccctcaccttgctgatggtttctggcatcgagaacaatacgaaggacgtctgtgttggaaaccctggcatccctggcactcctgggtcccatggcttgccaggcagagatgggagagatggagtcaaaggagaccctgggcctccaggcccattgggcccccctggaggaatgccaggccaccctgggcctaatgggatgactggagcccctggtgttgctggagagcgtggagaaaagggagagcctggcgagaggggccccccaggacttccagcttctttagatgaagagctccaaaccacactccacgacctcagacatcaaatcctgcagaccatgggagtcctcagcttgcacgagtccctgctggtggtgggaaggaaggtcttctccagcaatgcgcagtccattaatttcaacgacattcaagagttatgtgccggggcaggcggccaaattgctgccccgatgagcccagaagagaatgaagccgttgcaagcattgtgaagaagtataacacttacgcctacctgggcctggtggagagccccgactctggagacttccagtacatggatggggcccctgtgaattacaccaactggtaccccggggagcccagaggtcggggcaaagagcagtgtgtggagatgtacacagatgggcagtggaataacaaaaactgcctgcagtaccgactggccatctgtgagttttgagcagcctctaaggccacagtagagataggccctgccttgctttcagcctccatcctgcag

SEQ ID NO: 5714 - DNA, 701 bp, Canis familiaris
agaggcagacggaggctgagagagggaggcgagaggacaggggagcagcaagcaccgggccactcctcgagcgacgccatcatgggctcccccatcgccgcaagcttcctcctcttcctggcagttcagctcctggggcagacgggcgctaaccccgtgtacggctctgtgtccaacgcagacctgctggatttcaagaacttgctggaccgcttggaggacaagatgcctttagaagatgaagccgagtctccccaagccctgagtgagcagaatgcggaagctggggcagctctcagccccctgcctgaggtgcctccctggacgggggaggtcagcccagcccagagagatgggggtgcccttgggcgcagcccctgggactcctccgatagatctgccctcctgaagagcaagctgagagccctgcttgctgcccctcggagcctgcggaggtccagctgcttcggaggcaggatggataggattggagcccagagcggactgggctgcaacagcttccggtactgaagataatggccagggaggaaaaggaggccctggccgggggcagactctgagagaccctcgtcccttggggtctctcactcaactttgtcccagctcattgccatcaagttgagccgtgacgagcaccgagaccgtattcaagctgcagcctcttggcgatgtttctcacg

SEQ ID NO: 5715 - DNA, 1442 bp, Canis familiaris
ctgctgtggctgctgctgctccccacactgtgtggcctgggtgctgctgactggagtgccccatccttggcttgtgcccggggccccgcattctggtgccaaagcctggagcaagcactgcagtgcagagccctgggtcactgtctacaggaagtctggggcaatgcaagagctgatgacctctgccaggaatgtcaggacatcgtccgcatcctcaccaagatgaccaaggaggccatcttccaggacatggtgcggaagttcctggagcatgagtgtgacgttctccccttgaagctgctcacaccccagtgccatcacatgcttggcacctacttcccagtggtggttgactacttccaaagccagattaacccaaagatcatctgtaagcacctgggcctgtgcaagcctgggcttccagagccagagcaagagtcagagctgtcagatccgctgctggacaagctgatcctccctgagctgcctggagccctccaggtgactggacctcatacacaggatctctctgagcagcagttgcccatccccctcccatactgctggctctgcaggactctgatcaagcggatccaagctatgattcccaagggtgtgctggctgtgactgtgggccaggtgtgccacgtcgtacccctggtggtgggcggcatctgccagtgtctcggcgagcgctacactgtcctgctcctggatgcgctgctgggccgcatgctgccccagctggtctgcggcctcgtcctccggtgctcccacgaggacagcgctgggccagctctggcgtctctgcccagtgaatggtcaccccaagagtccaagtgccagctctgcatgtttgtaaccacccaggcagggaaccacagtgagcaggccacaccacaggcaatacgccaggcctgcctcagctcctggctggacagacagaagtgcgagcagtttgtggagcagcacatgcctcggctgcagaccctagcatccgggggcagggatgcccacaccacctgccaggccctgggggcgtgtaggaccacgttcagtcctctccagtgtatccacattcctcacttctgacaaggactcaaagccatgccagcccaaaccagagccacttccttgtgaggtgcagccaaggcagcaccctctggaggagatccgcaagaggggacttccggcctgataacttccggccagaactcacacccaactggagccaggccagctcccgtaaccccccagcgctgggtccagggaacacatcagccacatggcccttccctggcttgattccctttcatctccatgtgcataagacactagcttttacagttattttgctaatactttcataaaacttaaattcaggagaataaaaaatgggaccatgaagtaccgtagaagatagatatactgagagcaagctt

SEQ ID NO: 5716 - DNA, 762 bp, Canis familiaris
ccccttcagcctgtctgtgacgtttatggacttggcttgctagaaggctcaaggagatgatggcaggaatgaaaatccagctggtgtgcatgatacttctggctttcagctcctggagtctgtgctcagattcagaagaggaaatgaaagcattagaagcagatttattgaccaatatgcatacatcaaagatcagtaaagcaagtgtttcttcttggaaaatgaccctgctaaatgtttgcagttttgtcaataacctgaacagccaagccgaggaaacaggagagtttcgtgaagaggagcttattacaagaaggaaatttcccactgccttggatggctttagcttggaagcaatgttgacaatataccagctccaaaaaatctgtcacagcagggcctttcaacaatgggagttaatccaggaagatgttcttgatgctggaaatgacaaaaatgaaaaggaagaggttataaagagaaaaatcccttatattctgaaacggcagctatatgagaataaacccagaagaccctacatactcaagagaggttcttactactactgagaggataacgatttcatttacatgtgattgtgatttatcatcctttaattaaatatcaaattatatttgtgtggtaatgtgacagaaaacaattattatgtctcttctacagttgtggtttattggatgtgatttttctgcattagtattaattggactaaatgttttaaaataaacctagatcttgagtact

SEQ ID NO: 5717 - DNA, 461 bp, Canis familiaris
cagagtcggctttctcagtggtccaggtcttccgaagccatgggtacccgatacctcctggttctgttgcttgtcctcctggtattgggatttgaggtccagggggcccatgagtcccagcaagatgaaaccaccagctccgccctgctcacccagatgcaggaatcactctacagttactggggcacagccagatcggctgccgaggacctgtacaagaaggcatacccaactaccatggatgagaaaatcagggacatatacagcaaaagcacagcagctgtgagcacttacgcagggattttcactgaccagctactttctatgctgaagggagactcgtaacagctgagccccgatcgtgggggaggggagagtccagaccccccacttctcagcactgtcagcatcttgctccagtgctagtctgtcttcttataaataaatacatttaaaaagcc

SEQ ID NO: 5718 - DNA, 445 bp, Canis familiaris
ctctcaggaacagaggtgccatgcagccccgggtcctcctcgtcgctgccctgctggcgctcctggcctccgcccgagccctggaggaagaggacccctccctcctgggccttatgcagggttacatgcagcacgccaccaagacggcccaggacacgctgaccagcgttcaggagtcccaggtggcgcagcgggccaggggctggatgaccgatagcttcagttccctgaaagactactgcagcacgtttaagggcaagttcactgggttctgggattcagcctctgaggccaaaccaactccagcctctgatgccttctagacctcgaaaccccaagtcttcctgcgaaagtcacttgaaaatgaacaacattctgacctcccaccccgccccagacctggcccacccctaagctcgctgtctacccaataaagttgcccttt

SEQ ID NO: 5719 - DNA, 2869 bp, Canis familiaris
gccacagtgacagaagcccacagaatcagaggcgagctttaaagatgaacactgcctacactcttaacccaagaggccactggaaatagcccaaagacccactgagggagatggacactgtttcccagaagtaaatacagctcaacttgtactttggaacaactggtcaaccttgctccttgcacaattcatcagcaaaggttaggcagcgcctgaataggatcatggcagaagcatcgggcctcgtcaccgtctgccttttaggatatctactcagtgccgaatgtgcagtttttcttgatcgtgaaaatgccaccaaaattctgagtcggccaaagaggtataattcaggtaaactggaagagtttgttcgagggaaccttgagagagaatgtatagaagaaaagtgcagttttgaagaagcacgggaagtttttgaaaacactgaaaaaaccactgaattttggaagcaatatgttgatggagatcaatgtgaatccaatccatgtttaaatgacggtgtatgcaaggatgacattaattcctatgaatgttggtgtcgagctggatttgaaggaaagaactgtgaattagatgtaacatgcaacattaagaatggcagatgcaagcagttttgtaaattgggccccgataacaaggtggtttgttcctgtactacgggataccaacttgcggaagaccaaaggtcctgtgaaccagcagtgccatttccatgtggaagagtttctgtccctcacatttctatgacacgcacccgtgctgaaactcttttttccaatatggactatgaaaattcaactgaagtggaaaaaattttggataacgtcacccaaccgcttaacgacttcactcgagttgttggtggaaaagatgccaaaccaggtcaattcccttggcaggtccttttgaatgggaaagttgatgcattctgcggaggttccatcatcaatgaaaaatgggtggtaactgcagcccactgtattgagcctgatgttaaaattaccatagttgcaggtgagcataacaccgagaagagggaacatacagagcagaagcgaaacgtgattcgcactattcttcaccacagctataatgcaactattaataagtacaaccatgacatcgcccttctggaactggatgagcccttaacgctgaacagctatgtaacacctatttgcattgctgacagggaatactcgaacatcttcctcaaatttgggtctggctatgtgagtggctgggggagagtcttcaacaaagggcgatcggcttcaattcttcaataccttaaagttccacttgttgaccgagccacgtgccttcggtccacgaagttcaccatttataacaacatgttctgtgctggcttccatgagggaggtaaagattcatgccagggcgatagtgggggaccccatgtcaccgaagtagaaggcataagtttcttaactgggattattagctggggtgaagagtgtgcgatgaaagggaagtatggaatatataccaaggtgtcccggtatgtcaactggattaaagaaaagacgaagctcacctaaagaataatgtatttccaaggttgacacgtttagggtagaaaatggacaaggtcctttactaactaatcactttttttatctctttagatttgactatatacattctctgaatactgctttttctctttctggggagaaatctatctagaattctattttactagactaagtgaattagaaaatgtaatcactacgggaatgtactgtgatgggaacttgtgaccactcccacaggtctagcccttggcaccattgtgaggttaggttattcctcctgcccgtcaggtgttaagtttctccactggggcaactccctgattctccctccttggcagcattccatgttccagacctttcttacctttcccatggaaatcatcaaaatgtgttagatctacatccaggatatttgatctagttcataacaagtctaacacctcacttgttaaggaagaacacaggagcaactgacaggttgcaactcaccagaaaacactatttccttttctgtatgcttattcctgcttcctttatctcttctgtttcctaatcctgaaatcagtgtctctctttctctttctctctctctttttcctacagaggtttaaaggagggaagggacacatcatgctgttttactactgtccacagttatacatgtctatcaaacccagacttgctttcagtttggtctttgacttgcttttcggagcatagggatgaagccagtgcctgaagcacgtgcaggaaaatttatctgaaagagtcatgtctcagtactgaaatacatgcatcgtggaaggaatgaccgacccatcagaatagtccaataagcatttgtaattgtgttgtgatagaggtaactaagaagagtgacatcaactcctgcgtctcatcccccatgtgaaaaaactgtgaactaaaagagaacagccagtgtgcaacgtagaactagtagagtcttcaaggaagaattcattggtgggtctccagtactggccggagctaaggaagaagttgccctcgaccaaagaacatgagcaccctgtctcttaaactagcatgtccccacagtggagaaggatgtactggtggcttaaggcatgagtcaggggtgtcttgggtggctcagtggttgagcctttggctcagggcatgatcccagcgtcctgggattgagtcccgcatcaggcttcctgcagggggcctgcttctccctctgcttatgtctctgcttctctgtgtgtgtgtgtgtgtctctcatgaaaaaaataaataaaatcttt

SEQ ID NO: 5720 - DNA, 995 bp, Canis familiaris
ggaattccacaagatgcccagtccgctggtgctggcgctggccctcctggggagcctggtccccgtgtcccctgctcccggccaggcgctgcagcgagtgggcatcgtaggggggcgggaggcccctgggagcaagtggccctggcaggtgagcctgagactcaaaggccagtactggaggcacatctgcgggggctccctcatccacccgcagtgggtgctgactgctgcccactgtgtgggaccgaacgtcgtgtgtcctgaagaaatcagggttcagctcagggagcagcacctctactaccaggaccacctgctgcccgtcaaccggatcgtcatgcaccccaactactacacacccgagaatggggcggacattgccctgctggagctcgaggaccctgtgaacgtctctgcccatgtccagccggtcaccctgccacccgccttgcagaccttccccacggggacgccgtgctgggtgacgggctggggtgacgtgcacagtggaacgcccctgccgccgcccttccccctgaagcaggtcaaggtccccatcgtggagaacagcatgtgtgacgtgcaataccacctgggcctcagcacgggggacggcgtacggatcgtccgcgaggacatgctgtgcgctggcaacagcaagagcgactcctgccagggcgactctggagggccgctggtctgcagggtgaggggcgtctggctgcaggcgggtgtggtcagctggggagaaggctgcgctcagcccaacaggcctggcatctacacccgcgtcgcctactacctggactggatccaccagtacgtccccaaggagccctgagcccagcccccgggccgcccgggttggtggggaagccggcctccacggcgcctcacccctgccccccggcccgggggccgcccttttccccctgtccccgtggcctgtccccggagcccgccgtgggcccaccctcattaaagtgcatggaagc

SEQ ID NO: 5721 - DNA, 889 bp, Canis familiaris
tgggcatcgtggggggctgcaaggtgccagccaggaggtacccgtggcaggtcagcctgaggttccatggcatgggtagcggccagtggcagcacatctgcggaggctccctcatccacccccagtgggtgctgaccgcggcccactgcgtggagctggagggcttggaggctgctaccctcagggtccaagtcgggcagctgagactctacgaccacgaccagctgtgcaacgtgaccgagatcatccgccaccccaacttcaacatgagctggtatggctgggacacggcggacatcgccctgctgaagctggaggcccccctgacgctctccgaggacgtcaacctggtgtccctcccgtctccctccctgattgtccccccggggatgctatgctgggtgaccggctggggagacattgcagaccacacgccactgcccccaccctaccacctgcaggaggtggaggtccccatcgtggggaacagggagtgtaattgtcactatcagaccattcttgagcaagacgatgaggtcatcaagcaggacatgctgtgtgccgggagcgagggccacgactcctgccagatggactccgggggccccctcgtgtgcagatggaagtgcacctggatccaagtgggggtcgtgagctggggctatggctgcggttacaacctccctggggtgtatgcccgcgtgacgagctacgtgtcctggatccaccagcacatccctctgtcccccggaccctagaagggacacacgtcagtcttccttgtctcatcactgcgtgttcctgcgcggtggcagggggagcggggagaagtccggggtctcggatgcctgcttggaattggattcttattaaacatgctgggaaaacc

SEQ ID NO: 5722 - DNA, 184 bp, Canis familiaris
tcacaacacttacaaagctctcattttggtctgcaggcacagcttctgcagcgaaagcaccgtgagggaggatgttctgctcaccctcacgccctgttaacgtccaggcgcaacccgggcaccgtgttaacagcaataaaaaccactgatgcatttacccactcccacgtctgtcgctgctgtc

SEQ ID NO: 5723 - DNA, 163 bp, Canis familiaris
gggtcggttcgtgaaaagatacatccataaccaggagtacgtgcgcttcgacagcgacgtgggggagtaccgggcggtgacacggatcgggcggcccatcgctgagtcctggaacgggcagaaggagatcttggagcaggagcgggcagaggtggacacggtg

SEQ ID NO: 5724 - DNA, 160 bp, Canis familiaris
ggtgcggttcgtggaaagatacatctataaccagtacgtacgcttcgacagcgacgtgggggagtaccgggcggtcacggagctggggcggcccctcgctgagtactggaacacgcagaaggaactcttggagcaggcccgggcagaggtggacagggtg

SEQ ID NO: 5725 - DNA, 160 bp, Canis familiaris
ggtgcggtatctggcaagagaaatctataaccagagatcctgcttcgacagcgacgtgggggagtaccgggcggtcacggacgtcgggcggcccatcgctgagtcctggaaccggcagaaggagatcttggagcagagcggggcctcggtggacagggtg

SEQ ID NO: 5726 - DNA, 166 bp, Canis familiaris
ggtgcggttcgtggaaagatacatccataaccgggaggagcctgtgcgcttcgacagcgacgtgggggagtaccgggaggtcacggagctcgggcggccgctcgctgagtcctggaacgggcagaaggagatcttggagcaggagcgggcttcggtggaccctacg

SEQ ID NO: 5727 - DNA, 160 bp, Canis familiaris
agtgcggcttctgactaaatacatctataaccggagtagctgcttcgacagcgacgtgggggagtaccgggcggtcacggagctcgggcggccctcggctgagtactggaaccgccagaaggacgagatcgaggggtacggggcgtcggtggaccgggtg

SEQ ID NO: 5728 - DNA, 1803 bp, Canis familiaris
cgatcagggatgttggggcggaggaaacggagggaaggagggagcggaggaggcccgaggactgttggtgtccccctcctgcccttttggggccaggcccacttctatacaaggcctgctctccagcctccaccccggcgggtatggtgcaggcgcggaggggcgcattcccccgccctgagctcagcggccggaatgcggccgataaatcagagataaccccaggcgcgggataagggataaaaagcccccgttgccgcgggatccaggagagcacccgcgccccaagcggtgacactcgaccccggtcgcagcgcagcagctcagcagccggacgtctctttccccacttctctccagcgacatggagccctgcgcagcgctgccccgggccctcctgctcctcctgttcttgcacctgtcgccactcggaggccgcccccacccgctgggcggccgcagccccgcctcggaagcctcggaagcctcagaagcctcggggttgtgggccgtgcaggtgagcgctcagcctgcctgaaggccgcggcgggtggcagcaggtcacgggggcttagccactgtcccaagtcctcagtctcccttgggaattagtgataagggaatcagaaagtgacgagattgggtgccaggactccatacccaaggcggcggcttcacttgggtgcaagggtggttccgccccggcgtgggttcctgaggctcaggccgtccattgcaggagctgctgggccgtctgaaggacgcagtttcagagctgcaggcagagcagttggccctggaacccctgcaccggagccacagccccgcagaagccccggaggccggaggaacgccccgtggggtccttgcaccccatgacagtgtcctccaggccctgagaagactacgcagccccaagatgatgcacaagtcagggtgctttggccggaggctggaccggatcggctccctcagtggcctgggctgcaatggtaagccgcctccctgccgccttggctccccctccccagccccctgggttcgacccttggaaccccttctgggtttgttgtctcgggggatcacactctgaggaaaggacatctggacatcgctccttcttgctgacagtcctaagggccaaggagtacgtttctggaaatactacgtgtggacatcgttgtccagggtccctacccacctcctagccccctcctgcctctcgcacccaagggcagaatcatcttaggatggaatcagtcgttgtctggaagcatctccttggagcagaaagagtcctaaacatcgtcctcgtagctctctctgtctgtctgtagccacgaaggcagaggtcagggtcaccagggcagtgatgattcccagttaacagaggaggagactgaggtctagagagatggattattccaaagcctcaaacatccagatcggctgagggtggggttggtggcagggatggctcctgggcttgggaagctcggatcctgcctcagtctcccacctgacgccatcatccccctctctctcctcccacagtgctgagaaagtattaaggaggaagtcccgactgcccacatctgcattggattcttcagcagcccctgagccccttggaagcagatcttatttattcgtatttatttatttatttatttcgattgttttatataagatgatcctgacgcccgagcacggattttccacggtgaaataaagtcaaccttagagcttcttttgaaaccgatttgtccctgtgcattaaaagtaacacatcatttaaaaaaa

SEQ ID NO: 5729 - DNA, 3080 bp, Canis familiaris
aagcagcgcctgaataggatcatggcagaagcatcgggcctcgtcaccgtctgccttttaggatatctactcagtgccgaatgtgcagtttttcttgatcgtgaaaatgccaccaaaattctgagtcggccaaagaggtataattcaggtaaactggaagagtttgttcgagggaaccttgagagagaatgtatagaagaaaagtgcagttttgaagaagcacgggaagtttttgaaaacactgaaaaaaccactgaattttggaagcaatatgttgatggagatcaatgtgaatccaatccatgtttaaatgacggtgtatgcaaggatgacattaattcctatgaatgttggtgtcgagctggatttgaaggaaagaactgtgaattagatgtaacatgcaacattaagaatggcagatgcaagcagttttgtaaattgggccccgataacaaggtggtttgttcctgtactacgggataccaacttgcggaagaccaaaggtcctgtgaaccagcagtgccatttccatgtggaagagtttctgtccctcacatttctatgacacgcacccgtgctgaaactcttttttccaatatggactatgaaaattcaactgaagtggaaaaaattttggataacgtcacccaaccgcttaacgacttcactcgagttgttggtggaaaagatgccaaaccaggtcaattcccttggcaggtccttttgaatgggaaagttgatgcattctgcggaggttccatcatcaatgaaaaatgggtggtaactgcagcccactgtattgagcctgatgttaaaattaccatagttgcaggtgagcataacaccgagaagagggaacatacagagcagaagcgaaacgtgattcgcactattcttcaccacagctataatgcaactattaataagtacaaccatgacatcgcccttctggaactggatgagcccttaacgctgaacagctatgtaacacctatttgcattgctgacagggaatactcgaacatcttcctcaaatttgggtctggctatgtgagtggctgggggagagtcttcaacaaagggcgatcggcttcaattcttcaataccttaaagttccacttgttgaccgagccacgtgccttcggtccacgaagttcaccatttataacaacatgttctgtgctggcttccatgagggaggtaaagattcatgccagggcgatagtgggggaccccatgtcaccgaagtagaaggcataagtttcttaactgggattattagctggggtgaagagtgtgcgatgaaagggaagtatggaatatataccaaggtgtcccggtatgtcaactggattaaagaaaagacgaagctcacctaaagaataatgtatttccaaggttgacacgtttagggtagaaaatggacaaggtcctttactaactaatcactttttttatctctttagatttgcactatatacattctctgcatactgctttttctctttctggggagaaatctatctagaattcctattttactagactaagtgaattagaaaatgtaatcactacgggaatgtactgtgatgggacttgtgaccactcccacaggtctagcccttggcaccattgtgaggttaggttattcctccgtcccgtcagtgttaagtttctccactggggcaactccctgattctccctccttggcagcattccatgttccagacctttcttacctttcccatggaaagcatcatcaaaatgtgttagatctacatccaggatatttgatctagttcagaacaagtctaacacctcacttgttaaggaagaacacaggagcaactgacaggttgcaactcaccagaaaacactatttccttttctgtatgcttattcctgcttccttatctcttctgtttcctaatcctgaaatcagtgtctctctttctctttctctctctctttttcctacagaggtttaaaggagggaagggacacatcatgctgttttactactgtccacagttatacatgtctatcaaacccagacttgctttcagtttggtctttgacttgcttttcggagcatagggatgaagccaggtgcctgaagaccttcaggaaaatttgtctgaaagagtcatgttactgaaatacatggcatcgtggaaggaatgaccgacccatcagaatacgtccaataagcatttgtaattgtgttgtgatagaggtaactaagaagagtgacatcaactcctgcgtctcatcccccatgtgaaaaaactgtgaactaaaagagaacagccagtgtgcaacgtagaactagtagagtcttaaggaagaattcattggtgggtctccagtactggccggagctaaggaagaagttgccctcgaccaaagaacatgagcaccctgtctcttaaactagcatgtccccacagtggagaaggatgtactggtggcttaaaggcatgagtcaggggtgtctgggtggctcagtggttgagcctttggctcagggcatgatcccagcgtcctgggattgagtcccgcatcaggcttcctgcagggggcctgcttctccctctgcttatgtctctgcttctctgtgtgtgtgtgtgtgtctctcatgaaaaaaataaataaaatctttaaaaaaaaaaaaggtatgagtcattccagtgagccatctcactcccccttttctggtttcaggttctctaggcaaccttttgattataattaggccttccatattgaattttctaaagagttgctgaccaacctctgcatgtactttagtgtgttaggctggctccctttatgaattaataaactgttgttctggttgatactgtagctttttgtgaatgtggctgatgtgaatcagtcatcccacatgttgttatatatgagactactgacaaaatcatgtttgggaccactttgacctgaccaagctgctgccttcacctcacccccagccaggcatttactttagtccttcaaatattaagtaccaataaatgtcttttcaaatttcaaaaaaaaaaaaaaaaaaaaaaaaaa

SEQ ID NO: 5730 - DNA, 864 bp, Canis familiaris
atgtcccagcaacacactctgccagtgaccctgccccctgccctcagtcaggggcccctcaagcctgagtctcctcccatcgatactcaacaagagcaggtgaaacagccgacttcactacctgtcctgtgccaaaaaatgccctcttctctcccagggaaggttcccttggggcatggggagaaacatacaagtcttgtgaagggggaacctgagcaacagtgtgagccacaggagcaggaacagcagcagaaacaacaagagtcacaggagcagaaactgcacctggaacagtgtctggaacagcatcaggaacaacaagagtcacaggaccagaaactgtacccggagcagtgtctggaacagcagcaggagcaacaagagtcacaggaccagaaactgtacccggagcagtgtctggaacagcagcaggagcaacaagagtcacaggagaaggaacttcatctggaacaggaacagcagaaggaggagctacagcagcaggaacagcagcagggaaaggaacagtgtgagaaacatcaggaagcaaaaaatctggagcagcagctagagcagataggagcacaaaggaagcagcagcaaaaggaacagctggaacaggaaaagaagctcgtggaccagcacctggatcaagagccagcacagagaactgagcaaccggaaaagaaagaagagcaggtgctggagcagcaggggcagcaggaggggcagctggagcagcctgcctttgtcccagctcaggtccaggtccgagaacccctgaagggagaagtcctgcccctcatagagcagcagcaccagaagcaggaggttcatgaccctccagaacaccagtgagcaccc

SEQ ID NO: 5731 - DNA, 1493 bp, Canis familiaris
cgaaagggagggaaggcccagaacatcccacaggatggtgagcatctggacaatcgcgctgtttctgctgggagcagccaaagcaaaggaagtttgctatgaacaaatcggatgcttttctgacgcggagccctgggccgggacagcaatcaggcctctgaaagttctcccctggagccccgagagaatcggcacccgcttcctgctctacaccaacaagaacccaaacaactttcaaactctccttccctctgatccatcaacgattgaggcatcaaattttcaaacagacaagaagacccggttcaccatccatggcttcataaacaagggagaagagaactggctgctggatatgtgcaagaacatgttcaaggttgaggaggtgaactgcatctgcgtggactggaagaaaggttcccaaacctcatatacacaggctgccaacaacgtgcgggtggtgggcgcccaggtggcccagatgctcagcatgctctcggcaaactacagctactcaccttcccaagtccagctcatcggccacagcctaggagcccacgtggctggggaggcagggagcaggactccaggtctgggcaggattacagggttggatcctgtagaagcaagtttccagggcactcctgaagaggttcgacttgatcccactgatgctgactttgttgatgtgattcacacagatgcagctcccctgatcccattcctgggttttggaacaagccaacagatgggtcaccttgacttcttccccaatggtggagaggaaatgccaggatgcaagaagaatgccctgtcacagatcgtgaacctagatggcatttgggaaggaactcgggacttcgtggcttgcaatcacctgagaagttacaagtattactcagagagcatcctcaaccctgatggatttgcttcctacccctgtgcttcctacagggcctttgaatctaacaagtgcttcccctgcccagatcaagggtgcccacagatgggtcactatgctgataaatttgctgtcaagacaagtgatgagacacagaaatacttcctgaacaccggagattccagcaattttgctcgctggagatacggggtttctataacattgtctgggaaaagagccactggtcaggctaaagttgctttgtttggaagtaagggaaatactcatcaattcaatatcttcaaggggattctcaaaccaggctctactcattccaatgagtttgatgcaaagcttgatgttggaacaattgagaaagtcaagtttctttggaataacaacgtggtaaacccaacctttcccaaagtgggtgcagccaagatcaccgtgcaaaagggagaggagaaaacagtgcacagcttctgcagcgaaagcaccgtgagggaggatgttctgctcaccctcacgccctgttagcgtccagcgcaacccgggcaccgtgttaacagcaataaaaaccactgatgcattt

SEQ ID NO: 5732 - DNA, 796 bp, Canis familiaris
ccgcggctcctcgtgctgcggcctcaggtttctgtatatccagaaagaaaaaatttgacaccttgcatcctggaagttcatttaagagactgaaattagggacttctttcaaatttggacatggctaatcgaggagcaacaagacccaacgggccaaatactggaaataaaatatgccagttcaaactagtacttctgggagagtctgctgttggcaaatcaagcctagtgcttcgttttgtgaagggccaatttcatgaatttcaagagagtaccataggggctgcttttctaacccaaactgtgtgtcttgatgatacaacagtaaagtttgaaatatgggatacagctggtcaagaacgataccatagcttagcaccaatgtactacagaggagcacaagcagccatagttgtatatgatatcacaaatgaggagtcctttgccagagccaaaaactgggttaaagaacttcagaggcaagccagtcctaacattgtaatagctttatcaggaaacaaggctgatcttgcaaataaaagagctgtcgatttccaggaagcacagtcctatgcagatgacaacagtttattattcatggagacatcagctaaaacatcgatgaacgtaaatgaaatattcatggcaatagctaaaaagttgccaaagaacgaaccacagaatccaggagcaaattctgccagaggaagaggagtagaccttactgaacccacgcagccaaccaggagtcagtgttgtagtaactaaacctccagtttgaacttcctggaatatc

SEQ ID NO: 5733 - DNA, 656 bp, Canis familiaris
gcggccatggcgtacgcttatctcttcaagtacatcatcatcggcgacacaggtgttggtaaatcatgcttattgctacagtttacagacaagaggtttcagccagtgcatgacctgactatcggtgtagagtttggtgctcgaatgataactattgatgggaaacagataaaacttcagatatgggatacggcagggcaagagtcctttcgttccatcacaaggtcatattacagaggtgcagcaggggctttactagtgtatgatattacaaggagagatacattcaaccacttgacaacctggttagaagatgcccgccagcattccaattccaacatggtcattatgcttattggaaataaaagtgatttagaatcaagaagagaagtaaaaaaagaagaaggtgaagcttttgcacgagaacatggacttatcttcatggaaacttctgctaagactgcttccaatgtagaagaggcatttattaatacagcaaaagaaatttatgagaaaatccaagaaggagtctttgacattaataatgaggcaaacggcattaaaattggccctcagcacgctgctactaatgccacacacgcgggcaatcagggaggacagcaggccgggggaggctgctgttgagtccgtttttt

SEQ ID NO: 5734 - DNA, 811 bp, Canis familiaris
gagcggctgcgtttgaaggatgacctctaggaagaaagtgttgctgaaggttatcatcctgggagattctggagttggtaagacatcactcatgaaccagtatgtgaacaagaaattcagtaatcagtacaaagctacaataggagcagactttctgacaaaggaggtgatggtggatgacagactagttacaatgcagatctgggacacagcaggccaggaacggttccagtcccttggtgtggccttctacagaggtgcagactgctgcgttctggtatttgacgttactgcccccaacacattcaaaaccctcgatagctggagagatgagtttctcatccaggccagtccccgggatcctgaaaacttccctttcgttgtgttgggaaacaagattgacctcgaaaacagacaagtggccacaaagcgggcacaggcctggtgctacagcaaaaacaacattccctacttcgagaccagtgccaaggaggccatcaatgtggagcaggcgttccagacgattgcaaggaatgcacttaaacaggaaacagaggtggagctgtacaatgaattccctgaacccatcaaactggacaagaacgaccgggccaagacctcagcggaaagctgcagttgctgaaggggcagtgagagcagagcacagagtccttcacaaacaaagaacacacttaggccttccaacacgagcccccttcttctcttccaaacaaaacataaagtcatctctcgaatccagctgccaaaagaccctaccaaacacttcaccctgacacacacatacacacac

SEQ ID NO: 5735 - DNA, 784 bp, Canis familiaris
  misc_feature (418)..(442): n comprises a, c, g, or t, or includes no nucleotide
ctgcagcataggggtggggcagggagacaacattttaaaaacaatgcatttttaaaaatgcaccaagattttcttcactgccttttttttttatcattcctacgaatgaatgattggccagatttcgtctgctcgtctgctgaagagcttcccagtgttcctctcactgggacacatggttagcacaggaaatactggtgaggctttcccatcctttaacattctctggctgtcttcgacccccgccgactgtatcctttgctgtgcaaaagcttcttatcttgatgaagtcccaatagttcatttttgcttttgtttcttttgccttcgtggatgtatcttgcaagaagttactatggccgagttcaaaaagggtgttgcctgtgttcttctctaggattttgatggaaccttgccnnnnnnnnnnnnnnnnnnnnnnnnntgaagtgtatggtgaaagagagtggtctagtttcattctttctgcatgtggatgtccaatttcccagcaccatttattgagagcaatgtctttcttccaatggatagtctttcctcctttatcgaatattagttgcccataaagttcaggtccacttctggattctctattctgttggactgatctatgtgtctgtgttcatctgtatgttagtaaattgaacaccaataaaaataaaataaaataaaataaaataaaataaaataaaaaaaaaaaataaaattctctggccgccttggttttgaatctcatggcccttctttcaaaatgatctttctgcag

SEQ ID NO: 5736 - DNA, 281 bp, Canis familiaris
ctgcagcataggggtggggcagggagacaacattttaaaaacaatgcatttttaaaaatgcaccaagattttcttcactgccttttttttttatcattcctacgaatgaatgattggccagatttcgtctgctcgtctgctgaagagcttcccagtgttcctctcactgggacacatggttagcacaggaaatactggtgaggctttcccatcctttaacattctctggccgccttggttttgaatctcatggcccttctttcaaaatgatctttctgcag

SEQ ID NO: 5737 - DNA, 1436 bp, Canis familiaris
ataaacgttagttactatttttatcaggactcctgggacccctatctcactaatttccttaaagacagtataatacagcagctcacacagactttcggattcagaaaaacagttgtgtcgggccttgggtaaattatgtaaggcaagcctcagtttgctcagcggtaaaacgaggaaagtaataagccacccgcctccgccattttgggtagaataagggtgcatccagtgagagaaggatgcagtcgaggaacctctggagaattctgggactctgtctcttatcagttggtgcttgggggcaggacgaggatttcaaagcttctgatgacttgacaagtatatctccagagaaacggtttaaggtctccatctctggaaccgaggtagtggtgacatgccctgatgtttttggatatgataatataaaatgggaaaaaaatgataaccttgtggaaggtgctagtaacagagagctatctcagaaggagttttcagaagtggacgacagtggttattatgcctgctatgcagattccataaaggagaagagctatctctacctgagagcaagagtgtgtgcaaactgcatagaggtgaatctgatggcagtggtcacaatcattgtagctgacatctgccttactctggggttgctgctgatggtgtattactggagcaagactagaaaggccaatgccaagcctgtgatgagaggaacaggtgccggcagcaggcccaggggacaaaacaaggagaagccaccacctgttcccaatccagactacgagcccatccggaaaggccagcaggacctgtattctggcctgaatcagagaggcatctgacggctcctgaggacacggcctccccagggcccaggtcttggtgtctccaggtcctgctactcccagtaccctgggtaaatcttgaaccccagaagagaattattcctctgccttctggagaactaactcccagcctgcagccttatccccagcaccctccaacccgccttctctgctggcacttggtcctgcaatatcacctcctcatcatggccactcaccgcccccccaccagccagactgccctctggtcggggtatttatttctgttaccctgacgcccccaccatcaccaattccttcctacccttcagaggtatccttgctcccttccgtacccctctcccggacagaacctgcccccatcccttactatcccacctacctttccgtttttccagctctctctttggtgaccctctgtggggatggactaggtaactctggtagaggtcctgccccatccatgaccttggcccagagccaccctctgccagcaggcccctggatgatcatttgcattcttacaaatgtgctaggctccttgacagctagagagaaaataataaagtgtatttggttgaaaaa

SEQ ID NO: 5738 - DNA, 1038 bp, Canis familiaris
gaagcgctcgctcgcacggcgcctcccgccaggacagctgagcaccctccgcgggcgtcgcgattaattagtgtctccgacacccagctccgcgggcgggcgcgcgccgccggggaaggggaggggtgggcggcggtccccgcgtgcgccggccggagctggaggtaaggaggcgcgcggcaggggcgagcgcgccgtcgcacactttgcacgccgcccagggctacaccactcaccgaaaattgggaggcaggtccgggaggcggggtccggcgcccaccgccttcgcccccggccccgccgccccccgcgccccctgcccacgcccacgccccccacgcaccggccgcacccccggcgcgcgcggcgcggcgtttgggcgcgtcctcggcgggccgatttttcggcttccccttcggtttataggggccgccgctgtgggtccgtcctctgaagaggctggggcgtcatcgggctgcttaggagcgccgtctccggcggggacactcagtcgcgtcggcaccgcggagcgggctgcgtcaggtggctggcccggcggcgctcgctggctccccggctcccggctctccggctcggggctgcggcgccggctggagcgaacccctgtcccggcgcggggcggcggcgggcggccggcaggcaggcaggcaggcactgcttgcgtgtgagtgcacctcactcacatgtaagtccgggtgcaccgtggcctcccgaggaagtgcgagtcgccggcgcggggcaagagccgccggggccgggacagggcaggggcgccccggcgctgccgccctgccccgagcccgccgcaggacccccccaattctctcttttctcttttctcctcctctccattggcgtgcccaagagccaaaccgaggagcgcctgagggtaacagcaaactcgtgccatcgcgcctctgcactttcttttttgagattgtttgacatttctcggtgctttttggtttctcgctgttgttgggtgctttttggtttgttctacacccctttttttcc

SEQ ID NO: 5739 - DNA, 3199 bp, Canis familiaris
acacttggaggtctaccattgtacaacatgctgcagttaagactattacctaccttttcaatgggatgtcatctgttagccgttgtggctctcttattttcccacgtggaccttataagtgcagagacagaaatggaaggagaaggcaatgaaaccggcgagtgtactggctcatattattgtaagaagggggtgattttacccatttgggagccccaagacccttcctttggagacaaaattgccagagctactgtgtattttgtggccatggtctacatgtttctcggagtctctatcattgctgaccggttcatgtcctctatagaagtcatcacatctcaagaaaaagaaataaccataaagaaacccaatggagagaccaccaagaccactgtgaggatctggaatgagactgtttccaatctaaccttgatggccctgggatcttctgctccagagattctcctttcagtaattgaagtatgtggccataacttcactgcaggagacctaggtcccagcaccattgtgggaagtgctgcattcaacatgttcatcatcatcgcgctttgtgtttatgtggtcccagatggagagacaaggaagattaagcatttgcgtgtgttcttcgtgacagcagcctggagcatctttgcctatacgtggctttacattattttgtctgtcatctctcctggggtcgtggaagtctgggaaggtttgcttactttcttcttctttcctatctgtgttgtgttcgcttgggtggcagataggaggctgctgttttacaagtatgtctacaagaggtatcgggccggcaagcagaggggaatgatcatcgagcacgaaggagacaggccatcttccaagactgaaattgaaatggatgggaaagtggtcaattcccacgttgacaatttcttagatggtgctctggttctggaggttgatgagagggaccaagatgatgaagaggcgaggcgagaaatggctaggattctgaaggagctcaagcagaagcatccggagaaagaaatagagcaattgattgaattagctaactaccaagtcctaagtcagcagcagaaaagccgagcattttaccgcatccaagctactcgcctgatgactggagctggcaacattttaaagaggcacgcagctgaccaggcaaggaaggctgtcagcatgcatgaggtcaacactgaagtggctgaaaatgaccccgtgagtaagatcttctttgaacaagggacctatcagtgtctggagaactgtgggactgtagccctgaccattatccgcagaggtggcgatttgactaacactgtgtttgttgacttcagaacagaggatggcacggccaacgctggctctgattatgaatttactgaaggaactgtggtctttaagccaggtgagacccagaaggaaatcagagttggcatcatcgatgatgacatctttgaggaggatgagaatttccttgtgcacttgagcaatgttaaagtatcttctgaggcctcagaagacggcatcctggaagccaatcatgtttctgcgctcgcttgcctgggatctccctccaccgccaccgtgacgatttttgacgatgaccacgctggcatctttacttttgaggagcccgtgactcacgtgagtgagagcattggcattatggaggtgaaggtattgcgaacatctggagctcgaggaaatgttatcgttccctataaaaccatcgaagggactgccagaggtggaggggaggactttgaggacacttgtggagagctcgaattccagaacgatgaaattgtcaaaacaatatcagtcaaggtaattgatgatgaggagtatgagaaaaacaagaccttcttccttgagattggagagccccgcctggtggagatgagtgagaagaaagccctgttattgaatgagcttggtggcttcacaataacaggaaaatacctgtatggccaacctgtcttccggaaagttcatgctagagaacatccgattccctctactgtaatcaccattgcagaggaatatgatgacaagcaaccgctgaccagcaaagaggaggaggagaggcgcattgcagaaatggggcggcccattctgggagaacacaccaagctggaagtgatcattgaagaatcctatgaattcaagagtaccgtggacaaacttattaagaagacaaacttagcccttgtggttgggacaaacagctggagagagcagtttattgaagccatcaccgtcagtgctggggaagatgatgatgacgatgaatgtggagaggagaagctgccctcctgtttcgattatgtgatgcattttctgactgtgttctggaaagtcctcttcgccttcgtccccccgacagaatactggaatggctgggcctgtttcattgtctccatcctcatgattggcatactgacagctttcattggagacctggcttcccactttggatgcaccatcggcttgaaagattctgtgactgcggtagtgttcgtcgcacttggaacttcggtaccagacacatttgcaagcaaagtggcagccacccaggatcagtatgcagacgcgtccataggtaacgtcactggcagcaacgcggtgaacgtctttctgggaatcggcgtggcctggtccatcgctgccatctaccatgcagccaatggggaacagttcaaagtgtcccctggcacgctagctttctctgtcactctcttcaccatttttgctttcatcaatgtgggggtgctgctgtatcggcggaggccagagatcggaggtgagctgggtgggccccggactgccaagctcctcacatcctgcctcttcgtgctcctatggctcttgtacattttcttctcctccctggaggcctactgccacataaaaggcttctaaaggaacaatcagatatagtaaatttatatatatatacgtatatatatacataaaatattatgtataatgaacagaggaaactgacatttgtcatgttcacttacctgctgatggaatccagcttcaagagcatactctgtactagggctgaagtgagaaaccatcacctcccattcccaggggcgtcatcacattgaacaaggcatggaggcaggggcatctttgcagctcagcctagaaggactgtgttctggaattc

SEQ ID NO: 5740 - DNA, 327 bp, Canis familiaris
ggagaaaatgtgctcacccagtctccagcaataatggctgcctctctggggcagaaggtcaccatgacctgcagtgccagctcaagtgtaagttccagttacttgcactggtaccagcagaagtcagccgcttcccccaaacccttgattcataggacatccaacctggcttctggagtcccagctcgcttcagtggcagtgggtctgggacctcttactctctcacaatcagcagcggggaggctgaagatgatgcaacttattactgccagcagtggagtggttacccgctcacgttcggtgctgggaccaatctggagctgaaa

SEQ ID NO: 5741 - DNA, 423 bp, Canis familiaris
aacacagatcaaagtttcccaggtttccctggatcagagatgtggaacccaaacactgatctcagcgaagactgtttatatctgaatgtgtggattccaacacctaaaccaaaaaacgccactgtaatgatatggatctatggtggtggttttcaaacaggaacatcatctttacctgtttatgatggcaaatttctggctcgggttgaaagagttattgtcgtctcagtgaactatagggtgggggccctaggattcttagctttaccaggaaatcccgaggccccagggaacctgggcttatttgaccaacaactggcacttcagtgggtgcaaaagaacatagcagcctttggtggaaatcctaaaagtgtaactctctttggagaaagtgcaggggcaggttcagttggccttcatcta

SEQ ID NO: 5742 - DNA, 3164 bp, Canis familiaris
tcacagtggagcagtcttcacatcctgggatggggaaggggtccttgactgcaatgaccagtcctccagggaaaatcgctctggtccatcacctgagcacactctggcagctgtgcctcttcccagcctccagccctggggtcatctgaagctcacaggacctcagtctcagccaggaccaactactgttcacgctcacatgtggccttgggtgggggaggaggtgagaggaagccttaaccacccaggtgggtctttaattccaggatgcagctaggaagggaaatagaaaggaaacaggaaagactcttcagagaagcaacgtcccaaggcccctaaaatcactcatggaggcagccccctggttgagggcaggcgaaaagcacagccagagtgacatatatactgtgttaaggtaggtctaccattttcattttctcaggcctcccaactctcgaaatgatcccgttgacagataaggagattgagacttagaacagataacttgggatccctgggtggcgcagcggtttggcgcctgcctttggcccagggcgcgatcctggagacccgggatcgaatcccacatcaggctcccggtgcatggagcctgcttctccctctgcctgtgtctctgcctctctctctctctctgtgactatcatgaataaataaataaaatcttaaaaaaatattaaaaaaaaaaagaacagataacttgtccagcctataaactgttccgagtccacacccaaccattaacgcagtatcagcacggacaccgacacgtgcgtgcacgcccgcacacctgccaaggtgccaggggccgcccagggctttatcaggacacgcccccaacagattggccacagctgggcctcgggttacgtcgagccccgtggggtggggaaggggggggtcacctgtggacaggccccttttatagctctaccaccccacctggctctgtctactgccacctgacctgccagctgctacctataccggctgtccccatccgtcatggaaaagatcctcgtccttctgctcgttgcccttgcggtggtctacgcggttcctgaccctcgggggatcattatccacctggtaagagggacttcaggggaggagtcatcttaacatccaagtagggacttttttttttttaagattttatttatttattcatagagatgcagagagagagagaggcagagacacaggcagggggagaagcaggctccatgcagggagcctgacgtgggactcgatcctgggtctccatgatcatgccctgggctgcaggcggcgctaaaccgctgcgccaccagggctgccccaggtggggactttttaagcttagatctttacctctcacgtctccacctggggctgcccggaggctgagaggtgaggcatcttctgctttactgtcatgcccaccctgcgcctcctaccgggttgggggaggggggctcagacaaggctgatcggcacggagcatgcccagagcaggggtttgacctggctgagggacagtcccaggctcctgccccggaagccctggctcagaaggtccagtagttcagaaagctcccccggtgattctggcttcgacctagagtgacacacggacacggttctcaatgcctcaggaccgtttacccatttagtccccatactgacgcatgaggcagggacctagtatcaaacccgttttcagatggaaagcagttctagagaaaggtgaagccacctgcctgaggtcgcgcacgtggaagctctcagcggatcagaggccgcagggcggatggtccccccccccgctcccccgtgctgcgtctctacccaaaatttctgaactcgcggccttcagggctcagaggggccaggatccccctgaggtcatatgccttcctgggggatggtcctcaaccttcacaggcttctcagtggactgcaggacccagggaagtctggacaccctgttttgggtcacatgtgcagattccaaggggacactgaggcacggggggggcagggtcttgcccggatcaccccgggagtcagatgcgtggcggggtcctgtcctgtctcgcagcttctcccgcgggtggggctgggggtgggcagactggccgccagccccgcgggttgggtcctttacccgctcccccgcgggggacgcgctctgggcggtggcggtggcgaagggacaaaaagcgagggccctcgctaactggccgcccggcaggaagacggcgagctctgtctgaacagcgtccagtgcaagagcaagtgctgccaccgggccaccgggctgagcctggcccgctgcgcacccaaggccagcgagaacagcgagtgctctgccaaggtgggtgccgcgggccgtgcggtgctggggcacgaggcacagctggggggcgggtcagggagggggtcagcaggctccaggcactgccccatccgctcggccctttcgaacctcacgactgaccagtgaggtgggtgggggcggagatttgttattcccatttcacggatgggtaactggaggctccccagggagatctagttagtaagcaccaaggaagccgagtgggggaacctgggccgggcgtcctcgaggcccacagcgccccctggcgtggcagtcaggaggggacagtctgaaaagagcctggcccggggtgaggcggggagcgaggggcaggctatgcccaaagtagcccccccaccccacccccgcgacagcctgtgattccactgtttctgtgtctttgaagacgctctatggggtttactacaagtgtccctgtgagcggggcctgacctgtgagggtgacaagtccatcgtgggctccatcaccaataccaactttggtgtctgccacgatgctgggcgctccaagaagtaaagccactgaaggatgctcctcatccaccacctctccctggctggccacccccttaaccagcacctcccttttctgattggattctcagcaattaaagctcttcctgcaaccttccccgggctccagaatgttcttgagtcagtgtcttccttgatgtcccatcaagccttcgcctcgtcaaggcaggtgtcaaacaggtcagaggaagaacggatgggtctgggaccaggcgggatgaggctg

SEQ ID NO: 5743 - DNA, 5510 bp, Canis familiaris
ccagtcatctggtgtctgctgctaagatgaaggcatgattgggaatgaagagcatccggaagtcagaaaggagacatatgggaagaccctgatgaaagggaggataatgtggagagggtccaaatagagatgtggtctgagctagggactaggggatggagaagatccagggagcaagtgtgatgtggctggtgtctgaaagtctatgaggcacctggggtctgtcagggtacctcagggaatggtgtactctcccaagagggacagcacaagaggaagaccatgttgggcagggggagggacccaagtagtgaaaaaagtttttaaagcagaagatgtgacaaatttgtgtctggagggagccatggggagaagggtctcgcgtctccactgtttacagctcccccccaaagttcatctcagtcctggtctgtcctccaccatgtgttgcacccagcaggtccctctgcccacccccagctccatctggccaggtgttgcctcagtgcctagctgtttgtcaagaactctgaagagtcttaagatttcacagacttgcaaacaaatgttaggagaccagcttcatgggtactggcagaagacaccagatcctgggtcggggcagaattttactattcatggtgcagcagggggcatgggcttgatattcatatcagttcacctggttccccaagtcccatgagggtgatcagaggacgataggtggactctgtgcacacagtggtttgtgccacactttaggacctgagcttaggaatccttaatcctataagagggctgctggcaaatctgcctgaagtttgtccctgatggagatattatctttacaactctgagttgcaaacaaaattgctctggagggacatattatacttactgtccttggcagtaaacagatattatcttttattaaatcatggacagcaaacaaaggcttctctaagggagataccatcttgaaagtctgcatgaaggccaaacaatcttgacagacagtccagagtgaaaattttaattcctttgctctgtagacaggtgacacccatggagaacttctccccacatgagttggttctcaccctctatctttccctgccagaaagggaaagggaacattactctcttttcctcacgttcttcatccactacatctgtatgctcagatgctcaccatccccagacacttgccagacttccaggcccacttcccaacaacagggggaataatatggccgtttggtctgtgtgatccatgtcaaatcctgccctagtgttgtcacctctgtgtgtttgtgtgtgcatgcatgtgtgtttatgtggtttttaccttgaggggatataactatgttttccagtatagaggttcacagtcctttaccttgaaaactccttgtttggtacttgtgcatagtgcagctctgtgtgtgtgtgtttgtgtgtgtgtgcgtgtgtgtgcatgtgtgtgtgtctgtcaagtgtgcaaggccctacttgtgtcctaatgcctgtacgtgggaactttggcatcatatgtaaaacagaacaagagaccttgaatatcaatcatctgacttgggggctggtgtagagatggataaatatgtcctgcctgtatcttcagctatgtctctgtcatcttcaatgcccagccctgtgttcaggtactgccctggagtctgatccactgggtccacacgggaatgcttggtctctgggtttgtgcctgccaccatgtgggttaatccagctttgaccttgaccatgtggacctggatctgcatagatgtctgactgtggccatatttgtgttcacaacatgaatattcacaagtatgttcccctagtaggggaactagttcttgcacctgaagtgcgggaaccagggagttctggaagtcagctcttatttcagagatgtgggaagttggggaacacaagcatcttggctcagagaggtgcggagatcagagagcttcagggacatactgcaagtatttgggggtctaatgggctttggagtacaagatctctcttggggtgtaggcattagaagctttgtgataggcatcatgattctccagagctgctgattctgtcattctggggcctcccctccctgcccctgtcatcaagagcaaggcaacagggctataggtcctgtcccatttggcctcagaccttgaaatatatccagcatgatcaaggacctaggacaacaggtgtttgctttttcatccctccaatagccctgggggtgggggctgtccacacccagaagcagggccagccttggccagcttctgggtggcagcagagcagggcggggccctgggggtgtatgtaggcttttaaaggctccccagggttgctctccagctcctagctcactgtctgccagctcccagcactcctgtcaccatgtggttcctggccctgtgcctggcaatgtccctggggtggactggtgagtagagtggatctgagagagggagaggggcactgactctcacggtgctctgaccaccctcccctgcctccacaagaccatctcctcccgccatcaggcagcctattcctccagcccacggtcaggccaggcagggtaccaggctccattcccactgccacctcctacctggcctgacccagcaaccctctgcaggtgccgaaccccacttccagccccggatcataggaggcagggaatgtttgaagaattctcagccctggcaggtggctgtgtaccataatggtgaatttgcttgtgggggtgtcctggtacatccagagtgggtgctcacagctgcccactgtgcaaacaggtgagtatggacagagggtgtggtggggtttctgtgctccacaggaatcagcaattgggcactgcctgggtttgcttcaagggcggtactgagggaaagaaagatggtcttggtctggagatcatggagagtggcagggacaacccagggaagacctgccaggacagcatgtgtctctgtctccccttataactgtcttcctgtgtctccccgccctgtgtctgtgtctctcagtacctggctctgtcatgtatctgactgtgatttatctctatctccctctcttccctgtcttggtgtctgtgtgtgtccctgtgtgtgtcctcctctgggtccctctgctgcatccctgtcactgtatgtctcaccctccatctctctgccccatctatctccttgggtctctgccccacaccctctgccccattgctgcctagcaccccccaggatgggagtgagggggacccccagagaagaggaagggactctcctgccgtgtttgtgtgtgtgtgtgtgtaggggggctctcaggtgccccgcccctccctcccagaaaggatgccttgcagggggacacatgaaagggctggtttcagctggtgcctggtggtggttccagaggaaggaggaggaggaaggggaagaggaaggtaggcaggaggctgaatgtccagggagggagggggacacagacctttggctgggggccaggccacccactgctggggagctaaccccacagcccctgctgcagctgaatgggtcccaggctccctcctctgctctgtcatccctcccttctctctctcaggttgcccctacacaaacactgcctgtagtcttcactctcttcctttgtgctctttttcactctccccttcattgactcatgctttgaccttgtcatgtccttcatctctcactcatcttttcttcatagctctttatcttcctgtctgtctctctatggccgtttctctctgtcttcaggaccctccctcatgctccatggccatttatccctacctttctcttctctcctcattcctgggtgttccctctctccccagtaattgtgaggtctggctgggtcgccacaacctgtcggagtcggaagatgaaggccagttagtccaagtcagaaaaagcttcatacatccactctacaaaacgaaggtccctagagccgtcatccgtccaggggaagatagaagccatgacctcatgctgctgcacctggaagagcccgccaagataacaaaagctgtgagggtgatggacctgcccaaaaaggaacctccattggggagtacctgctatgtctctggatggggcagcactgatccagaaacgagtatgctggggctagaccatatatcctggagcccagacttgggtgtagggaggagggtgctgaggacctggacttctgggcctgagagaggagggggctggggcctgggctcctgggtctgagggaggagggctgaggagccacctgggctctggccacagacctttttctctctggcttgtagtttttcacccagggagtctccagtgtgtggacctcaaactcctgtccaataatcaatgtgcaaaagtatacactcaaaaggtgacaaagttcatgctgtgtgctggtgtcttggagggtaaaaaagatacctgcaaggtgagccaggtttgcttgcttgcttgcttgcttttaaagattttatttagggacattggggtggcttagtggttgagcatctgccttcagctcagggcgtggtcctggggtcagggatcgagtcccgcatcaggcatcctgcagggagcctgatgtgggactcgattccaggatatcaggatcatgacctgatccaaaggtagatgctcaaccactgagccaaccaggtgccccaatgagccaatctttcacttcaaggccttgaggggaaagaaaggagatgactatggttaatgctggaacctaaatgctgttttatccccctccttgtgacttcttcaatatacggtgttgaccttattcttttcttgcttacccctcttccagggctccctagggcctagagggagtgcctactcagaaaaaaaaactctgggagagttaatatctgagatgagctgtgatggtgggaggtcccttaaatggtcctgctcctccctgctgacccatctgtagggactgtccttctggactctgaagtgccatgtctagtagccaggacttgagacactctcctctgtgttggaatttccacctaccttgtggggagaggactcaggcaattgcttctttccccatcaccgctattgccgtgtgagatacgcaagtccaggtttgacagcttgggttccccaggcagaattagggctggccttcctcaccctctgtctctatctctttcacttgcagggtgactcaggaggccctctgatatgtgatggtgaattggtaggtatcacatcatggggggctactccatgtggcaagcctcaaatgccatccttgtataccagggtgatgcctcatctgatgtggatcaaggacaccatgaaagccaacacctgaatgtccctttcctactctctactcctagtaaaattgagtatacatcaagttgtggaatcatctggtctttctggatacagggtacc

SEQ ID NO: 5744 - DNA, 660 bp, Canis familiaris
cccgcaggaccagctctgggccagggggtccaaagtgctcacccccggcacagccgacgtttgggggccttctttcagcaggggacagcctgactggggacgatggcacctctccaccacatcttggttctctgtgtgggtttcctcaccacggccaccgcagaagcgccacaggaacacgacccgttcacctacgactaccaatccctgcggatcggaggcctcatcatcgccgggatcctcttcatcctcggtatcctcatcgtcctgagcagaagatgccggtgcaaattcaaccagcagcagaggactggggaacctgatgaagaggagggaactttccgcagctccatccgccgtctgtccacccgcaggcggtagagacacctggcgcgatggaacccagccaggtcctgcagctcgggctaggctggggggcggggggaggagaagggggcgaagggtgggatgggatggccggggggctctcttgcctctcacctttgtcacccccacaggattccccctggcgcctgatgcctcccacccaccacctgtgcgcccaccgccacctggactgccctcttccccagccctgcccccgcaggctcctctctgccgcccagacttcaataaaacgttgcttttctctcttgaaaa

SEQ ID NO: 5745 - DNA, 1530 bp, Canis familiaris
atggtgggctcttatgtcttgtggctggccttggcttcctgcattctgaccctggcatctccagaacagcaaggtaacagaaacctcatcaacactcgttcctatgacccctgccagaattacaccctcctggatgaaccctcacgaagcacagagaacacagaagggagccaagtgtgtgacaaggacaagcatggctggtaccgctttgtgggagatggaggagtgaggatgcccgagacctgcgtcccaatgtaccgatgccagacagatgctcccctgtggctgaacgggacccaccccacccttgcggagggcattgttaaccgtactgcttgtgcccactggagcggcaactgctgtctctggaagactgtggtgcaggtgaaggcctgcccgggcgagttccacgtgtaccggctggagggcacccccaagtgtagtctgaggtactgcacagacgcctccactgctacagacaagtgtaagaacctctgccgcccggaagaggcctgtagctttctcaatggcacctgggactgtttctgcagatcggacctcaacagctctgatgtccacagtttgcagcctcggctgaactgcggggccaaggagatccaggtgtcactggacaagtgtcagctgggaggcctgggttttggggacgaggtcatcgcctacctgcgagactggaactgcagcaatatgatgcaaagagaggagagaaactggatatctgtgaccagccctacccaggcgagggcctgtggaaacattctggagagaaatggaacccatgccatctacaaaaacaccctctccttggccaatgaattcatcatcagagacaccatcctcaacatcaatttccagtgtgcctacccactggacatgaaagtcagcctccaaactgccctgcatcccattgtaagttctctgaacatcagtgtggatggggaaggagagttcactgtcaggatggccttgttccaagaccagagctacatatctccttatgaaggggctgcagctgtgctggctgtcgaatccatgctctatgtgggtgccatcttggagaaaggggacacctcccggtttaacctattgttgaggaactgctatgccacacctactaaagacaagactgaccctgtgaaatatttcatcatcagaaacagctgcccaaatcaatatgattccaccatccatgtggaggagaatggggtgtcctcagaaagccggttctcagttcagatgttcatgtttgctggaaattatgacctagtgttcctgcattgtgagattcatctctgcgattcccttaatgaacagtgccagccgtgttgctcgagaagtcaacagcgtagtgaaatagtggctctcaacccagctcgggttctagatttgggacccatcactcggagaagttctgcatctgttgacatcacagatggaacccccagcactgcagggttcctgttggcctggcccatgcttctcctgcctatcctcctggctgagctgttttga

SEQ ID NO: 5746 - DNA, 489 bp, Canis familiaris
atgcagagcttgctacccttgagttccctccaaagaaactatttggaaacaaggatgaacgtgtgattgctgagaggcgaagtcacttagagaaagccctggagaaggacagggagagattagagcacgaaatccagcagttgaagcagaagatctgtgaggttgatggtgttcaaaaagggcatcatcggaccttggaggggaaggctccttctcccagcttgccatccagtactgagaagtcacacctggtccctctgatggatgccaggatcaatgcttacattgaagaagaagtccaaagacgacttcaggatctacatcgcgtgattagtgaggatgctgatgcatctgcagatgtggtgaaggataatgagaaactccacaatggcaccattcaacgcaagctaaaatatgagcggatggtttctcgctctttgggagcaaatccagacgacctgaaggacgagcacttcgagtttgaggtca

SEQ ID NO: 5747 - DNA, 202 bp, Canis familiaris
ggcgcagaggtttggcgcctgcctttggcccagggcgcgatcctggagatccgggatcgaatcccgcgtcgggctcccggtgcatggagcctgcttctccctctgtctatgtctctgcctctctctctgtgtgtgtgactatcataaataaataaaaaattaaaaaaaaaaaaaaaaaaaagaaaaaaaaaaaaaaaaaaaa

SEQ ID NO: 5748 - DNA, 1158 bp, Canis familiaris
cccgtgttctgcaggaggggactccaggggccgggacgatggcagcactacaggagaaaaagtcatgcagccagcggatggaggagttccagcgctactgctggaacccagacacggggcagatgctgggccggacactgtcccggtgggtgtggatcagcctctactacgtagccttctacgtggtgatgactggaatctttgccctgtgcatttacacgctgatgtgcacacttgacccatacacgcctgactaccaagaccagctaaaatcaccaggggtgaccttgaggcccgatgtctatggggagaaaggcctggacatttcctacaacgtctctgacaacaggacctgggtagaccttgtgaacatcctccacaacttcttggaaggctactcgcccacatcccaggaggacaatatcaactgtacctctgagaagtacttctttcaggacgtttttggggccccaaatcacaccaagttctcctgcaagttcatggcagacatgctgcaaaactgctcaggcctgacagaccccaacttcggctttgcagaaggaaagccgtgttttattattaaaatgaacaggatcgtgaacttcctccccagcaacagcacagcgcccagggccgactgcaccttcttggaccagcacaaggatgaccggcccctgcaggtggaatattacccacccaacggtaccttcagccttcgctatttcccttactacgggaaaaaggcgcagccccactacagcaaccctctggtcgccgcgaagcttctcaatgtccccagaaacacggaagtcctcattgtgtgcaagatcctggcagattatgtgacctttgacaacccccatgacccctatgaagggaaagtggagttcaagctcaccattcagcagtagagagcaaggaggctgcaccctggcccccatgacccctatgaagggaaagtggagttcaagctcaccattcagcagtagagagcaaggaggctgcaccctggctgcccacccccctgccatccctgtactcctcctagctgcccgtcgacatgctgcaaaactgctcaggcctgacagaccccaacttcggctttgcagaaggaaagccgtgttttattattaaaatgaacaggatcgtgaacttcct

SEQ ID NO: 5749 - DNA, 2913 bp, Canis familiaris
gtgagttgcctaaagtcacacagcaagttagagactcagttccatcacttactatatcggtcctgtctcaccatcctgcccactctcgctctgcggcctcccagtccatcacgtggctatggacagaaaagtggcagtccccgaggacgggcctcccgttgtctcctggctccctgaggagggagagaagttggaccaggaaggggaggaccaggtgaaggatcggggccaatggaccaacaagatggagtttgtgctgtcagtggccggggagatcattgggctgggcaatgtctggaggtttccctatctctgctacaaaaatggaggtggggccttcttcatcccctacttcatcttcttcttcacctgcggcatcccggtgttcttcctggaggtggcgttgggccagtacaccagccagggcagcgtgacagcctggaggaagatctgcccccttcttcagggcatcggtctggcgtctgtggtcattgagtcctatctgaacatctactacatcatcatcctcgcctgggctctcttctacctgttcagctcctttacctctgagctgccctggacgacctgtaccaacacctggaacacagagcattgcatggactttcttaaccactcgggagcccgcacagcgacctcctctgagaacttcacctcacctgtcatggaattctgggagagacgtgttttgggcatcacctcaggcatccatgatttgggggctctgcgctgggagctagctctgtgccttctgctggcctggcttatctgctacttctgcatctggaagggagtcaagaccacaggcaaggtggtgtatttcacagccacgtttccctacctgatgctggtcatcctgctgatccgaggcatcacccttcccggagcctaccagggtgtcatctattacctgaagcctgatttgcttcgcctcaaggacccccaagtatggatggacgcgggcacccagatcttcttctccttcgccatctgccaggggtgcctgactgccctgggcagctacaacaagtatcacaacaactgctacagggacagcatcgccctctgcttcctgaacagtgccaccagcttcgcggctggcttcgtggtcttctccatcctgggcttcatggcccaagagcaggggctgcccatctctgaggtggccgagtccggtcctggtctagccttcatcgcgttccccaaggctgtgacaatgatgcccttatctcagctgtggtcctgccttttcttcatcatgctcatcttccttgggctggacagccagtttgtctgtgtggagtgcctggtgacagcctccatggacatgttccccagtcagctccggaagagtgggcggcgggagctcctcatccttgccattgctgtcttctgctacctggcggggctttttctggtcacggagggcgggatgtatatcttccagctgtttgattattatgcctccagtggcatatgcctgctcttcctggcgatgttcgaagtgatctgcatcagctgggtgtacggggctgatcgtttctatgacaacattgaagacatgattggctaccggccatggcccttggtgaagatttcctggctctttctgacccctggactctgcctggccaccttcctcttctccttgagccagtacacacctctcaaatacaacaacatctacgtgtaccctccctggggctactccatcggctggttcttggctctctcctccatgatctgcgtcccactctttgtcatcatcactcttctgaagacccggggttccttcaagaagcgcctacgacagcttaccacccctgaccccagcctgccacagcccaagcaacacctgtatctggatggtggtaccagccaggactgcgggccttccccaacaaaggagggactaatagttggggagaaggagacccacttgtaggatgtggccagcagccaggtggctattgagccaagaacctcctctgtcagggccactgcagtgacagcctttacctctgccccttacccagtccagctatgaacctctgcaatgtctgtgtgtgtcctcagccagaggccaggctgctctctcctcagcagggcagctcttctggtgggcgagatgtggtcctgctgcaatacgccatcctgttggaacacaccttcttatttataaagaagggtggttttttttgagtccaccatctgatctaacacattacactgtgtgggagctcccactgcagggacattccagcttcctatacttatgtgttgggagggtagccctgacgggagtacatatcacacattgactcggagatcccgatggaacacaacatgttggaagtgacaactgaacgcaccatattggattctgacattcccttagaggggttccttcatgaggcttagtgttctggagtccgtggggaaggaactagagaaacaaaaagccttcatgagccatcattgtcttgagttttcctggaggcttcttgaggtgtccctagtcccacacgcctcttgcaatgttgtcctccactcacggagcactggatggaagggactcagaggtgatccctaggctgttctttgaacagctttgaacagcttagggtgcctgtactatgcccaggcagacatcactaatcgatgacagagtctctccgacctcacaggccttccaaatatagtgctctaggcagctccattggccaccccactttggtccaacctctggactttgtgggtgaggagactgaggactaaagagagagtgactttttcaagttcacatagctatgcctaaaacctggcctccttgttctcaggccatggttctttccattatgccctcctgccttggttaacaagcaagtacagatt

SEQ ID NO: 5750 - DNA, 2870 bp, Canis familiaris
ccggcccagcagcgcgtcaggccccccgcggtccccgcccctcctgcgtcccgggagccggctcggtccggagccgcgcgccgagcctccgggcatgccccgctacgagctggctttgatcctgaaagccatgcagcggggttggtacagtaggcttcactaacttagctgcaactcagaatttctcctccagcacctgagtaaatgctgatggtcttgtggagagtggattaagagtacgagctaagttctcaatcccaattaagaagcggaggaaaatttaaactgtctccttcaaagtttatcacaaccaccaccatcaagacagcaaaccaaaggacaaagactttgacctgctgtgttgctctgtgtagtccagttcacgtatggtttacagacttggctggggttactaatgagtaaataaaaagtcggacacttctgtcattggacacttttattcacaaagttaccaaaatgagggctgtactggagacagcagacattgccatagtggccctgtattttatcctggtcatgtgcattggtttttttgccatgtggaaatctaatagaagcaccgtgagtggatacttcctggcggggcgctctatgacctgggtagcaattggtgcctctctgtttgtgagcaatattgggagtgagcacttcattgggctggcaggatctggagctgcaagtggatttgcagtgggcgcatgggaattcaatgccttactgcttttgcaacttctgggatgggttttcatcccgatttacatccggtcaggggtatacaccatgcctgaatacttgtccaagcgatttggtggccataggattcaggtctattttgcagccttgtctctgattctctatatcttcaccaagctctcagtggatctgtattcgggtgccctctttatccaggagtctttgggttggaacctctatgtgtctgtcatcctgctcattggcatgactgctttgctgactgtcaccggaggccttgttgcagtgatctacacagacactctacaggctctgcttatgatcgttggggcactcacacttatgataattagcatgatggagattggcgggtttgaggaagttaagagaaggtacatgttggcctcacccaatgttacttccatcttgttgacatacaacctttccaacacaaattcttgtaatgtccaccctaagaaagatgcactgaaaatgttgcggaatccaacagatgaagatgttccttggcctggatttgttcttgggcagaccccagcttcagtatggtactggtgtgctgaccaagtcatcgtgcagagagtcttagcagctaaaaacattgctcatgccaaaggctctactcttatggctggcttcttgaagctgctgccaatgtttatcatagttgtcccaggaatgatttccagaatactgtttgctgatgatatagcttgcatcaacccagagcactgcatgcaagtatgtggaagcagagctgggtgctctaatattgcttacccacgcctggtgatgaagctggttcctgtgggcctccgtggcttaatgatggcggtgatgattgcagctctgatgagcgacttggactctatctttaacagtgccagtaccatatttacccttgacgtgtacaaactcatccgccggagcgcgagctcccgggaactaatgattgtggggaggatatttgtggcttttatggtggtgatcagcattgcatgggtgccaatcatcgtggagatgcaaggaggccagatgtacctttacattcaggaggtagctgattacctgacacccccagttgcggcccttttccttctggcaattttctggaagcgctgtaatgagcaaggggctttctatggtggaatggctggctttgttcttggagcagtccgtttgacactggcctttgcataccgtgccccagaatgtgaccaacctgataacaggccaggcttcatcaaagacatccattacatgtatgtggccacagcattgttttgggtcacaggactcattacagtaattgttagccttctgacaccacctcccacaaaggaacagattcgtaccaccaccttttggtctaagaagagcctggtggtgaaggaaagctgctccccgaaagatgaaccctacaaaatgcaagagaagagcattctgaggtgcagtgagaacagtgaggccaccaaccacatcattcccaatgggaagtcggaagatagcatcaagggccttcagccagaagatgttaatctgttggtgacctgcagagaagagggcaatccagtggcttcgttagggcattcagaggcagaaacaccagtagatgcttattccaatgggcaagcagctcttatgggtgagaaagagagaaagaaggaaacagaggatggaggccggtactggaagttcatagattggttctgtggctttaaaagtaagagcctcagcaagaggagtctcagagacctgatggaggaggaggctgtttgtttacaaatgttggaagagcctccacaagttaaactaatactaaatatcggactttttgctgtgtgttcacttggaattttcatgtttgtttatttctccttatgaactttttaaggatatgatgagacactaacttaagaaaatactggtctttggaaaacaaaacaaaacttatgtaactgttgcatctctcaggcattgtttacgctataggttttagccaaattttacttagcagaaaaatcatctatttgcaagactttattttcccagagatggacgaaagtaaattttcaacctaaatgaagtaaaacttgtttaacagaaaaaaaaaaaaaaaa

SEQ ID NO: 5751 - DNA, 1440 bp, Canis familiaris
gccggggccatggagctgctaaagctgaaccggagcgcgcaggggtccggagccgggccgggggcttccctgtgccgcgcggggggcgccctcctcaacagcagcggtgcgggcaatctcagctgcgagccgcctcgcctccgcggagccgggacacgagaattggagctggccattagggtcaccctttatgcagtgatctttctgatgagtgttggaggaaatgtgctcatcatcgtggtcctgggactgagtcgccggctgaggactgtcaccaacgccttcctgctctcactggcagtcagcgacctcctgctggctgtggcttgcatgcccttcaccctcctgcccaatctcatgggcacgttcatctttggcacagtcgtctgtaaggcagtttcctacctcatgggggtgtctgtgagtgtgtccacactaagccttgtggccatcgccctggagcgatacagcgccatctgccggccgctacaagcacgcgtgtggcagacgcgttcccatgcggctcgtgtgatcatcgccacttggatgctctctggactgctcatggtgccctacccggtgtacaccgccgtacagcccgcaggaggggcccgggcgctgcagtgcgtgcatcgttggcccagtgcgcgtgtccgccaaacctggtcggtactgctgctcctgcttttgttcttcgtcccaggcgtggttatggctgtggcctacgggctcatctcccgcgagctctacttagggcttcgcttcgacgaggacagcgacagcgaaagccgagtccgaagccaaggagggctgcggggtggggcgggaccaggtcctgccccccccaatgggagttgccggccggagggcgggctggctggcgaggacggcgacggctgctacgtgcagcttccgcgctcgcgtcagaccctggagctgtccgcgctgaccgcgcccactcctgggcccggaggtggcccccggccctaccaggccaagctgttggccaagaagcgcgtggtgcggatgctgctggtgatcgtcgtgctttttttcctgtgttggttgccactgtatagtgccaacacgtggcgtgccttcgacagctctggtgcacaccgcgcactttcaggagcgccaatctctttcatccacttgctgagctacgcctcagcctgcgtcaaccccctggtctactgcttcatgcaccgtcgcttccgccaggcctgccttgagacgtgtgcccgctgctgccccaggcctccacgagctcgcccccggccccttccagacgaggaccctcccaccccttccattgcttcactgtccagactgagctacaccaccatcagcacgctagggcctggctgaggggtagggggagagtggaggctgagacgggacacacccattcctacaggcagggacccacccagacac

SEQ ID NO: 5752 - DNA, 2391 bp, Canis familiaris
gtgatcttcacaagtgccaaactcctttgcttcagtgtcctgatttttgaattaataaagcagaaagaagtggcaggatggacctataattacagcacgaaagcgtattcatggaattattcccggattttctgccagaagcactacacagatttagtggccatccagaataaaaaagaaattgcttacctcaatgatgtcataccttactacaactcctactactggattgggatccgaaagatcaatgataaatggacctgggtgggaaccaaaaagcctctcaccgaagaggccgagaactgggctgaaaatgagcccaacaacaaaaagaacaatcaggactgtgtggagatctacatcaagagcttgtcggcccctggcaagtggaatgatgagccctgctggaaaaggaagcgggcgctatgctatacagcctcctgccaggacatgtcctgtagcaagcaaggagaatgcattgagaccatcgggaactacacctgctcctgtttccccggattctatggatcagaatgtgaatatgtcagagagtgtggggattttgatcttccacagcatgtgctcatgaactgcagccaccctctaggaaacttctctttcaattcagagtgcagcttctactgcactgaagggtacgaattgaatggacccagcaagctggaatgcttggcttctggaacctggacaaataagccaccacgatgtgtagctacccagtgtccacccctaaagactcctgagcaaggaagcatgaactgtcttcactctgtcgaagcattccagtatcaatccagctgccactttagttgtgaagagggatttgcattagttgggccagaggtggtacagtgcacggcctcagggatgtggacggctgcagccccagtgtgtgaagctgttgcctgtgggccactgaagagtcctgttcatggaagcatggattgctccccatcctcgagagcatttcagtacaacaccagctgtcgcttccattgtgctgagggtttcaggctggaaggagctgacctagtccagtgtactgacttgggacagtggacagcaccagcccctgcctgtcaagctctgcagtgccaggatcttctggctccaaacaaggcccaggtgaactgctcccacccatttggtgcctttaggtaccaatcaacctgcagcttcacctgtgatgaaggcttactcctggtgggagcaagcatgctgcaatgctcgggtacagggaactggagtgctcctcccccagaatgtcaagccatgagctgcacacctctgctaagccctcacaatggaacaatgagctgtgtccagcctcttggaaattccagttataggtccacatgtcgattcacctgtaatgaaggattctctttatctggaccagaaatattggattgtactccatctggacattggacaggctcctcaccaacatgtgaagccatcagatgcccagaattatttgctccagagcgaggaagcctggcttgttctgacactcataaggaattcagcgttggctccacctgtcatttctcctgtaacaggggctttaagctggagggattcaataatgttgaatgcacagctttgggaaaatggacagcacctgcaccaatctgcaaagcaggcatagtgtcagctcctacttcaaaggttcagtgtccagccctcatcactccagagcaaggaacagtgtcctgtaggcaccatctgggaacctttggtctgaataccacttgctactttggatgcaaagctggattcatactcatgggagacagtgctctcagatgcagaccttcaggaaaatggacagcaggaacgccaacatgccaagctatcaaatgccctgagctgcatattattgagccaggcgtgatgaactgctccaatccttggggaaatttcagctatggatcaacctgtagcttccattgtccggagggccagttacttaatggatcagcgagaacagcatgccaagagaatggccaatggtcaactcccatgccagcctgcaaagcagggccattggcaatccaagaatccctgacttactttggtggagcagtggcttctgcaataggtttgatgacatgtgggacactcttggctctgctaagaaagcgcttcagacaaaaagatgatggggaaagccctttgaaccctcacagccatctaggaacatatggagtttttacgaatgctgcatttgacccaaccccttaagagacctgtcctgctggtctcctcactcaacctccacaggatcctatttttgaacaccagttttcctgccagacttgagttacactgtagcatattagctgcagttttctggtaatacttgtaagg

SEQ ID NO: 5753 - DNA, 4545 bp, Canis familiaris
gtgcccctgctcggccgcccgccgtcccccgggagacccccggcgcggcccgcgggggcggaggaagacgacgacgaccaggtcgcggggggcatgtccgggccccgcagcgcgagccccccgggctgcgcggcgacccgggggggcccggagcaccgcgcggcgtggggggaggcggaggcccgcgccaacggccacccgcacgccgccgggggcgcgacccgcggctgcagcaagaagcccgggggggcggtgaccccgcagctgcagcagcagcagcagcagcagcagcacgagcagcagcacgagcagcagcagcacgagcagcagcagcatgtgcagcagcagcagcgcctggccaagcgctggcgcggcgacgacgaccccccgctgggcggcgacgaccccctggccgggggcttcggcttcagcttccgctccaggtcggcctggcaggagcgcggcggcgacgactgcgggcgcggcagccggcggcggcggcggggcgcggcgggcgggggcagctcccgggcgccccctgcgggcggcggcggcggcccggcggcggcgggcggggcggaggtgcgcccccgctcggtggagctgggcctggacgagcggcggggccggggccgcgccgagcccgagcccgaggccgaggccggcgcccccgggggcgaccgcggggcgcgggacggcgacggccccgcagggccgggcgcctgctgccgcgcgctgctgcagatcttccgctccaagaagttcccgtcggacaagctggagcggctgtaccagcgctacttcttccgcctgaaccagagcagcctcaccatgctcatggccgtgctggtgctcgtgtgcctcgtgatgctggccttccacgcggcgcggcccccgctgcggctgccccacctggccgtgctggcggccgcggtcggggtcatcctggtcatggccgtgctctgcaaccgcgccgccttccaccaggaccacatgggcctggcctgctacgcgctcatcgccgtggtgctggccgtgcaggtggtgggcctgctgctgccccagccgcgcagcgcctccgagggcatctggtggaccgtgttcttcatctacaccatctacacgctgctgcccgtgcgcatgcgggccgccgtcctcagcggagtgctcctgtcggccctgcacctggccatcgccctgcgcgccaacgcccaggaccggttcctgctcaagcagctcgtctccaatgtcctcattttctcctgcaccaacatcgtgggtgtctgtacccactacccggctgaggtctcccagagacaggccttccaagagacccgggagtgcatccaggcacggctccactcgcaacgggagaaccagcaacaggagcggctcctgctgtctgtcctgccccgacacgttgccatggagatgaaagcagacatcaatgccaagcaggaggatatgatgttccataagatttacatccagaaacatgacaacgtgagcatcctgtttgctgacatcgagggcttcaccagcttggcatcccagtgcactgcccaggagctggtcatgacgctcaatgagctcttcgcccgcttcgacaagctggctgcggagaatcactgtttacgtattaagatcctgggggattgttattactgtgtctctgggctgcctgaagcgagggccgaccacgcccactgctgcgtggagatgggcatggacatgattgaggccatctcgttggtccgggaggtgacaggggtgaacgtgaacatgcgcgtgggaattcacagcgggcgagtacactgcggtgtccttggtctcaggaagtggcagttcgacgtctggtctaatgacgtcacgctggccaaccatatggaagctggaggcaaggctgggcgcatccacatcaccaaggccacactcagctacctgaacggtgactacgaggtggagccaggctgcgggggcgagcgcaacgcctacctcaaggagcacagtatcgagaccttcctcatcctgcgctgcacccagaagcggaaagaagaaaaggccatgatcgccaagatgaatcgccagagaaccaactccattgggcacaacccgccccactggggggccgaacgtcccttctacaaccacctaggaggcaaccaggtgtccaaggagatgaagcgcatgggcttcgaagaccccaaggacaagaacgcccaggaaagtgcgaaccctgaggatgaagtggatgaatttctgggccgcgccattgacgccaggagcatcgacaggctgcggtcggagcacgtccgcaagttcctcctgaccttcagggagcctgacttagaaaagaagtactccaagcaggtggatgaccgattcggtgcctacgtggcatgtgcctcgcttgtcttcctcttcatctgctttgtccagatcaccatcgtaccccactccgtgttcatgttgagtttctacttgacctgtttcctgctgctgacgttggtggtatttgtgtccgtgatctattcctgcgtgaagctcttcccgggcccgctccagagcctctcgaggaagatcgtgcgctccaagaccaacagcaccctggtcggggtgttcaccatcaccctggtgttcctgtcggctttcgtcaacatgttcatgtgtaactccgaggacctgttgggctgcctggcggacgagcacaacatcagcaccagccgggtcaacgcgtgccacgtggcggcgtcggcggccaacctcagcctgggcgacgagcagggcttctgcggcacgccctggcccagctgcaacttccccgagtacttcacctacagcgtgctgctcagcctgctggcctgctccgtgttcctgcagatcagctgcatcgggaagctggtgctcatgctggccattgagctcatatacgtgctcgtcgtcgaggtgccccgggtcacactgtttgacaacgctgacctgctggtcaccgccaacgccatagacttcaacaacaacaacgggacctcgcagtgccctgagcacgcgaccaaggtggcgctgaaggtggtgacgcccatcatcatctccgtcttcgtgctggccctgtacctgcatgcccagcaagtggagtccaccgcccgcctcgacttcctctggaaactgcaggccacggaggagaaggaggagatggaggagctgcaggcctacaaccggcggctgctgcacaacatcctgcccaaggacgtggctgcccacttcctggcccgtgagcgacgcaacgacgagctctactaccagtcgtgcgagtgcgtggctgtcatgttcgcctccatcgccaacttctccgagttctacgtggagcttgaggccaacaatgagggtgtcgagtgcctgcgcgtgctcaatgagatcatcgctgactttgatgagatcatcagcgaggatcggttcaggcagctggagaagatcaagaccattggcagcacctacatggccgcctcaggcctcaatgactctacatacgacaaggtgggcaagacccacatcaaagccctggctgactttgccatgaagctcatggaccaaatgaagtacatcaatgagcactccttcaacaacttccagatgaagatcgggctcaacatcggccccgtggtggccggggtgatcggggctcgcaagcctcagtacgacatctggggcaatacggtgaatgtggccagccgcatggacagcaccggcgtgccggaccgcatccaggtcaccacggacatgtaccaggtgttggctgccaacacgtaccagctggagtgcaggggtgtggtcaaggtcaagggcaaaggcgagatgatgacctacttcctcaacggtgggcccccgctcagttagcagctgccaactggtgatgccaggccgcctggcctcctgagaaacggaaatggcttctttgtgtgccggtgggcaggtggaagcctgcgctctagcccgtgtggccgcgccggtgagattttccactttgactccagaagcagcttctgcctttgtgggcagcccaggccctggggcgccagcgtcctgcgagcaccaagctgaccaaagatgtttcctccgtggaagactccgccaggcgtgatctgagtctcgagttttctaacgggtgctgctactgcacgggtagaaaggagctgctggagctctggcggcgtgtggtagccaggcgtgcggcgacagggctgacggggaggcctcggctgggggacccagggccccgctttcctgtgtgagcatttcagcttccgccagagcgcacggcccctgccccacggaggcgttctggcgggagtgctggctgtggaggggctgcggcttctcgcagtcctcctcctgcacccgcacacgtagacgacgcctcgtcgaggggaacggaacgaagtgcgagggggaggcgagaggactcgaggcaaggaggggtggttctgagaaaaagaatatttattaaataaaacaactttctgtgcccttaaaaaaaaaaaaaaaaaaaaa

SEQ ID NO: 5754 - DNA, 2642 bp, Canis familiaris
ggcaaaccatggagctcagcgtccttctcctccttgctctcctcacggggctcttgcttctgatggccaggggccacccaaaggcttatggccacctcccaccaggcccccgtcctctgcccatcttggggaactttcttcagatggacagaaaaggcttactcaaatccttcctcaggctccaagagaaatatggggatgttttcacggtgtacctggggccaagacgcacggtcatgctatgtgggatagacgccatacgggaggccctggtggacaatgctgaggccttctctggccggggaaaaattgctgtagtggagccagtcttccagggatacggtgtagtctttgccaatggggaacgctggaagactcttcgccgattctctctggccaccatgagggacttcgggatggggaagcggagtgtggaggagcggattcaggaggaggctcagtgtctggtggaagagctgcggaaaactgagggagtcctccaggaccccaccttcttcttccactccatgaccgccaacatcatctgctccattgtctttggaaaacgctttggctacaaagaccctgagttcctgcgcctgatgaacttgttctatgtgtccttcgcactcatcagctctttctccagccagatgttcgagcttttccacagcttcttgaagtactttcctggcacacacaggcaggtctacaataacctgcaggaaatcaaagccttcattgcccgcatggtggagaagcaccgggaaaccctggaccccagcgctccgcgggacttcatcgacgcctacctgatccgcatggacaaagagaaggccgagcccagcagcgagttccaccatcggaacctcatagacacggcgctctcgctcttcttcgccggcacggagaccaccagcaccacgctccgctacggattcctactcatgctcaaatacccccacatcgcagaaagaatctacaaggagattgaccaggtgattggcccacaccgtcttccttcccttgatgaccgagccaaaatgccatacactgatgcagtcatccacgagattcagagatttggggaccttctccccattggcgtgccccatatggtcaccaaagatatttgcttcagagggtacattattcccaagggcactgaagtatttcccatcctgcactctgctctcaatgatccccattactttgaaaaaccagatgtcttcaaccctgaccactttctggatgccaatggagcactgaagaagaatgaagcatttatccccttctccatagggaagcgcatttgtcttggtgaaggcatcgcccgcatggaattattcctcttcttcaccaccatcctccagaacttctctgtggccagccccatggcccctgaggacattgacctcacaccccaggagataggtgtgggcaaattgcccccagtgtaccagatcagctttctgtctcgtggagggtgctgagggaaggggggtcaaaggattccaggatcatgaaatatgtccactacttcagagaacagctgcttgcctctctctgggtcttcctgccactgaaagacccacttccagccagtgtccttcccctccttgattgctgcctccctgggaaattcctctctgccatctcatctcaccccatcattctgcagctcttgtaaagactcatgggggtgtgtttctttcctttgtcaataaagttacatatgtggtgtagagctagaagctggggattaaggggagatttgactcaggtgctctctgcatttctgcctcccaaaccacagcttcccccagtgactcctcccatcctcagaacaaccaccacctccactgagcaaccatttgtgctccatgatctgtgcctatgtgagctcacttgaatcttccttcagtagtcccatgggatggctacagtgattgtgttttacagacgagtaaacaaaggccaggcactggcatcagttttcccagatcatatggctgggagtggaggagcaagattcacactctgtctccctggttctcaaactcaaattcttcacctaaccacaacccccattatatttttaaattatagtaaaattcacatcacataaaacaagtgttttaaagtgtataatttagtggcattgagttcattcgcaatgttgtacaaccaccaccactatcgagttccaaacattttcatcactcaagaagaaaaccccttacccagtaacagtcactctccatttcccttccccctcagcccctggcaaacaccaatctgcttccagtctctgtggctttgcctattctatgtatcttatgtaaatggaatcatacaatatgtgctctgttgtgtctggcttctttcactcaggataatatttttgagattcatccacattgtagaccattgctgtaccctactgtcctcattcttactgactctccttactgcttccctctgtgcaaagggctccttggctccttggcccatgggctccaggcccatgattctaatctagtgcctaaactggtttctttacagtgcccttcaattctctgaaactcaaataaacatcaaaagcctgacatcccctggtcaggtggtgagccaaaaaaaaa

SEQ ID NO: 5755 - DNA, 4046 bp, Canis familiaris
cggccgggcgggctgcgggcggcgaggctcgccggggcgcgggcggcggggggcgcggggcggccggccgggccggagcccggggggcggcggggcggggtccggggcggcgcggagcggggccggcagcatgtcgtggtttagtggcctcctggtccccaaagtggatgaacggaagacagcctggggtgaacgcaatgggcagaagcgtccacgccgcgggactcggaccagtggcttctgcacgccccgctatatgagctgcctccgggatgcgcagccccccagtcccacccctgcggctccccctcggtgcccctggcaggatgaggccttcatccggagaggcggcccgggcaagggcacggagctggggctgcgggcggtggccctgggcttcgaggacactgaggccatgtcagcggttggggcagctggaggtggccctgacgtgacccccgggagtaggcgatcctgctggcgccgtctggcccaggtgttccagtcgaagcagttccgctcggccaagctggagcgcctgtaccagcggtacttctttcagatgaaccagagcagcctgacgctgctgatggcggtgctggtgctgctgacagcggtgctgctagccttccatgctgcacctgcccgccctcagcctgcctacgtggccctgctggcctgtgccgccaccctcttcgtggcgctcatggtggtgtgtaaccggcacagctttcgccaggactccatgtgggtggtgagctacgtggtgctgggcatcctggcagccgttcaggttgggggtgccctggcagccaacccccgcagcccctctgtgggcctctggtgccctgtgttttttgtctacatcacctacacgctcctacccatccgcatgcgggcagctgtcttcagtggcctgggcctgtccaccctgcatttgatcttggcctggcaactcaaccgcggtgacgccttcctctggaagcagctcggtgccaacatgctgctgttcctctgcaccaacgtcattggcatctgcacacactacccagctgaggtctctcagcgccaggcctttcaggagacccgcggttacattcaggcccggctgcacctgccagatgagaaccggcagcaggaacggctgctgctgtccgtgttgccccagcatgttgccatggagatgaaagaagatatcaacacaaagaaagaagacatgatgttccacaagatctacatccagaagcatgacaatgtcagcatcctgtttgcagacattgaaggcttcaccagcctggcgtcccagtgcaccgcgcaggagctggtcatgaccctgaacgagctcttcgcccggtttgacaagctggctgcggaaaatcactgcctgaggatcaagatcttaggggactgttactactgtgtgtcggggctgccggaggcccgggcagaccatgcccactgctgtgtggagatgggggtggacatgatcgaggccatctcgctggtgcgtgaggtgacaggtgtgaacgtgaacatgcgcgtgggcatccacagcgggcgtgtgcactgtggtgtccttggcctgcggaaatggcagttcgacgtgtggtccaatgacgtgactctggccaaccatatggaggcggcccgggccggccgcatccacatcacccgggccacgctgcagtacctgaacggggactacgaggtggagccgggccgcggtggcgagcggaacgcgtacctcaaggagcagcacatcgagaccttcctcatcctgggagccagccagaaacggaaagaggagaaggccatgctggccaagctgcagcggacgcgggccaactccatggaaggcctgatgccacgctgggtgcccgaccgcgccttctcccggaccaaggactccaaggctttccgccagatgggcattgatgattccagcaaagacaaccggggtgcccaagatgccctgaaccccgaggatgaggtcgatgagttcctgggccgtgccatcgatgcccgcagcatcgatcagctacggaaggaccatgtgcgccgcttcctgctcaccttccagagagaggatcttgaaaagaagtactcaaggaaggtggacccccgcttcggagcctacgtggcctgtgcgctgttggtcttctgcttcatctgctttatccagctcctcgtcttcccacactcaaccgtgatgcttgggatctacgccagtatctttgtgctgttgctgatcaccgtgctgacctgtgccgtgtactcctgtggctctctcttccccaaggccctgcgacgtctttcccgcagcatcgtccgctctcgggcacacagcactgtggttggcattttttcagtcttgctagtgttcacctctgccatcgccaacatgttcacctgtaaccacacccccatccggacctgtgcagcccggatgctgaatgtaacacccgctgacatcactgcctgccacctgcagcagctcaattactctctgggcctggatgctccgctgtgtgagggcaccgcacccacttgcagcttccctgagtacttcgttgggaacatgctgctgagtctcttggccagctctgttttcctgcacatcagtagcatcgggaagttggccatgatctttgtcctggggctcatttatttggtgctgcttctgctgggcccccccagcaccatctttgacaactatgacctgctgcttggtgtccatggcttggcttcttccaatgacacctttgatgggctggactgcccagctgcggggagggtggcactgaaatacatgacccctgtgattctgctggtgtttgccctggcgctgtatctgcacgcccagcaggtggaatcaactgcacgtctggacttcctctggaaactgcaggcaacgggggagaaggaggagatggaggagctccaggcctacaaccgaaggctgctgcataacattctgcctaaggacgtggctgcccacttcctggcccgggagcgccggaacgatgagctctactaccagtcgtgtgagtgtgtggccgtcatgtttgcctccattgccaacttttctgagttctatgtggagctggaggcaaacaatgagggtgtcgagtgcctgcggctgctcaacgaaatcatcgccgactttgatgagatcatcagcgaggagcggttccggcagctggagaaaatcaagacgatcggtagcacgtacatggctgcgtcggggctgaacgccagcacctacgatcaggccggccgctcccacatcactgccctggccgactatgccatgcggctcatggagcagatgaaacacatcaacgagcactccttcaacaacttccagatgaagattgggctgaacatgggcccagttgtggcaggcgtcattggggctcggaagccacagtatgacatctgggggaacacggtgaatgtctctagccgtatggacagcacgggggttcctgaccgaatccaggtgaccacggacttgtaccaggttctagctgccaaacggtaccagctggagtgtcgaggggtggtcaaggtgaagggcaagggggagatgaccacctacttcctcaatgggggcccccccagttagcagacgccagctacaagttcagctgtcaggaccaaggtgggcatttaagtggactctgtgctcgctggatggagctgtggccgggggcaccaagcctccagaccctgctgaccacaaaagggaacacctcagcaggctgtgcttggaccatgctcgtctgccctcaggctggtgaacaagggataccaagaggattatgcaagtgacttttacttttctaattggggtagggctggctgttccctctttcttcctgcttttgggagcaggggaggcagctgcagcagaggcagcaggagccctcctgcctgagggtttaaaatggcagcttgccatgcctaccctttcccctgtctgtctgggcaacagcatcggggctgggcccttcctttccctctttttcctgggaatattttgt

SEQ ID NO: 5756 - DNA, 6259 bp, Canis familiaris
cccaggtccagaacaacaaccttttgctgaggagcctccaaaacaaagtgaggaggacatggccaccaaggagaagttgcagtgtctgaaagactttcataaagacatcctgaagccatccccagggaagagcccaggcacccggcctgaagatgaggccgaggggaagccccctcagagggagaagtggtccagcaagatcgactttgtgctctctgtggctggtggctttgtcggcttgggcaacgtctggcggttcccgtacctctgctacaaaaatggtggaggtgcatttctcataccatattttattttcctgtttggcggcggcctgcctgtgtttttcctagaggtaatcataggccagtacacctctgaaggaggcatcacctgctgggaaaagatctgccccttgttctccggcatcggctatgcctccatcgtgatcgtgtccctcctgaatatatactatgtcatcatcctggcctgggccacctactacctgttccagtccttccaatcggagctgccctgggcacactgcaaccacagctggaatacgcctcagtgtatggaagacacgatgcgcaagaacaaaagcctgtggatcaccctcagcaccaagaacttcacttctcctgtcaccgagttctgggagcgcaacgtgctgagcttgtcttctggaattgacgaccctggctccttgaagtgggaccttgctctctgccttctccttgtctggctggtctgcttcttctgcatctggaagggtgtcaagtccacggggaaggttgtctacttcacggccactttcccgttcgctatgctcctggtgctgctggtccgtggactgacactgcccggtgctggcgcaggcatcaagttttatctgtaccccgacatcagccgcctcgaggacccgcaggtctggattgatgctgggacccaaatattcttctcctatgccatctgcctgggggccatgacctctctggggagctacaacaaatacaagtacaactcgtacagggactgtatgctgctgggatgcctgaacagtggtaccagttttgtgtctggcttcgcaattttttccatcctgggcttcatggcacaagagcaaggggtggacattgctgatgtggctgagtcagggcctggcctggccttcattgcctacccaaaagctgtgaccatgatgccgctgcccacgttttggtccattctcttttttattatgcttctcttgcttggactggatagccagtttgttgaagtcgaaggacaggtcacgtccttggtcgatctttacccatccttcctaaggaagggtttccgtcgggaaatcttcatcgccttcatgtgtagcatcagctacttgctgggtctgtcgatggtgacggagggtggcatgtatgtgtttcaactctttgactactatgcagctagcggtgtatgccttttgtgggttgcattctttgaatgttttgttattgcctggatatatggcagcgataacctttatgacggtattgaggacatgattggctatcggcctgggccctggatgaagtacagctgggccgtggtcactccagttctctgtgttggatgttttatcttctctctcgtcaagtacgtacccctgacctacaacaaagtctacgtgtaccccacctgggccatcgggctgggctggagtctggccttgtcctccatgatgtgtgtccccttggtcatggtcatccgcctctgccagacggaagggccgttcctcgtgagactcaagtacctgctgaccccgagggaacccaaccgctgggccgtggagcgcgagggggctacgccctacagctcccgcctggccgtgaacggggctctcatgaaaccgacccacatcatagtagagaccatgatgtgagctcttgggcagacgggccgcttccctgctgtttactaacattagattctcataggaccaggtttacagagctttctatttgcactaggattgttttttttttttaattgtcacagaaaatgttactctgtgtgtgtgtgtgttggtgtgtgtgtgtgtgtgtgtgtgtggtattgtgcgtatgtgtattttgttttgatttggggatattttgtacaaaaagaaaacccaccggcagatgtccgggacgaggcagagctttcatattgaattagatgtattttatgggaacttggtaaatttttctttgtattttttttacatataattatatatacatttagagattgtcatacagttttaccacttgaatcgatcttcttgccagcaatagatctcgtttttaaaagcaattcttcggtgcttgtgtagctggcagaaagttctgccccccaaaaacacagggtggaaccgacctggacagtagacccattttaagggtgtagtaccttctcagcctggttcgagtagaagcatatagtggggctgggggagtggggggaggccccactagctggccagacccagagaggctggagaaaggagggccacaagcttcaatgacacttgtcttagccaataagagaaatgccaaaataatggatcaacctctgagatcaagggattgacttaaggcagacagaggaggccgtacagcgcaagtccgattctctagaaaccgttgtaccagcagcaaaaccccacctggtacattgagatcgagggtggatagtcagaaggactgtcaggcaggttgtcagcaccagagggagcggcaagggctcccgggaggccggtgaggatggcaccctgacattcaggaggcggactgcttggctgccgcccatggccagcgcacgaggagccagggatctcagggccccaaacctcgcacagatggggctgttgtgttttatgggattctattgtgtcaggttctggccgtttccccgctgacatgtcttgcagctccgtgtaggagagaagcatgatgtatctggtgagggacgaggggtgagccagtggacctttgggtgtgggcccaggcgttcagagaggcctggtgtcagggaggggtgcttttctttcctcatctctccatcctcagctctgtcctcatctcccagaggctgggaaactcctgacaagctccccgcccagggctgccccagctcctagctggagtgccaagagtgtttctggaggctccctgaatcttggagtcgggctaagcgctcccaagccctcctccccattcgggcacaagagcagcccttggtggtggcttgggagatagtgaagctcttcaggacttcacaactcctgcagtagccggtgttggatgcacaccacgtggggaccgaggagaggaggcgagggagcattttctagaaaggtaggattgttcagggggctggcaccccagaactggcttggccaagagcctgatttagagcggcattcctctctgaagaagtagagaaggtactccacctttaaaatcctgagacggacacgtctccacccaagcccccatttggacctaaactgtgccatttaaactgtcacttccaagttcagagtctcaactcaaccaaaacattgtcatgcacaaacgccagtgactgcctcgtggggtgcggagggtgaagcccagctcaggtgttgagagcgggggctctctgaatcctggaaccctctccccaaatttgggaggggaggagcctctggtgtgtgccccctccccagaggcggaggcaaccctgaacctcttctctctggcaagcattcacatttcacatttcactgtttccaaaggatacactctgccaaacaatacccagtcctattccaaaccgttaacaattctgtgttcctgtttttctatgtatttatggttgccgctgtgtctgagttgattttgttgttgtgtcttttcctaattttactgagtagcaatgtgatctgttttccttcgtctcatggaacttagtaaactaaccactgtccacgattggggacaggtgatgtgtggggtcaaggggtgcttggtaagctgtggctgcctgggcatttgtggtcatctcaggctataatatctcccctccggtaaaaaggctacagtatttggggttggtaggtaaactgcaacattctggaaatggcctgagaaaggcttcttctcataagattcgcagaccaaattctagaccaaagacacaagcagaccaagtccccaggccctgctgaaggaaggtcagccactttccccgagcccctctcttgacaatctcccagtttacctgtctccaatcgggccctcttgtctactcccctggcccttgtgtgtctgcagaacttggctctgtgagtacaaggtgtaatgatgcgtgactttgatatgtctccacataaaggaaacttgtcattggagctcatgactctggtcctcctgtctctggagaacaggcagtccccccactctctgccttgggaatgggtcagaaattctggtgtccgcacctagcccagttggccagctctgggagggatgtaagggagatggttaaagacctttctgaggatgcagaaatgagtaagggccttaggctaaatctcacccagggagatgcttctctgagcctgccatgggctgtgtcggcccctccagggacagtcctgcacagtcagtcgctccccggtccgcgcccttggaaaatggggggcttctgcgaggcccggagcgcagaacagaccgggcacagcgggcagggactggaaccaggctgtcccgagtcagttccagttgcaggttctctgaggggtgtgtggcaagtggcaagtgcgtctccccagtgttctccctgaagacccgagacgagcctttatgaacaaggaagcgctctgtgccccagcattcagggacgaggagaagcacccctcaccccctccccatcctcaaaggtgtggctctgtaggacaggcgactgcctctgcccagccagagaggcagcaccccttcaccctggccctgcacccagtagccctctgagctaggaactgagatccctgttgcatatgaggaaactgaggcccagtgaagccagctgtggaaagaagcagaagtccttgggcaggatttagcctgaggctgtgcgggacattcccaggcagctagaagcagccttgggtgatttctgggtggcacacagccccctctctgtatctctcgttctcaccccagatccccagtgcacccctaaaggaggtggtgaagcacgaggggagcgagctgctctctgcctagcacacggtgatcttgcatcccccacaggccgccacggcacggcggtccatggtccagccggcttctccccaacactgcccttctggaaggggaaaagctctgggcagccagtgctcaaggcagaggtgccagccttcccctcgagcctagacacaggccaggacggatgcaagagaaagctcgaggcggctagaggtcccgtccagccccgagacccggtgccaggcagccccacgtaaatcgcaccgtgcaaaaatccaacaagcaccaaccaaacaaaatcccgagagcaaaactcagagaggggcgtgagtaacccggaagccagagaacagcatttccctcgccccccgccctgttaacgcctggccctcagaatgctcttgtttttaataggaagctgtttcattgttctcttgtgggtgtcactacagacgtgttctgacagttccctgagggatggagcatcttgttatatatttggcttcaaattgagatgttggctccgtttctccccccctccccccaattaattttcgaatccctagcaactgtgactgtatttagcacaagagaaagctgagatcgtgggtcttgcctccttccagaaatatgtctggctcatcaggactttttttaagacttcaaaatatttttaagatattttaaacttttgtaaaaaaaaaaaacaacaaccaacgagactcttctgaggaggaacatttgtatctgaataagatcctcggtgtataattcagtcttgcagtatacaagcttttgtgtataaatgttttatgatataatccctgtatttcgcagggctcttcttttcctcttttgctttttagataaatatgtatatcgatattttaaattcatctttgcttttttttagaggagtttgtaatcaccttataacatgaaaataaacatttcctttttaaaatccaaaaaacccacgcgtccgcgac

SEQ ID NO: 5757 - DNA, 742 bp, Canis familiaris
tcgccagctcccgaagcagggccttacccttatggtgacctctaacgtgggcaacagtgctacacacgagcaggggttccctgcagccaagttccctgttaaccacccaaacctcacgttttcctccctgatggtgacgagttcaggtcctggagacagcggcctctacttctgtggctacctacagggcgcgcgctacgagcagtatttcggcgccggcaccaggctcacggtcctcgaggatctgcagaaggtcacccctcccacggtcacagtgtttgaaccatcggaagcagagatctcgcggacccagaaggccacactcgtgtgcctggccacgggcttctaccccgaccacgtggagctgagctggtgggtgaacgggaaggaggtcacgagtgggttcagcaccgacccgcagccctacaaggagaggcccagcgagaatgactccagctactgtctgagcagccggctgagggtctctgcctccttctggcacaacccgcgcaaccacttccgctgccaagtccagttctatgggctcggggacgacgatgagtggaaatacgatagagtcaaacccatcacccagaacatcagtgctgaggcctggggcagagcagactgtggcttcacctcggtgtcctaccatcagggcgtcctgtctgccaccatcctctatgagatcctgctgggcaaggccacgctgtatgctgtgctggtcagcatcctggtgctg

SEQ ID NO: 5758 - DNA, 523 bp, Canis familiaris
tgtccagtatctaggagaagggccacagctcctcctgaaagcattaagagacaaggaaaaaggaagcagcaaaggttttgaagccaccttggacaaaacatccagatccttccacttgaagaaaggctcggtgcaactgtcagactcagctgtgtactactgtgccctgagagatcgaggatattatggaggcagccaaggacgactcatctttggaaaaggcactcaactctccgttaaaccaaatgtccaggaccctgacccctctgtgtaccagatgagaagccctaaaaccggtaggactgtctgcctgttcaccgattttgattctcaagctgatttccaaaaaccggagggggccacagtgatcagcttgaacagtactgtgctggacatgaaggttatggattccaagagcaatggggccctgacctggaacagcgagactaatattgaatgcaaggaaaacttccagcagcccttctaccccagttcaaactattcctgtgatgccaagttgtta

SEQ ID NO: 5759 - DNA, 2429 bp, Canis familiaris
ccaacgcgcaacccgcacgccgccgggggccgacccgcggctgcagcaagaagcccgggggggcggtgaccccgcagctgcagcagcagcagcagcagcagcagcacgagcagcagcacgagcagcagcagcacgagcagcagcagcatgtgcagcagcagcagcgcctggccaagcgctggcgcggcgacgacgaccccccgctgggcggcgacgaccccctggccgggggcttcggcttcagcttccgctccaggtcggcctggcaggagcgcggcggcgacgactgcgggcgcggcagccggcggcggcggcggggcgcggcgggcgggggcagctcccgggcgcccctgcgggcggcggcggcggcccggcggcggcgggcggggcggaggtgcgcccccgctcggtggagctgggcctggacgagcggcggggccggggccgcgccgagcccgagcccgaggccgaggccggcgcccccgggggcgaccgcggggcgcgggacggcgacggcccgcagggccggcggcctgctgccgcgcgctgctgcagatcttccgctccaagaagttcccgtcggacaagctggagcggctgtaccagcgctacttcttccgcctgaaccagagcagcctcaccatgctcatggccgtgctggtgctcgtgtgcctcgtgatgctggccttccacgcggcgcggcccccgctgcggctgccccacctggccgtgctggcggccgcggtcggggtcatcctggtcatggccgtgctctgcaaccgcgccgccttccaccaggaccacatgggcctggcctgctacgcgctcatcgccgtggtgctggccgtgcaggtggtgggcctgctgctgccccagccgcgcagcgcctccgagggcatctggtggaccgtgttcttcatctacaccatctacacgctgctgcccgtgcgcatgcgggccgccgtcctcagcggagtgctcctgtcggccctgcacctggccatcgccctgcgcgccaacgcccaggaccggttcctgctcaagcagctcgtctccaatgtcctcattttctcctgcaccaacatcgtgggtgtctgtacccactacccggctgaggtctcccagagacaggccttccaagagacccgggagtgcatccaggcacggctccactcgcaacgggagaaccagcaacaggagcggctcctgctgtctgtcctgccccgacacgttgccatggagatgaaagcagacatcaatgccaagcaggaggatatgatgttccataagatttacatccagaaacatgacaacgtgagcatcctgtttgctgacatcgagggcttcaccagcttggcatcccagtgcactgcccaggagctggtcatgacgctcaatgagctcttcgcccgcttcgacaagctggctgcggagaatcactgtttacgtattaagatcctgggggattgttattactgtgtctctgggctgcctgaagcgagggccgaccacgcccactgctgcgtggagatgggcatggacatgattgaggccatctcgttggtccgggaggtgacaggggtgaacgtgaacatgcgcgtgggaattcacagcgggcgagtacactgcggtgtccttggtctcaggaagtggcagttcgacgtctggtctaatgacgtcacgctggccaaccatatggaagctggaggcaaggctgggcgcatccacatcaccaaggccacactcagctacctgaacggtgactacgaggtggagccaggctgcgggggcgagcgcaacgcctacctcaaggagcacagtatcgagaccttcctcatcctgcgctgcacccagaagcgggtccggcggggtggggggggcccaaggccggggggggcggatagcccggggtggtggggggcctcggcagggccttagtcttcccgggaaggaatgtttcttggcatccgcttccttctcgtctccgtgtctccttgagtcaagtggtggatccctcgtgccgctgcggctcctgcatcccgggaagcacatcgagtgcttgcacccggagggcttgcaaaggctgacggcagacggggatcctttcattttcccaccgttgcagaaatgcaacaggcctgaaatcagttagcagcggcacagcggcaggccagggcgtgggaatggaacagccaggagatctgtccccggccactgtctgtgcatttgtttcacgtccgccccgctcctggtctgttgcctgaaccaggcggacatcgggcctgtctctgtctctccgtctctcacctgtctctgccagtccctacagacgttcgggtctccggaggacctccgtcctttccctttctcctccctccctttgtcccagcccacactcagcccaaatataaaactgaattattagcagg

SEQ ID NO: 5760 - DNA, 825 bp, Canis familiaris
atgaagaagacacaaacttggattatcacttgcatttatcttcagctgctcctatttaatcctctggtcaaaactaaagggatctgcgggaaacgtgtgactgatgatgtgaaggacgttacaaaattggtggcaaatcttccaaaagactataagatagccctcaaatatgtccccgggatggatgttttgcctagtcattgttggataagcgtgatggtggaacagttgtcagtcagcttgactgatcttctggacaagttttcaaatatttctgaaggcctgagtaattattctatcatagacaaacttgtgaaaatagtggatgatcttgtggagtgcacagaaggatactcatttgagaatgtaaaaaaagcacctaagagcccagaactcaggctttttactcctgaagaattctttagaatttttaatagatccatcgatgcctttaaggacttggagacggtggcatctaaaagtagtgaatgtgtggtttcttcaaccttaagtcctgataaagattccagagtcagtgtcacaaaaccatttatgttaccccctgttgcagccagctcccttaggaatgacagcagtagcagtaataggaaggcctcaaattccattggagactccaacttacaatgggcagccatggcattgccagcattcttttctcttgtaattgggtttgcttttggagccttatactggaagaagaaacaaccaaatctcacaaggacagttgaaaatatacagattaatgaagaggataatgaaataagtatgttgcaagagaaagagagggagtttcaagaggtgtaa

SEQ ID NO: 5761 - DNA, 1889 bp, Canis familiaris
ttccagcagcagcagctgtcagctgctatggcagacaccttcctggagcacctgtgcctgctggacatcgactcggagcctgtggccgcccgcagtaccagcatcattgccaccatcgggccagcctctcattcggtggagcgcctcaaggagatgatcaaggccgggatgaacattgcgcgcctcaacttctcccacggctcccatgagtaccatgctcagtccatcgccaacatccgggaggccgtggagagctttgcaacttctccgctcggctatcgccccgtggccattgccctggacaccaagggaccggagatacggaccggggtcctgaaggggggccctgagaccgaagtggagctagtgaagggctcctgggtcctggtgaccgtggacccggcgttccggacgctgggggacgcacacaccgtgtgggtggactatcccaatatcgtcaaggtcgtgccggtgggaggccgcatcttcatagacgacgggctcatctccctgcaggtcaagaaaatagaccggaaggggctggagacccaagtggagaatggaggtctcctgggcagccggaaaggcgtaaacctgccaggcgccgaggtggacttgccggggctgtctgagcaagacgcccaggacctacgcttcggggtggagcataatgtggacatcgtctttgcctcctttgtgaggaaagccagtgatgtggctgccatccgggctgctctggggccggaaggacggaccatcaagatcattagcaaaattgagaaccacgaaggcgtgaagaagtttgatgaaatcctggaggtgagtgacggcatcatggtggcacggggcgacctaggcatcgagatccctgctgagaaggttttcctggcccagaagatgatgattggtcggtgcaacttggcgggcaagcctgtcgtctgtgccacacagatgctggagagcatgatcactaagccccggccaacccgggcagagacgagtgatgtagccaatgctgtgctggatggagcagattgcatcatgctatcaggggagaccgccaagggcaaatttcctgtggaggctgtaaagatgcagcatcggattgccagggaggcagaggctgctgtgtaccaccggcagctgtttgaggaactgcgccgggcagcgccactgagccgcgatcccacggaggtcactgccatagccacggtggaggccgccttcaagtgctgtgctgctgccatcatcgtgctgaccaagaccggccgttcagcacagctgctatctcggtaccggcctcgggcagcggtcattgctgtcacccgctctgcccaggctgcccggcaggcccacctgtgccgaggggtcttccccttgctctacagtgaacctccagaggccatctgggcagacgatgtggatcgccgggtccaatttggcattgaaagtggaaagctccgtggcttcctccgtgtgggggacctggtgattgtggtgacaggctggcgacctggctctggctataccaacatcatgcgagtgctcagcatatcctgagatgccacgccccactgacccagcccaacctggatcccatgccccagaccccaaggtccccttgcagtcctccctgctgaggccacatccattctagggtgccccttcccctctccatttcacgcaggaccccaaagtctgttgtccagttaagcactgaccatctggcaagtaccaatcctacattccctgcactcaatgctctcagtgggccctaagatgctctgagcccttaatcctagcttaactggttaattctatgcccctagggttcaatatacccaggatgggtggggacaaggacaggcattcacaagcatatgagatag

SEQ ID NO: 5762 - DNA, 364 bp, Canis familiaris
tgcaaccttctctgatactgtagagagtgcagccaggaggacgggtgagaaggcagaggtactgctagcctgcccttcccaggtctggatacctccgggtcctccccttactcttgcaccaagagtaaactccgtaggaaaaaaaccctgacaagtagcaagagtcctcctccccacgtgggtaggcccttcctgcgactcaccaggtagacctccccaggtaggctgagggctccacgcactgctgcctgccagtggagctgagcaaggagcacaggcgccagcagggaggccttgctccttcctctctccctatgaggagatgtggagacagatggacaaaggaatggctgaataaaatgaa

SEQ ID NO: 5763 - DNA, 516 bp, Canis familiaris
acttcctccgcctggggaacctcaacaagagccccgctgctcccctcctgcccgcctcttcacctgtcgctggcggcacgggcagccgctttcgccggacgaggcgccgcaactttttccgcgcgttgctgcagcacctgccgctgccccgccgccagctcgacagccccgctggtcccgccgagcggaggagaacgccctcggcagccgccaagagaccccggagaggagagacgatccgaggaacctcccatctcgctggatctcaccttccacctcctccgagaagtcttggaaatgccaggggccgagcagttagcgcagcaagctcacagcaacaggaaactgatggagattattgggaaataaaacggtgcgtttggccaaaaagatgcagcatttagcacacacacacaaaaaaaattaaaataatacagtattctgtaccatatcgttgctctgataccatttgtttatttttttaaagcttgaagcctagacgatgtacaagcaaga

SEQ ID NO: 5764 - DNA, 180 bp, Canis familiaris
agcacagcaacagaggagagcacagaaggcccttctggaacggaagtgccctcagtctcagaggagccatccccctcagaggagccattcccctgggaggagttgtccacactttcacccccagggcccagtgggactgagctgccaggctctggggaggcatctggggtacctgaagtc

SEQ ID NO: 5765 - DNA, 286 bp, Canis familiaris
ggtggtgtggcctgaggacaacggcagaaagatgatccttttgtaccacctggtggtgatcgtcctcatctacgtgctgcctctcttggtgatgatcgtcgcctacagtgtcatcggcctcactctctggagacgcgaggttcccaggcaccaggtgcacggcgccagcctgcgccacctgtgagccaagaagaagtttgtcaagagcaatgtgctggtagatggtgcacattagcaatctgctgtggtgcccaccctctactacaacctcacagtttccagagga

SEQ ID NO: 5766 - DNA, 275 bp, Canis familiaris
aagccagatgtctgcaaaagcaaccaagatggtcatcggaagtattcggattctagcattcctacttgccttccctcagtgtctttactccaaaattaaagtcatgccaggccgtaccctttgttatgtgcaatggccagaaggtcccaaacaacattccactcaccatatcattgtcattatactggtattctgcttcccattgctcatcatgggcgtcacatacaccattgttggaattactctctggggaggagagatcccaggagatccct

SEQ ID NO: 5767 - DNA, 279 bp, Canis familiaris
ccttccacctctacttcctcctgcctcacatcaaccctgatctctacctggagaagtttattcaccaggtctacctgggcatcatgtggctggccatgagctccaccatgtacaaccccatcatctactgctgcctcaacgacaggttccgtctgggcttcaaacatgccttccggtgctgcccctttatcagcgccggcgactacgaggggctcgaaatgaaatccacccggtacctccaaacccagggcagcgtgtacaaagtcagccgcctgggga

SEQ ID NO: 5768 - DNA, 161 bp, Canis familiaris
taatttcatctccttcatggtcattgctttctccaagagatgttgcaatgagcgtgtgcacatgttcaccatctggctgggctatatcaactcccctcatttatcccttacgctgaacccatgcaatgaaaactcaagacattcaggattctggacattga

SEQ ID NO: 5769 - DNA, 1260 bp, Canis familiaris
atgggaaagcagtctttccaagaactttctgcaaggctcgctgagatgatttatacaatgaagaaagaacagatattttgggtgtctacatatctgctgcttaattgtgcctctgcccctcttaatgccgtccttgatgaaagtgaagaatatcccggaattacagatgagttgccaccactgagacttttacattcgttttgtgctttgaaagcggataatggcccatgcagagcaatgattaggaattattttttcaacattcacactcaacagtgcgaagaatttatatatgggggatgtgaaggaaatcaaaatcgatttgaaagtctggaagagtgcgaagaaaaatgtgtaagagtttatccaaaggctaagacggagacattagaaaaagttctagaaaagccagattactgccatatgaacgaagacagcggactctgtcgaggttttgtcactaggtattattataacaacgtgtcaagtaaatgcgaaggcttcaagtacggcgggtgccttggcaatctaaacaactttgaaacgctggaacaatgcaagaacacctgcgagggcagcattgatttgctgatggatgagacagtgaataatacaggatcgcctgggtctatgaataatacatccctgtttaattctggggatagcctgttaccagctgattctggggatagcatgccacctgattctgagattggtggattacaacacgattctgagagtggtggattacaacacgattctgagagtggtggattacaacacgattctgagagtggtggattacaacacgattctgagagtggtggattacaacacgattctgagagtggtggattacaacacgattctggggataatacatcacctccggtttctgtgaataatgactctttcactccccggcctcccacggtttccagctttttagagttctacggtccttcctggtgtctgaccccagcagacagagggctgtgtcacgccaacgagagccgattctactataattcagtcattgggaaatgccgcccttttaagtacagtggatgtggagggaatgaaaataatttcacttctaaaaaagcatgccttacagcttgcaaaaaaggtttcatgcaaagaatatcaaaaggaggattaattaagaccaaaagaaaaagaaagaagcagaccgtgaaaatagtatatgaaaaaatttttgttaaaaaactataaatttgttacactattacatcagct

SEQ ID NO: 5770 - DNA, 552 bp, Canis familiaris
caccatgcctgcctgccgccccggtcctctggccggcgccctgctcctgggcctgctgctgctcggcctcccccgggtcccaggcggagaagtggagaagaccggcgtgtgcccccagctacaggcggacctgaactgtacgcaggagtgcgtctcggacgcccagtgcgcagacaacctcaagtgctgccaggccggctgcgccaccatttgtcacctgcccaacgaaaaggagggttcctgcccccaggtgaacactgacttcccccagctcggcctctgtcaggaccagtgccaggtggacagtcactgtccaggcctgttaaaatgctgctacaatggttgcgggaaggtgtcctgtgtcactcccatcttctgagctccagccaccatagcccaaggagtgggggagtggaagtttctgtccagccctgcctggctccagctcggctccaggcccgccgtcctcttgtctttctggcctgtacacccgctccagagctaagcgcagcttcttccttttccaaccaataaagtgaccgcttccagcaa

SEQ ID NO: 5771 - DNA, 1222 bp, Canis familiaris
ggcacgagcggcacgaggcgatgcgtctcttggtcgccgcgttcctgctcctggcgctcggcgacctcggccctggcggagcggtgcatttcaaggactgtggttctgcagttggagttataaaagaactgaatgtgaacccatgccctgcccagccttgcaaactgcacaaaggccaatcttacagtgtcaatgtcaccttcaccagtaatattccatctcaaagtagcaaagccgtggtgcatggcatcgtgttgggcgtcgcagttccctttcccattcctgaggctgatggttgtaagagtggaatcaactgccccatccagaaagataagacctacagctacctgaacaaactgccagtgaagaacgaatacccctctataaaactggtggtgcagtggatgcttctgggcgacaacaatcagcatctcttctgctgggaaatcccagttcagattgaaggctagtgctgtttaggccagtatgtcatctgggggtgagagagcacagtggagggaggaggagaaatcagtctaactaatacgtgccataagacgaaggaatttccacaccaccattttatgcttctcagcctccagaaggttccagacctgttcctgagagctcagaactattgcccttgtaatatcttctttgaagggttagagggaagaagagagagggagggataggcatgaatttaattgtcctcagtgtttcttgctgttggaatacggagggtccagcgggtcaggacccaaatgaggctgcacagggcccttggataatttgccctcgggtgatcagtctttgcagcggaggacgggttcccaacctccctcacctcctgggatattacatccgcaagttcctcatctccaagtgcctccttgagttccgtacattggccagcaagtctgcgtacctgtgacagcacctccagctctgctgcttcaacaacaggtactggctgtccagtggtgcccagcatgtcaatggaggggacatgctcaaccacagaaactcacgtctgagtggccagttctctatagttctctcctgtctccttttctgtctaaggtggttttcattaaatgcagcacttgattagcagatgtttgattttttttttttttaacaacactaacttgtggcctctttgtgcaactggaaatgtccttttgaataaataaaactttggtggtcttgtcttctgcaa

SEQ ID NO: 5772 - DNA, 484 bp, Canis familiaris
ctcatctctaaaagctatcaagacagccaccaagattctccaaagatgaagggcttcctcttcctcctacttaccatcagtctcctggttatgattcagatacaaactggagtcctggggaacagtaccactcctcgaatgaccaccaagaaagtcaagagtgcgaccccagcactcagcagcctgggcggtggcagtgtccttctcttcttggccaacaccctcatccagctcttctacctcagctgaggtgacatgcctcagccctagccctgtgccccctgagatagctgccaccatcgctagcgagagaagctccccccacccaccaccacaggtccaggaggggtggatgccagagatcaccaggttgttggaattaaacggtagtgccttggaggcaatgaccgacacagggaggtactgatacggaggggcaagcaccacccagctgggggtcaataaacatgtcctgtactcggaa

SEQ ID NO: 5773 - DNA, 174 bp, Canis familiaris
tcagctacacctagatagacgttaaatgataattaaaatgctgtaaccaacttatctaataaaatcggcacccagccactattttgttgactatgagaaagtttaagtttatgttaatttttagggtctgatagaatatttcatgtgtattacagtggtattcatatgctatgt

SEQ ID NO: 5774 - DNA, 1742 bp, Canis familiaris
cgtagggggcctgacgggggggtaggcgccggaaggctggggggcccgaagccgggcccgcgtggcccgagttccggtgagcggccggcggggcgcagcaaatgggctgtattaaaagtaaggaagacaaaggaccagcaatcaagtacagaaacactccagagcctgtcagtgtgagccattacggagcagaacccactcaagcaacaccgtggccgtcatcatcaggatggggaactgcttttaatttcagcagtctttccatgacaggatttggaggatcctcaggggtaacgccttttggaggtgcatcttcctcattttcagtggtgccaagtccatatcctgctggtttaacaggtggtgttactatatttgtggccttatatgattatgaagctagaactacagaagacctttcatttaagggaggtgaaagatttcaaataattaacaatacggaaggagattggtgggaagcaagatcaatcgctacaggaaagaatggttatatcccgagcaattatgtagcgcctgcagattccattgctgcagaagaatggtattttggcaaaatggggagaaaagatgctgaaagattacttttgaatcctggaaatcaacgaggtattttcttagtaagagagagtgaaacaactaaaggtgcttattccctttctattcgtgattgggatgagataaggggtgacaatgtgaaacactacaaaattaggaaacttgacaatggtggatactatatcacaaccagagcacaatttgatactctgcagaaattggtgaaacactccacagaacatgctgatggtttatgccacaagttgacaactgtgtgtccaactgtgaaacctcagactcaaggtctagcaaaagatgcttgggaaatccctcgagaatctttgagactagaggttaaactaggacaaggatgtttcggcgaagtgtggatgggaacatggaatggaaccacgaaagtagcaatcaaaacactaaaactaggtacaatgatgccagaagctttccttcaagaagctcagataatgaaaaaattaagacatgataaacttgttccactatatgctgtcgtttctgaagaaccaatttacattgtcactgaatttatgtcaaaaggaagcttattagatttccttaaggaaggagatggaaagtatttgaagcttccacagctggttgatatggctgctcagattgctgatggtatggcatatattgaaagaatgaactatattcaccgagatcttcgggctgctaatattcttgtaggagaaaatcttgtgtgcaaaatagcagactttggtttagcaaggttaattgaagacaatgaatacacagcaagacaaggtgcaaaatttccaatcaaatggacagctcctgaagctgcactgtatggtcggtttacaataaagtctgatgtctggtcatttggaattctgcaaacagaactaacaacaaagggccgagtgccatatccaggtatggtgaaccgtgaagtcctagaacaagtggagcgaggatacaggatgccttgccctcagggctgtccagaatccctccatgaattgatgaatctgtgttggaagaaggaccctgatgaaagaccaacatttgaatatattcagtccttcttggaagactacttcactgctgcagagccacagtaccagccaggggaaaacctataattcaagtggcctgcaactggg

SEQ ID NO: 5775 - DNA, 484 bp, Canis familiaris
cgaggaggaggtgtcggactgcgtggtgaacaccgaccacatcctctacaccgtgtactccacggtgggcgctttctacttccccaccctgctcctcatcgccctctacggccgcatctacgtggaagcccgctcccggattttgaaacagacgcccaacaggaccggcaagcgcctgacccgagcccagctgataaccgactcccccggctccacgtcctcggtcacctccgttaactcgcgggctcccgacgtgcccagcgaatccgggtccccggtgtacgtgaaccaagtcaaagtgcgggtctccgacgcgctgctggagaagaagaaactcatggccgctagggagcgcaaagccaccaagaccctgggaatcatcttgggagcctttatcgtgtgctggctgcccttcttcatcatctccctggtgatgcctatttgcaaggacgcctgctggttccacctggccatcttcgacttc

SEQ ID NO: 5776 - DNA, 295 bp, Canis familiaris
atcatgaagtgtgacgtggacaagccgaggaccacggcttaacatggggccatctggtggcactatcctgtgtccctggcattgctgacacgatgcaccagatcaccgccctggtgcccaacacgatgaatatcaagatcaccgcaccgcctgagcacaagtaccctatgtggatggggggctccaaccaggccttgcccttcagcttccagcagaggtgcatcagcaagcaagcagggtacgagtcctgcccctccatcgtccaccacaaatgcttctaggtagactgttactt

SEQ ID NO: 5777 - DNA, 109 bp, Canis familiaris
atcatgaagtgtgacgtggacaagccgaggaccacggcttaacacggggccatcacgagtcctgcccctccatcgtccaccacaaatgcttctagatggactgttactt

SEQ ID NO: 5778 - DNA, 459 bp, Canis familiaris
tgactttgccaagtggcgctgtgtgctgaaaattggggaacacactccctcagcccttgcgatcatggaaaatgccaacgttctggcccgttatgccagcatctgccagcaggtgggcctgcaggtccccaacaggccaccttccacctcatttgtttctagtgtcagctagcctgccacccatctgtcagtatacataccacccccctccctgaggcaactgttctggatcctcaccaagcatcgggcctggacccgtgaaggaccctggagggctctgtgagcagagggcagaatagggattgtgtgggtggctcagaggagatgcctgtagagtcagcactgatgctgtgaagcggagtctctgtcatggagatcagatcttggctgatggctgtggggacctagaggttaggaggcctcatggctactctgtccctcacccccacagaatggcat

SEQ ID NO: 5779 - DNA, 250 bp, Canis familiaris
aaggatggcgccgactttgccaagtggcgttgtgtgctgaaaatcagtgagcgcacaccctcagcacttgctattctggagaatgccaacgtgctggcccgctatgccagcatctgccagcaggtgtgtgtatgtttgtgtgaggggtcagatgggtgccttgtgcctagtggggagagggttaggagggctttctcccctcctccctactgcccctcccaagttactctgctcttacctacagaatggc

SEQ ID NO: 5780 - DNA, 331 bp, Canis familiaris
cgtggagatgaagaattggattccctcatcaaggctacaattgctggtggtggtatgtaaatactaaaattttgttcctttggagaaaaaaattccttggcgctcattaattcttagtcaagaagaaggcctgttttcagtcgtcttcagtgtggttgcaccaagaaatttgattcgtatgtagaacttaaagaatttgtacatacttgagctttgcatttaaagacctctttgaagttgaacgttgtcttggtttttttttaagtgttgtgtgatttctaaaatatgtatattaaaaagtagaattaatccctttctgttcttctcctag

SEQ ID NO: 5781 - DNA, 1205 bp, Canis familiaris
atgttgaagccaccattgccactcagatccctcttattcctgcagctgtctctgctgggggtggggctgaactccacggtccccatgcccaatgggaatgaagacatcacacctgatttcttcctgaccgctacaccctccgagaccctcagtgtttcctccctgcccctcccagaggtccagtgttttgtgttcaatgttgagtacatgaattgcacttggaacagcagctctgagccccggcccaccaacctgaccctgcactactggtataagaactccaatgatgataaagtccaggagtgtggccactacctattctctagagaggtcactgctggctgttggttgcagaaggaggagatccatctctacgaaacatttgttgtccagctccgggacccacgggaacccaggaggcagtccacacagaagctaaaactgcaaaatctggtgatcccctgggctccggagaacctaacccttcacaacctgagcgaatcccagctagaactgagctggagcaacagacacttggaccactgtttggagcatgttgtgcagtaccggagtgactgggaccgcagctggactgaacagtcagtggaccaccgaaatagcttctctctgcctagcgtggatgggcagaagttctacacgttccgtgtccgaagccgctataacccactctgtggaagcgctcagcgttggagtgaatggagccaccctatccactgggggagcaatacctccaaggagaatcctttgtttgcatcggaagctgtgcttatcccccttggctccatgggattgattattagccttatctgtgtgtactactggctggaacggtcgatcccccgaattcctaccctcaagaacctggaggatctggttactgaatatcacgggaatttttcggcctggagtggagtgtctaagggactggcggagagtctgcagccagactacagtgaatggctctgccacgtcagtgagattcccccaaaaggaggggctccaggggagggtcctgggggctccccctgcagccagcatagcccctactgggctcccccatgttataccctgaaacctgaaactggagccctgataccctgacagaacctcagagtcctgtcctcctatattgtactaacttccccttatctaaccaacctgggtccaatgctcacctcgccctc

SEQ ID NO: 5782 - DNA, 2263 bp, Canis familiaris
gatggtttgcagggtcagccaggacctcctggccctgaaggagaaaaaggtggtaaaggagagcctggccttccaggccctcctggaccagtggatccagatctgttgggctcaaaaggagagaagggggaccctggcttaccaggtattcctggagtttcagggccaaaaggttaccagggtttgcctggagacccagggcaacctggactgagtggacaacctggattaccaggaccatcaggtcccaaaggtaaccccggcctccctgggaaaccagggcttacaggacctcctgggcttaaaggaagcataggtgatatgggttttccaggtcctcagggtgtgaaagggtctcctggacctcctggagttcctggacaacctggctccccaggattacctggacaaaaaggtgaaaaaggtgatcctggtgtttcaggcattggtcttccaggtcttcctggcccaaagggtgaagctggtcttcctggatacccaggaaaccctggaatcaaaggttctatgggagatactggtttgcctggattaccagggacccctggagcaaaaggacaaccaggccttcctggattccccggaaccccaggacttcctggaccaaaaggtattaatggtccacctgggaaccctggccttccaggagaacctggtcccgtaggtggtggagggcgtccttggccaccagggcctccaggtgaaaaaggaaacccaggtcaagatggtattcctggaccagctggacagaagggtgaaccaggtcaaccaggctttggaatcccaggaccccctggactcccaggactttctggtcaaaagggtgatggaggattacctggcattccaggaaaccctggccttcctggtccaaaaggagaaccaggctttcagggtttccctggtgtccagggtcccccaggccctcctggctctccaggtccagctctggaaggccctaaaggcaaccctggtcctcagggtcctcctgggagaccaggtctaccaggtccagaaggtccccggggtctccctggaaatggaggtattaaaggagagagaggaaacccaggccaacctgggcaacctggtttgcctggcttaaaaggagatcaaggaccaccaggaatccagggtaatcctggccggccaggtctcaatggaatgaaaggagatcctggtctccctggtgttccaggatttccaggtatgaagggacccagtggagtaccaggttcagctggccctgagggggatccaggacttgttggcccaccaggtccccctggactacctggtccttcaggacagagtattataatcaaaggagatgttggtccaccagggatcccaggccagcctggattaaaaggtctaccaggactaccaggacctcagggcttaccaggtccaattggccctccaggagatccaggacgcaacggactccctggctttgatggcgctggagggcgcaaaggagacccaggtctgccaggccagccaggtacccgtggtttggatggtccccctggaccagatggaatgcaaggtcctccaggtcctccaggaacttcctctattgcccatggattcctcatcacacgtcacagccagacaacagatgcaccacaatgcccacatggaactgtccagatttatgaaggcttttctctcttatatgtccaaggaaataaaagagctcacggtcaagacttggggacggctggcagttgccttcgtcgcttcagtaccatgcctttcatgttctgcaacatcaacaatgtttgcaactttgcttcaagaaatgattattcttactggctgtctaccccagagcccatgccaatgagcatggagcccctgaagggccagagcatccagccattcattagtcgatgtgcagtatgcgaacgtccagctgtggtgattgcagttcacagtcagaccatccagattccccattgtcctcacggatgggattctctctggattggctattccttcatgatgcacacgagcgcaggagcagagggctcaggtcaagccctggcctcccctggttcctgcttggaagagtttcgttcagctcctttcattgaatgtcatgggcggggtacctgcaactactatgccaactcctacagcttttggctagcaactgtagatgtgtcagatatgttcagcaaacctcagtcagaaacactgaaagcaggagacttgaggacacgtattagccgatgtc

SEQ ID NO: 5783 - DNA, 1780 bp, Canis familiaris
atggagctcgccctggtgcccctggagaacggcggggccatgaccgtcaggggaggaggtgaggcccgggcaggctgtggccaggccgtagggggggagctccagtgccccccgacggctgcgcgcggcgccggccccaaggagcgggagcccagggagcgcggcccgccgaggggagcggaccccggagcgcggcctctgccagcgctgcctctgcctcgacggctgcctcccggagacgaggagggagacggcgacccccgcctgggcctggcggaggaccagtgccgggcccgggctcgggtctttcaccaccagcgcgtcctcatcaacatctccgggctgcgcttcgaggcgcagctgggcaccctggcgcagttccccgacaccctcctgggggacccggccaagcgcctgcgctacttcgaccccctgcggaacgagtacttcttcgaccgcaaccggcccagcttcgacggcatcctctactactaccagtccgggggccgcctgcggaggccggtcaacgtctcgctggacgtgttcgccgatgagatccgcttctaccagctgggggacgaggccctggagcgcttccgcgaggacgagggcttcatcaaggaggaggagaagccgctgccccgcaacgagttccagcgacaggtgtggcttatcttcgagtacccggaaagctccgggtccgccagggccatcgcgatcgtctcggtcttggtcattctcatctccatcatcaccttctgcttggagaccttgcccgagttccgggacgagcgcgagctcgtgcgccatcccccggggcccccccacccccctgggcccgcccgggggccaacgcagcgcggtcggggccccacggtggcgcctctcctgccgcggaccctggctgaccccttcttcatcgtagagaccacgtgcgtcatctggttcaccttcgagctgctcgtgcgcttcttcgcctgccccagcaaggccgagttctctcggaacatcatgaacatcattgacgtggtggccatcttcccctacttcatcaccctgggcaccgagctggccgagcaacagccaggcgggggagggggtggccagaatgggcagcaggccatgtccctggccatcctcagagtgatccgcctggtccgggtgttccgcatcttcaagctctcccgccactccaaggggctgcagatcctgggcaagaccttgcaggcctccatgagggagctgggcctgctcatcttcttcctcttcatcggggtcatcctcttctccagtgccgtctacttcgcagaggctgacaaccaggagacccacttttccagcatcccggacgccttctggtgggcagtcgtcacaatgaccacggtaggctatggggacatgaggcctgtcactgtggggggcaagatcgtgggctcgctgtgtgccatcgccggggtcctcaccatcgccctgcctgtgcccgtcattgtctccaacttcaactacttctaccaccgggagacggaccacgaggagcaggccgctctgaaggaagagcagggcagccagagccaggggacagggctggacagcggaggccctcggaagaccagctggagcaaggggtccttgtgcaaggctggagtgtccctggagaatgcagacggagcccgaaggcagctgcccctggagaagtgtaacctcaaggccaaaagcaatgtgcacttgcggcgatccctctatgccctctgcctggacacgagtcgggaaacggatttgt

SEQ ID NO: 5784 - DNA, 1482 bp, Canis familiaris
ggcacgagcggcctcagagccagctctgcatgtgccgagatggggctgccccggccagtgctgtggctaaggaggctctgggtcctcttgcaggtggccgtgcaggtggccgtgggcaaagtgttcctgaaactgtttcccgcaagagtcaagcaacacatcgtggccatgaatgggaagaaccctcacttttcctatgacaactgggcccccaccctctacagcatgcagtacttctggtttgtcctgaaagtccaatggcagcgactagaggacaggactgagccaggaggtctggcccccaactgccctgtggtccggctctcgggacagaggtgcaacatttgggacttcatgcaaggcaacaggccattggtgctcaattttggaagttgtacctgaccttcatttcttttcaaatttgaccaattcaagagacttattgaagacttctgctccacagcagactttctcatcatttacatcgaagaagcacatgcatcagatggctgggcctttaagaacaacgtgaacatcaggactcaccagactctccaggaccgcctgcaggcagcccgcttgctgctggacagggcccccccatgccccgtggtggtggacacgatgaggaaccaaagcagccagttctacgcggccctacccgagaggctctttgtgctccaggagggcaggatcctctacaagggtaaacctggcccttggaactaccatcccgaggaagttcgtgctgttctggaaaaactgcacagttagcctggaaagatcccccagttctataggtgatccacaggagggctcctcaagtcctggctctcctcccagcccaggtggcttttacctcttgacccgtgtcactagctcagattggtctgatctaaccaaacaattgtactcaggaaacgaagcagcgagtaagctgaaggttaaagacccttcacctcgacgctgcccccacggtggagaccacaataattgcacatcgtccccatgtgagaaaggtccctccccactggatactgctggggtatgcggtctgtctccagccactctgatcccacgtggtcagatacagcagtcctcatgtgagtcaaactcattttaccaaatctgccgtttatggacaccatcaaaaagacactaatttggctgttagaacccagcatgggagaatgccagttgcttggagagatgaggaattgaaagctgttgtacatttatgcagaagctcatattcgaaactatttctctgatttctttgcaagtctcctgatggtcatttgtgttagattacatcagaccgatggacaaccattggtattcatctgttttaactctgcttcttttcatgtttgtctatgacggccacagcctaaagcacacacagctgtgacttgatttgaaagaaaatgttttaagatgcagcaagctaatacagaatgattaaaatatctcaggctaaaa

SEQ ID NO: 5785 - DNA, 789 bp, Canis familiaris
aggagacgcagagacagacaagatggcggcggcgtctgcacagggcgggagaactggtggtggcggaggcagtagtgggcccggcggtggtcctacctgcgggtccggcagtggccgcagcggcttgttggacaagtggaaaattgatgataagcctgtaaaaattgacaaatgggatggatcagctgtgaagaattctttggatgattctgccaaaaaggtacttctggaaaagtacaagtatgtggagaattttggtctgattgacggtcgcctcaccatctgtaccatctcctgtttctttgccatagtggcattgatttgggattatatgcatccctttccagaatctaagcctgttttggctttgtgtgtcatatcctattttgtgatgatggggatcctgaccatttatacctcatataaggagaagagcatctttcttgtggcccacaggaaagatcctacaggaatggatcctgatgatatttggcagctgtcctctagtctcaaaaggtttgatgacaaatacactctgaagttgaccttcatcagtggaagaacaaagcagcagcgagaggccgagttcaccaagtccattgctaagttttttgaccacagcgggacactggtcatggatgcatacgagcctgaaatatccaggctccatgacagccttgccacagaaagaaaaataaaatagccaattctaaaagcagccatctttgctggatcatgctgaattttggggtgagagagaaggaaacagaacttaaaatggataaagta

SEQ ID NO: 5786 - DNA, 167 bp, Canis familiaris
gtcaagcgccccatgaacgcattcttggtgtggtctcgcgatcaaaggcgcaagatggctctagagaatccccaaatgcaaaactcagagatcagcaagcagctggggtaccagtggaaaatgcttacagaagccgaaaaatggccattctttgaggaggcacagag

SEQ ID NO: 5787 - DNA, 1166 bp, Canis familiaris
cggcacgaggaagtttttcattcatttaagacttcattttactcttttgaagcaaaaaaaaaaaaattaatttctggaagagactgctgagaagatccccttcgtttggccagaagagaagagaggactgtaaatcaaggaaaaggtcccgcgagcgacaggggacgatgctgcggaggctggttcagcagtggggcgtcgcggtgttcctgctgagctactcggtgccctcctgcgggcgctcggtggaggagctcggccgccggctcaaaagagctgtgtctgaacatcagctccttcatgacaaggggaaatctatccaagacttacggcgacgattcttccttcatcacctgattgcagaaatccacacagcagaaatcagagctacctcggaggtttcccccaactccaagcctgctcccaacacaaagaaccaccccgtccgatttgggtctgatgatgagggcagatacctaactcaggaaaccaacaaggtggagacatacaaggagcagccactgaagacacctggcaagaaaaagaaaggcaaacccggaaaacgcaaggagcaggaaaaaaagaaacgtcgaactcggtctgcctggctaaactctggcgtggctgaaagtgggctagaaggcgaccacccatatgacatctcagcgacatcgctggagctcaatttacggaggcattgaaatttttagcaaagaccttcaaaggacgtattacaggattctgtaatagtgaacatatggaaagtattagaaatatttattgtctgtaaatactgtaaatgcattggaataaaactgtcttccccattgctctatgaaactgcacattggtcattgtgaatatttttttttgccaaggctaatccaattattattatcacatttaccataatttattttgtcaactgatgtatttattttgtaaatgtatcttggtgctgctgaatttctctattttttgtaacataatgcactttaggtatacatatcaagtatgttgataaatgacacaataaagtgtctttattttgtggttgattttaataatgcctaaatataattatccaaactgattttcctctgtgcatgtaaaaatagcagtattttaaatttgtaaagaatgtctaataaaatataatctaaatt

SEQ ID NO: 5788 - DNA, 692 bp, Canis familiaris
cggcacgagcacaagtttactcaacttcgaaaaagcatcagctgccgatacacctgaaagatcttgtcacaagacattgtgtgtgaagatgatgtctgcaaaagacatggttaaagtaatgattgtcatgtttgcaatttgttttcttgcaaagtcagatgggaaacctgttaagaagagatctgtgagtgaaatacagtttatgcataacctgggcaaacatctgagctccatggagagggtggaatggctacggaagaagctccaggatgtacacaactttgttgcccttggagctccaatagctcacagagatggtagttcccagaggcccctaaaaaaggaagacaatgtcctagttgagagctatcaaaaaagtcttggagaagccgacaaagctgatgtggatgtattaactaaagctaaatcccagtgacgatacatcagggcactgctgtagacagcatagggcaacaacattacaagctgctaacattttcaagctcttaagattaataaatgccaaaatttacatgtaatccattgttagccatgatagctgaaattttaattgattgttttgattctagtttaattcatttaagagctcttttaattgttctatttctattgtttattctttttaaagtatgtttttgcataatttataaaagaataaaattgcacttttt

SEQ ID NO: 5789 - DNA, 273 bp, Canis familiaris
aggtgccccaactcactgacctaagctttgttgatataaccgattcaagcatcggcctgaggtggaccccgctaaactcttccaccattattgggtaccgcatcacagtagttgcggcaggagaaggtatccctatttttgaagattttgtggactcctcggtaggatactacacagttacagggctggaaccgggcattgactatgacatcagcgttatcactctcattaatggcggagagagtgcccctactacactgacacagcaaacgg

SEQ ID NO: 5790 - DNA, 130 bp, Canis familiaris
ataaaagtaattggtggagatgacctctcaactttaactgaaaagaatgtcttgattgttgaagatctcattgacacaggcaaaacaatgcaaaccttgcttcccttggtcgcgcagtataatccaaaaa

SEQ ID NO: 5791 - DNA, 733 bp, Canis familiaris
gttgtgtgatgtggcccatcagtatggggctctgactttcgtggatgaggttcatgctgtagggctatatggaccccagggtgctgggattggggagcgtgatggagttatgcacaagattgacattgtctctggaactcttggtgagtgccttgggatgcccttatatataatccagtaagaccctttccttcctcctccccaaagctatagaagttatttgggtagaactcatagcctcaggctatggaactcttggattccctcctcccactcctaccccactgcagagttgctgagaaagtctgggaggggtttttgagaataaccctaagtagggccaaatagccaggttcaagtcagtacggagagttgtagttctaaattcctcccccactccagccccaaccttcattttagttccacttttgggactaaccagctaaaggtccccacccagctaccacctatctcatcactgcatgtggcaggccttggaagtcctatctcaaagcagcagaactatcagctgtctgtcctgtcatggacaagagagataagcagaggtctgggaaaggaatctggaactccagcttctggtgcacatcttcatgtttatctggacataatcctgtccctttagagactaattatgggctctgtgcatatcctccccccattatctccaggtaaggcctttggctgtgtgggtggctacatcgccagcacccgt

SEQ ID NO: 5792 - DNA, 737 bp, Canis familiaris
ggtctggtggccagtggaatggcgcttgctccggccagagcgcgatcctggaaacccaggatcgagtcccatgtcgggctcccggtgcatggagcctgcttctccctctgcctgtgtctgtgcctctctctctctctctctctgtgactatcataaaaaaatatatatatatttctgtatccccagtcttagcccagtgcctgctaggaagtgtgagttaacaaacatttgtgactgactgaccaactagatggatgaatccctattcccagtgtgcacagccaagataatattatttactggtggctcaagtgagcacccaggaactcctgtaaatacttcacgagcatcattttcctctttgatccttcatgatccacccagtgagagaggtgctaccagtctccccctcttgaggagggacactgccgaggacacagaaggaggttaggagaatgcctgtggtcttactgccacttagcagcagtgtgggaagaggacctgggatggggaggcggggcggtcggtcgcatgctggcgcccacttgcctaggcacccttccacaatgcctggctaccccgagcttggacgatgtggctgctgaatgggtccaagcactgatggctgcctggactgcacaacctttaggtcactgaggatcttttctgttccagtccagtccagccctagcagcttctgccaggaacctggacgaggaggtggggaggtgggatcc

SEQ ID NO: 5793 - DNA, 755 bp, Canis familiaris
gcggccgcgtcgaccgcggagccgagccagcatgaccgagcgccgagtgcccttctcgctcctgcggagccccagctgggaccctttccgcgactggtacccggcccacagccgcctcttcgaccaggccttcgggctgccccggctgccggaggagtgggcgcagtggttcggccacagcggctggccgggctacgtgcgcccgatcccccccgcggtcgagggccccgccgcggccgccgcggccgccgcgcccgcctacagccgcgcgctcagccggcagctcagcagcggcgtgtcggagatccggcagacggccgaccgctggcgcgtgtccctggacgtcaaccacttcgcccccgaggagctgacggtcaagacgaaggacggcgtggtggagataactggcaagcacgaagagaggcaggatgagcatggctacatctcccgccgcctcactcccaaatacaccctgccccctggtgtggatcctaccctggtctcctcctccctgtcccctgagggcactctcacggtggaggctcccatgcccaagccagccacccagtcggcagaaatcactattcccgtcaccttcgaggcacgtgcccagattgggggcccagaagctggaaagtcggagcagtctggagccaagtaaaggccttagccctgcttagcccacatcctcacctcagtagccatcactgaccgtccctgcacactaaagttcaaagcaacgtgccgtcgacgcg

SEQ ID NO: 5794 - DNA, 2531 bp, Canis familiaris
caaagcagtgacgctctgcaccctcagaggtctttctgtttgccggtcctcatgcatctgctcctgtggttgcttctgctggcccgcctctgccgccctgagttcatctgcgaggtctccaaggtgaccagccaggtggaggtgaactgtgacaacaaggggctgaaggcactgcccccgggcctgccaggggacacggccatccttcatctggccgagaaccccctgggtgccttctccacggccctgctgggacctctgacccggctggcccagctgcacctgcgtcaaagccagctgacccagctgcaggtggatgggatgctgccgcggctggagaccctggacgtgtcccacaacaggctgaaaagcctgccgtcgctgggacgggccctgccagcactcactaccctggacgcgtccttcaatgagctggtggcactgtcccctggcacactcgatggcctgagccacctccatgagctctacctgcgcggcaacaagctgaagacgctacccccgaggctcctagcgcccacggcccagctgaggaagctcaatctggccgacaataggttgactgagctgcccccggggttcctggaggggctcggggaactggacaccctctacctccaagggaactggctgcgcaccgtacctaaaggcttctttggggacctcctcctgccgttcactttcctccatggcaacccctggtcttgtgactgcgagatcctctacttggctcgctggctgcgggacaacagcaataatgtctacttgtggaaggagggtgtggaagccaaagccacgacgcctaacgtggacagcgtgcgatgtgtcaactggaaaaatgtgcccgtgcacacctaccaggggaaggactgccccagccccatggacgggggtgacatggactacgacaactatgacgatgaggatgagaaactcccgggggttgaggcgcctgccacacgggctgtggtcagcttctctacccacaccaaagcccacacaacccactggggcctgctctacccaacatttgcttatccagaccaccaaatggcctacttgtcttccaccctggagctcactgagaaacagaccatgttcccgagtaccctggggcccattatgcccaccaccaccccagagcccaccacaccccccaccaccctggagcccaccacaaccccaaccaccccagagcccaccacaccccccaccaccctggagcccaccacaaccccaatcaccccagagcccaccatgccccccactaccctggaacccaccacaaccccaatcaccccagagcccaccacaccctccacaacccccaccaccccgcagcccgccacaacccccaccaccccgcagcccgccacaacccccaccaccccgcagcccgccacaacccccaccaccccgcagcccaccacaaccccaaccatcccggagctcccaacgcccccaaccaccccggagcccaccatgcctcccaccaccttggagcccaccacaactccaaccagccccaccacaaccctaattctctccgaatcaaacaccttcttaggcatcccagaattaacttcaccttgtactacttcagaatacccaatagtcccctcccttgtccacctcccagaggcccatgaggtggctcgaggaacttcagatagctccagaaaccatcgtttgttcaaccctgacctctgctgcctcctccccctgggcttctatattttgggtctcctctggcttctgtttgcctctgtggtcctcatcctgctgctgacctgggcccagcacgtgaagccccaagctctggccatggccacgtacaccacccatctggagctgcagtggggaaagcaggtgactgtgccctgggcctggctgctctttcttcaagggtcattccccactttccgctccagcctcttcctgtgggtccgagctaacagctacgtggggcctctgatggcaggacggcggccctctgccctgagcctgggtcgtgggcaggacctgctaggtacggtgggcgttaggtactccagccacagcctctgaggcgacggtgggcagtttggggaccttgagaggctgtgatgggccctcctatcaggatcttgctgggggtgggtgggcagggagcacaggattggggggaggccttaagcaccttttctgggtcagaagcctcctctccgcattgcatgtgcaacctcagtgaagcagcatgggcaggggagccggacgggccacccaacagagctccttatgctgcaggaggggttcacagaccactcggacatcaccatcaccttggggggggtgcttgagggaaaagcaaattgaacagagcgtgattctcacgtgcaggtacctaagggaactggggaagagatgcaccaagacgagagccctcgtcatccctggggagcccaagcctaggggttttcttcctcttcccgtttagcattttccaccatcgtatgttacttgtataataatta

SEQ ID NO: 5795 - DNA, 2288 bp, Canis familiaris
gctcccagcggaggtgaggcggcggcggagggggaagcggggcggcgagatgcagagctggagtcgcgtgtactgctccctggccaagagaggccatttcagtcgaatatctcatggcttacaggcagtttctgcagtgcctctgagaacttacgcagatcaaccaatcgatgctgatgtaacggtgataggttctggtcctggaggatatgtcgctgctattaaagctgcccagttgggcttcaagacagtctgcgttgagaaaaatgaaacattgggtggaacatgcttgaatgttggttgtattccttcaaaggctttattaaataactctcattattaccatatggcccatgggaaagattttgcatctaggggaattgaaatgtctgaagttcgcttgaatttggagaagatgatggagcagaagagtacagcagtaaaagctttaactggtggaattgcccacttattcaaacagaataaggttgttcacgtaaatggatatggaaagataactggcaaaaatcaggtcactgcaaagaaagctgatggcagcactcaagttattgatacaaagaacattcttatagctacaggttcagaagttactccttttcctggaattacgattgatgaagatacaatagtgtcatctacaggtgctttatctttaaaaaaagttccagaaaagatggttgtcattggtgcaggagtaataggtgtagaattgggttcagtttggcagagacttggtgcagatgtgacagcagttgagtttttaggtcatgttggtggagtcggaattgatatggagatatctaaaaactttcaacgcatcctccaaaaacaaggatttaaatttaaattgaatacaaaagttactggtgctaccaagaagtcagatggaaaaattgatgtttctattgaaggtgcttctggtggcaaagccgaggttatcacatgtgacgtactcttggtttgcattggccgacgaccctttactcagaacttgggactagaagagcttggaattgaactagatcctagaggtagaattccagtcaataccagattccaaactaaaattccaaatatctatgctattggtgatgtggttgctggtccaatgctggctcacaaagcagaggatgaaggcattatctgtgttgaaggaatggctggcggtgctgtgccaattgactacaactgtgtaccatcagtgatttacacccaccctgaagttgcttgggttggcaaatcagaagagcagttgaaagaagagggcattgagtacaaggttgggaaattcccctttgctgctaacagcagagctaagacaaatgcggacacagatggcatggtgaagattctggggcagaaatcaacggatagggtgttgggagcacacattctgggaccaggagctggtgaaatggtgaatgaagctgctcttgcactggagtatggagcatcctgtgaagatatagccagagtctgccatgcgcatccgaccttatcagaagcttttagagaagcaaacctggctgcatcattcggcaaatcaatcaacttttaaattagaagattatatttttctgcaaatttcctgggagctttgtggaggtacattcctgtacaggaaatgctcacgttctccaagaatttttaggactgaattatgaaacttttggaaggctttactaggtttggacagaatggaataatctcatctattttaaataaatttaatattttgtttcagtgcattaatattgcagaaaaaagctacttatcgtagtatcctggaaaattttcttcaacccttattttcatgcattttctgaaagattcaatttcactgaatttatgttaccgtagcttttatccctgctattgtaaagttggatttacttatgtgatggagctggtgtagagtatgtgaaccagctgtgtttgaagccaggtgaccaagttattttaaacttggttttcatattggaaatagttaatcattagagtaagattaaaatatgtataaaccaaaatgatgtaaataaatgatggtctctcacatctttatttaatctccaaattcttgcagtttagaggtagaatttatgtttaaatttttaaggacccattgaggtctagtctgtaggcagttaaccaaattaaggaggtagatctgtgaaattcatatattaaatgaagacacaaatgtattacaacggggaatgaaaatacagaaataaacagtcttaaatattcaaaaaaaaaaaaaaaaa

SEQ ID NO: 5796 - DNA, 734 bp, Canis familiaris
tgtggggcgtaagtacaaaagacagggatggggcacatttcaaagtaactcttgcaaatgtaaaccttgtattaatacatcaatggttatagtttatgagatttcatacattagtatattggtatggctgacacattctagttattagtaattttcaaattttaagttgttggtaccaacttctacttaaggtcagtgtttccccctcttaaatatttctctatggaattatttgttgactactctttttaaaaattttttatttttttaagatttattgagagcaagagaatgcataaataggggcagctgcaaagggagagggagagaagatttcccactgagtgcggagctccatctcacaaccctgagatcatgacttgagccaaaatcaagagtcagatgcttaacttactgggccacccaggcgcccttttacattttttttcatgatcaaaagttaattttcaactagctatagccatattatgttcacaaatggtgcttggcacatttagaatggctgttgttttctaaacgtaaaagcattccataccaattgtgttgatgaaagagactcaggttgtagggtactgacccctttcctaactagttttaataatctaatgtgctttggattttctagctgggtctgctaccagtatcctggatatcgcgggtatcaatatatcttggaatgtgaccatcatggaggagactataaacactggaga

SEQ ID NO: 5797 - DNA, 630 bp, Canis familiaris
catgaaggtctccgcagcgctcctctgcctgctgctcatagccgccgccctcaccacccaggtgctcacccagccagatgcaattatttctccagtcacctgctgctatacactcaccaataagaagatctcaattcagaggctggccagctataaaagagtcaccagcagcaagtgtcccaaagaagctgtgatcttcaagaccgtcctaaacaaggagatctgtgctgaccccaaacagaagtgggtccaggattccatggcacacctagacaagaaaagccaaacccaaactgcaaagccatgaatactcactctgaaatggaagaatctgaaactaatttattttcttctaaccttccctaaatgccctctgatattattttattataatttcaaagagtacaaactttgtttattgatatgcacacaatgccttaagtaatgttaatcttatttaaattattgatgttttaaatttattttccccaaatactagtgtattttttaaaatatggagacttgaaataaactgctttcctctgggggccccagttctacccctgggatggtgtgagggtccttgcaaggatcattaatgcaagactatgttttaaattctaaagcata

SEQ ID NO: 5798 - DNA, 2605 bp, Canis familiaris
ttcggcacgaggcgaaagctgttccagggcactttcaggtgggacaagggttttggggaccactaagttctcatcacggcagcaactaaaaatgcctaggaagatggtcgtgatctttggagcctcaaatatactttggatggtgtttgctgtttctcaagcttcgaaaatggagatcttccttgaacccagagtcgctgctcagattggtgatgtcatttctctgacttgcagtacgacgggctgtgagaccccatctttctcttggagaacccagatagacagtccactgaatgggaaagtgaagaatgaggggaacaattccacgttgaccatggaccctgttagcttcaacaatgaacatgcttacttgtgtacagcgacttgtggatcgaagaaactggaaaaaggcattcaagtggagatttattctttccctaaggacccagagatccaactgagtggccccctagaagttgggaagccagtcacagtcacgtgtttggtccgtgatgtttacccatttgacaggctggagatgaatttgctgaatggcaatgatctcctacagagtaaggactttctagagcctatggagaagaagtccctggagaccaagagtttggaggtaaccttcactcctaccaatgaggatattgggaaaggtcttgtttgccgagcacaattacacatggatgaaattgactttgagcccaaagaaagggagactaccaaagagctacaagtctacatctcacccaggaacacatttatctctgtgactccctctatgaggctgcaagaaggcggttctgtgacaatgacatgtgccagtgaaggcctaccacctccacagattttctggagcaaaaaattagataatgggaatctacagctcctctctgggaatgcaactctcactttaattgctatgaggctggaagattctggaacatatgtctgtgaaggtgtcaatgaagtcgggaaggatggaaaagaggtggaattaatcgttcaagagaaaccattcactgttgagatctccccaggaccccagattatcgctcagatcggtgattcagttgtgttaacatgtggtgtcacagactgcgagtccccatctttctcttggagaacccagatagatagtcctctgagtgggacggtgaaggttgaaggggccaagtctacgctgaccctaagccctgtgaatttggagaatgaacattcttatctgtgcaccgtgacctgtggacataagaaattggaaaagggaattaaggtggacctctactcattccctagagatccagaggttgagatgagtggtctactagtggatggaaacccagtcactgtgagctgcgaggttcctaatgtgtatccttctgaccgactggagattgaattatttaagggggagactatcatagaaagtaaaagctttctggaggacatggacaagaaatctctagaaactaagagtttggaaatgaccttcatccccaccacagaagatactggaaaagttcttgtttgtctggctaagttacatattgatgaaatggaatttgaacccaaacaaaggcagagtacacagacactttatgttaatgttgcccccagggatacaaccgtcgtggtcagcccctcctccatcgtggaggaaggtagtcctgtgaacatgacctgctctagcgatggccttccagctccgaacatcctgtggagcaggcggctaagtaatgggcgcctgcagtctctttctgaggatccaattctcaccttaacttctgcaaaaatggaagattctggtatttatgtgtgtgaagggattaaccaggctggaataagcagaaaagaagtagaattaattatccaagttgctccgaaagacatacagcttatagcttttccttctgagagtgtcaaggaaggagacactgtcattatctcctgtacatgtggaaatgttccaaaaacttggataatcctgaagaaaaaagcagagacgggagacacagtgctaaagtccagagatggtgcatataccatccacaaggtccagttagaggatgcgggagtgtacgaatgtgaatctaaaaatgaggctggcttgcaattaagaagtttaaccctcgatgttaaaggaagagaaaataacaaggactatttttctccagaactactcgtgctttattgtgcatcttccttgataataccagccattgggatgatcatttactttgccagaagagccaacatgaaggggtcatacagtcttgtagaagcacagaaatcaaaagtgtagctaatgtttgcaatggtcaactagagacactatttatcagtccaaattcttaatactgctcatcattccatgagggaaacaaactaagagtccagacttccctgaatgtagtgaattcttggaaagaaatggcttcctgtgccccatgctgtgaggatcaagaggctaaaagaaaactttctgcctgaaaaataggcactgccactgaaatgtattgactggagtagctccttgatgtgtatatacaataacatgatctgtacatatgtaaaataaatttatgccataggagga

SEQ ID NO: 5799 - DNA, 2222 bp, Canis familiaris
ccgcgcgctccggccgggggaccctggttccggcgagcggctcagcgcggcgcccggaagtttaagctgaaaccactgctcagcttccaagatgttgccacccaaactgcatgcgcttttctgcctctgcagctgcctcacactggttcatcctattgactggcaagacctaaatcctgttgcccatattagatcatcagcatgggccaataaaatacaagctctgatggctgctgcaagtattaggcaaagtagaattcccaaaggaaatggatcttattctgtcggttgtacagatttgatgtttgattatactaataagggcacctttttgcgtttgtattatccatcgcaagaggatgaccactctgacacgctttggatcccaaacaaagaatatttttttggtcttagtaaatatcttggaacaccctggcttatgggcaaaatattgagcttcttttttggttcagtgacaactcctgcgaactggaattcccctctgaggactggtgaaaaatatccactgattgttttttctcatggtcttggagcattccggacaatttattctgctattggcattgatctagcatcacatgggttcatcgttgctgctatagaacacagagatggatccgcctctgcgacttactatttcaaggaccagtctgctgcagaaatagggaacaaatcttggtcttatcttcaagaactaaaaccaggggatgaggagatacatgttcgaaatgagcaggtacagaaaagggcaaaggagtgctcccaagctctcaacttgattctggacattgatcatggaaggccaattaagaatgtactagacttagagtttgatgtggaacaactgaaggactctattgacagggataaaatagcagtaattggacattcttttggtggagccacagttcttcaggctcttagtgaagaccagagatttaggtgcgggattgccttggatgcatggatgcttccactggatgatgcaatatattccagaatccctcagcccctcttttttattaactcggaacggttccaatttcctgagaatatcaaaaaaatgaaaaaatgctactcacctgacaaagaaagaaaaatgattacaatcaggggttcagtccatcagaactttgctgatttcacttttacaactggcaaaatagttggatacatattcacattaaaaggagatatagattcaaatgtagcaattgatctttgcaacaaagcttcattggcatttttacaaaagcatttaggactgcggaaagattttgatcagtgggattctttgattgaaggaaaagacgaaaatcttatgccagggaccaacattaacatcaccaacgaacatgacactctacagaactctccagaagcagagaaatcgaatttagattaaaagcacttttttaaagatcttgtttaaaaactgtcaaaaaatgtgtgtatgacttttaatatattttctcaaataactcatattggaaaatgtaggctatcccataaaagtgattgaagcttggactaggaggtttttttctttaaagaaagattggtgtctatcgaaatcatgccagcctaaattttaattttactaaaatgatgctgtgtcaaaattaataactacttttacattctttaatggacaagtataacaggcacaaggctaatgaaaacgtgttgcaatgacataacaatccctaaaaatacagatgttcttgcctcttttttctattataattgagttttagcaacatgttatgctaggtagaatttggaagcacttccctttgacttttggtcatgataagaaaaattagatcaagcaaatgataaaagcagtgttttaccaaggattagggatactgaacaatttcactatggtaactgaatggggagtgaccaagggtaaaaatattaaagccaaggcaaaggcagcagattagaatggattaaagagagtttataatttgtttgcatttacttgatggtttatctcatggattcatgagtcaagaaaggtgcgtaggacaggccagggattccagttataacacattattcacccaaaggctgtgagaaataaccaaggaaacattcagacttttaactgttttatctttccaatttcatgttctttaattctgtatgagtattgggagtggattagcacaatagaggcatatgttgcttta

SEQ ID NO: 5800 - DNA, 1777 bp, Canis familiaris
ggaattccgttcggcgtgcctgatacctgcccgtagcactctgatttttgtcttccatatatattattcatggactgaagaaaccaaaatggctgaagagacaaagcatggaggacacaaaaatgggaggaaaggaggactttctggaagttcatttttcacatggtttatggtcattgcattactgggagtctggacatcagtagctgtcgtctggtttgatcttgttgattatgaagaagttttaggaaaactaggagtctatgatgctgatggtgatggagattttgatgtggatgatgccaaagttttactagaaggacctggtggggtagccaagagaaaaactaaggctaaagttaaagaactcactaaagaagagctcaagaaggaaaaagagaaaacggaatcaaggaaggagaataagaacgaagagagaagaaaggggaagaaagaaaaagaggatgagcggaaggataagaaaattgctgatgcagatatatccaggaaagaatctccaaagggtaaaaaggacagagagaaggagaatgtgggcctagacaaaagtgctaaagccaaggaaagtaggaaaaagtcaacaaatgtaaaggatgcttctagtaaaacggcatccagagacaaagatgacacaaaggaaggtaaaacctctagcaaacacacacactcagcgaagggaaataaccagaagaggaagaactgaaagctctaataccatcatcccaggaaatggtaatgttcctcatcacaatttactgctatagggcagaaaaaatatagtatcgctctggtcggggaaggtatgtcaaatagccattgagtgtatttattggtgctcagtatgtaaagggtttgaaattttagatacactgtctcatgcctctcagtttaaaagatgaagcttgtaaaaaccatgtaataaaaatgtgatataatagcttctgtttttattaatttattgatcatgtatccagataaatgtatatacatgtaatatgaattgtaatgtacttattaatcaatggaatactttcaccagggttaaatgttaagattttccgtagtgtgtatatgcagaatgccgttccagtatgacagatggttaggtgacagaggttttcttctttctccctttatgtgacctttgtcgtcttttctcctttcccttcctgcttccttgcttccctttcttcttcacctggctgtctccctctccccttctctcttcttcctcatcctctctcccccttcttcaggttcttccctggattctccttttccttctccctctcgtcccctactaggtctcccctccccagtcttattggctcttttatacctcctccttctgtctgtgcctcctggctacccacccccctcaagagcctgctcctcctcccaacttgctttggccactcagtgaatattttgtgtttcttgtgtgctacacacactgttctgagaactctggatacagtcatgcataaaagaaagaatttgtcttagaagaagagttttagaacacttttattgatatcttcacagattcagatgagttacaaaagactaagtatttcaaattaggatattctttaatcttttatcacacaattttcccattattttggtgggagtggcatatatttttcatatttgtatgtattatggtttaccatttctaaggagcttgaaatttgagatctaactagagatcagaactcaatcagaaaacatgtaataaaatgaaatttcaataaga

SEQ ID NO: 5801 - DNA, 261 bp, Canis familiaris
tgctcggccgtctccacctcttgagggtgcttggacccctcctgtcttcctcctggagctgctgctggccctgcctctaggggcccagggactctctggtgtccgcttctccgctgccaggacagcccatccactccctcagaagcacttgacccatggcatcctgaaacctgctgctcaccttgttgggtaccccagcaagcagaactcactactctagagagcaagcacggatcgtgcctttctccgacatggcttctc

SEQ ID NO: 5802 - DNA, 265 bp, Canis familiaris
aatgcaagtaatccagatgtatcggacggtgggtctcttttcgtagatattttgaagaaatggagagaggagagtgacaaaaacatcattcagagccaaattgtctctttctagaaactctttcagaactttaaagataaccagatcattcaaaggagcatggataccatcaaggaagacatgcttggcacagttcttaaatagcagcaccagtaagagggaggacttccttaagctgattcaaatccttggaacgatctgcagg

SEQ ID NO: 5803 - DNA, 2117 bp, Canis familiaris
agcggaagtcgaaacccgcaacagctcctccgaggcagcatcttaaaactgcgacaagaaaccagagtgttcgcccccgcgatccgcggacgcccggggtgggtgttggcccgtcggccgagacccggggcaccagaggagccttgacttgctctctttatcagcagtcatctgacttcagcatgattacctctcggttactggtttatgtggcagttttggttctctgtgtcataaaagtcagctcccgggatacatttattgcagctgtttatgaacatgcagtgaaattgcctaatgccaccctagtaccagtgtcccatgaagaggcattggcagtaatgaaccaaaatctggacctgttggaggcagcaatcacttcagcagcaaaccagggtgcacatattattgtgactccagaagatggtatttatggctggaactttagcagggaaactatctacccatacttggaggatatcccagaccctggagtgaactggatcccttgtaataatcctaaaaggtttggctacaccccagtgcaagaaagactcagctgcctggccaaggacaactctatctacgttgtagctaatattggagataagaagccatgcaatgccagtgactctcagtgtcccctcgatggtcgttatcaatacaacactgatgtggtgtttgattctcagggaaaactggtggcacgctaccataagcacaaccttttcatgggtgaaaatcaattcaatgtacccaagaaacctgagattgtgacttttgacaccatctttggaagatttggcgttttcacatgctttgatatactcttctatgatcctgctgttactctggtgaaagatttccatgtggataccatagtcttcccaacagcatggatgaatgttttgccacatttatcagctattcaattccactcagcttgggcaatgggcatgggagtcaacttccttgcatccaatatacatcacccctcaaaaagaatgacaggaagtggcatctatgcacccgattctccaagagcatttcattatgatatgaagacaaaagagggaaaacttctcctctcacaactggattcttatacacatcaccctatcgtggtgaattggacttcttatgccagtggtataaaagcattcccaacagaaaatcaggaatttacaggtactgctttttttgatgaattcaccttcttggagctcacaagagtcacaggaaattacacagtttgtcagaaaaaactctgctgtcatctaagctacaagatgtctgaaaagagaacagatgaagtttatgccctaggggcgtttgatggactacatgttgtcgaagggaggtattatttacagatttgtactctgctgaagtgtaaaacagcacatgtacatacttgtggtggtgcagttgaaactgcttctaccaggtttgacatgttttccctcagtggtacttttggaacccagtatgttttccctgaggtgttgctaagtgaaactcagcttgcacccggagaatttcaggtgtcaagtgacggacggttgtttagcatgaagccgctatctggacccctcttgaccgtgactctgtttgggagaatatatgagaaggaccagacattaaaggcttcatcagatcccaggtcacaagtaccaggagtaatgctcttagtcataataccaattgtgtgctcattaagttggtagaatattttcatttgttctcttttattttgtgtaatttaaaaaatgatggatgagaaaagaatgaagacgataacagtggtcatggtctcttgtacaagcaaatacaagtatattttcatatatagttcactgttttttagacacacacacacacacaccccccagataatagatgccggataaactgtgacataattttgaaagtaaaatctataaaatgagagtaacagttttacccatattttacaggatttcttggggtgagaattaaataattgaatacatttaaagtccttaggcaagttttctgggtctggtatgtgtgctcgctattataactgtgtgactatcacaataaaagcacgtgtgatataaaaaaaaaaaaaaaaa

SEQ ID NO: 5804 - DNA, 3480 bp, Canis familiaris
gagcccaacatggatgcgctcatcatcccggtgaccatggaggtgccgtgcgacagccggggccagcgcatgtggtgggctttcctggcctcctccatggtgactttcttcgggggcctcttcatcatcttgctctggcggacgctcaagtacctgtggaccgtgtgctgccactgcggggacaagaccaaggaggcccagaagattaacaatggctcaagccaggcggatggcactctcaagccagtggacgaaaaagaggaggcggtggcagccgaggtcggctggatgacctctgtgaaggactgggcgggggtgatgatttctgcccagacgctgaccggcagagtcctggttgtcttagtctttgctctcagcattggtgcccttgtaatatacttcatagattcgtcaaacccaatagaatcctgccagaatttctacaaagatttcacattacagatcgacatggctttcaacgtgttcttccttctctactttggcctgcggtttattgcagccaacgataatctgtggttctggctggaagtgaactccgtggtggatttcttcacggtgcctcccgtgtttgtgtctgtgtacttaaacagaagttggcttggtttgagatttttaagagctctcagactgatacagttttcagaaattttgcagtttctgaatatccttaaaacaagtaattccatcaagctggtgaatctgctctccatatttatcagcacgtggctaacagcagccgggtttatccatttggtggagaattcaggggacccgtgggaaaatttccaaaacagccaggcgctcacctactgggaatgtgtctatctactcatggtcaccatgtccaccgttggctatggggacgtttatgcaaaaaccacgcctgggggcctcttcatagtcttcttcatcctcgggggactggccatgtttgccagctacgtccctgaaatcatagagataataggaaaccgcaagaaatacgggggctcctatagtgcggttagtggaagaaagcacattgtggtctgcggacacatcactctggagagtgtttcccacttcctgaaggacttcctgcacaaggaccgggatgatgtcaatgtggagatcgtctttcttcacaacatttcccctaacctggagcttgaggctctattcaaacgacattttactcaggtggaattttatcagggttcagtcctcaacccacatgatcttgccagagtcaagatagagtcagcagatgcgtgcctaatccttgccaacaagtactgcgatgaccctgatgctgaagacgcctccaacataatgagagtaatctccataaagaactaccatccgaagataagaatcatcactcagatgctgcagtatcacaacaaggcccatctgctaaacatcccaagctggaattggaaagagggggatgatgcaatctgccttgcggagctcaggctggggttcatagctcagagttgcctggctcaaggcctctccaccatgctcgccaacctcttctccatagggtcattcataaagattgaggaagacacgtggcataaatactacttggaaggagtctcaaatgaaatgtatacagaatatctctccagtgccttcgtgggtctgtccttccctactgtttgtgagctatgtttcgtgaagctcaagctcctaatgatagccattgagtacaagtccgccaaccgagagagccgtatattaattaatcctggaaaccatcttaagatccaagaaggtacttcaggatttttcatcgcaagtgatgccaaagaagttaaaagggcatttttttactgcaaggcctgtcataatgacatcacagatcccaaaagaataaaaaaatgcggctgcaaacggcttgaagatgagcagccatcgacgctgtccccaaaaaaaaagcagcggaacggaggcatgcggaactcacccagctcctcgcccaagctgatgaggcatgaccccttgttaattcctggcaatgatcagattgacaacatggactccaacgtgaagaagtacgactccactggaatgtttcactggtgtgcacccaaggagatagagaaagtcatctcgactcgcagtgaagccgccatgaccgtcctgagcggccacgtggtggtctgcatctttgggcacgtcagctcagccctgattggcctccggaacctggtaatgccgctccgtgccagcaactttcattaccacgagctcaagcacatcgtgtttgtgggctccattgagtacctcaagcgggaatgggagacgcttcacaacttccccaaagtgtccatattgcctggtacgccattaactcgggctgatttaagggccgtcaacatcaacctctgtgacatgtgcgttatcctgtcagccaatcagaataatattgatgatacttcgctgcaggacaaggaatgcatcttggcgtcactcaacatcaaatctatgcagtttgatgacagcatcggagtcttgcaggctaattcccaagggtttacacctccaggaatggacaagtcctctccagataacagcccagtgcacgggatgttacgccagccatccatcacaactggagtcaacatccccatcattactgaactagtgaatgatactaatgttcagtttttggaccaagacgatgatgacgaccccgacacagaactgtacctcacgcagccatttgcatgtgggacagcatttgccgtcagtgtcctggactcgcttatgagtgcgacatacttcaatgacaatatccttaccctcatccggaccctggtgaccggaggagccacaccagagctggaggctctgattgctgaggagaatgcacttcgagggggctacagcaccccccagacgctggccaatagggaccgctgccgtgtggcccagttagcgctactggatgggccctttgcggacttgggggatggtggttgttatggtgatctgttctgcaaagctctgaaaacatataatatgctttgttttggaatttaccggctgagagatgctcacctcagcacccccagccaatgcacgaagaggtatgtcatcaccaatcccccttacaggtttgagctcgtgccgacagacctgatcttctgcttgatgcagtttgaccacaacgccggccagtcccgggccagcctctcccattcctcccactcgtcccagtcctccagcaagaagagctcctccgtgcactccatcccgtccacggcaaaccgacagaaccgacccaagtcccgggagtcccgagacaaacagacagaaaagaaatggtttacagatgaaccggataatgcctatcccagaaacattcaaatcgagcccatgagtacccacatggctaaccagatcaaccaatataaatccacaagcagcttgattccaccaatcagagaagttgaagatgaatgttga

SEQ ID NO: 5805 - DNA, 594 bp, Canis familiaris
atgggaaagaagctggtgatggcccaaaagcggggagagactcgagccctttgcctgggtgtggccatggtgatgtgtgctgtcattgcctactatatcctgggcacgaccatgctgcccctctaccagaaaagtgtgtggacgcagaaatccacgtgccatctgattgagaccaacatcagggagcaggaggagctggagggcaagaaggtgccccagtacccgtgcctgtgggtcaacgtgtcagctgtgggccggtgggctgtgctgtaccacacagaggacactcgggaccagaaccaccagtgctcctatatcccaggcagcctggagaactaccaagttgcccgggccgatgtggagaaggtcaaagccaaattccacgagcaacagattttctactgcttctcaacaacccgggagaacgagaccactgtcctgtatcggcgcctctatgggccccagaccctcctcttctctctcttctggcccaccttcctgctgaccggaggtctcctcatcatcgccatggtcaagataaaccagtccctttccatcctggcagctcagaggtagatccacacactcccatca

SEQ ID NO: 5806 - DNA, 428 bp, Canis familiaris
ttcaactggcaacagcagtgtcaccataaggcatttttctgattggccagaacctgacctggcaggttttggtttgggtgtctttagattcccctttctgttgggtcctcaccctagttctacaattcagaacagcaagtgtggagaccgcacggagaagaggatgatcctaaacagagttctgattctggggaccctcatcctgactattatgatgagcccctctggaggtgaagagattgtgggtgagtgcacacctgagggatatggggactagactagggaaaaggaattggaagggaaaaagagagaatggcataaaatagtggagactcctcaaaggtgttctcaatattaagcaattctaaaatttttaatcattcttccttcaggaaactagagacccaacccactgtctttgctccctg

SEQ ID NO: 5807 - DNA, 2117 bp, Canis familiaris
cctcactgagtcccttgaccacttctcttctacttgagtttacagtgtatcctgtgaagacccaacccctgcagcaccacaacctcctggtctgctctgtgaatggtttctatccaggccacatcgaagtcaagtgcttccagaatggccaggaagaggaagctgggatcatgttcacaggcctgatctgtaatggagactagaccttccagactctggtgatgctggagacagttcctcagagtagagaggtctacaactgccaagtggagcacccaagttcgataagccctgtcaccatggaatggagtgagaagctttctgacctcataagttcctcaccaaggagggaattttgcttattcctgagtgtcagggttctctctcattacactatattttcatttgttccatgctctcttctcttcagaacaggtcattggagatagcctagtaattgtttccataaacacctaacttcctgggaaggtaagatgcttggaagacagaaagaggtcatccctattttgaacccacctgtgatatcacaggtcatggttcccccatgaccctgggcaccagtgcccggcctcaagatgggcttcttttctggcactgttgctctgagtcgttcattgtgatctaaaaacaggtacatcatctataatgtagggaccttcctgacatgagggaagtctgaggtaaacaagcatggagtttgtgggtaaagatcctgaggcaaatgcaggaagagcctctaaatgaaactacactgaatttgtgtgacagaaacttcatgggtcacattcctcacttcctactctcctctccaccctggcatcatgtgatgtgggttgtagtgttagagaagtctaagcaggggctctgtggctggggatattgtatctgagaacagacttgcttccacacttttaatcatatatgttttccctttcttttcaggccactctggacttcagccaatgggtaatgctctttagtcctttttagagatagccttggtccctagaactgatggtagagacaacaagccaggtgacagaaataacaggaggactggaatgtgatcaggtggtttgcagtaaagcttcttttcaccacttaataaatggtctctaagatagcactggctcggggagacctaagaatgttcttcttactgcagggctttgacatgaggccctgagagagggaagaagctgcttgcagaggtgggtctggaacaatactctgctgtcttctgcaggactcctgagctgaagtggagatggtgaccctcaagaaaaaaccttcctttccagcttcttctcagagtccaaaggtttccagctttgctcttattcttccacaaatacagcactttctcaggatctggtttgccctggcttcagtgaccctgcacagcctgtgttccccgatggctccctcttccctcgtccttggacctggaacccccagtgctgactgcagtaccttatctgcattctctccttcctcttcctatgcagcccttatgtttcccttgcatgggaactcacgttctgctcacatttcgttatgagcttttctcaaataaacatggggttgagtgcttgcctttagctccgagcgtgatcctggagtcctgagattgagtcccacatcggtctccctgcatggagcctgcttctccctctgcctgtgtctctgcctctctctctgtgtgtctctcatggataaataaataaaatctttaaaaaagaagaaaaagagagaaagaaagaaagaaagaaagaaagaaagaaagaaagaaagaaagaaagaaagagagagaaagaaagaaagaaagagaaagaagaaagaaaaaaaaaagaaagaagaaagaaagaaagaaagaaagaaagaaagaaagaaagaaagaagaaagaaagaaagaaagaaagaaagaaagaaagaaagaaagaaagaaagaaagaaagaaagaaagaaaagaagaaaagaaatgcaggttccacttcaaaatggtgacatatgaagatcctgaacttacctcttcccacagacacactggatctgtagctacaggtagagtcttttcctctgaaaagaaaaaagta

SEQ ID NO: 5808 - DNA, 2880 bp, Canis familiaris
gatccggggatcaagcccccgcatcaggcttccggctcagtgaagagtctgcttctccttctctcccctacttgtgctctctctctctctctctcactattgattgctctctctctcaagtaaataaataaaatcttaaaaaaaaaaaaaaggctcatgacactggcccttattgggccacatggtcagtttggagggaagcctgcttgaaatgcagcctgtgaccagagactggaggcaggaaggcagccaaccagggagacttgctttgtctgtcttcctcactgagtccctctaccacttctcttctagtcgagcctacagtgactgtgtatcctacgaagactcagaccttgcagcatcacaacctcttggtctgctctgtgaatggtttctatccaggccacattgaagtcaggtggctccggaatggccaggaagaggaagctggggttgtgtccacaggcctaatccgtaatggagactggaccttccagatcctggtgatgctggagatagttcctcagagcggagaggtctacacctgccaagtggagcacccaagtttgacaagccctgtcaccgtggaatggagtgagaagcttcctgacataagttcctcaactaccaaagaggggatttgcttatttctgagtgtcagggttctctctctccttataccatatttccgtttcctccgtattctcttctgtttagcacaggtccctgggggtagctgagtgatgtcctctgataatttaagatatcctgtgattatttctacagatcctgctgtctttggggaggcagttagatgtggcaggcagaaaggaggttatccatgttttcagattttccatggttcacaggtcagagttccatcttgacactgggcaccagtccactgcctttggctgggcttgtgcttctggcactgttgctcgagttctcattgtcatctgagacccttacattgtagggactttctgacttgaggggaaccaatcttggattccttttattagctctgtcaccctgcacaagctacttgtacttcacggagtcccaggctcctcatccatagatgttgaagtagtggatttgtcagaattgtgatatttaaaaggtcaatgcatagacttcgtatctactccatgtgattttagatttcttttccacaaattgctaattattctacttcttccaaggcagccttccttcctcattctcaaagttctcaaactgagtgtccatcagtttggtgtaaaaatcactaaagtgacattctcaatcccagtgtccatcagtttggtgtaaaaagcactaaaactgcttcttctttcaggggcacagtctgattctgcacagagcaagatgctgagtggaatcgggggctttgtcctgggtctgctcttccttgcagtggggctgttcatctacttcagaaatcagaagggtaaggcacctgttggtagctgagactccccagagactatgtggagagaaatacagctttgatcaaagctctctgtgtaccgatggccctgtataaagccattctttcccaatttgacctcagattccttagaaatccagaagtcagcagtccatggttactgtgtcacagcctaagaggtcatgtgttctgtagagctaagaaggagattaacaagcatgaggatcttgggttgagatcctgggccaaatgcaggaagagacgataaagctaatgaaactggatccgtgacagagacttcatgggtcatatctttcactttccactctcccctggcatcatacaatatgggttggcctgttagagaaatctaaggaggcaggtctggggctggaatcttgtctatggggccagatttacctccatatctgtttaagtctatgtcttcccttctcttttccaggacactctggacttcagccaacaggtaatgctccttcatcccctttacagatagatttggttatcctggttatcctggttatcctggagcagatagtaaaggtgaaaagacagaaataatgggagagactttgttgttgttgttgttttttaaaaagattttatgtatttattcatgagagacacagagagagagagacagagacacaggcagagggagaagcaggctccttgtagggagcccgatgtgggactcgatcctgggactccagggttataccctgagctgaaggcagatgctcaaccactgagccacccaagcatcccagtaaagactttggatctgacttctgatctggcagtttatactgacgctacctctctccacttagtgaaaggcctgcgctgtaaaatagctctggcccaaggagacctaaaaatatgtaatactgcagcgctttgacatgagtccttgagagagaggagaagaagctgcttatagaggtgggtctggaacaatactctgctctgtcttctgcaggactcctgagctgaagtggagatggtgaccctcaagaaaaaaccttcctttccagcttcttctcagagtccaaaggtttccagcttggcttggctcttattcttctacaaatacagcgctttctcaggatctggtttgccctggcttcagtgaccctgcacagcttgtgttccccaatggctccctctgccctgtccttgacctggaacccccagtgctgactgcagtaccttatctgcattctctccttcctcttcctatgcagcccttatgtttcccttgcatgggaactcaccttctgctcatgtttctttataagcttttctcaaataaatgtggattgaaaatcatctgcttcatgtgttttcaagaagagaagtaaaaaaaaaaaaaaaaagaaagagggagaatgggaggatcc

SEQ ID NO: 5809 - DNA, 1442 bp, Canis familiaris
tgtacttgaaccaacactgtattctgactttcacaacttcattttcacagaacctgaggttccaacccctatgtcagagctgacagagactgtggtctgtgccctggggttggctgtgggccttgtgggcatcgtgatgggcaccgtcttcattatccaaggcctgcgctcaggtggtacttccagacatcaaggacctttgtgagctgcacctagaaggaaggtaaggattcagatttgtcagagctgagagttggagacacagtccaggaggatggaaagtgggaggagtttgtggacccaaatgtggttggaaggttataggagaattgggagaggggatgatgacagcacagcagccccctaaaatccaaccatctatgtctgtcctattgcaggtgcactgcatgcccacctcccagagcagaagagtggacctgataggccacctagcactatttccttgcccagttcatcatactcctactctctaccaatgcttctctgtcacctcttctctgggactcaagaactatatcctctgagtgctaaccctttaaattctaccccttccttgactgcctgtttttgtttgtttgttttcttttcttttctcaattgtcaactacaatgagatctctgggatatcccaaccagttacctgatccctcattactctgatctagcattcccatggaaataattattttctctttaagagatcctttagatcaatttttcctgtctttcatctcagggctgattaggactttggtccccccttttattataccttcctaatctcactttccatattatgtttcatgcccagcaacaccagaaaatgcaggtataggctgataatattttgatatcttaggtaaggataatggttctctcttcctgttattctcatgtttgggtactgccacactcccccaattcagacaccaagaaaagtaatataagccctctgaccttggtgtaaatttggtatagaagaaatacaaagccaagaaataagttcatacttcttttaacataattttagaaagctatgacagagaaataagttaagataaagaaattttgaatttcaaagtaccaaaagacaaactgttttccaaaactttaaaatttcaatttgtgaagaatgaatgatgataggagaagctttcctctcccatcctcacccatgaaaagataagaattctttaggcaggaaaataaatggaagtcgggtaagagagcattagaataagaccataaagtaagtaactgaggacaggtacttagggacagcaacaacaggatgagaaaggggagtagaatcatagacatggttaagtttcttagaacacaggtgtagtttgcctcacctcttacatgaatctcttctagataagcacgtcgactttcctgtgccgtggtggcatatcagg

SEQ ID NO: 5810 - DNA, 1961 bp, Canis familiaris
caggttggcttattttggggagctctgggatcctgctcgtcctgaagatcgggtgatcattgacatcagccatgtcatcgaggccttttgagagtccacctccgtatagacctgatgaattcaaacccaatcattatgcaccgagcaatgatgtgtacggtggggacatgcacgtccgacccatgctctctcagccggcgtattctttctacccagaagatgaaattcttcacttctacaaatggacctctcctccaggagtaattcggattctgtccatgcttgtcattgtgatgtgcatcgccatatttggctgtgtcgcgtccacgctcgcctgggatagaggctatggaactggcttaatgggtggtagcataggctacccttacggaagtggcttcgggagctacgggactggctacggctacgggtttggctacggctacggctacggcggctacacggatcccagagcagcaaagggcttcctcctggccatggtggccttttgttttatcgctgcattggtgatatttgttaccagcgttataaggtctgacatatccagaaccagaaggtactacttgactgtaataatactgagtgccttcctgggcgtcatgatgttcattgctacaattgtctatataatgggagtcaatccaactgcccaggcttctgggtctttatacagttcacagatatatgccatgtgcaaccagttctatgcatctacagctaccggactctacatggatcagtatttgtatcactactgtgtggtggatccccaagaggcaattgccattgtcctgggattcatggtgattgtggcttttgctttaataattttctttgctgtgaaaactcgaagaaagatggaccggtatgacaagtcgaatatattgtgggacaaggaacatatttatgatgaacaaccccccaatgttgaagagtgggttaaaaacgtttctgcaggcacacaagacatgcctcctcccccttctgactatgtggagagagtggacagtcccatggcgtactcttccaatggtaaagtgaatgacaagcggttgtatccagagtcttcctataaatcaacaccggtccccgaagtggtgcaggagctgcccgccacctcccctgcggatgacttcaggcagcctcgctacagcagcagcgggcacttggagccaccttcgaagagggccccctcgaaaggaagaacgggaaggcccaagaggctggagcaggaccactatgagacagactacacgacgggcggcgagtcgtgtgacgagctggaggaggactggatcagggaatatccacctatcacttcagatcaacaaagacaactctacaagagaaattttgacactggcctgcaggaatacaagagcttacaagcagaacttgatgagatcaataaagaactctctcgcctggataaagaattggatgactatagagaagaaagtgaagagtacatggctgctgctgatgagtacaatagactgaagcaagttaagggatctccagattacaaaaataagaggaattattgcaagcagttgaagagcaaattgtcccacatcaagaagatggttggagactatgatagacagaaaacatagaaggcagatgccacacagtttgagagattgtgaagtatttgacatatctgcaacgttgtcagaaggcagaatgactttggatttcgaacccaggaggccagatctttgtgatcattacaaagttttggtagctttaatatcatcagtattgaagcattttacacatagcttttgataatcaactgggctgaacactcccgattaaggattctgtgctttagactttggctgttgtgctaaaggactgagtataggtggaggttttcagaccttggaagaaggtcccacggtgaacttgtgctgtgaacttgcacacttggggca

SEQ ID NO: 5811 - DNA, 952 bp, Canis familiaris
gagcacacccgtgaccctgagacctgcccagggcttggacttcctctgttcagctggttgagacctgcaagggggccagccgcaggggggctgactggtgtgcccccagcccacagcgtgagggagtctagaagccagacgtcgccgtgggttctctgccaacctggccatgaacctggagccaccgaaggccgagatccggtcggccaccagggtgattggggggcccgtcactcccagaaaagggccccccaaatttaagcagcggcaaaccaggcagttcaagagcaagccccccaagaaaggcgtccaagggtttggggacgacatccctggaatggaaggcctggggacagacatcacggtcatctgcccttgggaggccttcaaccacctggagctgcacgagctggcccagtacggcatcatctagcgccagagcctgacccagaggcttggggccagggtccctgccgcccactccgctccctgctccgggtgcctgcgaggaggccggcccccccccgcggtgtccagatggcccagtgtgtgtctggagaccctcgcagggtggcagcctcagcccccagacgcccattaccagaagcccaccagctccctgcaggacccctcgggccctgcttcactaccacaaacaccggcccacagaccttctcttagggcaggaaggccaggcaggtgtcccaggaatgtgcatcacaccccgctcccctcctttggtctagtgacgaggacgagcccccctcactagtcttcccagctggcgcccttgagctgagtgggcaaggggggggggtccccggcggcctcagagcagcagccctctgaagccaacacagcagcaggaagcatcctgtccagcattgcccatgcttgctgtccctgtttcagagtaaagttagtgtggcccccaaaaaaaaaaaaaaaaaaa

SEQ ID NO: 5812 - DNA, 2956 bp, Canis familiaris
cccccctcggcctccagggcggcggcaaccccggcccccgctcccgtcccccgcctgcggggctgagccgagcgctcgcggtggcggcggccaagcggaggggccggccttgccaggaacgcggagggaggggtggggagagacagccagctcgcccaccccgctccgggcggagggcggagggcggcgggcggcgggcggcggcgcgtcccggggccgagcgcgtctgtccggagccgagcggagcggcgcgggaaggatgctggcgggcaggggcgcgcgcgcgggcggcgggctgccgcggggctggaccgcgctctgcctgctcagtctgctgccctttgggttcacaaacacagaaaccgtgattactcctaccacagtgccaacctccacagaaataatgtcagctgtttctgagaatacatccaaacgggaagccatcacactaactccttctggaactaccaccctgtactctgtctctcaagacagcagtgggaccacagcaaccatctcagagactacagtccatgtcacatctacctctgagatcaccctaacgcctgggaccatgaactcttctgttcagtcgcagacctctttagctatcacggtatcttttaccccaaccaacttttcaacttcaagtgtgaccttggagcccagcctgctacctggaaatggttcggatcccccctacaacagcaccagccttgtgacatcccccacggaatattatacatcactttctcctaccccaagtagaaatgacaccccaagtaccatcaagggagaaatcaaatgttccggagtcaaagaagtgaaattgaaccaaggtatctgcctagagctaaatgagacctccagctgtgaggactttaagaaagataacgaagaaaaactgacccaagtcctgtgtgagaaggagccagctgaggctggggccggggtgtgctccctgcttctggcccagtctgaggtgaggcctcactgcctgctgctggtcttggccaacaaaacagaacttttcagtaaactccaacttctgagaaagcaccagtctgacctgaaaaagctggggatccgagacttcactgaacaagatgttgggagccaccagagctattcccgcaagaccctgattgcactggtcacctcagggatcctgctggctgtcttgggcaccactggttacttcctgatgaaccgccgcagttggagccctacaggagaaaggctgggcgaagacccttattacacggagaacggtggaggccagggctatagctcaggccctggggtctcccctgaggctcagggaaaggccagtgtgaaccgtgggcctcaggagaacgggaccggccaggccacgtccagaaacggccattcagcaagacaacacatggtggctgatacagaattgtgactctggggggggagtaaggctgggcagggtctggggaaggggcccctcccagcacctgaccacatgctgcctctgtgctggagctgccaccacttacattctagcctttcctgctgcacacaccctccgaggccattcctggggccctgcactgcaccaggccgaggggttctctccatcctggggcccgggaggtaacccctaccttttatacattcatctcactaagcctagagtctggtctcctttgagaaaagacatgagggagacgtgccaaagtatagagaagctaccagagttgggggggtggggggtgatgatctcacatcattcacgtgtgggcttcttccctcttcctcctctctgccttattaaaagaacttccagggggaagcatggccttttctgggctacaatgtcctcctgggaggctttgtcttttcctgtgtcttcctcatgtctgtctcctctactttagggaaaccaaagcacctgctcctttgtaatgctatagccagcaagacttgttgtcttaaaccgtctcccttgtgctcacaccagctcactgtggattcaggcaaccggcttccctcatgctctccgggctccctgagctccacaccttctccctgcacctctgtgtacagaagcctgcactgttctctggctgagcctggaacgagactccaagttttgaacaatgtcttgtgtctatgtttgggagacagcatagggatgcgtggacacatgcgttcctatctttggggacaaatgaaggagaggggatggctcagtccttgtctctctggggctcacagagtctcatcttgggcccccgtttctccctgtgagtctcagtgaacgggaccaagggaccagatcttggagccaagcctcttgacccatgcacctctgaagaagcccctcgctcgaaggctaggtcctggccttgccctctgatcctgatggcttcctccttcctccctctgactcctgggtgagctgtggactcagactcccagcagactcctttctgtctcagcctccccgaccccaaccccctcactgttctgtacccccatatagtcagggcccccgacatctccagaggaccttcatcacaagccatctcctctgtaggtggcccaggttctcatttatttttttaggtattttttttttccagaggggtgagcagagatcttggtttcaatgacggttggaaatagaactttccagagataggaagactgggtggattttatttctgaatacaaaaatggtgtgtgtaaatactgtaattaaagtgataccgagacacatctgttctgtgtcgctgccccagccaggtgtgtctgaatgccacggcggtgtccctggtgtcccggtcagacccggccagacttcccaatgatgtggtagagaggggtgaccctggaaagaggtgggcccatctcgggggatacaggcaaaagccagggtgctgccccttggccaagtgtccctatgggtggggggggttggagg

SEQ ID NO: 5813 - DNA, 5637 bp, Canis familiaris
atggatttatctgcggatcgtgttgaagaagtacaaaatgttcttaatgctatgcagaaaatcttagagtgtccaatatgtctggagttgatcaaagagcctgtttctacaaagtgtgatcacatattttgcaaattttgtatgctgaaacttctcaaccagaggaaggggccttcacagtgtcctttgtgtaagaacgatataaccaaaaggagcctacaagaaagtacaagatttagtcaacttgttgaagagttgttgaaaatcattcatgcttttgagctggacacaggattgcagtttgcagacagctataacttttccaaaaaggaaaataactctcctgagcatctaaaggaggaagtttctattatccaaagtatgggctatcgaaaccgtgccaaaagacttcgacagagtgaacctgaaaaccctaccttggaaaccagtcttagtgtccaactctctaaccttggaattgtgagatctctgaggacaaagcagcagatacagcctcagaataagtctgtctacattgaattggggtctgattcttctgaagatacagttaataaggcaagttcttgcagtgtgggagatgacgagttagaaatcacctctcaaggagccagggctgaagccagtttgaatcctgcaaaaaaggctgcttgtgaattttctggggacataacaaatattgaacatcatcaatccagtaataaagatttgaccaccactgagaagcatgcaactaagaagcatccagaaaagtatcagggtatttctgtttcaaacttgcatgtggagccatgtggcacaaatactcatgccagctcattacagcatgagaacagcagtttattactcactaaacacagaatgaatgtagaaaaggctgaaatctgtaataacagcaaacagcctggcttagcaaggagccaacagagcagatgggctgaaagtaaggaaacatgtaatgataggcagattcccagcacagagaaaaaggtagttgtgaatgctgatctcctgtgtgggagaaaagaactgaataaacagaaacctccacactctgatagtcctagagattcccaagatgttccttggataacactgaatagtagcatacggaaagttaatgagtggttttccagaagtgacgaaatattaacttctgatgattcacatgacagaggatctgaattgaatactgaagtaggtggtgcagtagaagttccaaatgaagtgggtgaatattctggttcttctgagaaaatagacttaatggccagtgatcctcaggatgctttcatatgtgaaagtgaaagagtccacaccaagccagtaggaggtaatatcgaagataaaatatttggaaaaacctatcggaggaaggcaagcctccctaaggtgagccacacaactgaagttctaactataggagcgtgtgctatagaacctcagacaatgcaaacccatcccttcatgaataaagcagagcataaaaggagaactacatctagccttcatcctgaggattttatcaagaaagtagagttaggcattgttccaaagactcctgaaaagctaattgagggaatcaaccaaatcaagcgagatggtcatgtgataaatattacaaataatggtcctgagaatgaaacagaaggtgattatgttcagaaagagaaaaatgctaacccaacagaatcattggaaaaagaatctgcttttagaaccaaaactgaaccaatgagcagcaggataagcaatatggaactggaattaaatagctccagttcaaaagcacctaagaagaacaggctgaggaggaagtcctctgccaggcacacttgtgcccttgaattcgtagtcaatagaaatctaaacccacctgatcatagtgaactacagattgaaagttgttctagcagtgaagagatgaagaaacagcatctggaccaagtaccagtcagacacaacaaaacacttcagctcatgcaagataaagaacctgcaggtagagctaagaaaagtagtaagccaggagaacaaataaataagagactcgccagccatgcttttccagagctaactttaacaaatgtatctggtttttttgctaactattcaagttctagtaagcctcaagagtgcatcaaccctggccttcgaagagaagaaatagaagagagccgaagaatgactcaagtgtctgatagtaccagagatcccaaagagctggtattgagtggaggaagaggtttgcaaactgagagatctgtagagagtaccagtatttcattggtacttgatactgattatggtacacaggacagtatctcattactggaagctgacaccctgaggaaggcaaaaacagtatcaaatcaacaggcgaatctgtgtgcaacaattgagaaccccaaggaacctatccatggttgttctaaggacactagaaatgacacagagggttttgtagttccattgacgtgcaaagataaccacactcaagagacaagcatagaaatggaagagagtgaacttgacacgcagtgcttacgcaatatgttcaaggtttcaaagcgtcagtcatttgctctgttttcatatccaagagatccggaagaggactgtgtaacagtctgtccccgctctggggcctttggaaaacaaggtccaaaagtcactctagaatgtggacagaaagaagaaagtcagggaaagaaagagtctgaaatcagacatgtgcaggcagttcatacaaatgcaggcttttctgcagttagtcagaaagctaagaagccaggcgattttgccaaatgtagcataaagggagtctctcggctttgtctgtcatctcagttcaaaggcaaggaaactgaactccttattgcaaattaccatggaatttcccaaaacccttatcatataccaccactttctcccatcagatcatgtgttaaaactctatgtcaggaaaacctgtcagaggaaaagtttgagcaacattcaatgtcacccgaaagagcagtgggaaatgagagagtcattcaaagtacagtgagcacaattagccaaaataacattagagaatgtgcttctaaagaagtcggctcaagcagtgttaatgaagtagtttccagtactaatgaagtaggctctagtgttaatgaagtaggttccagtggtgaaaacattcaagcagaactaggtagaaaccgaggacctaaattaaatgctatgctcagattaggtcttatgcaacctgaagtctgtaagcaaagcctttctttaagtaattgtaaacatccagaaatgaaatggcaaggacaaagtgaaggagcagttctgtctgttagtgcagatttctctccatgtctgatttcagataacccagaacaacctatgggaagtagtcggtcttctcaggtttgttctgagacacctgatgacctattaaatggtgacaaaataaagggaaaagtcagctttgctgaaagtgacattaaggaaaaatctgctgtgtttagcaaaagtgtccagagtggagagttcagcagaagccctagcccttcagaccatacacgtttggcccagggttaccagagagggaccaagaaattagagtcctcagaagagaacatgtctagtgaggaggaagagcttccctgcttccaacacttaatatttggtaaagtaaccaacatgccttctcagtctaccagtcacaatgcagttgccgcagagggtctatctaacaaaacagaggagaacctagactcattgaagaatagtttaagtgacatcagtaaccaggtaccgtcagcaaaggcatcccaggaacatcaccttagtgaggaagcaagatgttctggcagcttattttcttcacagtgcagtgctttggaagacttgactgtaaatacaaatacccaggatcctttctcgatgtttgatcctacttccaaacaagtgaggcatcaatctgaaaatctggacgttctgaatgacaaggaattggtttcagatgatgatgatgaaagggaacctggcctggaagaggatagtcctcaagaagagcagagtgtggattcagacttaggtgaagtggcatctggatatgagagtgaaacgagcctctctgaagactgttccaggttgtcctctcagagtgatattttaaccactcagcagagagataccatgcaagataacctgataaagctccagcaggaaatggctgaactggaagctgtgttagagcagcatgagagccagccctctaacagctccccttcccttatagcagattcttgttcgcctgaggatctgctgaatccggaacaaaacgcatcagaaagagtattaacttcagagaaaagtagtgactctcctataagccagaatcccgaaagcctttctactgacaaatttcaagtatttctggatagttccaccagtaaaaatggagaaccaggaatgatacggtcttccccttcacagtcccggttgttagatactagatggtatgtacacagctgcccaaggagtcttcaggacactaactgcccatctcagaaggagctcactaaggttgtcagtatggaggagcaacaaccaactgagtcagaagcaagagatctcatggagcaatcttatttgtcaagaccagatctggagggagccccttacctcgaatctggaatcagccttttctctgatgaccctgagtctgatccctcgtcacacagagcctcagagctggctcatgttagcagcatgccaacttcaacctctgcgttgaaattaccccaatttcaggtcgaagaatcagccaagagtacagctgctgtccatattgctagtactgctgggtataataaaagcgaagacagtgtgggcatagaaaagccagaagtgatatcttcaacaagaggagtcaacaaaagaatatctatggtggcatcaggcttgaccccaaaagaatttatgcttgtgcacaagtttgccagaaaacaccacatctctttaactaatctaatttctgaagagacaactcatgtcattatgaaaacagatgctgagtttgtgtgcgaacgaacactgaaatattttctgggtattgcaggaggaaaatgggtagttagctatttctgggtaacccagtctattaaagaaagaaagatactagatgagcatgattttgaagtcagaggagatgttgtgaatggaagaaatcaccagggtccgaagcgagcaagagaatcccaggacagagaatcccaagacagaaagatcttcaggggcctagaaatctgttgctatggaccctttaccaacatgcccacagatcaattagagtggatggtgcacctctgtggggcttctgtggtgaaggagccttcgttattcaccctcagcaagggcactcatccagtggtagtcgtgcagccggacgcctggacagaggacagtggcttccatgcgattgggcagatgtgtgaggcacctgtggtgacccgagagtgggtactggacagtgtagccctctaccagtgccaggagctggacacctacctgatcccgcagattcccagaactgctgcagactccagccagccatgcgtgtaa

SEQ ID NO: 5814 - DNA, 1226 bp, Canis familiaris
acgatgggcggaggcggcgggctgccggagcccgaggactcggtgctgttccggcgcggcactggccagagtgatgattctgacatttgggatgatacagcattgataaaagcttatgataaagctgtggcttcatttaagcatgcgctaaagaatggtgacatttctgaagcttcagataaaccaaaaagcacacctaaaagaaagcctgctaagaagaataaaagccaaaaaaagaatgctaccacagccctgaagcagtggaaagttggtgacaaatgttctgctgtttggtcagaagacgggtgcatttacccagctaccattgcttcaattgattttaagagagaaacctgcgttgtggtttatactggatatggaaatagggaggagcaaaatgtgtctgatctactttccccagcctgtgaagtagcaaataatgtagaacaggatactcaggagaatgaaaatgaaagtcaaatttcaacagatgaaagtgagaactcctccaggtctcctggaaataaaccaaataacatcaagtcaaaagctgctccatggaactcttttctccctccaccacccccaatgtcaggatcgggactgggaccaggaaagcctggtgtaaaattcagtggcccaccaccacctccaccaccaccacacttcctatcatgctggctgcctccatttccttctggaccaccaataattcctccaccacctccgatatgtccagattctcttgatgatgctgatgctttgggaagtatgttaatctcttggtacatgagtggctatcatactggttactatatgggtttcaaacaaaaccaaaaagaaggaaggtgctcacacttcaattaaggaattcaggtgcagctctctcccaaggagaatggtattttgatgcgccacggtcaatgtgaacaaaatttcatctttttcttcatgaagagttggttgggtggcacagtcacccgtatttccgcatgttgtatgcgactcatgcttaaataacaagctgtgtgtttcaagggaatcatcagtttaactcagtaatggaaatgtgagtaattaactcagtcacatgtagtacagaaaagtcaacctgtgaaaatttcgactcagcacatttgtatattgtaacttccctagtataaagtgtgttaagcttcctattaatgcctttaaaataaatgataaatttttttaaaaaaaaaaaa

SEQ ID NO: 5815 - DNA, 676 bp, Canis familiaris
gggtcccccgggcaccccatctgtagtccatggcttcctcgtgactaggcacagtcaaacaacagacgacccacagtgtccacctgggaccaaaattctttaccacgggtactccttgctctacgtgcaaggcaacgaacgagcccatggccaggacttgggcacggcggggagctgtctacgaaagttcagtacgatgcccttccttttctgcaacatcaacaacgtgtgtaacttcgcctcccgaaacgactactcctactggctatccacgccggagcccatgcccatgtccatggcgcccatcgccggggacaacatcaggccatttattagcaggtgcgcggtgtgtgaggcgccagccatggtgatggctgtgcacagccagaccattcagatcccgcagtgccctagcggctggtcctccctctggatcggctactccttcgtgatgcacaccagcgccggcgccgaaggttctggccaagcccttgcgtctcctgggtcttgcctggaagagtttcgaagtgcgccattcatcgagtgccacggccgtgggacctgcaactactacgccaatgcttacagcttctggctcgccactatcgagagaagcgagatgttcaagaagcccacgccatccaccttggaggcaggagagctacgcacacacgtc

SEQ ID NO: 5816 - DNA, 608 bp, Canis familiaris
gcacagtcagacggatcaggaacccatgtgccccgtgggcatgaacaagctctggagtggatacagcctgctgtacttcgaaggccaggagaaagcccacaaccaggacctggggctggcgggctcctgcctggctcggttcagcaccatgcccttcttgtactgcaaccctggtgatgtgtgctactatgccagccgcaacgacaagtcctactggctgtccaccactgccccgctgcccatgatgccggtggccgaggatgacatcaagccctacattagccgctgttccgtgtgcgaggccccagccgtcgccattgcagtccacagtcaagatgtctccatcccccactgcccagctggatggcggagtctctggattggatattccttcctcatgcacacagcagccggcgatgaaggtggtggccagtcgctggtgtcaccgggcagctgtctggaggacttccgtgccacgcccttcatcgagtgcagtggaggccgtggcacttgccactactacgccaacaagtacagcttttggctcaccaccatccccgagcagagcttccagggctcgccctccgccgacaccctcaaggcggggc

SEQ ID NO: 5817 - DNA, 633 bp, Canis familiaris
caccaggcatagtcagaccacagtgattccttcctgtccagaagggacagcgccactctatagtggcttttctcttcttttcatacaaggaaatgaacaagcccatggacaagacttgggaactctcggcagctgcctgcagcgatttaccacaatgccattcttgttctgtaacatcaacaatgtctgtaattttgcatctcgaaatgactactcatactggctgtcaacaccagctctgatgccaatggacatggctccaattactggcagggccctggagccttatattagcagatgcactgtctgtgaaggtcctacgattgccatagccattcacagccaaaccactgacattccctcatgtcccaatggctggatttctctctggaaaggattttcgtttatcatgttcacaagtgcaggttctgagggtgctgggcaagcactggcctcccccggctcctgcctggaagagttccgagccagtccgtttatagaatgtcacggaagaggaacgtgcaactactattcaaattcctacagtttctggttggcttcgttaaacccccaaagaatgttcagaaaacctattccatcaactacgaaagctggggagttagaaaagataat

SEQ ID NO: 5818 - DNA, 627 bp, Canis familiaris
ccacagtcagacggatggggagcccacctgccccgcgggcatgcccaggctctggacgggctacagtctgttatacctggaaggacaggagaaggcccacaatcaggaccttggtctggcagggtcttgccttcccatgttcagcaccctgccctttgcctactgcaacatccaccaagtgtgccactacgcccggagaaacgaccggtcctactggctggccagtgctgcgcccctgcccatgatgccgctctcagaggaggagatccgcccctacatcagccgctgtgccgtgtgcgaggccccagcccccgtggtggcgctgcacagccaggaccggtccatcccgccgtgtccacggagctggaggagcctctggatcgggtactcgttcctgatgcacacaggggctggagaccaaggaggagggcaggccctcatgtcccccggcagctgtctggaagatttccgagccgcaccgttcctcgaatgccaaggccgacagggaacttgccacttttttgcaaatgagtatagcttctggctgacgacggtgaggcctgacttgcagttttcctcggcaccatcaccagacaccttgaaagaaagccaggcccagcgccagaa

SEQ ID NO: 5819 - DNA, 618 bp, Canis familiaris
tggtgaagcacagccagtcagaacagctgcccctgtgccctgccgggatgagccagctgtgggtgggttacagcttgctgttcgtggagggccaggagaaagcccacaaccaggacctgggttatgctggctcctgcctgccccgctttagcaccatgcccttcatctactgcaacatcaacgaagtgtgccactacgccagacgcaatgataaatcctactggctctccaccaccgcccccattcccatgatgcccgtcggccaggcccagatcccccagtacatcagccgttgttcggtgtgcgaggcaccctcacaggccattgccgtgcacagccagggcatcaccatcccgcagtgccccctgggctggcacagcctctggattgggtactccttcctcatgcacactgccgctggtgccgagggcggcggccagtccctggtctcaccgggctcctgcctggaggatttccgtgctactcctttcattgagtgcagtggggcccggggcacctgccactacttcgccaacaagtacagtttctggctgacaaccgtggaagagaggcagcagttccgggaggaaccagtctctgaaacgctcaaggctgggc

SEQ ID NO: 5820 - DNA, 440 bp, Canis familiaris
gcatgactgctatctacctgatgtccatgctttttggcctagcatgtgggcaagcaatgtctttttgttttcctactgagtatacgatgcatgtcgaaaggaaagagtgtgcttactgcctaaccatcaacaccaccatctgtgctggatattgtatgacacgggatatcaatggcaaactatttcttccaaaatatgctctgtcccaggatgtttgtacatatagagactttatgtacaagactgtagaaataccaggatgcccgcgccatgttactccctatttctcctaccctgtagctgtaagctgtaagtgtggcaagtgtaatactgactatagtgactgtatacatgaggccatcaagacaaactattgtaccaaacctcagaagtcctatgtggtgggattttctatctaacttcaatagtgatgtaatttg

SEQ ID NO: 5821 - DNA, 794 bp, Canis familiaris
tatgaagtgagtgtctatgctcttaaggacacgttgacaagcagaccggctcagggagttgtcactactctggagaatgtcagccctccaagaagggcccgggtgacagatgctaccgagaccaccatcaccattagctggagaaccaagaccgagacaatcaccggcttccaagttgatgccatcccagcaaatggccagaatccgattcagagaaccatcaggccagatgtcagaagctacaccatcacaggtttacaacccggcactgactacaagatctacttgtacaccctgaatgacaatgcccggagctcccctgtggtcattgacgcctccactgccattgatgcaccatccaacctgcgtttcctggccaccacacctaactccttgctggtatcatggcagccaccccgtgccaggattactggttacatcatcaagtatgagaagcccgggtcccctcccagagaagtggtccctcgtccccgccctggcgtcacagaggctactatcactggtctggaaccaggcaccgagtacaccatccaagtcattgccctcaagaacaaccagaagagtgagcctctgattggaaggaaaaagacagaatggtgccatgataatggtgtgaactacaagattggcgagaagtgggatcgtcagggggagaatggccagatgatgagctgcacatgtcttggaaatggaaaaggagaattcaagtgtgatcctcatgaggcaacgtgttacgacgatgggaagacataccatgtgggagaacagtggca

SEQ ID NO: 5822 - DNA, 1567 bp, Canis familiaris
tatgaagtgagtgtctatgctcttaaggacacgttgacaagcagaccggctcagggagttgtcactactctggagaatgtcagccctccaagaagggcccgggtgacagatgctaccgagaccaccatcaccattagctggagaaccaagaccgagacaatcaccggcttccaagttgatgccatcccagcaaatggccagaatccgattcagagaaccatcaggccagatgtcagaagctacaccatcacaggtttacaacccggcactgactacaagatctacttgtacaccctgaatgacaatgcccggagctcccctgtggtcattgacgcctccactgccattgatgcaccatccaacctgcgtttcctggccaccacacctaactccttgctggtatcatggcagccaccccgtgccaggattactggttacatcatcaagtatgagaagcccgggtcccctcccagagaagtggtccctcgtccccgccctggcgtcacagaggctactatcactggtctggaaccaggcaccgagtacaccatccaagtcattgccctcaagaacaaccagaagagtgagcctctgattggaaggaaaaagacagatgagcttccccaactggtaacccttccacaccccaatcttcacggaccagagatcttggatgttccctccacagttcaaaagacccctttcatcaccaaccctgggtatgacactggaaacggtattcagcttcctggcacttctggtcagcagcccagtgttgggcaacaaatgatctttgaggagcatggttttaggcgcaccacaccgcccacaacggccacccctgtaaggcataggccaagaccatatccgccgaatgtaaatgaggagatccaagttggtcatgtccccaggggagacgtagaccatcacctctaccctcacgttatgggactcaatccaaatgcctctacaggacaagaagctctctctcagacaaccatctcttggactccattccaagaaagctctgagtatatcatttcatgtcatccagttggcattgatgaagaacctttacagttccgagttcctggcacttctgctagtgccaccctgacaggccttaccagaggggccacctacaacatcatagtcgaggcactgaaagaccagaagaggcacaaggttcgggaggaggttgttaccgtgggcaactctgtggaccaaggcctaaaccagcctacagatgactcgtgcttcgacccctacacggtttcccattatgccattggagaggagtgggagcggttgtctgaatctggctttaagctctcgtgccagtgcttaggctttggcagtggtcatttcagatgtgactcatctaaatggtgccatgataatggtgtgaactacaagattggcgagaagtgggatcgtcagggggagaatggccagatgatgagctgcacatgtcttggaaatggaaaaggagaattcaagtgtgatcctcatgaggcaacgtgttacgacgatgggaagacataccatgtgggagaacactggcaga

SEQ ID NO: 5823 - DNA, 1900 bp, Canis familiaris
gccttgtgggggactgctcctatcaccccacactcttgctcccacttactgcccccctggtccccctgggctgggccaaggctctctggaagccacacacctcccttcctgccctctccccacactgttgccagctgatttcatttgcctgacgttgtcctcattggccctaccttctctgtcagtgctccccccaacccccccagagttggggccaggccaggccagctcctctggcagcagagctggggcaggtgacgggttggcgtcgcagctgagggagtgaagaggcgcctgggaactggagctggaaacctaggagaggtgcagtcagagtccaagagccggagctacacctcaacctatcagccatgggggagatggagcagctacggcaggaagcagagcagctcaagaagcagattgcagatgccaggaaagcctgtgctgacactactctggcagagctggtgtcaggcctagaggttgtaggaagagtccagatgcggacacggcggacgttaaggggacacctagccaagatctatgccatgcactgggccaccgattccaagctgctggtaagtgcctcgcaagatgggaagctgatcgtgtgggacacctataccaccaataaggtgcatgctatcccactgcgctcctcttgggtcatgacctgtgcctatgcaccatcagggaactttgtggcatgcggggggctggacaacatgtgctccatctacagcctcaaatcccgtgagggtaatgtcaaggtcagccgggagctgtctgctcacacaggatatctctcctgctgccgcttcctggatgacaacaacattgtgaccagttctggagacaccacttgtgctctgtgggatatcgagaccgggcagcaaaagacggtgtttgtgggacacacgggggattgcatgagtctggctgtgtctcctgacttcaaactcttcatttcgggggcctgtgacgccagcgccaagctctgggatgtgcgggaggggacctgccggcagactttcactggccatgagtccgacatcaatgctatctgttttttccccaacggagaggccatctgcacaggctcggacgacgcctcctgccgcctgtttgacctgcgggctgaccaggagctgactgcctactccgacgagagcatcatctgtggcatcacatctgtggccttctccctcagcggccgcctgctctttgcaggctacgacgacttcaattgcaacatctgggactccatgaagggcgagcgtgtgggcatcctctctggccatgacaacagggtcagctgcctaggggtcacagctgatgggatggctgtggccactggctcctgggacagcttcctcaaagtctggaactaaggaggctggacgaggggaggtaaaagaccatgaagacactcagctaccccctcccctcccctgcccaatttttcttctgaggtttctttattgtttttttctatacctcagctgccattcccacccagctttgtcctttgagggcagtggggaaaatggggagtatgcctttgggagacagcatcagggacacagggcaaagaaatgctccatctcctcccatggcctcccctctccatggtcctgcagcttctcccttaatgagcaaggacaactgatccctccccagcccttggcaggcctagcaggcttccagtctgaggccccaggccctagaattcctccccggagccactaactttgtccagacctgggtggcagaggtgtcagctttgtgactatggctctggcatcactaggatcctagcccccttcctcatgatttttcttctctccctttatttctctcctaaaggacctaaaggacaataaagtgtagcacccta

SEQ ID NO: 5824 - DNA, 936 bp, Canis familiaris
atggatggaaactacaccttggtgaccgagtttattcttttagggtttccgacccgccctgaactgcagattgtcctattcctcgtgtttctgacattgtatggtataattttaacagggaatattggattgatgatgttaatcaggacagaccctcaccttcaaacccctatgtattttttccttagcaacctctcctttgcagacctttgtttctcctcagccattgttcccaagatgttggtcaatttcctctcagaaaataaatctatctccctttatggctgtgccctacagttttatttttcctgtgcttttgctgatacagaatcctttatcctggctgccatggcatacgatcgctatgttgccatctgtaatcctttactgtatacagttgtgatgtctcggggcatctgtgtatggttgattgtcttgtcctacattggaggtaacatgagttccctggttcacacgtcctttgcctttattctgaaatactgcgataaaaatgtcattaatcattttttctgcgacctccctcccctgcttaagctatcctgcacagacacctcagttaatgagtggcttctctccacatatggcagctcagtggaaattttctgcttcatcgtcattgtcatctcctactatttcattctgcgctcagtcttgaggatccgctcttccagtggcagaaagaaaaccttctccacgtgtgcctctcacctgacttctgtggccatctatcaggggactcttctcttcatttactcacggcccacctatctgtatactcccaacactgataaaattatctccgtgttctacaccattattatcccagtgctgaatccgttgatttatagtttgagaaataaagatgtaaaagatgccgctaagagagctgtaaggttaaaagtggattcctcatga

SEQ ID NO: 5825 - DNA, 936 bp, Canis familiaris
atggatggaaaaaattgctcttccgtgaatgaattccttctcgtgggaattagcaataagcctggagttaaagtgactctatttatcacatttctaattgtctatctcatcattcttgttgcaaacctcgggatgatcattttaatcaggatggactcccagcttcacacacccatgtatttcttcctgagccatctctccttcagtgacgctcgctattctacagcagtcggacccaggatgctggtaggcttcattgccaagaacaagtcaattcccttctacagctgtgctatgcaatggttggtgttctgtacctttgtagattctgagtgtctactgctggcagtgatggcctttgatcggtacaaagccattagccaccccttgctctatacagtcagcatgtccagcagagtgtgctccctgctgatggctggggtttacttggtgggaattatggatgcttcagtaaatacaatattaacattccggttatgtttctgtgagtcgaatgtgattaaccatttcttctgtgatgtcccacctctcctcttgttatcttgctcagacacacaagttaatgagttagtgatattcaccatttttggcttcattgaactgattactctttcagggctttttgtgtcttactgctatattatcctagcggtgagaaagatcaactctgctgaggggaggttcaaagctttctccacctgcacctcccacttaactgctgttgcaattttccagggaactatgctcttcatgtattttcggccaagctcttcctactcccttgatcaagacaaaattatttcattgttttactcccttgtgattcccatgctaaaccctctgatttatagcctacggaacaaggatgtgaaagaggccctgaaaaaacttaaaaataaaaagtggtttcattga

SEQ ID NO: 5826 - DNA, 954 bp, Canis familiaris
atgggaacaggtaaccagacttgggtgagagagtttgttctccttggcctgtccagtgactgggacacagaggtgtccctctttgtcctgttcttgatcacatacatggtgacagtgctgggaaacttcctcatcattcttctcatcagactggacagccgactccacactcccatgtatttctttctcaccaacctctccctcgttgacgtctcttatgccacaagcatcattcctcagatgttggcacatcttcttgcagcccataaagcaatcccatttgtgagctgtgccgcccagttattcttctccttgggcttgggtgggattgagtttgttctactggcagtgatggcctatgaccgctatgtggccgtgtgtgaccccctgcgatactcggtcatcatgcacggagggctctgtactaggttggccatcacctcctgggtcagtggctctatgaactctctcatgcagactgtcatcacatttcagctgcccatgtgcacaaacaagtacattgatcacatatcctgcgaacttctagctgtggtcagactggcttgtgtggatacttcctccaacgagattgcaatcatggtttctagcattgttctgctgatgacacctttctgcctggttctcctgtcctacatccagattatctccaccatcctaaagatccagtccacagagggaagaaagaaagccttccacacctgtgcctctcacctcacagtggttgtcctgtgctatggtatggcgattttcacttacatccagccccgctccagcccctctgtccttcaggagaagttgatctctctcttctattctgttttgacaccaatgctgaaccccatgatttatagtgtaaggaataaggaggtgaagggagcctggcagaaactattagggcaattaactggaataacttcaaaactagcaacttga

SEQ ID NO: 5827 - DNA, 930 bp, Canis familiaris
atggaactagagaatgatacacgaattccagaatttctccttctgggattttcagaggaaccaaaattgcagcccttcctctttgggctgttcctgtccatgtacctggtcaccatacttgggaacctgctcctcatcctggctgtcagctctgactctcacctccacacccccatgtacttcttccttgccaatctgtcctttgtagacatctgtttcacctgtaccaccatcccaaagatgctggtaaatatacaaacacaaagaaaagtcataacttatgagagctgcatcatacagatgtactttttcgagctttttgcaggtatagacaatttcctcctgactgtgatggcctatgatcgctacatggccatctgctaccccctgcactacatggtcatcatgaaccctcagctctgttcactactactactggtatcctggatcatgagtgccttgcattctttgttacaaaccttaatggtgttgcgactgtccttctgtacacatttccaaatcccccactttttctgtgaactcaatcagatgatccaacttgcctgttctgacacctttcttaataacatgatgttgtattttgcagctatattgctgggggttgctcccctggttggagtcctttactcttatttcaagatagtttcctctatacgtgggatctcatcagctcacagcaagtataaagcattttccacctgtgcttctcacctctcggttgtctccttattttattgtacaagcctaggagtgtaccttagctccgctgctccccagagcacccacacaagttcagtggcctcagtgatgtacacagtggtcacccccatgctgaaccccttcatctacagcctcaggaacaaagacataaagggagctctaaatgtatttttcagagggaagccataa

SEQ ID NO: 5828 - DNA, 4103 bp, Canis familiaris
cggagacagatctagagaggttactgcctgtgttctcttctaggatgtttatggtttcaggactcacatttaggtctttactccatctcgaatttatttttgtatatggtatatggttctttctttttcaagttgctggcatgatgatggacctgtcaggtatgggactatggaatcacttgcggtacacctaacactgtatgttaacttctggaattaaaacccctacataaagaagtaggcaagtaagtaagcaagtcagtcggtggagggggtgtggtgaggggttcaaggcagagactcaagctcagcaaggggtctccgggaaggaagacaggaaaaatggctgagcccagtctggtgtcttcacttggtttcttcagaaagaccctggtccaggagtcaggggggaaagtgtaacaaagagcgctgcacgcaagatgaaaagtgtcaggtcactctatggtcccggggagggcgaggtctcaggctctcaggccccagggcgggtccggggcggggacgctcaggctggggagtccccacctccccgggtttcacttctccgtctcccaacctggctcagggccccctgcctggagactcgtgacgcagccccagcgcgcactcccattgggtgcagcgtttctggaggagccaatcagcggcaccgggtcccgggctcgaaagcctccgccgccgcctccgccccccagtccggcggcgacggccagtgtccccggagcccggagatggaggtggtgatgccgcgagccctcctcgtgctgctgtcggcggccctggccgtgaccctgacccgggcgggtgagtgcgggcgggagcgaggggaccggcgggcggggacgcgggaccccgggaagccgcctctccgccgcccccggcccctcccgcctccgccccgccccgggcatctcccctgggccccgggccccgcggcgggagggggtcgggcggggtctcagccctcggctccgcaggctcccactccctgaggtttttccacaccgccgtgtcccggcccggccgcggggaccccctctacatctctgtgggctacgtggacgacacgcagttcctgcggttcaacagcgacgcggcgagtccgaaggtggagccgcgggcgcggtggatggagcaggaggggccggagttttgggaggagcagacggagatcgccaaggtgcacgcccagacctcccgatccaacctgcagacggccctcggctactacaaccagagcgaggccggtgagtgacccgggccgggtccagttcacgagtccatgaacccccttgcacagcctggggtctccccgagttcccgggtcggagattgacccccgggccaggagaccgtcctggccccctacgcgggacgagcctgcagggacttgcggacagtttccgaggtctctgaccactcgccggccgtaggtccaatgccaggggagtctaggtggaccgggctgacggcggggaccgggctaccggggcgggactgactgagacgggggcgggggggggttgcccagggtctcacaccttccagtggacttcgggctgcgacgtggggccggacgggcgcctcctccgcgggtatgagcagttcgcgtacgacggcgccgattacctggccctggacgaggacctgcgctcctggaccgcggcggacgcggcggcgcagatcacccggcgcaagtgggaggcggcgggcgcggcccagtactaccgggtatacctgcagggggagtgcgtgcagtcgctccttaagtacctggagagagggaaagagaccctgcagctcacaggtctgtggggcagctgggactccgggatctcccctcccgctggggctgtacctcctgctatccctacaaaaaggaaaatggaattgacaccagaattcctcccctgccccacttcttggatccagtctttatggagagggatagagatatctctgaaataatttaatagcagatttctttgaccctggcattcaccttgggcaccactgactgacttcctccctcaggccttgctccctgtcccacaccccacttaattggaggtctgcctccaggttttaagaggcactggacttcctctacctaggtcaggaccagaagtctctgttgtcccactcagagacctggaacttcctaccttaggctatcttatcctgattctagatcttccaaagggataggaaggtatcccagatcctggagttcaggctggtgtctgtattttgcactccctctcccccatttgtcctcttcattctcagcatggtcacaacagtgctgcttaggtggcccacccggtataatgcaaatttgtaaattttctgacccttctccttagatcctccaaaaatctacctgacccgccaccccatctctgaccatgaggtcaccctgaggtgctgggcgctgggcttctaccctgcggagatcaccctgacctggcagcgggatggggaggaccagacccaggacacagaggttgtggacaccaggcctgcaggagatgggaccttccagaagtgggcagctgtggtggtgccctctggacaggagcagagatacacgtgccacgtgcagcatgaggggctggcggagcctgtcacgcggagatggggtaaggagggcctcggggtagagcttctactcagggcaagtggagctcttctggagaatttcagcagagtcaggtctcaagtcagaggctggaccctcatcctccctcccctttccagagccttcccctctgtccaccattgtcatcgtcagcattgctgctctggttctcctcgtggtcgctggggtgattggagctgtgatctggaggaagcagcgctcgggtagggaaccgactgaatactctgtgttttcctgtcctgttgggggtttcctagggagcacgctgtcctgccttgttaacgggaggtgccgtccatacacggttactctcccacactggagctgtgtactcacactcactgtgcagcaaacacttgggaaaatgaaggccagagtttcgccttggtgattctggtgacggggactgattcccagccgtcacaggacagagcggaaggcccctgctgaggacagacctccagcaagtcaggtggtccagtgacccctcacctcatggcttgtctcctgaccctgacctgggcggtcagtcagaattctgcagactcactctgcaccaggactgggagcttcctcgaggatctcctggcccagccctgtgcccggcctctcacatgatgttttcttcccacacaggaggaaaaggaccaggctactctcatgctgcacgtgagtatgcagggagtgatccctgagaccccgggggagtgtagacaggaccccatggggagctcacccccacagctgctcctttagtctcacctcctgtgagctctgaccacgtcctgtttattctcctctaggtgatgacagtgcccagggctctgatgtgtctctgacagctcctagaggtgagaccccagagaccctgaagtggggagggttggggcactggggaccagatgagcacgagggggctgttgagaatgtcagcacttatgtgaccgacctcacagtaccgacaatttgtacttgattttttctcacagtgtgagaccagctgccctgtggggactgagcgatgcaagatgtgttcacatctcacgtgatgacatcaacaaccctggcttgtctctgcaaacagtgtcaggatgtgcctgtgtccctaggagcataatgtgaggaggtggggagattggcccaccctgcccaccatgacctgtccctaatctgatgtgcgctctcttctctgatgtgctttcctgtccaggagagggagggctggaccatctccatccctgtctttgtttcatgttgagtactaatgacttactacccgattgaaaataagaatcccgatatgagtttgtgtttcctgagtcttgggatgtggggctgatgaggtaataaaaggagatttgtgaagttgagagagcaaataaatggaagccctgagaaccttccagaactctcatgtgtg

SEQ ID NO: 5829 - DNA, 2017 bp, Canis familiaris
agacttctagaagttctcattttgtgctcccgctgcatacaatgctttgcagtagtccctgtgggcggcgccctcccctctgacgtatcctctgatatttcgcactggatttgggtcctcgcacctcctacctcccacaaagtggttggttttctacttgtacaattgcagcatttcttttctcagatttccgatctatttctcaggttttcagaatgatttgataaatatctagctgtattccggggaccagatgaagttaaggtctcctattcctctgccatcttaactcctccctaagttcctgaattttctgacccttctcttcagatcccccaaaggcactctcacccaccaccccttctctgactgtgaggtcaccctgacctgccaaatgggatggggaggaccagacccaggacacagagcttgtggagaccaggcctgcaggagatgggaccttccagaagtgggcggctgtggtggtgccctctggacaggagcagagatacacgtgccacgtgcagcatgaggggctggcggagcctgtcacccggagatggggtaaggaaatcaggagcccttgtgggagaacttcagtagagttgagggtgagacctgaggggcaaggccctcacctcatcctctcttcccagagtcccctcctcggctcaccatccccatcgtgggcatcgttgctggtctgcttgtctttgtggtctctggtactatggtggctggagctgtcctgtggaggaagtagatctcaggtagggaggggatgctctgagttttctcagcgtttcaagcccaggtagaagtttgtcctatctcatttaggggaagtgctacccgcacacatgtgcttgtccactccattgtgcagctcattgctacattcactgtgtagtaaagcacgtgtgagagtgaaggacaaactcatccctcctgttgaatgtggtgatggaatctgatccccagtggtcacaggtcagagagcaaggtccttgctgaggacagactccaggagaatggttggtctcatcctgctatctcttttcttcatgtccctgattcttccataggtctgtagttaaagtttgggaaacttccgtgtggcccaggctatgagtttcacctaggatctcgggtcatgccttctccatggcacctcatgtgatgttttctttccacaggtggaagaagaattatgctgaggttgcacatgagtatggagggggtgatccctgaaaccccggggtggtacagacaggaccccatggggatcttggcaccccccccactagctcctcctttggtctcatctcctttggctctgaccacattctatctgttctgccccaggcagtgacagtgcccagggctctctctctgcttctactggtgagaccttggagggcctgaaggggggagtggggaggggactggcccgtgattgggtagtggggattctttgagtaggatatttgagcatgtgctgagctgttgagaaagtcagcatgtacatgactgacccaaatctgttcatgattattttatttcatagtgtgaaccagctgcctcgtgggggactgagtgatgcaggatttgttcactttcccaccttgtgatgtcaacacccctgatttctctttctgcaaagggcatgtctgaatgtgtctgaaatatgttcctattaacataatgtgaggaggtgggcagactggctccctccccacgtgactcccctcccccgacagacctgtgttctgcttttgtgttgcttgtgtgttgcagctgagggagagcgggtcatctccatccctgtctttatgttacaccgagctacaacttcttacttccttattgaacataggactgtggatgtgaaattgttttttccagttcttgtcatgaggagctgatcagttagtcagatctgatctgaaaggagaagattcctaaagtttgagagaggaaataaatgggagcactgagactcttccagaacctgcag

SEQ ID NO: 5830 - DNA, 1957 bp, Canis familiaris
ggatccaggaagtaatccaagaacttctgttctttttatctagtttctgacatcccctaggcgtatttccctaattcatagaaactaaaccgctccccacgtcctatgctgacagttgagtgtctggggcaggaacatgagaattctctttaagagcatagtcacacgctcataccaagctgcaaaggaggctgggtcgtgtggtccctgtctcgttggtggcacaccttatgaaaacgtggggggactttactacaaaatgcagaattagagcatgagaactgcggggtagttaccattccatttcacacatataatttagtaagaaacggctgtgtgggcagtgtcccgggaccccggagaggaagcggtgacaccaccagccttcctcgtgctgctgtcggtgaccctggccgcggccctgccccgggcgggctccccccccccccaggtacttggaccccgccgtgtcccggccccacacgcaggtggtgcggttcgacagcgactgggccactgcgaggagcagcaggggccggggtatcgggaccaggggacgcggcgggtcaagaagtccgcacgcataaccgagtgcacctggaccccctgcgcggctgctacgagcagagcgaggccgggtcccaggccctccagaccgtgtccggctgtgacctggggccgacgggcgcctcctccgcgggtactggcaggacgcctacgacggtcccctgcaccgggacctgcgctcccggccggcggcggacacggcggcgcagttccccgcgcaagggggaggcggcaggtgctgcggggccgagagcaaccacccggagacgacgtgcgccgcgcggacctggaggacctggagacgcgcagggagacgctgcagcgcgctgaaccccccaacccgcgtgcgacccgccaccccttctcggaccgtgaggtcaccctgcgctgcagggcgctgggcttctaccctgcggagatcaccctgacctggcatgggatggggggagggggggaccagacgcaggacacagagcttgtggacaccaggcctgcaggagatggcaccttcccgaagtgggcggctgcgggggtgccctgtggacaggagcagaggtacaggtgccacgtgcagcatgaggggctggtggagcccgtcacccggagatgggagcctcctcctcctctgtccaccaatctcatcatcagcattgctgctctgattcttgtggtcgctggggtgattggagctgtgacctggatgaagcagcgcttgggaggaaaaggaccaggctactctcgtgctgcacgcgatgacaatgcccagggctctgatgtgtctctgacggctcctagagtgtgaaagcagctgccctgtggggactgagtcatgcaagacgttttcacatctcatgtgatgacatcaacaaccctggctcgtctctttgcaaagtgtcaggatgtgcctgtgcccctaggaacataatgtgaggaggtggggagattggcctgccctgcccaccatgatctgtccctaatctgttgtgcattctcttccttgatgtgctttcctgtccagcagaggcagggctggaccatctccatccctgtctttgtttcatgttttcatgttgagtactaatgacttactacccaattgagaataagaatccagataggagattgtgtttcctaagtcttgggatgtggagctgatgaggtaataaaaggagatttgtgaggttgagagaacaaataaatgcaagccccgagaaccttcgaaagaaagaaagagaaggaaagaaagaaagaagaagaaagaaagaaagaaagaaagaaagaaagaaagaaagaaagaaagaaagaaagaaagaaactgctatgtggcatgcattgttgatgcatgcatcatgtcagacattaatatatctaaactttcactcctaagctt

SEQ ID NO: 5831 - DNA, 333 bp, Canis familiaris
atggtgctgctggagagcgagcagttcctgacggagctgaccagactcttccagaagtgccgcttgtcgggcagcgtgttcatcaccctgaagaagtatgatggtcgaactaaacccattccaaggaaaggttctgtagagggctttgagccctcagacaacaagtgtctgttaagggctactgatgggaaaaagaagatcagcaccgtggtgagctccaaagaagtaaacaagtttcagatggcttactcaaacctattgagagctaacatggatggactgaagaagagggacaaaaagagcaagagtaagaagagcaaaccagcacagtga

SEQ ID NO: 5832 - DNA, 267 bp, Canis familiaris
catttcttgaagatggtaaagttcgagtgccatttcaccaacgggacggagcgggtgcggttggtggaaagagacatctataaccgggaggagtacgtgcgcttcgacagcgacgtgggggagtaccgggcggtcacggagctcgggcggccctcggctgagtcctggaaccggcagaaggagttcttggagcagaggcgggccgaggtggacacggtgtgcagacacaactacggggtgggcgagagcttcacggtgcagcggcga

SEQ ID NO: 5833 - DNA, 6726 bp, Canis familiaris
caccttcactgaagtcacaaacaagtataagtctttgcagagctaaggggtctccgactcacttcccctaccagaactgctcactagcctctctgggagaacaggcgtcagccggagtttcttcttactctgcctgagtgttaggctgaacgtgtattctaggagctcatggattccagtggaggcgagctgggatagaagagaggatctcttacctagaagacaagcaagattgagccagcaaagaagaatgagaagatggaatttccctttgggtccctggaaactaccaactttcgtcgattcactccagagtccctggtggagattgaaaagagaattgctgccaagcaggcagcaaagaaagcaaaaggtaagcacagggagcagaaggaccaagaagagaagcctcggcctcagctagacttgaaggcttgcaaccagccgcccaagttctacggtgagctcccagcagagctggttggagagcccctggaggatttggaccccttctacagcacacaccggacatttatggtgctggacaaagggaggaccatttcccggtttagtgctactcgggccctgtggttattcagtcctttcaacctgatcagaagaacagccatcaaagtgtctgtccactcgtggttcagtttatttattacagtcactattttggtcaattgtgtgggcatgacccaaaccgagcttccagacagaatcgagtatgtcttcactgtcatttacacctttgaagccttgataaagatactggcaagaggattttgtctaaatgagtttgcttacctgcgagatccttgggactggctggattttagtgtcattaccctggcatacattggtgaagcaacagctctccgagggatctcaggcttgcggacattcagagttcttagagctttaaaaacagtttctgtgatcccagggctgaaggtcattgtgggagctctgatccactcagtgaggaaactggcagatgtgaccatcctcactgtcttctgcttgagtgtctttgctctggtgggcctacagctcttcaagggcaacctcaagaacaaatgtgtcaagaattgtgcagctctcaatgaaacgggcaattactcctcttatggaaaacaagagtggaatttctgccatagggacgaagatttctactataacaagcctggcacttcagatcccttactgtgtggcaatggatctgatgcaggccactgccctaaaggttatctctgtcttaaaacatctgacaacccagattttaactacaccagctttgattcctttgcttgggctttcctgtcactgttccgcctcatgacacaggattcctgggaacgcctctaccagcagaccctgagggcatctgggaaaatgtatatggtctttttcgtgcttgtcatcttcttgggatccttctacctggtcaatttgatcttggctgtggtcaccatggcatatgaggagcagaaccaggcaaccattgatgaaattgaagccaaggagaagacatttcaagagaccctggagatgccccggaaggagcaagaggtgctggcagcactggggattgacacagcctctctccattcctgcaatggctcacctttaccctccaaaaatgccagtgagagaatgcgcagaatgaaaccaagggtgtcagagggctccacagatgacaacaaatcacctcaatctgatccttacaaccaacgcagaatgtctttcctaggcctcacttctggaagacgcagggctagtcatggcagtgtgttccatttccgtaccccttgcctggatacctcattccctgacggggtcacagatgatggagtctttcctggagaccgtgagagccatcggggctccctgctgctgggtggaggtaccagccagcaaggccccctcctaaggagtccactgcctcaaccccctaaccctggctcaggacatggagaagacggacactccacattgcccactggtgagcttgcccctggaggcatcgaagtctcggcatttgatgcaggacagaagaagactttcttatcagcagaatacttgaatgaacctttccgggcccaaagggcaatgagtgtggtcagcatcatgacctctgtccttgaagaactcgaggagtctgaacggagatgcccaccctgcttgaccagcttcgctcagaagtatctgatctgggagtgctgccccacatgggtgaagctcaagacggttctctttggcattgtgacggacccctttgcggagctcactaccaccttgtgcattgtggtaaacacagtcttcatggccatggagcaccacggcatgagctctgcctttgaagccatgctccagataggcaacattgtctttactgtgttttttactgctgaaatggtcttcaaaatcattgccttcgacccctactattacttccagaagagatggaacatctttgactgcatcattgtcactgtgagcctgatagagctgggtgcggccaggaaggggagcctgtcagtgctgcggaccttccgcttgctgcgggtctttaagctggccaagtcctggccaaccttaaacacactcatcaagatcatcgggaactcagtgggggcactaggaaacctcaccatcatcctggccatcattgtctttgtcttcgctctggttggcaaacagctacttggggaaaactaccgtgacaaccggcgcaatatctctgcgcccaatgaagaatggccacgctggcacatgcatgacttcttccactccttcctcatcgtcttccggatcctgtgtggagagtggattgagaacatgtgggcctgcatggaagttggccagaaatccatatgcctcatccttttcttgacagtgatggtgctggggaacctggtagtcctcaacttgttcaccgccctgctgctgaactccttcagtgccgacaaccttgcaactccagatgaagatggggaggtgaacaacctgcaggtggccctggcacggatccaggcatttggccatcgtaccaagaaggccatttgcaacttcttcactaggccctgcctgctgccctggcccaaggcagagccccagctggtggtgaaactcccactctccagctccaaagctgagaaccacattgctgctaatgcagctgtggggagccctggagggctctcagtgtccagaggcctcagggacgaccacagtgacttcatcaccaatcctaacatatgggtctctgtgcccattgcagagggtgaatctgacctcgatgacctggaggaagatggtgaggaggattctcagagttcccagcaggaagtgatcctccaagggcaggagcagctgcaagtcgagacgtgtgagggccacacggcgcccaggagcccaggctctggaatgtcctctgaggacctggcttcctacgtggatgagaagtggaaagacgaggctgttgcccaggcgcctgcagagggaggggacgacagcagctcctcagggggcagcacggtggactgcctggatcccgaggagatcctgaggaagatccctgagctggcagatgaccttgaagagccagatgactgcttcacggaaggctgtcttcgccgctgtccctgctgtaaagtggacatcagcaagtttccatggactgtgggatggcaggtgcgcaagacctgctaccgcatcgtggagcacagctggtttgagagtttcatcatcttcatgatcctgctcagcagtgggtctctggcctttgaagactatcaccttgaccagaagcccacagtgaaggccttgctggaatatactgacaggatgtttacttttatcttcgtgctggagatgttgctcaagtgggtggcctacggctttaagaagtacttcaccaatgcctggtgctggctggactttctcatcgtgaacatctccctgataagccttatagcgaagatcctgcaatattctgatgtggcatccatcaaagcccttcggaccctccgtgccctgaggcccctgcgggctctgtctcgattcgaaggcatgagggtggttgtagatgccctggtgggtgccatcccatccatcatgaatgtcctcctcgtctgcctcatcttctggctcatcttcagcaccatgggtgtgaacttctttgcggggaagtttgggcgatgcatcaacaaaaccaatgaatacttttctcttgtgcctttgtctattgtgaataacatatctgactgtaaatatcagaaccacactggcagcttcttctgggtcaatgtgaaggtcaactttgataatgttgcaatgggttacctagcacttctgcaggtggcaacctttaaaggctggatggacataatgtatgcagctgttgatgcccgagatgtgaacttgcagcccaagtgggaggacaacgtgtacatgtacttgtactttgtcatcttcatcatttttggtggcttcttcacactcaatctcttcgttggggtcataattgacaacttcaatcaacagaaaaaaaagttagggggccaggacatcttcatgacagaggagcaaaagaagtactataatgccatgaagaagctaggctctaagaagccccagaagcccatcccacggcccctgaacaagtaccagggctttgtctttgacattgtgaccaaacaagcttttgacattgtcatcatggtcctcatctgcctcaacatgatcaccatgatggtggagactgatgagcagagtgcagaaaagacaaaaattcttaacaaaatcaaccagttctttgtggctgtctttacgggcgagtgtgtcatgaagatgtttgccttgcggcattactacttcaccaatggttggaatgtgtttgacttcattgttgtggtcctctccattggaagcctggtgttttctgtaatacttacgtcacttgaaaattacttctctccaacgctcttccgagtcatccgcctggcccgaattggccgcatcctcaggcttatacgagcagccaagggaatccgcacactactctttgcccttatgatgtccttgcctgccctcttcaacatagggcttctgctcttccttgtcatgttcatctactccatcttcggcatggctagcttcccccatgtaagttgggaagctggcatcgatgacatgttcaactttcagaccttcgccaacagcatgctgtgcctcttccagatcaccacgtcggctggctgggatggcctcctcagccccatcctcaacacggggcctccttactgtgaccccaatctacccaacagcaatggctcccgggggaactgtgggagcccggctgtgggtatcctcttcttcaccacatacatcatcatctccttcctcatcgtggtcaacatgtacattgcagtgattctggagaacttcaatgtggccacacaggagagcagtgaacctctgagtgaggatgacttcgatatgttctatgagacctgggagaagtttgacccagaggccactcagtttattaccttttctgccctctcagactttgcagacaccctttctggccccctgcgaatcccaaaacccaatcagaatatattaatccagatggacctgcccttggtccctggagataagattcactgtttggacattctttttgccttcactaagaatgttctgggagaatccggagagttggattctctgaaggcgaatattgaagagaagtttatggcaactaatgtctcaaaagcatcctatgaaccaatagcaaccaccctccggtggaagcaggaagacatttcagctactgtcattcaaaaggcctatcggagctatgtgctacaccgctccatgacaatttccaaccccccagctgtgcccagggcagaggaggctgtgccacccccagatgaagcttttgttgaattcatggtaaatgaaaattgtgcactcccagacaaatctgaaactgcatctgccgcatctttcccaccatcctatgacagtgtcactagaggccttagtgatcaaatcaacatgagcacatctagctcaatgcagaatgaagatgaaggcaccagtaagaaagtgactgctcctgggccctagtgaggacactctagtatggacctaatcagttctgatgtgaacttctgctctgtgataactctttcccactataggtggcaaccagctaccacctcaccaatgcatgccaccagttcacagtatcagaactgggcaaagaatgaaattggtgcccacctttggagaagccctcaaaaccaataggagccagaagccaagagcatctccactgtgactacccttttgaatttcagtatcagataatgtatctcttactttccagaaaatgtcccctggtcctttcattttaattgtgaccagaacttatatttacggtgacaaacttctcaggaccagaatttccaaagatatatggtaaggatgttgctgaaggtccaaggtagtcttctgtgaatcccaaacagaaactgacaatgttatttaggattttgcatgactgcatgttgagagctgccagacaattgctcctgcccaaggtaacacctgtggtctatgtcatgaaagaactttgagatatccattaaaattaatatttttagaggtatatcccgaaaaaaaaaaaaaaaaaaaaaaaaaaaa

SEQ ID NO: 5834 - DNA, 249 bp, Canis familiaris
gtggtgggcgctggaggcgtgggcaagagcgccctgaccatccagctcatccagaaccacttcgtggatgagtacgaccccaccatcgaggactcctatcggaagcaagtggttattgacggggagacgtgcctgctggacatcctggacacagcgggccaggaggagtacagcgccatgcgggaccagtacatgcgcacgggggagggctttctctgtgtatttgccatcaacaacaccaagtctttt

SEQ ID NO: 5835 - DNA, 249 bp, Canis familiaris
gtggttggagcaggtggtgttgggaaaagcgcactgacaatccagctaatccagaaccactttgtagatgaatatgatcccaccatagaggattcttaccgaaaacaggtggttatagacggtgaaacctgtctgttggacatactggatacagctggtcaagaagagtacagtgccatgagagaccaatacatgaggacaggcgaaggcttcctctgtgtatttgccatcaataatagcaaatcattt

SEQ ID NO: 5836 - DNA, 402 bp, Canis familiaris
  misc_feature (210)..(210): n comprises a, c, g, or t, or includes no nucleotide
tgccgagctgacaccaaaaactggatgctcaaccgactgagccacagaggtgcctctgaggggagtgccattattttacatggggattctaatgttctaagggtaaaccaggttcaagggaaaccctattcatcagacaaagtgccagcctgaggcataccagatccggcagttctaaaaccaactccaccataaactatttttttactncaggcaaaaccctttatcaccctcaaactcccctcctgaaaatgaaaaaaattaaaaacttttccacttacctccattacctccttaatcaaaaaacaattcctccgaacacccctctcccgttcctccccaagctattcccaaaatgcccccctgcagtctactcctgcctctccctctgcagctcggcaa

SEQ ID NO: 5837 - DNA, 371 bp, Canis familiaris
tgccgagctggaacatcaacccttggacaaaccaactacttgaattggatggctattgcgaagaattcaatatcgcatttgaacatgatggggagcatcattacgaactgactagaagaaatggcatcaaggatcttgcttatcaaaaattcaaggatgagcaaaagaagaaaaactgcaaaaggcatggtgttgtcttaatcaatatacccatcctcgatgaaggtgtaaggaatgacttcgatacactctttagtcatgttttgcattgttgcgctagaagtggattggatatgaaatttaccccatctcaaattcaggaactgagcatgaggttctacaaatcatctcccacctaacagctcggcaaa

SEQ ID NO: 5838 - DNA, 558 bp, Canis familiaris
tgccgagctgagtgtaaagtcccaggaagcaatgtggtgcagtataaagagtcttgactttagccacttgtagggaggcttgcagcctagtcctgccaactttgtaccttcgcagcctctaacaagtcacttaggtctgtgagccttcgtttcctcatttaagatggataatacctcctacctaaggttgttatgaggtctaaatgcaccgtgttagacagggttacctgtatgttgtaggtgctcagcaaatgtcaggtacttgtctatagggctaagcagaaacagacacccaatctacagacgtgcgctgagatttaaggtaggtgtaagagaatcccgaccaaaagaggaattaaaaggcagagaacagtgtaacgtcctgtacaagacttggaaagaagtaggtatacatgacaaatactactgggaatgttggctatttagatgtgaaggacagggtgcttcctgggtttttaaacaactttgtttggggaaaactgaatccaagggccaaaaaatatgtttccacctccgcctttgttacttcctccatca

SEQ ID NO: 5839 - DNA, 1965 bp, Canis familiaris
gggttcagaggcttcacccagcaatgcgctgccgcagactggccctgggcctcggattcagcctgctgtcgggcattgccctctggtccctgtggatttatatggagacctggctgcccttctcctatgtcccctattatctcccctgcccagagatcttcaacatgaaactgcagtataagggggagaagccattccagcctgtgacacggtcaccgcaccctcagcccaagctcctagagcagaggcctactgagctgctgacgctcacaccctggttggcgcccattgtctccgagggaaccttcaaccctgagcttctgcagcacatctaccagccgctgaacctgaccatcgggctcacagtgtttgccgtggggaagtatacccgcttcgtccagcacttcctggagtcggctgagcagttcttcatgcagggttaccaggtgtactactatatcttcactaatgaccctgcaggcattcctcgggtcccgctgggtcccggccgcctcctcagcatcatccccatccagaggcactcccgctgggaggagatttccacgcgccggatggagaccatcagccggcatattgcccagagggcacaccgcgaggtggattacctcttctgtgtcgacgtggacatggtgttccggaacccatggggccccgagaccttgggggacctagtggctgcaattcacccaggctactatgctgtaccccgccagcagttcccctacgagcgcaggcatatttccacagcctttgtggcagagaacgagggggacttctattatggtggggcggtctttggggggcgggtggccaaggtgtacgagtttaccacaggctgccacatggccatcctggcagacaaggccaatggcatcatggcagcctggcaggaggagagtcacctgaaccgtcgcttcatctcgcacaagccctccaaagtgctgtcccctgagtacctctgggatgacaggaagccccagccacctagcctgaagttgatccgcttttctacactggacaaggccaccagctggctgaggagctgacagcagagccagggctccatgaatggggccctaagccccgcagccagctcaccccagcacagcacccagctcgccccagcagccaccttgcatcagtgcctcccttctcgagcctcatgtgagaccagtccagtcttgcctaactcagtctgttagcagaactcacctggaaaatggatgcagaaaggccttcgtacactgtagagggctgcctccccatgaggggaaggcaaagaccacacagccctagaatcaggaagatgggaggcgggtgaagaagtccagggcctggcagcctcacccagcagatgtgcctttggggcaggccctggagtcagccctacactgtgcctgagacccaacctgtgcctcccttctgttgcctctcgcccttaaagttgcacttctaagccgctgctgtgaaaggcatcccagacccctcttctctggctgccgggggtcttggggactgtgaagtcccccagccacacagagccaatccctcgctcagcctgggagtgagcctttgcagcagaacaggcctggctccctctggttgccaggtctaacctgtgccccatggtgggccacactcgctggcaccaaccacctcctttgtaagagggtttgggcagcttttaacaaaggtggtgtgggaggtgcctgaatggctccgtcggttgagcggctgactcttggtttcagctcaggtcatgatctcagggtcttgggatagagctctcctcctcactgccccatccagctccttgctcagtgggcgagtctggttgagcttctctctctccctctgctcctcccccactcacacgtgtgtgcacatttgcacgctctctcttaaataaataaatcttaagaaaagaaaaaaaaaaaaaaaaaa

SEQ ID NO: 5840 - DNA, 195 bp, Canis familiaris
caggcagtgacagggtggagaatggacagacccatgtcaggaatcagcccagacagcaccctacttttcaacacctacgtccacttccaaggaaagctaaaggggctctcccccctggcggggctgcgggagttctgggtggacaacaccacctcggtgtcggtccccatgctctcgggtacaggcaccttccag

SEQ ID NO: 5841 - DNA, 179 bp, Canis familiaris
cttggtctgtgaggagggctgcatggtagtggtcgataccggtgcatcgtacatctcgggccccaccagctccctgaggctgctcatggacaccctgggggcccaggagctgagcacaaatgagtacgttgtgaactgtaaccaggtgcctacactccccgacatctccttccacctcg

SEQ ID NO: 5842 - DNA, 163 bp, Canis familiaris
gcactgcaccgccgatatggagacagatacatcaacctcaggggacccatcccggctcacctgctgggggacatgtgggcccagagctgggacaacctctatgacatgatggtgcctttccccgacaagcccagtctcgatgttaccagcactatggtgcgca

SEQ ID NO: 5843 - DNA, 225 bp, Canis familiaris
actgactttgccactatgggctgtctacactgctatggaataccgctggccctttggcaattacctatgtaagatcgcttcagccagtgttagtttcaacctctatgccagtgtgtttctacttacatgtctaagcatcgatcgttacgtggctattgttcatccaatgaagtcccgccttcggcgcacaatgcttatggcaaaagtcacctgcatcattatttg

SEQ ID NO: 5844 - DNA, 203 bp, Canis familiaris
gcattatggctttcccacctgagaaatatgcccaatggtcagctgggattgccttaatgaaaaatatccttggttttattatccctttgatattcatagcaacatgctattttggcatcagaaaacacttactgaagaccaacagctatgggaagaacagaataactcgtgaccaagtcctgaagatggcggctgctgttgta

SEQ ID NO: 5845 - DNA, 264 bp, Canis familiaris
atgggaggctcagtgctgtgcctcattgaatttggagagattctcatcgactttgtgtggatcaccatcatcaagctggtggccttcgccaagagtctgcggcagaagcaagcccaggctcgctatgctggcccgccgcccaccgtggctgagctggtggaggctcacaccaactttggcttccagcctgatgtggccaggcctggccccgatcctgggacttaccctgatgagcagactctgcccatcccaggcaccccaccc

SEQ ID NO: 5846 - DNA, 333 bp, Canis familiaris
acgctcctactctccctgcaccactgaaggtcgctcggatggttaccgctggtgcgccaccacagccaactacgaccaggataagctctacggcttttgtcctacccgagccgacgctactgtggttgggggcaactcggcaggcgagctgtgcgtcttcccctttgtcttcctgggcaaggagtactccacctgtaccagcgacggccgcagggatgggcgcctctggtgtgcgaccacatcgaacttcgacactgacaagaagtggggtttctgtccagaccaagggtacagcctgttcctggtggcagcgcacgagttcggccatgcact

SEQ ID NO: 5847 - DNA, 2428 bp, Canis familiaris
atggcagaaaaggcacctcctggcctgaacaggaagacctccaggtcgaccctctcccttccacccgagcccgtggacatcattaggagcaagacgtgctcgcggcgggttaagattaacgtgggcggcctcaaccacgaggtcctgtggcgcacgccggaccgcctgccgcgcacgcgcctggggaagctgcgggactgcaacacgcacgagagcctgctcgaggtgtgcgacgactacaacctgggacacaacgagtacttctttgaccggcacccgggggccttcacgtccattttaaatttctaccggaccgggaagctgcacatgatggaagagatgtgcgcgctctccgttggccaggagctcgactactggggcatcgacgagatctacctggagtcgtgctgccaagccaggtaccatcaaaagaaggagcagatgaacgaggagctgaggcgggaggccgagaccatgcgagacggggagggggaagagttcgataacacctgctgccccgagaaaaggaagaagtctcgggacttgctggagaaacctaactcgtcggtggctgcaaagatcttggccatcgtgtctaacctgttcatcgtactctccaccatcgcactgtctctcaacactttaccagagctgcaggaaatggatgagtttggacaacccaacgacaacccccagttggcacacgtggaggctgtgtgtaatgcttggtttaccatggagtacctcttacgcttcctgtcctcaccaaataagtggaagttctttaaaggcccactaaatgtcattgatttgctggccatcttgccctattatgtcaccatcttcctcacggagtccaacaagagcgtgctgcagttccagaacgtgcggcgcgtcgttcagatcttccggatcatgcgcatcctccggatcctgaagctggccagacattccacaggcctgcagtctttggggttcaccctcagacggagttacaacgagttgggcttactgatactatttttggccatggggataatgatattttccagcctggttttttttgctgagaaggatgccgatgctaccaagttcaccagtatcccagcgtcgttttggtgggccaccatcaccatgaccaccgtgggctacggtgacatttaccccaagacactactagggaaaagcgtgggaggcctctgctgcattgcgggggttctggtgattgcccttcccatcccgatcatcgtgcctcctttttctgaattttacaaggagcagaaacgccaggaaaaagcgattaaaaggcgggaggctctggagcgggccaaaaggaacggaagcatcgtttctatgaacttaaaagatgcctttgctcgaagcatggaactgatagacgtggccgtggagaaggcaggcgagtcgtccagtaccaaggactcggctgacgataaccacctctctccaagccggtggaagtgggccaggaaagctctgtcggaaacaagctccaacaagtcttacgagaacaagtaccaggaggtgagccagaaggactcccacgagcagctgaacaacacgtcttcctccagcccgcagcatctgagcgcccagaagctggagatgctctacaacgagatcaccaagacccagcctcaccccgccccgaaccccgacggccaagagcagcccgacaggccatccgcctacgaggaggagatcgaaatggaagaggtggtctgcccgcaggagcagctggccgtggcgcagggcgaggtcatcgtggacatgaagagcacgtccagcatagacagcttcaccagctgcgccaccgacttcaccgagacggagaggtcgcccctgccaccactctccgcctcccacctgcagatgaggttcccccccgacctcgcagggaccgacgagcaccaaagagcccgggggcccccgttcctgatgctcgccagggggaaggggcccgctggcagggatgccatcctggaatatgctccagtcgacataacggtgagcctggatgccagcggttccaaagtgggctcacatggtcccctgcagcccgacagtgcctcggagagccccaagagttcgctgaaaggcagcaaccccctgaaatccagatcgctcagagtgaacttcaaggagaacagaggcagcgccccgcagaccccccccagcacagcccggccgctgcccgtcaccacggcggacttctccctcaccgccccgcagctcatcagcaccatcctcctagaagagaccccctcccagggagacaggccttgctgggcgccgagggctcggcacactgtcagggaccttccaaggggctgtccccccggtttcccaagcagaaactctttcctttctcatcaagagagaggaggagcttcactgaaatagacactgg

SEQ ID NO: 5848 - DNA, 1845 bp, Canis familiaris
  misc_feature (1828)..(1828): n comprises a, c, g, or t, or includes no nucleotide
ccgggtgccgggcccgcgggctcggcgcgctcagaaacatgctgaggtcccggcggctgttgcagcagcggcagcggctccagcagcggctccagcagcggctccggcagcggctccagcggcggcaactccggcggcagcagcagcggcggcggcggcggcggcagcgcacggctcccgcggggaaggcgcccggcgcccatgcctccggccccgcgcggcggctgccctgacccggccgcgacctccgcgccccacgtcccccggcgtggtccccggccacggccccagcccgccacaccccccgcccccggcctccgcagctcggcatgggcgcgggggcgctggccctgggcgcctcggagccctgcaacctgtcgtcggccgcgccgctccccgacggcgcggccacggcggcgaggctgctggtgcccgcgtcgccgtccgcctcgccgctggccccgaccagcgagggccccgcgccgctgtcgcagcagtggacggcgggcatcgggctgctgatggcgctcatcgtgctgctcatcgtggcgggcaacgtgctggtgatcgcggccatcgccaagacgccgcggctgcagacgctcaccaacctgttcatcatgtccctggccagcgccgacctggtcatggggctgctggtggtgcccttcggggccacgatcgtcatgcggggccgctgggagtacggctccttcctgtgcgagctctggacctcggtggacgtgctgtgcgtgacggccagcatcgagaccctgtgtgtcatcgcgctggaccgctacctggccatcaccgcgcccttccgctaccagagcctgctgacgcgcgcgcgcgcgcgggccctcgtgtgcaccgtgtgggccatctcggcgctcgtgtccttcctgcccatcctcatgcactggtggcgggccgggggcgacgaggcgcgccgctgctacaacgaccccaagtgctgcgacttcgtcaccaaccgggcctacgccatcgcctcgtccgtcgtctccttctacgtgcccctgtgcatcatggccttcgtgtacctgcgggtgttccgcgaggcgcagaagcaggtgaagaagatcgacagctgcgagcgccgcttcctgggcggccccgcgcggccccccgcgcccccgcccgcgcccgcgcccgcgcccccgcccgcgcccggctccccgcgccccgccgcggccgccccgctggccaacgggcgcgtcggcaggcggcggccctcgcgcctcgtggcgctgcgcgagcagaaggcgctcaagacgctgggcatcatcatgggcgtgttcacgctgtgctggctgcccttcttcctggccaacgtggtcaaggccttccaccgcgacctggtgcccgaccgcctcttcgtcttcttcaactggctgggctacgccaactcggccttcaaccccatcatctactgccgcagccccgacttccgcagggccttccagcgcctgctgtgctgcgcgcgccgcgccgcccgcgggagccacggggccgccggggaccctccgcgggcccggccgccgccgtcccccggggccgcctcggacgacgacgacgacgacgaggacgacgccggggccggggccggggccgcgccgcccgcgcgcctgctggagccctgggccggctgcaacggcggggcggcggccgacagcgactccagcctggacggcgcgggcagccccgcgggcgcctcggagtcccgggtgtaggcgcgcggcctcccggggggcgcatcggtgtttactccagacccagagcaggtgaaccccgggcccgcgcacccccntcgcattcatcgaggca

SEQ ID NO: 5849 - DNA, 3893 bp, Canis familiaris
ctctgaaggttccagaatcgatagtaaagtctcgaagcctgctgcagagagaagatggcggtcgcggtgagaactttgcaggagcagctagaaaaggccaaagagagcctaaagaacgtggatgagaatattcgcaagctcaccggacgggatccgaatgacgtaaggcccatccaagccagattgctggccctttctggtcctggtggaggtagaggacgtggtagtttattgctgaggcgtggattctcagatagtggaggaggacccccagccaaacagagagaccttgaaggggcagtcagtaggctgggcggggagcgtcggacaaggagagaatcacgccaagaaagcgacccagaggatgatgatgttaaaaagccagctttgcagtcttcagttgtagctacctccaaagagcgcacacgtagagaccttatccaggatcaaaatatggatgaaaagggaaagcaaaggaaccgacgaatatttggcttattgatgggcactcttcagaaatttaaacaagaatccactgttgctactgaaaggcaaaagaggcgccaggaaattgaacaaaaacttgaagtgcaggcggaagaagaaagaaagcaggttgaaaatgagaggagagaactgtttgaagagaggcgtgctaaacagacagaactgcggcttttagaacagaaggttgagcttgcgcagctgcaagaagaatggaatgaacataatgccaagataattaaatacataagaactaagacaaagccccatttgttctatattctcggaagaatgtgtccagctacccaaaaattaatagaagagtcacagagaaaaatgaatgctttatttgaaggtagacgcatcgaatttgcagaacaaataaataaaatggaggctaggcctagaagacaatcaatgaaggaaaaagagcatcaggtggtgcgtaatgaagaacagaaggcggaacaagaagagggtaaggtggctcagcgagaggaagagttggaggagacaggtaatcagcacaatgatgtagaaatagaggaagcaggagaggaagaggaaaaggaaataggtatagttcatagtgatgcagagaaagagcaggaggaggaggaacaaaaacaggaaatggaggtcaagatcgaggaggaaactgaggtaagggaaagtgagaagcagcaggatagtcaaccggaagaagttatggatgtgctagagatgctgttgcacgtagctgtcaaaaatgtaattgctgagcaggaggtaatggaaaccaatcaagttgaaagtgtagaaccttcagaaaatgaaactagcaaagaactggagccagaaatggaatttgaagttgagccagataaagaatgtaaatctctttctcctgtgagagagaatgccagtgctctagaaatggaaaatgagcctgaggaaaaagaagagagagaatctgagccccagcctgagcctgtgcgtcacctccagcccttgcctcagcctgagcctgagcctgagctacagcctgagccacagcctcagctacaacctgagccacagttacagccccagctccagctccagctccagccccagccccaatcccagtcccagccacaacctcagcttcagcttccgcttcctcttccgcttcagccccagccccaggtgcaggcccagtcccagccccaagcagtactccaaccccagcctgtctctcaacctgagactttgccattagctgttctacaggcaccagttcaggttattcaagagcaagggcatttactacctgagaggaaggaatttcctgtggaatctgtaaaactcactgaggtgacagtagagccagtcttgatagtacattcagatagcaaaaccaaaaccaaaaccaggagcagaagtagaggtcgagctagaaataaaaccagcaagagtagaagtcgcagcagtagcagtagtagttctagtagcagctcaaccagtagcagcagtggaggcagttccagcagtggcagcagtagtagtcgaagtagttccagtagcagctccagcacaagtggcagcagcaggagagatagtagcagcagcactactagtagcagcgagagtagaagtcggagtaggggccggggacataacagagatagaaagcacagaaggagcgtggatcggaaacgaagggatacatcaggattagaaagaagtcacaaatcttcaaaaggtggtagtagtagagatacaaaaggatcaaaggataagaattcccggtccgacagaaagaggtctatatcagagagtagtcgatcaggcaaaagatcttcaagaagtgaaagagaccgaaaatcagacaggaaagacaaaaggcgttaatggaagaagccaggctttcttagcctattctttgccgcagaagatttcttgatgagtaaaaggattacctttccttgtaaggaggatgctgccttaagaattgcatgttgtaaaaaatcttttttggaaaatacagactgtttgtttaccagacattcttgtactttttgcataattttgtaagagttatttatcaaaattatgtgaggttccaaaatatgtaaaaattataataataaaaaaagattaacatcccttgtcatcttttttaaatatcctatacacttcagtaagaatctgtatattttaataggtaaatctttacgctcctgttcccttcaaattctgtatcatacattgcttttcgtcagaaataaatcgtgcatttctttcattagttttcggaatcgtcctccgttgacacttgtataataaattaccctcttgatatatcgttttcagcttttatcactagatactgaacgtgattagaatgtctttgaagggttgattactactaatcaactattgtcgtctttgtatggaagaaaataataaaatagttggtcgactattcttcttctactatatgatgtttgtgagaatagttgctcctcctgctgtgtagcaaccatcttgttgattaataataataaaatattatcaccctccttctgagtaattactactactatttcagacgtctttattactacatcatgaagtaatcatcgtagaacagctggtagtatatgaagaatagttgctcttttttatatgagaaacgcggggaaatgcttagattaaaacaagggagattagaaaaaaatagtaaatgattctgagaacaaactatgttccccaaaagcgtgcaaagatctgactatgacaagctccaaataattgcctaaggcaaataaaagtgaggaaaccttcaaatgacattctaatctactgttcagtatctagtgataaacgtcggaacatagtttgttctcagaatcatttactattttttctaatctcccttgttttaatctaagcatttccccctgtttctcatatataagtcatatttggtagataaaacagtatgatttggttggcattttcttcatgattataggagcatcattcatttgtctccagggctacttgtgtgatatagcatatacatctattgaagaaaataatcactctctaggggagggaggtagaaaagtatattctaaacttgggtttttgagtttgtggtcttgtcttaacttttgtgttgctctaactacatgccaatatgtgttctcaagagtttttgttaagtattgtatgaaagtttacagaatgaaggaagttcatctacacttgaatctgtaagcaagataacacacaagtgtaccaagtgattattaactttgttgttttataaatttgtatgaatttggagtatctgttgccattactatatatgtgcaaataaatgtggcttagacttgtgaaaaaaaaaaaaaaaaaaaaaa

SEQ ID NO: 5850 - DNA, 686 bp, Canis familiaris
agaggtcaatgacccaggagcaacaatcaactcaagatttaattttcattatgttattcatgaacacccggagcactacactataatgcgcaaatggatactgacatggatcctgccaactttgctctacagatcatgctttcacattatctgtctagtgggcactatatctttagcttgcaatgacatgactccagagcaaatggctacaaatgtgaactgttccagccctgagcgacatacaagaagttatgattacatggaaggaggggatataagagtgagaagactcttctgtcgaacacagtggtatctgaggattgataaacgaggcaaagtcaaagggacccaagagatgaagaacagttacaatatcatggaaatcaggacagtggcagttggaatagtggcaatcaaaggggtggaaagtgaatattatcttgcaatgaataaggaaggaaagctctatgcaaagaaagaatgcaatgaagattgcaacttcaaagaattaattctggaaaaccattacaacacatatgcatcagctaaatggacacacagcggaggagaaatgtttgttgctttaaatcaaaagggggttcctgtaagggggaaaaaaacgaagaaagaacaaaaaacagcccactttcttcctatggcaataacataatcatatatggtatata

SEQ ID NO: 5851 - DNA, 530 bp, Canis familiaris
ggcagcgtcagctgtacagctacactgactgtgacagtaccagagccacctccaaaagctgttgaagaggctgaagtacctccagctccggttacaaaaagggaaaggaaaattcctgaaccagtaaaagtgcctgaaattaagccagcaatacctctccctggacctgaacctaaaccaaagcctgaaccagaagtgaaagtaatcaaaccacctcctgtggagcctgcaccgacccccatcgccgccccggtaacggtgcctgtggttggaaagaaagcagaagccaaagcacctaaagaggaggctgccaagccgaaaggtcccatcaaaggtatccccaaaaagactccttcaccaatagaagttgaaaggaaaaagttaagaccaggaagtggtggagagaaacctcccgatgaggcccctttcacctaccagctaaaggctgtaccactgaagtttgtgaaagagatcaaagacattgtcttgaccgaagcagagtccgttgggtcttctgcgatctttgaatg

SEQ ID NO: 5852 - DNA, 1474 bp, Canis familiaris
tcggagggcccggacggacggacggacgcgttgactgccagacacccgagcctgccagccagcctgtgcccagccgctcgccctccccagcctcccaggcatgcccaccatgtggcccctgtggcttgtcgcctccctgctggccctgagccaggccctgccctttgagcagaagggcttctgggacttcaccctggacgacgggctgcccatgctgaacgacgaggaggcttcaggcgctgagacaacttcaggcgtcccggacctggacgccctcacgcccacctacagcgccatgtgtccttttggctgccactgccacctgcgggttgttcagtgctccgacctgggtctgaaggccgtgcccaaggagatctcacccgacacgatgctgctggacctgcagaacaacgacatctcagagctccgcgccgatgacttcaagggcctccaccacctctacgctctcgtcctggtgaacaacaagatctccaagatccacgagaaggccttcagccccctgcggaagctgcagaagctctacatctccaagaaccacctggtggagatccctcccaacctgcccagctccctggtggagctccgcatccatgacaaccgcatccgcaaggtgccaaagggcgtgttcagcgggctgcgaaacatgaactgcatcgagatgggcgggaaccccctggaaaacagtggctttgagcctggagccttcgatggcctgaagctcaactacctgcgcatctctgaggccaagctcaccggcatccccaaagacctccccgagaccctgaatgaactccacctggaccacaacaaaatccaggccatcgagctggaggacctgctccgttactccaagctgtacaggttgggcctgggccacaaccagatccgcatgatcgagaacgggagcctaagcttcctgcccaccctgcgggagctgcacttggataataacaagctgtccagggtgccttccggccttccggacctcaagctcctgcaggtggtgtacctgcacaccaacaacatcaccaaggtgggcgtcaacgacttctgccctgtgggcttcggggtcaagcgggcctactacaacggcatcagccttttcaataaccccgtgccctactgggaggtgcagccggccactttccgctgcgtcactgaccgcctggccatccagtttggcaactacaaaaagtagaggcagcggcagccgccgtggtggcctgggccgggtctctggggagcacagcagacatcccgaaggggagggcagagccaaggagccgagccagcgcccagctgcgcccaacccagccccgccctgatcccggaccctgactcgctgcctcctgacgccctcatcctggctcccaagcacgcagatggggcacaagacccagccgcccatcacatgcctgttggcctcagagctgcccctgcccgccccccaccg

SEQ ID NO: 5853 - DNA, 8747 bp, Canis familiaris
cagcctgcttcaagaaaatgtggccatgctgtaaaggatatactacttttcctgtcccatggcactgctagtcagttggatgcaagatggcacaagcccgtacaatcagttgtccctctccatagtatttcttataaaatacatcaacaggtgtgaaaatttacagcccttgtatcccttcctggcaactggagggttaaaacactcttggtcacatgctcaatcaagacagacacagctaacactcaaagacaaggttaagaaacaactggcagggtccctgggtggctcagcggtttagcgcctgccttgggcctagggtgtgatcctggggtcccgggatcgagtccccacatcgggctccctgcatggagcctgcttctccctctgcctgtgcctctgcctctttctctctgtgtctctcacgaataaataaataagtaaaaactttaaaaaaaaagaaagaaagaaagaaagaaagaaagaaagaaagaaagaaagaaagaaagaaagaaagaaagaaagaaaagaaagaaaaagaaacaacctggcaggggcacccaggtggctcagtggttgagcatttgcctttggctaggtcgtgatcctgaggtcctgggatggggtccagcatcaggctctccagagggagcctgcttctacctcagcctgtgtctctgcctctctgtgtctctcgtgaataaataaaattaaaaaaaaaaaaaaaaagaacgtggcagctgaaagttcaaagaataaaacaagactatacaaagcaggatgtgactgaagtctggtaaatctgattaacctgtactatgtttagggggatttagaggaaaagataaatagcctccatgaggacattcgcaccacctacccatcaaatggctacacggcagcacaagataatataacacaaagggacaaaaatcaatgtttcttaaggaccaaccatgtggcatttttcatttaacaccatatttaattctcccaaaaccctgtttcacatcattcttcatattttacaggagcatttgctaagtctgagaactccaggaactttcctaaggtcagacagacacttaagtggcagaagctggattcaagctctcccatcgaactgcaaagctggttgcatgccttgaatgtcaaaatgaataatggcacaggtgatcaatgcttcaggaactcagagaagagatgatccctcggcctcatagtggctaaggaacactgccatcattaaatgccagtgcttttatatcatccccaacgccttccctcccactaaccgtgaatcttaagcaagactgtccaacttctactttattatccttagcaatggggaaatcacttaattccagtgcccacacattcatgttgtaacaacagattattagcaaattcttccttatataaagtcaacattttcctcagatgctgtggaatcagatatggagtccacattgccagaaacaatggcaaaccacaccacaggattgttcaagagaggcctcccagtccattggcttgacccagaccctgtaggcagcaccagacacatgaaccataactaatttttccccaaaaatcaaaccctcggccactcacactcattagaaaaattaattccaatggtgcctgctccccagtttacacctttataaatcaaattgtatacctactcatctgattgacagagtctcagtcacaagattggggcctacatgcaagagaaaggaagtttacggaatccaccttagttaggaaagcaagaatcatagttgggagttccctaacataagaaggatgttcaagacactaaggatccactacatacatggcaaatgtctgctacactccatcacttggctgcccaacatgaatgcacactccttctccatgcttcaccttcctaaaacaaaagtgctcccattgaacgtaatcctatctcttgtacaaaggaaaatgaggtcaacttcccccagaactgaaataatccagtctcagcacctactgctttcagctccaactataggatctccagatgatacccattccccctctatttagtcagctcctcccaccaaattgatattctatagaccatgggctaacccgaaggttcaccaccaacagcatactatatgtaaaatagcaggaggaaggtagaggaaggagaaaaaggaaattggttcaaatattcaaatacacacaggacagagcaaggaagaaaatatggacagagagtggcctcattatttctgaaattggcccttgaccggagctatacctattccagtctcttgccctcagccaatacaggtgaaacagaagttgaatgttagtgaacctgagccttgggaacaccgtggaactatcacactagcctctcaaattctaactccaagagtgaaaactagaaatgcttcatttatttactcctctgattttgggtgcaactgatacaggacttctccaggtccagattctcctctgttccgctgatggtagaatgcccagagtaaggttgccatctttagcaaataaaaatgcaggactcccagataaatctgaatttcagataaacaatttatcttattttgtctcatttaatattgagatatacttataccaaaataaatagtttcttgttcatctgaaatacaaatttaactgggtattctgtattttttaaaagatttttatttatttgtttgtttgtttgtttgatagagacagagaacacaagcaaaaggagtggcagtcaggacagggagaagcagcttgatgtgcggggaacccaacacagggctgaatcctgggatcatgacatgagccgaaggcagatgctcaaccactgagccaccaggtgcccttttgtatttttttaaagattcatttatttatttgagagagagagaacgtgagtgtgagcaggggaaggggcagagggagagagagagaaagtgagagagagaatcctcaagcagacttcctgctgagcacagagcctgatgcagggctctatttcaggacctttagatcatgacccaagcagaaaccaagagtcagggatccctgggtggctcaatggttgagcatctgcctttggctcagggtgtgatcccagtccggggatcaagtcccacatggggctccctgtgaggagcctgcttctccctatatctgtgtctctgcctctctctgtgtctttcatgaataaataaataaaatctttaaaaaaaaaagaaagaaagaaagaaagaaagaaagaaagaaaccaagagtcagcccctcaaccaactgagccacccaggcacccctgggcattctgtattttatctggcagataaagagaatgaaaaattagtacagggattcatcagacattacagataggtgtaaatataactatcctacagagaatcagagcttggggcaactgagtacctaaccaatacttactaaggaacagattcccccagtcacaagcttcaagctaagaccaagggcatggtaggatgatttagggaaggtatgttttcccctgtgattccttatctctgaattaaatggcttctgaatctccaaaagagtggcgcctgggtggctcagtcagttaagcatctgcctttgactcaggtcatgatcctggggtcctgggagaaagctccatgtcaggctccttgtcagcatggaatctgcttctccctcttcctctgcagctcctcgtgattgtttctctctctctctctctctctctctctctgtcaaataaataaataaaatataataaatcttcaagagaaacgacactctgcctgttatccatctcttccctggactcactgttcctccaacctggggaaaacaacagatatgtacttgaaacctagttacaacagttatgagttatatgatcttgttcatgttaatgtatctgagcctcaatcctacatttgtaaagtgacagtaatggtacttcttggcgggggtgggatccctgggtggctcagcggtttagcccctgcctttggcccagggcgtgatcctggagacctgggatcgagtcccacgtcaggctccctgcatggagcctgcttctccctctgcctgtgtctctgcctctttctctctttctgtgtctctcatgaataaataaataaaatcttaaaaaaaaaaagaaaggtacttcttggggttattgtggaataaaagagtaaaacctcagatactgacatctgtatacattctatttcagaaaaataagtttgaattataatatgggagtagaaaagcccaggatcccagagcaaaccactcttctacatgtacatccccactagcgggactctgtttctcttaggtggtagagcagagagggctctggatttggaatcaggaaaacctatttctgaacataatactccataaaaccgagctaataatatccacttcacagagtcattatgtaaatatatctaagagttgggacaataaatgatgcataggctctcaaaaaatgctaattccaagccatttactcttgtgatgatgtgtgtaaagtcctaccataggttacgttcccttccttcatctactctccaaggatctttcttatgccagtgaacattggttcagaggaagcaagagatccagatcaatgtttttcaaattgcaggcaatcatcctttaagtggggtgctgttcatattttaacgtggagtgggatggaatgaaatagaaactgaaagcaccgcacctgacaaggataaatattgtttcctgaaacttgattcatttgtatgtgtgtacgtttgtgctcatgtactcacacaaacatataaatggacattgggtccttcttcaaaatgcatttcctactctcggccataaaagtgcatgtttcggggcacctgggtggctcagtggttgaacatctgcctttggctcaggtcgtgatcctggaatcctgggatcgagtcccacatctggcttcctctgagaagcctacctttccctctgtctatgtctctgcctctctctgtgcgtctctcatgaataaataaaatcttttttaaaaagtgcatatatttctggatgctccacataaggactctccctacccatatttctaaagagtctttaacaaagtgccctaactgggaaagacatgatccttccaccccctacgtcccagataaggcaccatggttgaaagctcatcctggaagccagaacttcggggtcaggactccacttcacctccagcaaaacagagcataacttggaagaaacatctgatcagaaagatagcctaatatgggagaagaaaaacatgaccacatagttcctgtggttaccagcccagcccttggctcattgctggagttataaaacccaagaccagaaaatagaagcagcatctgcccagggcagcctcactgagaagatgcattgtcttcctctcaccctgctgctccttctcctatgttccagagcagaagctggtgagtcttgggatccttccccctggaaacggcaggatcagcaccccaaaaccaagtttagtctgaatatagctgactcataagcaaggtggcaggatctctctgtaggagtccagagtgaagttccaattgggatatacccacccaatctctgtagcctgtggtaattcccagggacaaggaaccccactgactaggggaaagcccagaacaggtgaaaggaagagggatatcttctcactgtgagatactgtgtagaaggccctaagttctctttatcttctgagcttcggggctacactttatctgtggccattctgtgacgctgctcacacaacctgtggagaaggtcaagacaagaacctggggagcttgccctacacggtgacaaaggagcattaaggcctggcaattttggagtaggagaaatctgaggtagaaaatgcctgaatggtaacagaggccagattggctgttgtacccagaagaaggaatgagaatttatatgggaggttgtgggtggggagaccagatactagagcctcctgagggggatgatgggccgagcacagggtgaggatgagattcaaaagaagcccttcccaactccagcccagtctacgcattctctgtattcaggcccaggggctctctgttccagaggagatcatcgggggcacagagtccaagccacactcccgcccttacatggcccacctggaaatcctcactctccggaatcacctggcgtcttgtggtggtttcctgataaggcggaacttcgtactgacagctgctcactgtgcaggaaggtgacacaacagggtcctgtttatctccaaaagggggatagggtagcagggtagcagtgagggatgcacacttaggcagcctgaggaggggctcctgggactgggagaggcaagacttgaatttaagggaattggtcccataattgatggatgccctgatcttcaatcactgtgagctcggcaacccttcaaaggaaaaggagcccctaaccaagtgtccctcctctaaaagtaactcccttctcctcgaccccaacatatgagacatgtgactttcaggccacttcctctctgccctttccaagaacgctggcctttagttctcagggacttgacccatcctttccatgggaagcagagaacagggtctaccagggaaaccccaccacctccccctttcctctgatatctctcagagggctggccctcacataaggccccctgaattaggaagcactaaccctgcccctggattcccccatggccgactcggttcccagcaattcctgagggtcctggatattgtcactatttccctagtgaaacctaaccccccaaatgccacatgtggcccagggaaaggaggggtgggtagagtccagtaacccctgtgatagactccagtcctcagtgggcagatcccaggaggaaccctagaccatcactgtttctccttgtccttccttctctctctcaacaggttcataatggtcaccctgggagcccataacatacaaaagaaagaagacacgtggcagaagcttgaggtcataaaacaattccctcacccaaaatatgatgaccttactcttcgccatgacatcatgctactgaaggtgatgacttctttctccccctcctccacttcccattctcttagttttctctttcaggtccccagtgccctgaaatttcctcaacctgcctatggactccaaccccaccaagtcccaccccacccccggggggctagttttaatgtgaaacagtttgccctgtcctcccctgatttcctccacctaccccatcagccctttctggcactgacagcccctcctgcccttcacagttgaaggagaaggccaacctgaccctggccgtggggaccctccccctctcaccccagttcaacttcgtcccacctgggagaatgtgccgggtggctggctggggaaaaagacaagtcaatggatcaggctctgacactctgcaagaggtgaagctgaggctcatggacccccaggcctgtagacactacatggcttttgaccacaacctccagctgtgtgttggcaatcccaggaagacaaaatctgcatttaaggtaatcctccaacaagggttcttttccataaatcactgtttgtttggggtccagaatgtctcctggaagaagagggggtgggtagactgtcaggtggccacagggtttcagatcataggcctaaggaactggaatcacccctctccagatctatccccccacccatacagtctctaaccatccctccaggctgcggcacagggcacacagggtggcaagaaggaaagggagaaggggcatcacactgagacatataaccccatgaggagccagggctgctgggtctgacctgaggtctcactgtgactcggaattggaacccacaggcagaagtggatgacttctctgctgaccttctgtgcgctctctctccctctttctctctctgccccacagggagattcagggggccctcttctgtgtgctggggtagcccagggaattgtgtcctatgggcagaatgatgcaaagccccctgctgtcttcacccgaatctcccactaccggccctggatcaataaggttctgaagcagaataaagcctgaatggagcctgggcaagcctgaggggaaatctggaaccagacctgagcaggctctctgccacttactctggagctgcctctagtctctactgaggccccactacatccctcagacccaagagggctcctccaggtcacagagtcctcagtaaacctcaataaagatccagcttccagacttgagtgtgtgtcctctctctgacattcctttctcctggcacaaagcaaccggcccccagcctaaagcagcctacaagtttggaaggagtgggagtgggggtgggtggggaatgtgagagacacagaaacagagagaaaacaatgaagaaaaattagggaaagagagagggaatccctgaggaggcaggatccatattttcaacttaaacaagacattacaccagatccttgctataatcatcaactttatactaattcggatttatctctagtaagagtcagaatcactaaggtcaatgtgaatcataagcaaagatattagatgtttagagcagccctgacctctccacactaggtaccgggccccccc

SEQ ID NO: 5854 - DNA, 1396 bp, Canis familiaris
ccgcccgccgccaggcccggggccgcctgcagcctgcggaggaggccgcgccgcccgccgctcctgccgtctctctcctccttcctctccagccaccggctcccagacatgacagccatcatcaaggagatcgtcagcagaaacaaaaggcgctaccaggaggatgggttcgacttggacttgacctatatttatcccaacattattgctatggggtttcctgcagaaagacttgaaggcgtatacaggaacaatattgatgatgtagtaaggtttttggattcaaagcataaaaaccattacaagatatacaatctgtgtgctgaaagacattatgataccgccaaatttaactgcagagttgcacagtatccttttgaagaccataatccaccacagctagaacttatcaaacccttttgtgaagatcttgaccaatggctaagtgaagatgacaatcatgttgcagcaattcactgtaaagctggaaagggacgaactggtgtaatgatttgtgcatatttattacatcggggcaaatttctaaaggcacaagaggccctagatttctatggggaagtaaggaccagagacaaaaagggagtaactattcccagtcagaggcgctatgtgtattattatagctacctgttaaagaatcatctggattatagaccagtggcactgttgtttcacaagatgatgtttgaaactattccaatgttcagtggcggaacttgcaatcctcagtttgtggtctgccagctaaaggtgaagatctattcctccaattcaggacccacacgacgggaagacaagttcatgtactttgagttccctcagccattgcctgtgtgcggtgacatcaaagtagagttcttccacaaacagaacaagatgctaaaaaaggacaaaatgtttcacttttgggtaaacacattcttcataccaggaccagaggaaacctcagaaaaagtagaaaatggaagtctatgtgatcaagaaattgatagtatttgcagtatagaacgtgcagataatgacaaggaatatctagtactcactttaacaaaaaatgatctcgacaaagcaaataaagacaaggccaaccgatatttttctccaaattttaaggtgaagctgtacttcacaaaaactgtagaggagccatcaaacccggaggctagcagttcaacttctgtgacgccagatgttagtgacaatgaacctgatcattatagatattctgacaccactgactctgacccagagaatgaaccctttgatgaagatcagcacacacaaatcacaaaagtctgaattttttttaatcaagagggataaaacaccatgaaaacaaacttgaataaactgaaattggaccttttttttttaa

SEQ ID NO: 5855 - DNA, 4033 bp, Canis familiaris
gaattccgtctgggggagggggcgcggggtgattcagcgcccggcgaggcggaagcggccgcaggaggaggaggaggaggaggagggggagaggcctgtccgcgcctgggcgcccggggtggcacgagcccacggcctgagtgcgaggcggagacgaggaggccgcggggactggaggcgaggccggccgggcccccgcagccatggagaacgcgcacacaaagacggtggaggaggtgctgggccacttcggcgtcaacgagagcacggggctgagtctggagcaggtcaagaagctcaaggagagatggggctccaacgagttaccggccgaagaaggaaaaaccttgctggaacttgtgatcgagcagtttgaagacttactagttcgaatattattgctggcagcgtgtatatcttttgttttggcttggtttgaagaaggtgaagaaacaattacagcctttgtagaaccctttgtaattttacttatattagtagccaatgcaattgtgggtgtatggcaggagagaaatgctgagaatgcgatcgaagcacttaaggaatatgagcctgaaatgggcaaagtatatcgacaggacagaaagagtgtccagcggattaaagctaaagacatagttcctggtgatattgtagaaattgctgttggtgacaaagttcctgctgatataagattaacatccatcaaatctacgactctaagagttgaccagtccattctcacaggtgagtctgtgtctgtcatcaagcacactgacccggtcccagacccacgggctgtcaatcaagataaaaagaatatgctcttttctggtacaaacattgctgctggcaaagccatgggagtggtagtggcaactggagtgaacacagaaattggcaagatccgggatgaaatggtagcaacagagcaggagagaaccccactccagcagaaactagatgagtttggggaacagctttccaaagtcatctccctgatttgcatcgcagtctggatcataaacattgggcacttcaatgacccagttcatggaggctcctggatcagaggtgctatttactacttcaaaattgcagtggccctggctgtggcagccattcctgaaggtctgcctgctgtcatcaccacctgcctggctcttggaactcgcagaatggctaagaaaaatgccattgttcgaagcctcccttctgtggaaaccctaggttgtacttctgttatctgctcagacaagactggtacactgacaacgaaccagatgtctgtgtgcaggatgttcattctggacagagttgaaggtgatagctgctcccttaatgagtttaccattactggatcaacatacgcacctattggagaagtgcataaagatgataaaccagtgaaatgtcatcaatatgatggtcttgtggaattggcaaccatctgtgctctttgtaatgattctgcattggattacaatgaggcgaagggtgtgtatgaaaaagttggagaagctacagagactgctctcacatgcctagtagagaagatgaatgtatttgataccgaattgaagggtctttctaaaatagagcgagcaaatgcctgcaactcggtcattaagcagttgatgaaaaaggaatttactttggagttttcacgtgatagaaaatcaatgtcagtttattgtacaccaaacaaaccgagccggacttcgatgagcaaaatgtttgtgaagggggctcctgaaggtgtcattgacaggtgcacccacattcgagttggaagtactaaagtccctatgaccccaggcgtcaaacagaaggtcatgtctgtcattcgggaatggggtagcggcagcgacacactgcggtgcctggccctggccacccacgacaaccctctgagaagagaagaaatgaaccttgaggactctgccaactttattaaatatgagaccaatctgactttcgttggatgcgtgggcatgctggatcctccaaggattgaagtggcctcctctgtaaagctgtgccggcaagcaggcatccgagtcattatgatcacaggagacaacaagggcacggcagtggccatctgtcggcgcattggcatctttggacaggacgaagatgtgacgtcaaaggcttttacaggccgggagtttgatgagctcagtccttcagcccagagggatgcctgcttgaatgcccgctgttttgctcgagtcgaaccttcccacaagtcaaaaattgtagaattccttcagtcttttgatgagattacagccatgactggggatggtgtgaatgatgctcctgccctgaagaaatcggagatcggcattgccatgggctcgggcacagcagtggctaaaactgcctctgaaatggtcctggcagatgacaacttctccaccatcgtggctgctgtcgaggaggggcgggcaatctacaacaatatgaagcagtttatccgctacctcatctcctcaaatgtgggggaggttgtctgtattttcctgacggcagcccttggattccctgaggctttaattcctgtccagctgctctgggtcaatctggtgacagacggcctgcctgccactgccctggggtttaaccctcctgatctagacatcatgaacaaaccaccccggaacccgaaggaacctctgatcagtggatggctctttttccgttacctggccattggctgttatgttggcgctgctaccgtgggtgctgctgcatggtggttcattgctgccgacggaggaccaagagtgtccttctaccagctgagccacttcctacagtgtaaagatgacaacccggactttgaaggagtggattgtgcaatctttgaatccccgtacccgatgacaatggcgctgtctgttctagtaaccatagagatgtgtaatgccctcaacagcttgtccgaaaaccagtccctgctgaggatgcccccctgggagaacatctggctggtgggctctatctgcctgtccatgtccctccacttcctcatcctttacgtggaacctttgccacttattttccagatcacaccgttgaatttgacccagtggctaatggtgctgaaaatctccttgcctgtgattctaatggatgagacactcaagtttgtggcccgcaactacctggaacctgcaatactggagtaactgcttcctaaaccattttgcagaaatataagggtgttcggttgcgtgcatgtgcgtttttagcaacacatctaccagccctctgcatgattgatgttgggggaaaaagaaaagtagaaaaaaagtccccaactcattgtgtgttatgtggaggaaacgtgtattaccaacgggtttagcttttaaatcaaaataataattacaaatgtacaacttagcttaatgaatcagaaagcctctccagagaactttggtttctttgctgcaagaagaatgaggttccaaaaccttatctaagaacttagaagccatcagccaagtctccgtgtttctctgtgcaaaatgtcatagtttatataaatgtacaatattcaattgtaatgcatgcctttggttgtaagtagccagatttctctatggtgtcatttaaacatgctactttttaattggccctgtacagtttgcttatttataaatttattgaaaacactacaggtgttgaaaggttagaatgtaggcctccagttcataacttcagttattttttttgagtgtgcaaacagctattttgcactgtattaaatgtaacttatttaatgaaatcagaagcagtagacagatgttggtgcaatacgatattgtgatgcatttatcttaataaaatgctaaacgtcagtttatcacaagcatgtttgactttagactgtaaatagagatcagttgtctatttctgtgctggtaacaagcattgcacagacatggtttcaggtaaataaatctattctacgataaaaaaaaaaaaaaaaaaaaaaaaaaaaaaaaaaaaaaaggaattc

SEQ ID NO: 5856 - DNA, 1304 bp, Canis familiaris
tcccgcagacccagcactggggaaatgatccagaaattgcagcctcagcctccggccatctgccaccccctcatggccaggccgtgggctcgggagctataaagcaggagggtccagcagcccccagcccccggaaccatctgcaccccgacacggccggcaaacaggtctgtccccacgggctccccgccgccgcctccccgccagcctgtgctctcaaggcagcaggaggagaagagctgcctcggggcctttgcggggtgggctcagggtgggggggccgtgccccttaccagcctcaaccctgcctgtccccaggtcgccatggccctctggatgcgcctcctgcccctgctggccctgctggccctctgggcgcccgcgcccacccgagccttcgttaaccagcacctgtgtggctcccacctggtagaggctctgtacctggtgtgcggggagcgcggcttcttctacacgcctaaggcccgcagggaggtggaggacctgcagggtgagcccccgccgcccccgccctggctccctacctggccccaggggcaggccaggtggaaatattaaaaagaaaaatgactttcccttggtctacatcctgcaagggaccagctccttggtcagggtcagacaccaaaagcctgagggcagcctcccaccttggcaccaccttggggcctgggagccactggcatggggttggagtaggcgggacacactctctccctgaccctgacccgctctccgcctggctcctccgcagtgagggacgtggagctggccggggcgcctggcgagggcggcctgcagcccctggccctggagggggccctgcagaagcgaggcatcgtggagcagtgctgcaccagcatctgctccctctaccagctggagaattactgcaactaggggcgcggggggcaggacgtggcagcacctgctgcaggtcacggtggccgcaagccttcggctctctgcaccccaagtgattcaataaaccctctgaatgagccctagtggtgttgtctgtgcggcgcaggggttgaggtgtgggccaggggtccttccagggaccccctgtttcctgttctctcacaccagcccccccaaacttggcccctgcccactgggtgcccaaaggcaagctcctgcccattgtcggctgccccctgccccaggtgctaggaggtcccatggcccctgctgcttcagcacaggacagagaaggacctctttttctctgcggggcctgggggctggttgggagcagatttccctagctcaaaagcctt

SEQ ID NO: 5857 - DNA, 628 bp, Canis familiaris
  misc_feature (1)..(1): n comprises a, c, g, or t, or includes no nucleotide
nccttatggtatacttggttttataacatacatgtcatgagtaaggctttttgtgaagccttggattggaatggggggagttactggtcacaaaagctcatttggccttgttctgctcaagatgactattaaggtggcttatgaatggacatttaacgtagattatgtactttaatgtatgaaaaaatacaagcacatcaaacccgtgattttgggagaccttggggctcagtggttgagcatctgcctttgcctcaggttgagattcaggggtcctgggatcgagtcctgcattgagctccccgggtggagcctgcttctccctctacctgtgtctctgcctctctctctgtatctctcatgaataaataaataaaaatcttttaaaaaaaaaaaaaaacctgtgatttgatgatatattgaaatttctagttgcaaataatcattaattataaatagggatccctgggtggcgcagcggtttggcgcctgcctttggcccagggcgcgatcctggagacccaggatcgaatcccacgtcgggctcccggtgcatggagcctgcttctccctctgcctgtgtctctgcctctctctctctctctgtgactatcataaataaataaaa

SEQ ID NO: 5858 - DNA, 751 bp, Canis familiaris
  misc_feature (657)..(657): n comprises a, c, g, or t, or includes no nucleotide
  misc_feature (673)..(673): n comprises a, c, g, or t, or includes no nucleotide
actattgctatgaagggagcagggacagatgatcataccctcatcagagtcgtggtgtccaggagtgagattgatttgtttaacattaggaaggagttcaggaagaattttgccacctctctttattccatgattaagggtgatacatctggggactataagaaagccctcttgatgctctgtggaggagaagatgactgaggcatcagccagagagagatcttatgctgtgcctgccaccgccacttcgaccttccttcacagcttgctgcactttttatatgccagtgcttgacacattgccttattcacgttagcgtgtctgaataaccaaagcactacatcgacagccaggaagtcagaaataacggtgcctgctgtttcttttatattgtttacatatttacagagtcatagtttcttttctttctggttgctgagtgatcagataagtagatagctgttaccgttaacgtataagtatagtacgttaagggtcgggttcagatagatctttcttttagaaagagtcagactgctaggcagcctttttaaaaaaatcttctatattatattaatgttgaacccgtgtattccctaatctcgggatatttagaccctttaaaataaggaattcctgggaaagtggtttatttnttcaaagttttgctanctaaattaaacctgaaaaattatggtggttgcattcaaaagattagtaagaaataaacatttccttccccctgaaaaa

SEQ ID NO: 5859 - DNA, 660 bp, Canis familiaris
gacagagtcacgtacacctggggaagagcataatgggggggacgtgcaaaggtaataggccgaggggatgccagcacgtccatgtggctcacacagacacacgcccttcctcctgcgttgaaagttgagggaaggacaggcgggaaagatcctagcatttaaaaattgtcttcatataaccaaggcaaaacgacacaaggcttgaggttcccaattccggtctgggatgaagaataagaaaaagctttagcctgggatgagggacgcttccaaaggaacgaaaatcagggcggacgggaaaggggacaaagaacttgatgccgtctgcctccacaagtgacagaggtctcaaactcagatgcttcgggggccagacgtccagccctaagaaagagggggaagccaactggacctcacactttggctaaagagggtatcctgagctcagatccaaacaggcgtggccaagactgaagccggaaatccagattgttgcaaaacgtcgccaatttttcaacaagttgattgatttaaagttttgtttaaaaaaaagaaaaacaagggtgcctggccagctcagttggtagaacatacgactcttgatctcagggttgtaaattcaagccctactttgggtgtagagattacttaaaaataaaa

SEQ ID NO: 5860 - DNA, 626 bp, Canis familiaris
cgtcagaaataaggcatctggaccagagagagagcccagggaccacaagtgagtcactgcccagagcggtgggctaaagccaagcccccacaggcctccctgtactatagcatcagaactgtcaaatctctccccttccggagagcagggcttgcactcgttcccctagaacctactttgaaggcaattagaagctttgttttcatattgccccctggtattgtcttgccaggatggttaggtacacaaggacgcttattagatcactgagaagaaaaagccacaacccgcttctctggtatgaacatctagtttgagagcaagcaaaacacgtaggcttgtatttagtgctttaatggagtactggtaacactttttctttcttgaataggaaatctgcttaataatttaaggccaggccttctaatttcaaaaccccttcctcccactaccaactttccgtgcagttacctttcatttttaaagcaatttcactgctaaatataaattgtatttgtggggttcatagttatataatgctgaagggaaccactctttcgttgaaaggtgataaaagttaaataaagactgtctccacagtaaaaaaaaaaaaaaaaaaaaaaaaa

SEQ ID NO: 5861 - DNA, 646 bp, Canis familiaris
ggggagaatttccgtctaatctatgacaccaagggtcgctttgctgttcatcggattacacctgaggaggccaagtataagttgtgcaaagtgagaaagatctttgtgggaacaaaaggaatccctcacctggtgactcatgatgctcgcaccatccgctatcctgatcccctcatcaaggtgaatgataccattcagattgatttggagactggaaagattacaggattgtcaatcaagttcttgattacaggtatagtctatctagtgggatgactggcagggtagcctaaccatgggtagaggaaattggttgtgtatcgactcaaccgacgagagaacaaccctcggttggttctttgatggaagtatgtatcgaatcgtagagatgatcgccaggcggccaacatgtttccgacaccgagtctctccaaacattttgtgtatatgtgggcaaaggcacacaaaccagggatttctcttccccgtgggaaagggtatccgcctcaccattgctgaggaaagagacaagagactggcagccaaacagagcagtgggtaaaatggtccctgggtgacgtgattggaagtctttatacttaattaaagattctacagcacgctaaaaaaaaaaaaaaaaaaaaaa

SEQ ID NO: 5862 - DNA, 577 bp, Canis familiaris
atagatgaatgtgtgacgacccaaataattcgcccagagggactactaggcattagcggtaaaagctcaaaggaaccttggcgggtgccttatatccctctagaggagcctgttctataatcgataaccccgataacctcaccacctttcggcgtaattcaagtctaaataccgccatctttcagcaaaccctcaaaaggtagaacagtaagcacaatcagttttacataaaaaagttaggtcaaggtgtaacttatgaggtgggaagaaaatgggcacacttttctaaccccaggacatttcaacggaaggtttttaatggaaatttaaaactggaaaggaaaggaatttaaagttagttaaattaagaaatagagagcttaatttgaatagggcccatgaagcacgcacacaccgcccgtcaccctcctcaagtaataagacacaaccataaccatattaacttaactaaaacacaagaggagacaagtcgtaacaaggtaagcataccggaaggtgtgcttggattaataaaaaaaaaaaaaaaaaaaaaaaaaaaaaaaaaaaaaaaaaaaaa

SEQ ID NO: 5863 - DNA, 609 bp, Canis familiaris
tatttaataaagaatccctcaggactaagacttttaggttgtgaattccctctctcctctatggtgggacagtcccatcaataaacccacaagaaggacattcagctctgacaggactgtctccccctgttgagtcgtgaccccctgccactcccaggtaccctgtcccataagcttcattcccctgaaagaggcctatgccaagcttctaagagtactacctcacctctctccactgttcatcaagtgtcatggacccaaaggccttccctgcccttttcccctaatgaccctgagacctacaccatcatttttgtgtaactctcttttatcacctccttggctctccatcctatgtaaattgctgtccttttgccataacaacttacggatttttttcgtgtcttcctctaacaagatgtgaatgtctttaaagcagaatgtctttttttaacctactattctttcctcacatgcttaaatgattacaaaacttggtaacttctttcttacaaaattaaaataatccatatagcttttttaatgtatttcactaagtcattggctgtttctgtttgttgagttttagacaccaaattaaaaagaata

SEQ ID NO: 5864 - DNA, 568 bp, Canis familiaris
aattaaactagaagagaagaagaaaagaaccaagagaagtaggcagaagaagctgaaaagcaagtatttcatgggcactcctggtcacaattgagaatttcttaagttggaaggccaaatttgatgcagaactcttggaaattaaaaagaaacgaatgaaagaagaagaacaagcaggaaaaaataaattaagtgggaaacagctatttgaaacagatcataatcttgacacatctgatatccagtttttggaagatgctggaaacaatgtggaggtagatgaatccctatttcaggaaatggatgacttggagctagaggatgatgaggatgatccagactataatcctgctgacccagagagtgatctgactgactaatggactatccccatctacagagaggtgtgactgccacagcatctgtggctgtgtggaggtgttgattttcctttctttttttctaagaaaaaataattttcaggagaatattcttctgatagctttcatcattgaacttaataaactgaccttaaagtttcaaatataaaaaaaaaaaaaaaaaaaaa

SEQ ID NO: 5865 - DNA, 611 bp, Canis familiaris
tggagaaggcggccctgatcctcacgaggccgtgggcctggaaccagctttggagtttgcgctttgcaaatttgtcgaaggctctgaccgggcaaggatgtggctgacacaagtgaaaggcccccgcttgttcttaaagattaaagcagaaatcttcgatgatgaagtagagaaatgtgccgtttgtcatccttctcattgtgttcactttaagcaaaatgggcagttcccgcgcagtcttggctgcgaagtggcaagcctcaccgagcttccccacctgcggcccaggtcctcatggtcctgagccttgatggcagagtaaatggcatttagcaaactactggttgttactccatttatctctcaattcctcctttttgtgtgtgaaaccaaattcaactgtcaggcgtcacttgcagctgttaagtgttgatacagcgactgagataaaagagcagtgaacatgtttgacatggcaaggaggaaaagcataaaagcaaagatttaagaagcttgtgattttccccccatttgttaattgtatattgttaatgtgctattaaaaataccagtgaagttgaaaaaaaaaaaaaaaaaaaaaaaaaaaaaaa

SEQ ID NO: 5866 - DNA, 736 bp, Canis familiaris
tttgctgctcccctcactgtgtatagccttaatgattccctagaatcaagtaatcgttcctcgtgcctaattacaaactcacttaagtttaacttcggtaaattaaactatatgtgtttgggggaaaaagaccataaagcaaaccaggatggaaaataattgcaatattatggatgattatgcctatttcattagatgagcctacgaacctctgctccttggattaagtgtgagttggaattcatagatcctctgttcttgccggcttgaatccttggtgcctctgcttagaatgagcatcttgctgggctgaatatgctaccattgtgctttagaagatacatgaaagtctattgtacatggaagcctgcacgcatgggcccgagtgccttgagtcctggtgctgcaactcaagtagcgacccttcagattgagatgactagtgagagaaaggcaagccaccgcctgcggctgcgacccagtctatgagtcgagtggcctgccatgcagcacggcgaggggcatgcatgcctgaacgcacccgggtagtaggtagtcaccatgatcgaggtctctcgcgacagtgggagcccggcttctcccctcggccttcttttcttctcttctctctctctctctctgtctgtctctctgcatctctatgaatagataaataaaatctttaaaaaaaaaaaaaaagtcactttgggagctttaaagttaaaaaaaaaaaaaa

SEQ ID NO: 5867 - DNA, 632 bp, Canis familiaris
gccggggagctcgaaggcggacggcacggcaagccatcggcccgggctgcggggagccggagaccgcggcggcggcggctgctgctgcaggagaagccgaggggacaccgcccctgcccgcgccctgcctcaggccatcgctgctcccccggggccccgcgcggactagtctccgtgaagtgtcacgatgtctgaccggaaggcagtgatcaagaacgcagacatgtctgaggacatgcaacaggatgccgttgactgcgccacgcaggctatggagaagtacaacatagagaaggacattgctgcttatatcaagaaggaatttgacaagaaatacaaccctacctggcattgtatcgtgggccgaaattttggcagctatgttacacatgagacaaagcacttcatctatttttacttgggtcaagttgcaatcctcctcttcaagtcaggctaggtggccacagtgaaggtgtcagtggcggcggcagcgatggcaggcggcgttgctgggactgttttgcactggggccagcatcaggatgtcctctccaatggctgtgctactgcatggactgtatactcgatttcatgtgtatgtcgcagtaaacaaaaccaactttcaaaaaaaa

SEQ ID NO: 5868 - DNA, 670 bp, Canis familiaris
aagccaccaccaatgcaggagtgctttcgtaccatggagcttgctgcccaaggcatgaagaaggcctaccaggacatggacattgacaaggtggatgaactgatggctgacattacagaacaacaagagtggcccagcagatttcagatgccatttctcggcctgtgggctttggagatgttgtagatgaggatgagctattggaagagctagagttgctggagcaggaggaactggctcgggacttgttaaccgtgggtgacaaagaggaagaaccccccgttgaactgcccagtgtaccctctacacatctgcctgtgggaccagaagctcccgaagcagacgaagatgaagcagcacttaagcagttggctgagtgggtatcctgataagtctgggttgcttttcccggcactgccttcattggtctcttttccttaagtgccaagtgctaagctaaaggatcctagcctgttggggaggtcctgctgagcggtgatagtgtgaccctgcctggaaaggggttgttgccctccccttcttggcccaactctgaaaaaggatgttggcgcgagaggagccccgaggcccccttctctttgatagcagtcacggtgccctcgttcccaataaaatcgggcagatggaactgtaaaaaaaaaaaaaaaaa

SEQ ID NO: 5869 - DNA, 642 bp, Canis familiaris
ttatcagggaaaattaagaacgtttagtttctaagaacctttctaggaattagaagaagggatttcaagtgggtctaaggtcaaagctaattcgccaatagcaagatcatttgaaactagttttgtatcccttgcccgtcccctagatcaaatcgaatattaattgtgccttatttcacttacatagacttgaattattttagggaaagcccctatgtgaattcagaagtcactacaagcagcattgagagtgaagttgggatattctgttgaccgctaaaccttgatgtcattctgtgtatatagaatgtaaaaggaatattcagtgttactgccacatatgttaatatacacaaacttaattagcattgtaatggccaaatgcattccctcatgctttttctcttttaaaaaaaaaaaaggaaaaacaaatcaactctgtcccccaacagctgcctaatttaggagtctgaccctcacatctcattggtgtgggtgcatggggccgtagtatggatgttgtatgggtgtgtctgaatgtgtgtgagagagccttggaaaggactctgcagatactgtaaataccagtaccgttttaataaagcatgtacaataaaccaaaaaaaaaaaaaaaaaaaaaaa

SEQ ID NO: 5870 - DNA, 650 bp, Canis familiaris
gtgagtctgtctgccttgcctctcagttcagtttgaggaagaagccagattggagggggacttcaggagacaaagagcctgctttcagtgtccttgggctgcgttcgcagtgtggccccagacccgcacctgtcctggtatcctgtaggaacttgtcagaaatgcggaatctggggcctcaccccagacctgctgagtcagaatctgcattttaacaagatcccctggggattcacacacactggaacatttgaaaagctctgctatgggcagcttcattgaaaacacactagacaattccctgttctagttgagcttgtaggctagaaaccagaatcttaacaaggttcctttgttcagaagacactcctccaaatcccagcattgagacggcctcttctgcactgggaggagccctcaccactctggcggtctgcactgttgaaaacaaggacttgggcagccctggtggctcagcggtttagcgccgccttcagtctagggcctgatcctagagacccaggatcgagtcccacgttgggctccctgcgtggagcctgcttctccctctgcctgtgtctctgcctctctctctctctgtgtctctcatgaatatataaataaaatctttcaaaaaaaaaaaaaaaaaa

SEQ ID NO: 5871 - DNA, 524 bp, Canis familiaris
cctgcaggcattgtgggtgttttcgcagcattcaggagtttagtgaaaggtggtgtacctttccagtatatgttccatcctcctttgtatagttgtctttcctcccatgtccttcctatggcccagggtgggaggatggagaggaggctgctactctgctatttcccacgtgcctctaccatgggctcaaccccagctgtgaaagctgctcctgtcccctacctgggcacatgtgagccctcttcactggattttatacccttgtgtctgtgtatataagatatatatgtatatgtatgtatgtgtatctatatgtacacacatacatatatatgtataaactttgtataaatgggaagctccactgtttttggcagctgctgcccatatgtgtgtggtttcggtcagttggtgtgtctgatgttaataacttttcatgagcccaaaccgtgaatggtttctaggaatataaaacatttataatgaaaaaaaaaaaaaaaaaaaaaaaaaaaaaaaaaaaaaaa

SEQ ID NO: 5872 - DNA, 615 bp, Canis familiaris
tgttttctatattcatagactataatataaactcttaggaagcaaataagattttgtacgagttattacatcatattggatatcaatgctcaaaaataagatgtcatcttctagacacaagttatcgatacatattgtagatataaacagtttaaattgtgtaaaattaaagtcataggaatgagtcacttcctgaaggtcatcaatagtcacagaccagattatatttttcccttctctttccccctcagttctctgtcctcaaaaattgatagttgagagatgcctggttggttcagttggtgtagcatgtaactcttgatctcaggacagtgagtttgagtcccactttgggtgtagagattgcttaaaatcttaaaaaaaaaaaatagttgaaaagaaaattatccaattagaatactttttgttttcacgtataataagccactgcttgtttagtgtggtagtaaaatcagtagcagaactgttcattaaattaaattaccatggtgatccaaacctgagattctgtgagtttggttttctttttcatgagctgataatgggaagtttttttgtctgttaaaaatagggacatactggaaaaaaaaaaaa

SEQ ID NO: 5873 - DNA, 410 bp, Canis familiaris
acccacctacaccaggctgcctgtttggatctgttcttgcacaaggcttcacacagccagagaagctgcagctgaagagctccagtggcggaagccgggttggtggagagagagggtccttgtcaccaggctttagtgtgtttgggatgctgataggatgagaaagaagagatgtcattacttaattggttactaatcacctcagaggctttgaagaagtggggacagtggcttcttagcctgtaagtgtccagatgacattctttttggttttggcctctgcactgtttcaattaacagttgttctggcatttttctgcagctaaagttcgcataagtaaagtggagcactttatcattgaaaactggaaaaaaaaaaaaaaaaaaaaaaaaaaaaaaaaaaaaaaaaa

SEQ ID NO: 5874 - DNA, 598 bp, Canis familiaris
gagataggcatctggaccagagagagagcccaggggaaccacagtagtcactggcccagagcggtggcctaaaccacgccccccacaggcctacctgttacatagcatcagaaacgggtcacatctcttccccttccggagagcagggcttgcactcttcccctagaacctactttgaaggcaattagaagctttgttttcatttcccgcatggtattgtcttgccaggatggttaggtacacaaggacgcttattagatctactgagaagaaaaagccaaacccgcttctctggtactgaacatctagtttgagagcaagcaaaacagtaggcttgtattagtgctttaatggagtactggtaacatattttctttcttgataggaatctgctctatatttagccaggcttctatttcataccctctcccactacaaactttccgtgcagttacctttcatttttaaagcaatttcactgctaaatataaattgtatttgtggggttcatagttatataatgctgaagggaaccactctttcgttgaaaggtgataaaagttaaataaagactgtctccacagtaaaaaaaagaaca

SEQ ID NO: 5875 - DNA, 636 bp, Canis familiaris
atacagctctcagggcaatctttttgcatagccttaaaatcagaaaggatgaaggaagtatcgggaatataccaacctggggaaaacatttataagaataacattgctaatttgaaagatttgaaatatatgataaatttatttttatttccagaatagtcagaggaaaggtcttgggagaactaggatttgctacagtaggaaaatagcaataccacgtgccaaagtgatatgggtaaatcatgtctgtgatataaagaataaaatttcagtggtttctttttgctagaatcagagataacacctgcatttataaatgttaaagtacttggtggtattctaagtatgacatctttaacaccaggacagagctactgagagccacaacctcctttttaaatctaattttgatgtgtgttgtattactaatctattcagttttatggtttttagaacccatctttacaaaaatataaataccctatggatattaaatagttataaatttagtatcctccatggttttgaagcatacattatactctgaaataaatagaaatgcttgctactggtcaaaaaaaaaaaaaaaaaaaaaaaaaaaaaaaaaaaaaaaaaaaaaaaaaaaaaaaaaaaaaa

SEQ ID NO: 5876 - DNA, 507 bp, Canis familiaris
tcggtgctgcaacctgctcttgtggcccctgccgccgccgtcctcctggagggctgctcggggccagggctggggtaagagaggcgccacctaggactagcaggttcctctctttcggtgttgagcccattcacttctcaaacatgagtctctccttccccaggtcttggttttgagaaacagcaggtcttttgttcccagcgttttttgtgtttgtttggggcaatgttaaaatattttaagaattttttttaattgtatccaccctatttcaggttagttttgttgatgtcagatgtgtatatgacatgtatatggttgtttttaaccctttctgggttttttttagagggaacaagagtaaactccttgaaactttttttttttctttagcaacttgttatacactgggaatcaaagggaaaagtgatctctttttgcattggttgtatttgtatgtcacaaataaaagacactttgttcaaaaaaaaaaaaaaaaaaaaaaaa

SEQ ID NO: 5877 - DNA, 186 bp, Canis familiaris
catggggggtaggggcctgagcagcccctcaccagctgctcctgttcctcctggctttctgcagcacccccctcaccccatggttggacctgtaattctgctgctgtgatggggtgtgggtggggaagcatttgttattaaactgctggagttttggaaaaaaaaaaaaaaaaaaaaaaaaaaaaa

SEQ ID NO: 5878 - DNA, 543 bp, Canis familiaris
  misc_feature (328)..(328): n comprises a, c, g, or t, or includes no nucleotide
cccctgacctaagaggtctgcatcctgtagccacttgcgaaggcttccttggggagcctataagcaattgcaacttgctggcaggggtgccaatagcttaggaaaaagggccgaccacctgcaaaaaggagggggtaaccgtgggtgaagttggccaaaaccaagggccaagaagtttttaatgaagaacctgggaaggttgccctgctggggcttctaactaggggttgtcatgccccagagttccttttcgtataggcaagttttcctggttaccaccacctacagaatgtttccctcactgccactgccctagctcggtttgccnaggacacactccagatcatgaacctggcgcatgccaggagggagaacacccccttccccacggctgtttcttcagcacagccacagggtccctcatccacagggagaggccccgtgtctgtggaaggcaaagctgacaacatgtggaacatctcagaattatgactctttcgaggtttaaaatacattcttctcacgaggaaaaaaaaaaaaaaa

SEQ ID NO: 5879 - DNA, 599 bp, Canis familiaris
agtggaactacctgggcctgtcagcatgtctcccttttaatcccaagttcccaattgcactgtagtttttgatgtaactcccattaaagagggcctgtatgtgttttgattagttaacaggtatttgacaataatggtgggaaatggccttacctctgttatgagataatgttctaatcaatgtactctttgcctctgtattttttctgagggctctgttgctcccttcattctaatgaaaggtgtatcctggtgtcaggtgcacgtcatccaggatagtttcctgccaacaccgtccattgttcctagatcccctcccactcacatatgtggacctgacagtttgtccctgcagtgattctgaggcactattccagggactcattgacttttttgccttcttttctccacttctttggggagtgggggaactgacctttctaatacgtgcaccatcaaggggcatccccatagccattgggtcatggggtgttctggggccagaaggcaagggcagatcacttcaagcaagcccccacaatggcttagtcctgcttcccttccggtacatgaccctctgtttgaaaataaagtgagtg

SEQ ID NO: 5880 - DNA, 608 bp, Canis familiaris
ggcggggagctcaaccagtatagcgccaagtctggagaagtactggtgaatgttaaggagcactcccggcagatcaatgatatccagttatccagggacatgaccatgtttgtcactgcttccaaggacaaacacagctaaggctctgttgaacttccagcaactttctgtggaacaaccagaaagaactttccgggacaaggaacgttccaaggtccaaacttcaaggcttggccccttcttcttccccaaacttatgaacccaatgtgggtgctggggtggtggtcaggaagccatggatgtaaccaccacctccaccaggattggcaagtttgaagccaggtttttccacttggcctttgaagaagagtttggaagagtcaagggtcacttcggacccatcaacagcgttgccttccatcccgatggcaagagctatagcagcggcggtgaagatggttatgtccgcatccactacttcgacccacagtactttgaatttgagtttgaggcttaagaagcttggatctccatcagggccaggggaaatttctgggccagggctcacaaagttttggactctgagaagtaaattagtttggaaata

SEQ ID NO: 5881 - DNA, 585 bp, Canis familiaris
  misc_feature (105)..(105): n comprises a, c, g, or t, or includes no nucleotide
ctgatccactgtcggggagctcgtgggcacatcaccgtgtgcttctctgcagtcttccctgcctctgaaattccgtttatgtctaccgtcccctcaagcacaacnctggtgacctgtgacaaaggagtgttcagattacatccctcctctgtcccaggcccagatttagatttctccaaggacaacagcaaacccagaagtgccagtcagaggtgcagcagccttcgtaccatcatctcccagctgccagtgggtgcaagcaatacctctgctaaacgcaaaagtagaggaaatggaagtggatgacttctatgatgggaatcaaacgggctcttataatgaagataatgcttcagaaaaatgtgggttcagtatgtgggcactgatttatcaaggcaagagggacatgcttccccttgtccacctttgcagccagtttctgtcatgtagcctcaagtgttacctttaagtgcaaactaaggtagactactctgagagtgggaacatggagaaccatggaaaggctatataaaggtatataccttatcaggctgatctgaagtgagccaagaaaaaaaaaaaaaa

SEQ ID NO: 5882 - DNA, 601 bp, Canis familiaris
tgtaagatgatattttagtgactttttttcgttgagttatcaagagctcactgcaggcagtgctatttcttgtgcctaaggaatgtttctggacattggtatcactaatgctactgcaaaagttggagtgtacagaaaatttctgtgttaatatcaagcacacatggtggatgctctagggtgagactgtagtacagaatgcgtaatttttgtccccaggaaatttgcagtgaagcaggtgctggatgggtcccactccccccccgctccatgagctctgttaattctgtcttcagtaggcctaatgtttgaataaaccagatgtctaataaattattttcatgctcagaatttcaggtttttgtactctagtatagcttggtcttatttcttattgtaagaaagcttaatagcaatgtgatttaaggttttgttttgttttttttttttttttaagagggggatatgagtgatttaattcatgggtacttttagaacctgatagataatcccattgcctttatttttctaattaaagaattcctaaatactttgaaaatataaaatattcctgaaaaaaaaaaaaaaaaaaaaaaaaaaa

SEQ ID NO: 5883 - DNA, 528 bp, Canis familiaris
  misc_feature (172)..(172): n comprises a, c, g, or t, or includes no nucleotide
  misc_feature (178)..(178): n comprises a, c, g, or t, or includes no nucleotide
  misc_feature (516)..(516): n comprises a, c, g, or t, or includes no nucleotide
tacaacagaatctaagcagaatatgtgtaaccaaaataagaaagaatataagaaatatttctggagctaggtatgtctcacagttttgtagaatcttacagcatctttgataaattcagtgaaaatgttggctaggcaagttcagttaaaatatagtagaaatgtttatccntggtantttctaagtatacatttaattgtacagaaaacttacagtgtgacattgtgtcaacattttcaaattaactgtatatgaccgtaatttttgtgcagcctgaaggatcagtgtagtaatgccaggaaagtgctttttacataagacttccttctcagcttttcccataaagagaccctaataagcattttgatctgtaattggaaatgtaactttcactgaaaagtgtcatgtgatgtttgcattacttttacctgctatgtataaaggaaactgtatcttttgactctatcagttatttctcttgtgcacagggaaaaatgcattaaaaatggctaaanaaaataaaaaaa

SEQ ID NO: 5884 - DNA, 585 bp, Canis familiaris
  misc_feature (59)..(59): n comprises a, c, g, or t, or includes no nucleotide
ccatcttgaagggagaaggccataaaagcaagcagagtctgaagattttcaaaaggaangacagtctaagtcttaaggatccttgaaggaagaaagaatgacttggtttctgcccagggcagagcagtagtctagggacctgatgaggacacaatctgcagttgctatacacaccttcttgtcttttgaatcagaagaataaaatgatttgagctggaacagaaatgtaaggttgtccagctttttcccttctttatgttaagctggggttacacagtttctcttaaaaacctgcaacacaaccttacttacattagaccaccatgcagtttcctgcaaaaaatgagctgcagttagagaatgggtcagaaaatctggaagagtcgttatcagttcaaaccttttctatctagggacacctgagtggctcagtgattcagcatctgcctttggctcagggcttgatcctggggtcctgagatcgagtcccacatcaggctcccatagggagcctgcttctccctctgcctgtgtctctgcctctctctgtctctcatgaataaataaataaaatctttaaaaaaa

SEQ ID NO: 5885 - DNA, 454 bp, Canis familiaris
  misc_feature (169)..(169): n comprises a, c, g, or t, or includes no nucleotide
  misc_feature (186)..(186): n comprises a, c, g, or t, or includes no nucleotide
gggttgggtttctttctccacgttgtccgagccaatggggaaaaaagggcccaattaacttgttcccagccttcccacccggttacccggctaataattaaggtaaatagtttgtaaaatgtctttaccgtgaataaaccatttaggacagtcatagtctgccttaaanagtgtttcttgtaaatntggtccctgtttaaaattagttgtctgccagaattgttcccatgaatgcatggtcaaattatgaaaagtgcaataaatgtttgaagactataagtgatggtgtatcttgtttctaataagataaacgcttttgtctttgctttatcttattagggagtttatatgtcagtgtttaaaatgctgtttggtataataggtgtaaaataaattctgtaaaagtgggaaaaaaaaaaaaaaaaaaaaaaaaaaaaaaaaaaaaaaaaaaaaa

SEQ ID NO: 5886 - DNA, 565 bp, Canis familiaris
aatatatccacacgagtggtctctggacatttctcgaaaatggggaaaagaagaataaaatgtgtttatccgtccacagtgtgcctgggagaacctcgggagaccagcagaaatctaccattgtcgaaggcaaataaaatacagcaaagacaagatgtggtattggcaaaattgatacgaggaatgtccattgaccaggctttggctcagttggaattcagtgacaaaaagggggcccaaataattaaagagctgaatcgacttcagggcgaggccagtacctgaaacgcatccgataccatggcagaggacgctttgggatcatggagaaggtttattgccattactttgtgaagttggtggaaggccccccgcctccacctgaggcacggaagacagcagtcacccatgccaaagagtatattcaggagctccgcaaccggaccattattcacactctgtgatgggggattcagactctacagtgtatatattttgccatttatttcttaaaaacaaacagattaaagataaatgctttttaaaaaaaaaaaaaaaaaaaaaa

SEQ ID NO: 5887 - DNA, 606 bp, Canis familiaris
atggccgttcgcttgcgctacaaacgtggtgtgtgcgtttcccccctcgcaaacctctcgaagaggggaaaccacaacacacaatggggagttcactacccttctgggggtgacaactcgaactctccaaagtagacgccgttttgagttaagaacgggttgtagaaactaaggggatggacacgggtgtatactacacgcggaacatttcttctagggcactcttactgagagagcccctctgagatgagaagcgttgcgccacgagatctggtgtcacgcgcagatatatatacccgcgacaaggaattaaaaaaaaaaaggaaattcggaattcttaaaggaaaccaggcttttcacaagtggcctttctgcagtttttcaggagcgcaagatagatttggaattaggagtaacctctagttcttaagaaccaacactcttaaaagatttaggagaaagtttacaacataatctagtttacgaagaaaacttgtgctagaatactttttaaaaagtatttttgaataccattaaaactgcttttttccaacaagtatctgaccaacttgtttctgcttcaataaatctttggaaactcaaaaa

SEQ ID NO: 5888 - DNA, 521 bp, Canis familiaris
tcctttagacggaatgttccgttcctggtccatctgaataagcttctccgggggtcctgggttcatttgcatattttgtgtttcctcggtacctgtcacagagagtgtttgtgtcacttgtgaacctgacactttgtcctttcacacggctaccagtgtatgctcccctcccgccgcatgtctggggagctatcgtggatcagaccaagttctgtgtgcccctggaggctacgctcaaacggagacagacagacagacagtaagacaaataaagagcaaatatagggtcaggtaacgaacatgctgtgaagggaaagagcaagcgcgttgacacagccgaggcaaacaggcactggaggatccggaaggatgagctactggaaagaaagcatcacaaataatgggcaaaaataataataataataataataataataataataataataatgggccattggtgctttgttcaaatcggccttgaggaaataaagtatttctttagaaaaaaaaaaaaaaaa

SEQ ID NO: 5889 - DNA, 574 bp, Canis familiaris
cagcaccgcagaagaccctgagagccccctgagagtgaccagacggtggagatccgaaaggaccgtgaatgagaagaggagcccaaattcctgtacatatatttaagtgatacacatgatcaaaagcttgagagacacactttacgattgcttgtgtaataaagctcgtccttcacgtgtcgccatttggggcttttgcaacggaagtcttttagtgattgatgacaaatgggtctgggcagcatcccgttcatctttttttctcccctaaatccagtatccgttgatttgattgtgattagagaacccttggacattttgctgctaaagaatccttccccactcccttcctgaccctacttgcactgctgtggatttttttaagagaagcaaaaacaataaaataaactccttccgcctggccctccacaacatatactgctgtgagataactgtgcctgcaacaaagtgttaatcctgggatcgtatttttatatcatattcacatatttgtttttcttaattggtgttagatgacatgattaataaaaaaggcaagatattttcagaaaaa

SEQ ID NO: 5890 - DNA, 757 bp, Canis familiaris
  misc_feature (521)..(521): n comprises a, c, g, or t, or includes no nucleotide
aaccggcacgcccagtggtgaccttctgccaaccatgcccccggattcatcatggggcaccctgacaacccactggggggacagtcacaaaacagtggccggtaaaagtgaaaatgtcaagacacagaagacaaaggaatgacttaagaaccacgcagattagaagagacgagaaggctgtgagcactgtggtagcaggcgtttcagatggtccccgatgaccccaaatcctggagttcactccctcgcagtcccccctccttgagtgcgcctgaacctggccgacttgcttctcacaaatgcaacatggcaaaggtgagggaatgtcatttctggattacaaaagaccatgatttaagttacaagagacggtgtcttctgtcttgttgcattctctttgggtcttaccagcctgctggaattgagagctgccctatggagagccccatgtggcaaggcactgatgcctcaggccaacagtgctatgagctgaatcctgccaacacctgctgaatgagccnaggagtggatcctgtccctgtggaacccggagatcacagtaacctggccaacagacaccttgactgaaggaccctgagctaagccacatccagattcttgacccacagaaactgtgggataataaaagtggctgttttaagctgccacactttggagtgaaaaaaaaaatgctataaaagacattatttagataatcgagaaaatatgagtagaggccaaatgatcgctaaaaaaa

SEQ ID NO: 5891 - DNA, 570 bp, Canis familiaris
gaaggaaaaggccagccttccaggagtgaagaaagctttgggcaagtatggccctgctaatgtggaagacaccacaggaagtggagctacagatagtaaagacgatgatgatattgatctcttcggatctgatgacgaggaggaaagtgaagaagcgaagaggctaagagaggaacgccttgcacagtatgagtcaaagaaagcccataaacctgcacttgttgccaagtcttccatattactagatgtgaaaccttgggacgatgagacagatatggcacaaattagaggagtgcgtccgaagcatttaggcagatggcttggttctggggcttttttaaaatagttccaagtgggaataagggaatttaaaaacttcaaaatacagtgtgtagtggaagatgataaagttggaacagatatgctggaggagcggatcactgcttttgaggactatgtgcagtccatggacgtggctgcttttaataagatctaaaattacatcgtagatcattgtccttaaataaaagcttaaaagacaaaaaaaaaaaaaaaaaaaaaaaaaaaaaa

SEQ ID NO: 5892 - DNA, 381 bp, Canis familiaris
cgtgtggcgccaaaacgtgtggaggcccaaggaagccaaccgggagggccctccccaagtggcccaagtggaacgtgggcggggcccccaacgttaacccggggctcccggcgcccagtgcaaggggcggcgctgctctggctcgactgggctcgctgcctgcgcccggcctgcccctggatgcgacaccttcgctcgctcgcggagccgagctcctccctgtgcccaagcccactgcttccagagccaacaggcatcccctcccgcagccctgcacctgggcctccccgccccctcccttgctcccctcagtcccctgggatcaaacagaagcagccgtgggcaaaaacaatttcatttaacaaaaaaaaaaaaaaaaaa

SEQ ID NO: 5893 - DNA, 537 bp, Canis familiaris
tgtagaactttaaggtcttatgcacaggaaaatggggtattctcaaagtggcatcaagctacattacgtaggttcagttattcatcgagtagtaccaaatggttggatacaaggaggagatatagcatatggaaaaggagatgacggagagtcgatttatggaccaacatttgaagatgaaaacttttcaattcctcataataaaaggggagttcttggaatggccaacaaaggccgtcacagcaacgggtcacaattctacatcacactgcaaccaacgccctatctagataaaaaatatgtggcttttgggcagttgattgaaggcacagaggttcttcaaagactagaactggttccaacagagaatgaaaggccaaaactacgatgtataattattgacagtggagatctgtatgcctgattttcatatcaacattttctaacaacttattattatgtatctatcagctgtttatatatttaaacagtgcttgataaaatataatttgaaagctcaaaaaaaaaaaaaaaaaa

SEQ ID NO: 5894 - DNA, 626 bp, Canis familiaris
ctgagagacccccgtaccgggacaaatatgaaagttttttcgggaagcagaggaaacaaatgcaggcccctcgacccaacgcctgtctgctgactgcagtgtcatctccaccacagagaagctggactcaaagacaaaactggaccttggtggccacgtgaagcgcaaacatttgtcctatgtggtttctccataggctttggggtggtggcttgacaggggctccctgggagcagatggtccttaagccactttctggtttagttgaggttcacagggaaaggttttcagatcccagaatgaaatattcgaacccaccatctgaaagagacagggttagagcggccgggacgcatgctcaggctgggaatccctgattttgctgttccgacccggagtgtaaagatgtgcaggcagagagagaaggctttgtgagcacgttagtgacccatagaagcctgtggtggaagcacaggctatagttgcaggttaaccaattagttgctaccttagagtcacatatattcagaatgataaaacaagccagaggatggctcctgactgagaattgagcaaatggaagaaaacacagtattccttagatcagaatcattaaaaaaaaaaaa

SEQ ID NO: 5895 - DNA, 548 bp, Canis familiaris
tgggcccggacatgctaccaagaacagagtgggcttcctcaaggaggtgggcttacctggctatcgaggtgaacgcatcaatcagctcattcggcagcttgaattaaacccagaatatctggaagcacagtgcattggtggcatgtgttttgtcttctggaattgttaccagtatcttcaaagaagattattttctgctctatcttcagaaactagagggagggtcaaggaaaagatgatgctcctggcaggcacttctgaccacagcagtttcaaggaaaaattccagtgtattttccacattgcctgccactgccacctctcaaatcagcagaggactcatgccatagaaggagtcctgctgcgtcacatcttctgttctgaggtttaatggtgaacgaatacccaaacgtgaatggaagacggcagtggaccaagctcagggacatacttgaacctgggggttctggggccttgttttggacagaccttgaaatagttacaaagaagagcacaaaaacagtgctcagctgtcaaaaaaaaaaaaa

SEQ ID NO: 5896 - DNA, 683 bp, Canis familiaris
  misc_feature (429)..(429): n comprises a, c, g, or t, or includes no nucleotide
ctctcggatgactgcaatgcattggaatacccaatcccagtgaccaccatcctgccagaccgtcagagatagggcatctggaccagagagagagccccaggggaccacagttatgtcacttgcccagaggcggtgggctaaagccacgccccccaccaggcctccctgttactatagcatcagaaactgtcacatctctccccttccggagagcagggcttgcaactcttcccctaggacctactttgaaaggcaaattagaaggctttggtttgcagattttccgccctgggtaattgttcttggccaaggaatggttaagggaacaacaaaggaaccggccttaattaaggattccacttggaaggaaaggaaaaaggccccaaaaccccggctttccttccttgggttattgaaccatccttagtnttgaagagcaagcaaaacagtaggcttgtattagtgctttaatggagtactggtaacatttttctttcttgataggaatctgctatatttagccaggcttctatttcataccctctcccactacaaactttccgtgcaggtacctttcatttttaaagcaatttcactgctaaatataaattgtatttgtggggttcatagttatataatgctgaagggaaccactctttcgttgaaaggtgataaaagttaaa

SEQ ID NO: 5897 - DNA, 464 bp, Canis familiaris
tttttaactaattgcctttgaatggttgtcttgaaatacctggtatatatatatatatactgcagaaaaggaacacagttgttttccacaatgtttgtccccaacttctgttagtacttggaattgttgaacgtaatgatgaagatcttggtcccataacccctgaactatgacctgaggtgcacctggtacagaaaagtctaatagttttttgcagagtaatgtatataattacaggatcactccccattggagattttgagaagtctaaatcggtttgaccatctttgattgatggcacaactctgggttgtagaaaactttgtttagatctacgtcacataaccctggctacctgtggcctgggcccttccctgcctttgccatcccttccccccctttatggtgtctgtactttgatgaaggtgaggtataatgttgatggttaacataatctggaaggt

SEQ ID NO: 5898 - DNA, 643 bp, Canis familiaris
agcttattacttgtaataaacagtccattttaatgtgggattgggaccactagtctttcagatggtattcttcagactatagaaggagcttccagttgaattcaacagtggacacaaatgaggacaaccaggtgaacacgcgttttgttctaagtttacataccacagtcagatccgttatgataagtaatttagtggtaatagacttccagctttatgctgggattaattgcatgtgaccacttttgttggcctggggttggaagggtaagtgggcgctaagcctttttttttaagatttttcaggtacccctctaaaggcaccgaaggcttaagtaggacaaccatggagccttcctgtggcaagagagacaacaaagcgctattacactaaggtcaataaaaatggtgtcagcctcctaaccccagcttctgttagaaatgaggacttggggatccctgggtggcacagcggtttggcgcctgcctttggcccagggcgtgatcctggagacccgggatcgaatcccacgtcgggctcccggtgcatggagcctgcttctccctctgcctatgtctctgcctctctctctctctctctctctatgtgactatcataaataaataaaaattttaaaaaaaa

SEQ ID NO: 5899 - DNA, 595 bp, Canis familiaris
ctgctgagtaaggggcattcctgctaccgacccaggaggactggaagaagaggggaaaggcgccaaaaattcctgtttcggggttgcattgtggatgccaatctcagtgttctcaatttggttattgtgaaaaaaggggagaaggatattcctggactcacggatactactgtgcctcgtcgcctgggggccccaaaagagccagcagaatccgaaagctttttaatctgtcgaaagaagacgatgtccgccagtatgttgttagaaagcccctaaacaaagaaggtaagaaacctagaaccaaagcacccaagattcagcgtcttgttactccacgtgtcctccaacacaaacgtcggcgtattgctttgaagaaacagcgtactaagaaaaataaggaagaggctgcagaatatgctaaacttttggccaagagaatgaaggaggccaaagaaaaacgccaggaacagattgccaagagacggaggctgtcctctctgagagcttctacctctaagtctgagtccagtcaaaaatgagattttctaagagtgacaaaataaataagatcagacaccaaaaaaaaaaaaaaaaa

SEQ ID NO: 5900 - DNA, 548 bp, Canis familiaris
tgtaaaaacatctacacttcattgtctttcttggctgctattcgttcgtatgccccatcctttctgtgagttataattatttcttatctggtatcttgaaagtttacctgttgtgcaggaagtaactctccccacattgatcatatgctttactaaatcactgcttgttctctctctatagttgttttcactgcctcggacctcctaatgaattccaaaggctcctggggctataagatggaagactctttttcctttgtaaaagaattagattttaatggcttttagtaggtgtggggagacaaaagcccttggatcctgagatagttttgtattttgtagagaatcaccccaggagcacattcccccactgagggttctagccacctcttccgcctcattatactctgctgagcattgagaagcctggcatcgtttctgttggaatgaaaagattggcagagctgccctagacagcagcaccacaaaacactgtggcagaaggtttggtctacataccaaggcagcccagagtattaattgcattc

SEQ ID NO: 5901 - DNA, 591 bp, Canis familiaris
aggtgaatttctttggacgctggttcatttgaccaagtggaatccagcgtgtccttgtcgtgttaagtaagaatttaagagtaaaggcggggagggggccagccatccaaatagcagccacggatgtcgttgcgtgctgcagcgccttgccccatcgtgtcacctgcagacaggtgaggtcctctttcgaatgccaaaacccagtattcactggttgctgacgacatagaatggggttgagagaagatcagcggggacttcacattgtcattcaaaaccttgtgtttttgttatgatttgtggaaaacctctcaagctgaatggaatgattgccttgctggtgtcccgtttgtggaccaggggtgggaagaggggataactttgaccctgactggtgcctgggtgatgtgctcagggaagcttgtctctgggggttctgtggcagtgaacactttccactctctgacactttatcctgatattatgtctccaggatgttggattattgatttttcaaacgtagcttgaaatttcaataaactttgctctatttgttttctaaaaaaaaaaaaaaaaaaaaaaaaaaaaaaa

SEQ ID NO: 5902 - DNA, 631 bp, Canis familiaris
aataccagatttggataccggttagttagataattggtaaggaatcccatgaagttgtaaatgacataagcttcataacattctctgcaggtatccacatatattgcaatgctgggatatttcaaagctatccaactatctaaactgtatatgggtaccatccaaagaatccttattattggtttctgtagttctggttgtgtataatgtactaaatgttgtaatatcacccagagagatataggtatagtcaacagcaaaaagattccagcaataaaccaagccttggtgtgtattccaacctccagcttctgtaattcccacacgcacagaggaaccgcaaccactatggacaccaggtagatgaccaccgctaaaggtcgaatccactgcctccagttcctccacgtacaagtgcaaggcatgtttccgcataaatcagctcgaagtagcaaggaaaaagagctcgaaggagactgtactggggatccccgttctttggctgttttgtcaactcgcatactacagagaaacagctgttcttgggcgactctaccagcagctcgagccgcctcctcggcccgcgctgtgctttctgctgaggctgctgctgctgctgctgctgccgccg

SEQ ID NO: 5903 - DNA, 673 bp, Canis familiaris
  misc_feature (482)..(482): n comprises a, c, g, or t, or includes no nucleotide
ccgtagcctgaaaagccagggtgctgctcctgccttgggtctgaaacaaacgacctaagttgggatccgtagccttaggaacccgtggctcggggctagctgtaatctttacgaagatcccgtccctgccaggcagagacaggtgtcccaccgaggaggctgcctgcgccaccgcccgcccgcccgtcgcctgcaccgcgtgtggctcccgtgtccacgagcgcatctgaaggatggactgaaggttgagtgtcccctaaagtgtgtgtagcgtttagatgtaaatagtctgtgtccaacggcttaattgggtattaaggaaaccataactcttccccgagcgaacgttagggtttcaggttctgtgaaccgcccccgtaaacccggatcgttcaacaatggtgggccaaaccaatgggaaccgccttgttccgccgggttttaacttggaagatgaaccaaatgcaagattacatattttntgacttgtttgaatcttgaaagttacactctttttatgctttgtgttggtgtgtaatttttgtactattggtggctagtttttgtctaaaatcttttttggaatattgcttaaatgttttgattttatgatagtgaagcttgtactcagtgttttgccaattaatattatatgcttgtaataaaagcaaaa

SEQ ID NO: 5904 - DNA, 553 bp, Canis familiaris
atctccaagcgatctcgatcgatctcgagcgatctcgatcgatctcgagcgatctcgatcgatctcgagcgatctcgatcgatctcgagcgatctcgatcgatctcgagcgatctcgagcgatctcgatcgatctcgagcgatctcgatcgatctcgatcgatctcgagcgatctcgatcgatctcgatcgatctcgagcgatctcgagcgatctcgatcgatctcgagcgatctcgatcgctcgcgcgattgtctaattgaattcaatatctttccccccaatccccccgatttcactagactacataatatctcaataaatagacccgcctttcccctttttctggtcattgagctatcttatcactcttgcaaataaatttaatatatctttagataagcatcacatgaattcaattctcttctgacaatctcgctaaaggacacgatgacatacatatgtatgctaacccaaaaaaaaaccacactataaatcatagataaaataaataatcgctctcatcttaaactgatattttttttttttttttt

SEQ ID NO: 5905 - DNA, 613 bp, Canis familiaris
aacccctgcatagccagaattaccaggcactgtgaaacaacctgaatctataaatatactcccgttgaccacgaccaatccagagggtaccttggacaccctggtgtccagtgggcacccggcttgcacccgtcccaaccccacaccagaccaccacccactagcccacctgtggtgcagtgggtgtgtggacagagcaaacactacaaattagggtgtagattttggtttctggataggccacaacactcccaacactattgtatttggtaagccttctcaagttgtcaggactcaatgtgccttcttacaccaccgacaacaggctactgtgtccttaccatctctgaccctgggcccagggacccagtgtgtggtttgttttagctgggtgctctgtgttggggctagaccctgtctgatcccactaccaccagccaacctttgccctgtagacctgcacacagcccaaccctcaccaatcagggtacaagtctaaaacatggccacagagcctagctctgaagctgtgtagtgactttacctatcctcctcagtgtacactaaataagcctctgtagctcttttatttattcccttctactcttttttt

SEQ ID NO: 5906 - DNA, 596 bp, Canis familiaris
ccaggtccatgtccacttttaagaccctatgtggactctgacccctctctctccccgcacccctacactccgctggggacccagttagaaaggaccagtctgagcctgggcccaaaggtgtgccgcgggcacagtctgtggcgccaactgcaaccagccacttggtcatgggacgtatccctcccctgggatactcccccagtgcccccagtgcacccgggtcccctctcggggttcagcccacaacctgctaccagggtgggtgcccctgcacagctccctggccagccaacgaagggggtcccaccctctaaccacaaagattcccactggggtagccagccacacaaagcacccgagcggccagacaacaccccaactcggaggataaataagctgccggagcagcacgacacagtccacctgcctgagggacccctgagagctgcgccggcctcaaacccgcgccgcactccccctcctgccatcttgggtctgaaccagggcccagggcccgcacccagcggtggccgcaccatattattttgcactaaacctgtgacttttttttttttttttttttttttttttttttt

SEQ ID NO: 5907 - DNA, 581 bp, Canis familiaris
caactcgaagcagcctccttgctggctggaggtaaacaaggcccacctccaccaacagggtttaaaacaagtttacttgttgttcccagagttatcccgactaacaaaaatttctaactttgaatgtcaggcttcataaaagatgctggtgcctatgtctgccaatgggcaagggcctcaaacatgaacagtgaataaaaatgtcaaaaaggtataataacattagtgttaggctcccttctttctagtatgatcaaactgactctgtaattaaatttttttatagaaagaaggaatgtattgaactggagtagaaatagattagtgtttctttatgctacaaacaagaaaggcaatctagttataaaacagagggtccgtaacttgagagagcatagagccaagatcctaggttgaaggcacacctagtgctaaatgtgaacaggttgtttttaactgaaagagtatacaattaaggttcataaagaagatctaagaaaccttgcctttatatagtccgttgtagttatttgttgccttttaaaatgcattttttttttttttttttttttttttttttt

SEQ ID NO: 5908 - DNA, 615 bp, Canis familiaris
ggccttatttaaaatcctagaaggcactcgtagaaaggagttttgaatttaggctctgtaccggttgtagactactgtttagcaaaagcaagcaaagtagttgttgcttcaggctcctacctggttgtaatccagtgtgtgcagcagtcttcctagggtgtccggaaatctgtagtggtggaggtagtgcagatctgggttgctccatacgtcttgttggggttaaacttaatctaagtgaactcgcgctaccaatttctcggtgcttttgtctttgtagtcagttttgtccaactttaacctgcctttcgaaccaagaagcctcaaagggataaacagtgtcaaacacaatgtgacagaagctagcccaatgcaaagctgcaaaagccaaacaagaagataaataacactgcctaaaggggctctagctacacatattactgtcaggtttagggtaaaaaatagtaaaaactgttatgttttatgggcttaaattcaatcctgccccccaccccttttattccgctgacatctctgtgactgatataaaaaactgtgtttgaataactcacttaaaaaacagttcctattaatttcaaatagtatttttcaatt

SEQ ID NO: 5909 - DNA, 606 bp, Canis familiaris
gggaccgggtaacccgggtaggttgtaggctgtctaactgtccgtgcgagccatccttttgctgccttcctacggacttttattgttgtgggaccatcaaggtgtttcaggcttggtgttgcacccgcggatcatctttttctacggacagggcaacttgtcgcccttggtggcctaagtgggctccatataagtcttgtttagccccaaatcaggcttagacacctaccgtgggcggtaaaagacaggagaggagtccttttagttgtagctgtggtcataagactaccgccgtgtcatccacctcatctaccgtttgatcttccgcaaagtgtttcgcctcttgttctagacggagctcaagacaccaagcaactgggtagacctgtacggcgtctaagactctgagggagtgagccgcccaaagtgcttgtcagagcgaaacttcgagcactttgactcttttgcagcaggctcgttgttgctgaacctgttgaaaagtggcttgtcaacagacatctccccagttgttttattttcagacatctcccaagttgttttattttcagacatctccccagttttttttttttttttttttttttt

SEQ ID NO: 5910 - DNA, 562 bp, Canis familiaris
actgagtgggctaagaaggcgggcacatgactaacctgaggttgtagttagattctcagctcggaggtaatttgctgaaataaaccccacagtccccttgtgcaggcacctgttgtaagggtacttacagttagaaaatagagaagctaaatcaaaatcttttttaaatattgatatatatatatatctctatatatataaatttatccttccgtttcccctacaggggaaacatgaggcggaagtttataaccctctagagtactaccttatattgcctaaccactctccttcgagggtatttcaccaagtcaaccttggccatggtgaactaccagcagagagaaaatgttacccaccccagccaattagaaaataggctgagtttagccacaagtactagaccttgagagacaaacttcagatacataaacagtactagaacctgaagcaaggcccagcctcaggggccctgatcaccaagagtgctattcagatcatttacaaaaaacctgtactgatattatttggtgagtagagcttatttttttttttttttttt

SEQ ID NO: 5911 - DNA, 585 bp, Canis familiaris
ctcgagaggccacccggagtccggccgaagcgagaccgcccagggccgccgcaacctcccggtcctcaactccagctccaaaagccagcgcccgcactccttgggcaccaacctggtgcgcgcgggcttgcccatcagcctgcccagcaaagacttgcacaacggcagtgcgccagcggggcaggccccagcgggtgtccttggcccctgggtccccgcccaaccccctgtctccccttggccaagcaccaggtgcaagggggacacacactgccctcccggagtggccactgcctcaggtgtgtccctccccattggatcacaatttaccacctaggcctgttaactgttttggacaggccgtaaacttggccaccagcgaggcaccaccgcagaggtgctccccagccagtggacaactcaaataaccctcccaaggggtgccccggccggtggtgggcccaagctcacagtcattcctgtggtccgcccggtctgtgcagcacccagcacccactcataacagagctcaaaaaaaacatccatctattttgctctagcctctattttttttttttttttttt

SEQ ID NO: 5912 - DNA, 654 bp, Canis familiaris
cggaccggtaacccggggtagattccgcatgattacataatgttgcctggtgacagggctcctgaggcttcttccagtggaggcttctctgtccaaacaaagcctctccttcaacaaagccataccttcaatgatatgtccactgagttaattgcagcagactacagacaaagggtgacacaacgccatatatacagcacaaggcagtaaaacacagtccctaagcaagcaagcaagcaagcaagcaaggaagaaaccaagcaaaggttggcataccttgtagatatctctcatcaaatggttgggttaagcaatttttattcttgtctcagcttttgggtaagggttgttaaggttactggtgagtctggcaggtagtcacttgatatttagtcagtgtttaacaagtagttgataatgacagtcaaagactacttgagtagattatatggtttagctattttgggttattcaaacagtctcagtacagaatgtgtggatcaactgtgtcaccaggtcaaaagctataaatttgaaccattgtataggcaaaaaccaccaaaaggcagatatgctttcagaaaattacctctgaagagccaataagaacctaaatttaagataacaaagtacctacttatttatcaagaggaa

SEQ ID NO: 5913 - DNA, 637 bp, Canis familiaris
cccgttacttggactatagcaccagccttaagtgtctgagccccccttgatcactaaaagataaaaaattttgtattcagctaatgttctggtaaatacaatgaaaagaggctccctgcgagtgggccactcaccctactcactcaaaatcccatggggtgtccagagtgactgcttattgacaggccagggcccctcgaagccaaacactcttgcaacctgcccctgcctgagcatctgaacatgtgccctctagaggtgcttggcggcagagattataaaacacagtgtagctatcctaacttaaccttaaatgttaagtgtatttctaaaataaagcctcatttaaaaaaacacattttctccatgattttttatcttggatgctctattttagccaagattaaaaacaattcttttgaatagatagtgcaagcaagaggtatgaataagtttaatgcttttgcaacttccagttttggtttaacctatcgagcagttgtacaatctggataaaaaataagtttgtactcaaaccaacttattaggtctaaaatctaattttcaaatatcttcctttttacacttttattataattttactctcattgtataaaaacttttttttttttttttt

SEQ ID NO: 5914 - DNA, 761 bp, Canis familiaris
tttctgacaaaccggacggtaaccagttactgcttaggccgtcaacagtaccaactaatgcagggaagtgtaaaacctagtagtttaagggatcgtgtgctacctctttgagtttgtttggctttgtttcggttggccacggcaaaggcaccgttgttgggacacgtgcgcggtagcgagtggtaatagtctgagaggtgctggtaggtgtagttcccggtccgcttcgcacagaagttggcaggtaacacaaagactcaggtgacctagtggttgcctccgttgttgtctacctagtctttaaagctgttataggggtgtattttttatacctccacttccaggtctggcgatctggtatcaagttgggtatatcaaatgaagtgatagtttctatcttggttgccctggcagcataggtgggtcacttaggcctggtaaagtagggtctgccgtactgagaggtcaggagaaaagaacggggaccgcctttgggcttgtggtgtggaggccgttgtcgctgctggtgacctgtctggtggcggcgcagtctggaccacagaagacctgtagaacacacctgtgtaacacaaagtcctagctgccaaggtgtttatgggcagtggaggttcactcagaaatataaattacacaataccatcaatgaggggaaaaaaaaaaagttaatagttatttagaccctaaaaaagaaaagatctaaattttaatcaaaccaaaacatttttttttttttttttttt

SEQ ID NO: 5915 - DNA, 598 bp, Canis familiaris
tcccttgtcaggttacaactccagcctgtaccctggtcttatcataaacaccatcctcgagctagagttttgctccctcgaaaggagggccacatattgttcggctccccagagtagatctccatcgtcgttatctccttgggcatccaggtactggcaacggggtgcgccgagcacgtgcactcggtgttcgtcctggagaggcacctgcagcccttctcgggtacgttcgggcagatcaccaccctgatcgacctcaccacaaacactgggaaccaggaggctccttagagtgcgataacccttccgtgcactcgatttacagcaagtcgtggctaaccccttaaccgcagcgcccctcttttagctataggtcgatggcctttttgagtcccgaaaattcaaacctttatctgtagagtgcaaactgtccttccctaacaccagcaggttttgcgggctgcttaggatttgttatagagttgtcccacaagttaaacatgactgaggacccttgtcatatttgaaaacagagttcaccaactgataaatttctaaacttccactttgaccatgatgggatttttttttttttttt

SEQ ID NO: 5916 - DNA, 595 bp, Canis familiaris
cgacagttgcacaagggtcgtcttggtgctgcaggagttgttctccatcgaccagagttggcccagcctgcctgtaagactcccaaccaactggtcacccagaagtcgttgtgttccagggttgggtgggggtctcttgagacgttagaagagagagcaaaaattttatgtgagtaaagggtaaagataaaagagcgtactaaatgggcaccgggaacagaaagaaatcaccttgttggattgtggcaagcaaccagcacacccttgtcagggacaaacaaagggtcccacaaggtggtgggcacagcccctgtcctgtgactgcatcacaacggaaatgaacaactcacctggataaggaaaacaaagcaatctaagttaccagatgctacctaaccctaatcttttgattagattatgaaaccaaagtaaagaggaaaagaagaaagaaagaaaaaatttattgaggtttcttttgaaaaaaaataatggtaacagtttggttgtgttttttagatcttgaaattatttttgtgccaacccaaattttatttttttttttttttttttttttttttttttttttttttttttt

SEQ ID NO: 5917 - DNA, 608 bp, Canis familiaris
  misc_feature (202)..(202): n comprises a, c, g, or t, or includes no nucleotide
tcctacgtatagagttgccttgtacctggtatttgtgggctacccgccagtcctgctgtggcactacaaagctggcttgctgcaggttgtagccgctcacaaacagtaatcttctacctgtttgtgacatcacacctccaggaccagcgccagtgggaggatactgtacaacgagttgtcccagtccggcttgtcctactcncaggtggaggtgccctgagtatcctaagttttagagttggccttgtacctggtatttgtgggctacccgccagtcctgctgtggcactacaaagctggcttgctgcaggttgtaggccgctcacaaacagtaatcttctacctgtttgtgacttcacacctccaggaacaccgacagtggggaggcagaattaacaacttacaagttaacaatgagcccttagtaggctaagcacagctcacatgcctaaagccccttaaattgaaatgtttaatcctgaaactgattgtgcagttactcaggaaaacacttatgcagaacttttagaattattttgaaaagaagctaggatgctatttttttttttttttttttttttttttttttttttttttttttttttttt

SEQ ID NO: 5918 - DNA, 503 bp, Canis familiaris
gaattccacaacgggacacaacaagttgaccctgacgtagatagagagggggaaaaagcaaaggacacacggggttaagagagaggggaagccccagaacttggcaccaggcccactgggttcaaccaggacaaccaagttcaagttcagcacagcccgggccaggcaagggctgggtagcaggcccccatgcctgggggctccttcagctccatcacagccccagggaggtaccagggcctgactaagaatgggtagcccaccagggagcaggcagggtagggggtgggaggggttctgccccctgctcacaagcacgagagtaaatacaaaaaaaatggccccagccctacagccccacccactccagtggcgcagccccccagccaggtccagccctccccagttggtcaggcccaaggcactccagtacaagtctaggagataggtacagaggactaagaaccacagctgttatttgtaagcactggccagccaggctt

SEQ ID NO: 5919 - DNA, 600 bp, Canis familiaris
tgtgcaacatagccggatatggagggcctacttgtgggacattagagcattaagccctggctgtgaactcagcagaatctttcaccatggtggccaagcagagcggtgggccagcataggagagcacggaactactaggtgtgaggggcctttggcagagtggacgaggagacagggtttcaccgtggtctgtgggcatttacctagttgaaagaggtaggcaagtagtaactctgaggtgtcccagaattcatcatcgaagtctccgcagagcgcctagagcagcactgtctgggagagcagggctactttgacttgtactagcaacccagggtcccatgaggattgtaaggcccattgttgccccagcctgtactagagtgctaagaggttcccttggtagtgtatcagccctcctccccctacacggttctgttgggagggttgcctgtgccgccagcatagccgctgcctgatccctctgctatttatgggacaccaaggctgaaggtacaggtggcaggtaaaatcacagagttgtccaaattattttataaagtgattttctcgaggctctttatttttttttttttttttttt

SEQ ID NO: 5920 - DNA, 572 bp, Canis familiaris
atccaattgcctagttgactgtgctttctaaccccagaattgtgcaccctcagctcccaccaatctgtgggtctctgacagagggttaggagcaattccacctctggatacagtgaggtagattcatggtctcccacttgggcttgatggcccagtgagatcttacaattgtctggtttaaaagacaacagaagtcacaagactgtctaactgctgttcccagtcccatgcaacacaaaaaagtggcaatgcccagcaccatccacatcaccctcaccctccacccttgtggttgttgtgccagggctacctatggaggacatttagggtgtatggctagggttagggtgagatgtgagatgtggatctcactatgttatctgggcaggtccaagtcaacttcaccatagtgcacaggcagttgcttagggagggtctgtagttggcccctgagggtacccccttgtgatcaaaccagcaccaacttcatacagcctactgagtcattttcatagtagcctaagcatcacttatttcagttttccagacatttttttttttttttttttttt

SEQ ID NO: 5921 - DNA, 573 bp, Canis familiaris
tagatgtagtctggttctgtaacacagaacttttaagatatagctggctacccagggaggaactgagggaatgctccagcaacgggccctgggatagtaccaggggccccaggtacttgaccctctactggcacccaactaggtgccagcaacaaccacagccagagacacagcaacacacagacacactagttatttgtttgttttacaaaattttttttaagatatagccctttattaaaaagtgcaattgtatcaatctgtgctatatatttatcagaaaggtatattaaaatgcttaggattactaaattttggagtaaatttagaaagtttacaaatcatcagattttaaaagactcataatttttcaactatcatcctgaaacaaaatgttatccagattcatgaattaatacctctggctattataatcttttcaaatctctataaaaaagtgaagaacaaaagatctactatataagatagttttgagggtgataatatggtttttaaaaggagtataattttagttaaaaacttatttgagagaagtttaatgatttttttttt

SEQ ID NO: 5922 - DNA, 439 bp, Canis familiaris
gcttccacacccctcggccccctaggctcctctcggcagcgagccgccggcctcctgcatacggtggcgccgtgcacctcagcctcccagagtcccccggaggaggtggtgctcaaccgctggtgccagggcttgttcatcttggtgcccgtgccggcgcccttcaccgagacctactcgggcaccgaggtcgtcctcaaagcatttgcccagggcgtatcgaggcacctgtacttggcggccttggtcggcgcgacctgctgcccagtgacggccacccgctggggcctgcccgcctgccccacagcgctctaggactgcctctgactcacccccaccgaggacaccagttgggtgcacctcccacgtgcttgtagactgacagctaggaaagccagtgcaaagttctgactgagcaattttttaggttttttttttt

SEQ ID NO: 5923 - DNA, 600 bp, Canis familiaris
  misc_feature (297)..(297): n comprises a, c, g, or t, or includes no nucleotide
ttatggtgctgacagtataatgctccagggtcaggcactgggggaggctctaggctttagaggaccgcaggtaacccttcccctgagtgcctgttaccctcactaaggttttcctcaagactagattctaagtcaaaaggttcaattcatttctaaagcctagagaggagcatataacaaaaaagtcttgtgcttgaagactagaccacacatcttcatgggttgggaaggggttaaacttcctttgttgtcaactttgattcaagaccaaaatccctgagcaaacttggcctcccntggccatgtgacaaggtaaaatcatcagtacagggcctaagaaagtgtcagtccctcaccaaactccaagcctaggaagaatcagggtggcttgaagactctaaaccacagggggtggtttcaggtgccatttttgttggttaaccctggttgcggccaagggtcttggcagtgttctttgcctaccactcctcctgacacctctcctctaagacaagcaaggcggttttgagtggttagaactctttctacaatttccagaagcaagccaagtttgtggtatcaattttttttttttttttt

SEQ ID NO: 5924 - DNA, 627 bp, Canis familiaris
agcgcctagacagcactgtctggagagcaggctactttcgactgtaactagcaacccagggtcccatagaggattgtaagggcccattgttgcgccagcctgtactagagtgctaagaggttccctttggtagtgtatcagccctcctccccctacacggttctgttgggagggttgcctgtgccgccaggcataggccgctgcctgatccctctgctatttatgggacaccaaggctgaaggtacaggtggcaggtaaaatcacagagttgtccaaattattttataaagtgattttctcgaggctctttatgtcagacctcataaaggacagtgttaacataagccagttgggttctaattcaaggaaggcagccggccactaaaacccagtttaccaaggaaactgcagaagaagagtggcttgtgcctgttctggttgtccctttctgcattcctgtgattataccatatttacagagatttgagttggcagtaagcatgaaggtatgctccaagtaattaactccctctgaaagtggaatatggaaaggttgtgggtatataaattgtagaaaaacaaaacattagctatttgtttacaataagctctatgttttatttttt

SEQ ID NO: 5925 - DNA, 523 bp, Canis familiaris
gtgctgaaaatgcagggaggaccccttcaggcaattccactcaacttttgagttgtcctaaaatacacctggactcgtcgcaggaacactgtcaaacagtcaccttagaaccccgagggcaaacttcttttggagaaagaagttgcacaaagtgaacaggtcccctactcggagtagtaccctgttgctgacaactggttcttaccatttaaataggtgtcagaggctgtgttggcacaactggtgatacgccttttgctccgtgtggttagtgtagagttctaagcaacacctttatagggtgggcagtgaaccaaagtccccttgtagtgagcatggccccatgtgtgtgcacagctagactccttgagtcctggccaagccacgtggcgcaccagacaccattccctgcaaaccaaccacaggtcaccgctcagattcgccatcgaaagcagtactagggttgttcaccagagagcctcattcacttattttccgccttggttacagttttttttttttt

SEQ ID NO: 5926 - DNA, 577 bp, Canis familiaris
ggccagggtcttcgcatgaccctgcggttagccagccatccccggtcgtatccctgtaaacaacaaatttgtgcttggtggctgtagcctccccctccccctctatttgggaggggaagatagggcctctagagaggtatctgtcggtctacaggttgcaaatgtggggccagctggttggcgcggcaaccacccgtctctggtagttgtagcaatgaaagttctagagaatttaggaagtgttcacttcacaactgccccggtcaaaagtgattacgagtgtcagatattaaaaaaaaaaaaaaaattcagaagctactggatctgttttttttttagcgaactatgtcaaaggagagtaaagagatttaggcactcggcttagtcgaagggaagaccccatggccaggccgtgacgaggcaagttatagttctctcagacaattctgcgtgagttctgtattggggcctccgcctttaccccgtctctgtagctcaaatttttgcctcactagcaaaggcaatttcagattaattaaataaaatagatcttattttatactaaaattttgttttt

SEQ ID NO: 5927 - DNA, 584 bp, Canis familiaris
ggtagcgtcccactcactgcaaggcctcagcgaggacttacaggcagagggaggcgtgttgcagctggtagccagtcatctacaaactgggtttaggcagtcttgagcactacctcccagcagcagcacttcggctggcggccagcctctaggccctgggccgtagggtggcagccgttggggagcacctggtggcacaggtcttggtctgaggcctccctgtgtctcagtacttccactacgaccagactctgctccagggcttgcctcccgtggagtctttccgcatccagaccctgcagttggtcgctctctggaccctccccaaatacttggtgatcctggccttggtgttcgtcaaagtccggcaggagcagctgatagcaccctgcgccagtggccggcagctggcaggaacccttgcccgggttctgcgtggcagggctagcagccccctcagcctggctccctaccacaagagcacaaggaagcacaggcatgtggagttggcacgtggcactgccagtcctgggccccaacagacttatttatacacctccagtttttttttttttttttttttt

SEQ ID NO: 5928 - DNA, 623 bp, Canis familiaris
agcagaggactaaaatttggagatatcactgtagagcctgtctatttaattgcactttaatttgcacactaaaatttaggaatgtctccataagatataacattgaggtacccttgcctcagttagctagatcaaatgcatcaccaatcatttattgctataatttaaaacctctcctggcctactgtaccaattattcccgtcctgaaatacatgttcactgagacaccatttataaaaaccccagcttagctgccaactaagtaaaagctgcctttataatctgagtactaatagacgcaacaggtaatttttaaaaacgagagaattgaagccaagatttgtgctagaagtgatttaggggctgcgaggccaaagaggatgaagaatttgcttttgtttgtagaaggtgctcaaagttgtatgtacaaaactggttttcagatgattaaattgaaaaaagtgtttgttgagtatccttatggtttaagactattagttgaacaactacctgctggagaaattctgagaataaaagcctaaaagcctaattattagatattcctacatagtgagtaaatcttatttagtaatagttaaagttttttttttttttttttttt

SEQ ID NO: 5929 - DNA, 518 bp, Canis familiaris
tggcttcctgggtccctcagcaaggcaatgactggcatagagacctggaacaggataaagctggcagagcaacagggtttggtcaagccaggtaaaacccatcaagaccaactcccatccacttgagagggaaaaggaagagggggttctggccagtagagctgatcttggctgtggtctggcaggggtgtgctgaggggacggagaggtgaactgtgaccccaatttacaaaaggggccccgagcagcccaccaatcatggcctggaggcaggagaacctgaactgcaaccaagcagcacaatgtggaggagtgggctatgcaggaccagccactggttctgggagtgatgcatttatgtgtcgatggcaaaaaaacaaacaaactgtagcaagcacaacaccaaaacaaacatcctcccagccaaatcagaatgatgcatctttttagtcctctatcatagatcaaagcagatttatttgtcagtcttcttctttgtgcctttttttttttttttt

SEQ ID NO: 5930 - DNA, 625 bp, Canis familiaris
ttcaacagtttgccctttgtctctctatagggtatataaaagtggagtaaatttagatttcattttgtctgctgtcagctcgacctctctgaacaaatcgctgagacagtccttgttcactctggttggatcacattgctcaagcctgagcctagtataacttgttccaagctgctaaacagagcctaggcaactctagtggcctgtggctaccaggtctaatgtccataatatcagattgttatattaatatttgagctaactatatttagagtggaaaacaaaagcaagtgaggtctgatgctccagatactaagttcactaaaagatactttgcttaaaagcaagctgtttgcatagtttattttctcgacccaattcatctaagcataggttaattaaaaaacccctgggttttaccgagataaaaaaatagtgcttatacttaaaggtgagtccttttgtatcaattttttagggaaataaaagtaaacactacagtttattactagaacaggataatatacatataaattatttatatatctaaaattaaataatagatatcactctatcatatgtttgtataatgatagctaaattattttctataactcaagttttt

SEQ ID NO: 5931 - DNA, 596 bp, Canis familiaris
gactctttaaaagcaacgtctagtgcggtactaccctagtcttgtaaagggatacaggcaaaggctagggtgtgagttacttggtaagtagcaaaagggtccctgtgtttgaacagtcaaaccccgagttagtccctcactcacttacctgttgtacagatctgccactaattgtgaacactgtagcaagcagacccaggcaggtccctaactgacctgggcttgctcagcttagcctgcctgtgactactttgtatagatgacactgagatacaacaagattgctcaatcacagcacaacaagaagcaagtttcagcctccttgaaaagaagaaggattaattttagcatcagaccccacaaagaaaggtaggagaaattttacaatactttagaaaagtggaaaaaggtgatttttgctcaacaactatagcttgtggttcatagttatataaaccaaacaccttaatttagaggaatggaggcaacatacctataatttcccttggtatagttatttacagccatttataaaacaaagggtactggtactaaaacattgatttaccctaaggtagtagatttttttttttttt

SEQ ID NO: 5932 - DNA, 602 bp, Canis familiaris
ggtcttttttggtcatacgtatcggtatgaacaaaactacagatactgttgataagaacaagctggcaacaaacagtgccaaaatccctcacctgccatgccccatcaccagttcaagggggaaggcagtccaccatccggctaataaccacattccctaatgttgagccacatcacttctccactgaccaccatgcaccggtgatacataattcaagtgccctactatgacaattatgttggattacgctttctatatacaacttgccaataactaatcttacaccaatggcgatataaaatcgcataatctggccaccgttatcatagtgtctacaaaatcttacaccgtaggggatatcggtacatccaaaaaatatgcctcaggtaaactcggtaatctcgattaataaggcacatctaaccactacgagagcaaccaccgtctgcatatcatccttcaactctactttcctcctcaacggtaaagttgccgcagctagtataagtctcaaagaagtagatgacaggcataacaagatagatacataaataagtagtggtaccatttttttttttttttttttttttttttttttttt

SEQ ID NO: 5933 - DNA, 538 bp, Canis familiaris
  misc_feature (221)..(221): n comprises a, c, g, or t, or includes no nucleotide
agggacccgactcccttaagctgtaacaggtggccagtcccacgctgacttgcacaagccccaaccgccccgtgtcctgtcctgccgatgctgctagtgttaagtgggggcgcccagagccctggcaaccactggtgccaggaacacgagagcatgagtgcatctgggtgcccggcctccctcactggcaggcacaacaggccctgttggccctgggacanagcctgacttggtcgaacagaaaaagtatgttcaaaacctgagtacagatatcgtaggtggacagtgggtgtggtcgacaacccgctccccggtgtgtgctcagggacagggcggcctcacccagaccctgggggtacctgcccccgtggcagtgcggagttgccctacacagctcactgagcgggtcccaaagaccaaaccagctttatttgagaagatcctgcagcatgggaggctgcggcaaggtttcttcttttttttttttttttttttttttttttttttttttttttttttttttttttttttttttttt

SEQ ID NO: 5934 - DNA, 587 bp, Canis familiaris
  misc_feature (246)..(246): n comprises a, c, g, or t, or includes no nucleotide
cagaccggactctggtgtcttataggacgtccataatgaggcttttggtggatcttaggctaggccctgccttgcctgtcttcatcaggtttgcctaggttggctacaactagttgccctgagtgaagaatttggctgttgcactactcgctgtgcatagtgccaggttgcagattgcctcagaatcctctctgagaactagtctacagcagcagcacctccaagggtacccagcctctggaaccncagggctgaggcctagacccctcagtgtagttgtagcgagtctgttttctgaggcagagaaaggttgcaaatgcccaactctcaagttaaggaggaacaacctgtcaaacggactgaacaaaaagtgatccggtcaagcaggagttggtgctgtagaaaaataactataagtattttctgtttcattgggtgtatccacacaacgaagggtttaaaaatcacaactgttgcaaggctactaggtaatacttagagagtcaaaatcacaaacacctttgagtatttgttaaactaataatgacttttttttttttttttttttttttttttttttttttttt

SEQ ID NO: 5935 - DNA, 629 bp, Canis familiaris
cgtgccctgagtctcctaagttttagactttgccttttaccttgtcttggtgggctacccgccagtcctgctgcgacagtaaaaagcgggctttctgcatgttgtaggccgttcacagactgtcatcttatacctgtttgtgacctccaagctcaaggagcaacgccagcgtggaggctactaagtgccaactcaccgcctgcaggccctgttttatcttcagcgtcttgtagtacagccgcttgagaatagcacgccagctcccccgagcagacttcagccgcttgttgttgagcggcctctccttcttccagcgcccctttttgttggactatattggccccacctcctgcagcaacacaagcccgctgttgcgcgcccacaccgcgcccgtgtcgcacactatagtgaacagagggccaacttatttgaaacccaaacctaggtcaggtgctgattcaggagacagagaggcaggacagaccttcgtggtgcaggaagctaagagggagacacccaagggttcacccagaatcaagtaaaagatatgcccacttgtgaccagagaccaaagggcacaggaagacactacatatttgagcataggaccctttttttttttttttttt

SEQ ID NO: 5936 - DNA, 580 bp, Canis familiaris
ggatactaactaagattgatgctctaagctgcttcttactagctatagtccttatcctgactcatggaagatgaaaatttgttttagtttgtgctgataagaccaggaaaatttccagagtagtttaacataagacaaataaaattatgttacctacatttatctcacatatgtgttatagttaaaactatatcagcagaactagaattaccacagaaaattctcattggagtcttagtctcttactatacctacgtcgggtgcgctggaatcagagaaggaaagacgagagggacaaggagggaaaataaaagaccaaatggaaaagaacactcttgaaaagaggggtaggtgtaacatgaaaataatgcagagagacctacagacacccctcagaggagtgctgttctaccagaagcctgaagctgcctcaagtccacaggcttcttcgggtgtaccctacactaaaaatcaaaagttcgaaggccaatcttactttagattgaatatatataaagatcagtagtgttaaatattacagcaaattctttttatttagaacgaggatgttttttttttt

SEQ ID NO: 5937 - DNA, 692 bp, Canis familiaris
gatataaacgaccccactatggttgaactcgtaaggttttgagaattttgcctgaagaaatttagtctctatatattagagaattgtaggtggaagtacagtggggtcctgagtgtagaatgttacatatggttatgaagtaccaaaccaatagaacaaccaagactccccagaaaacccatccacactctcaagatttagacctagttttagaaaaagatgtgataaagttcagagaaaacaagacacgaagaaggttgagaaagtagtgattgtttctgatctcctctaaaaggattagggagcaatcaactaaaacctttattacaactttcagttgtatacaaggtttacagtactaaacgaaaaaacaaaagtgttttttttgagagcttgaaactttatctaagctgaagaaaggttcacactaaaagaccactaaaacaatgacttagccctccaaccagtctgagaaagagattgtttatctgttaagcgggtacccagggaggctctgcggaaatgcgccagccaaaggccctgggcgagtaccaggtgtcccgggtacgttaccctcgacgggcacccggagctaggtgccagcaacacccacagccagagacacagccacacacacacacacacacagagtcatacttatttatttgtttattaaattttttttttttttt

SEQ ID NO: 5938 - DNA, 575 bp, Canis familiaris
ctacacaaatttcaaggatcctgccgcatctatccaaaataacattgcatacatgtaacacattgttaagcagaaaagaaggcctagttagtcccattattggctacaggaggtcagccctcagggtgaaggtgtgtgctctaggctcctcttctagagactaatttctatcaaagacacctgataacagtctccgtgagacttcagaggatcaaacaactccatggtataattaactattaataaacaaaaagaagtaggaagtatcccagacctaagtaaatttgagtctctaataaaaatcacgtctagcccgcgatgaccagataacctttgcctcaggtcctcaagtgatctattgagccgcagaaattagtttagagatataactggacagatttccattctgagagtcaagctgcgcaaccagctgtagtaacagtcagaagtgataaatctaggtcctaggggtataccttttgttttagcaaaatataaatatgtaataaactcagttcatatattttagggatacttatttagataaatcacctttttttttttttttttttttt

SEQ ID NO: 5939 - DNA, 459 bp, Canis familiaris
ttggggtctgtgaaaagattagaaagacttgggctgagtcaagccccacagaacttcattacaaatcagtattaagaacaaggcaaaatttatttaattggtagggtcctacccaccttcggcctttccggctgggatagtttctggacagttggaagttggcaaaatccccaagtgtgtggggaaagagaataaagatgtgctattccagtggaaggtgtggtcctcagggtgccagattcctgttcatgttggattcaacagggtaggtaggtggaacacaagtgtctgagccttccatttacatccactggattgatgaatgtgattcaaaaacttgtcaactgtcctttcttgtctcaagataactgacatagataaccatagcaaattagaaaaagaaaacccaatttaacaatttatttctaaataacagtttttcacctttttttttttttt

SEQ ID NO: 5940 - DNA, 410 bp, Canis familiaris
cagtagcctccgtgcagcacccagagaacggggccctcccgggcgcaaaggcaccccgcccccaccccctctcacaccctcctgctaggggctgaaccgcgccccacgcaaccagctgctccaggccccactcaccggccccctgggcctggccgacccccgccaccccgagacagccgcagcagtgccgtctcaaggagggtcctcgcgtcagtgtggcagtgcggaggcacagtgaacctaggcaccagaccagggtaagcctcacgccagtaaactaagctccggagctaggtgtgtttcgaaagaccaccagaagacagatttccttggttgcctactaatttcagacaataaacacccttttttttttttttttttttttttttttttttttttttttttttttg

SEQ ID NO: 5941 - DNA, 646 bp, Canis familiaris
gaggtcggcgaagccggtccccataagccgccctggactgcacggcacctggcgcctaggcaacacgcggggtggttacggttgccgtggcggcggggacgcggcggcggtgtttcgggtcttgccggcgtgcggctggttggccgaggtggtggcgtccgacgagtacgtgctaagctcgtgcagtcgcgacatcgggcgcttcgccgcggcccagtgcctggcgcagcgccaggtgtccccggtgcacccggaggtggagttaccggccttgccccggcggggctgcaacgtggagtcgcagcagcgcccggtcggctgctgagaggtgcaaaggtcagggtaattgttggggccccctcgctttcacttgaacccagtgccacttgtggaggagttggcgcagttgctgctccaaacgatgggagaaagggctgttgaccacgagcagtgctatacccaggagtagaaggtgctaaatagtcggttctaggcctttcaactgactagatccagttgcctaggaaacaacccacctgtttagtaggaactaaagagtggctgcccacatgattggcttagttttgaacaaggaaagaaattattttgaagtttatttttttttttttttttttttttttttttt

SEQ ID NO: 5942 - DNA, 624 bp, Canis familiaris
gccgcagccgaacccggtaggtcttgacggtgcagcagacagcgttaacaaaaagtttgcagccagaggctttgggggctagagacctaaccgcctctactgcggagtgttgtccgaagagagctttctcaggcagcgggggcagagcttgttgggggtcctgagagtgaaccatctcgtgatcgtctagtccttgtagcccgtgagcatcaacatcaccttgaaaggggtgagctgcttcttggtgagccccaaccagctctacgtccccgtgaccttgtacttggtcagcccaaggatagtccgaggcaacagcttgctaggaccccagagctggctccgtctatcacgttgtgactacagagagttaatccacgagggtaacagcccggtggggcccacgagatttaactagctcccacgtaaagttcagccttagggttcctccgtgctgccccctcagcctctgctgtcgcttccagcttctttgctttgattcttaccgcctaatctttggacgaccaccaagtacctgaattcgtgactgttcacaacacccttactgctgtgtgccccgctggactacggggactagctgtgacttttctgctgcgcgggcttccg

SEQ ID NO: 5943 - DNA, 635 bp, Canis familiaris
  misc_feature (139)..(139): n comprises a, c, g, or t, or includes no nucleotide
tcacccgggtatgttgcggagatagcgaagagagctcgagctcgagagagagctcaaacagagaaagagagaacagagagagtgggtaaattcagagggaaaacccaagataactgatatagcaaaaaaaaaggcgctnaaggactttcgaaagaatcataataatgcaacattcaaagctcagtgagacccagcccaaccaaaagcattaccatatctagtttgtgttaactatggtctgggccggagtcttaactagagatttagaaatcacttggtcacagaataagcgaaatttttaatctgagatatacacaggtgtttattatagatatccatccaaatgctgcaaaaataagaggtcattagcttgtttcagtaatcctgtgataagctccgagaaacctagaggttatgtttgagtgtgtgttgtctgcagaagctgttgagaggcctatgtaccacgcggtgtgccgtaggcaccgcgggggtttcggtgtcttgctcaaggtcgagggaggagtccgcaaaaggtggggcccgagcactgggcaccctccagaaatctgtccaaaaaaacaccaactgtcaaattttatttttttaaaatttttggttaaatttttttttttttt

SEQ ID NO: 5944 - DNA, 594 bp, Canis familiaris
caacgctacccgctttcacagccactttctacagagagggggtgtgaggtgtcttgtccagtcccgcgcggcctttggagcaggtgctgcactcgggcctgtcccctgagaacacctttggccatggatctcggaatgtaccaaaggatactggtgtttagttttgtaagcagacctccagctctgaccgaggggcctttgctgttgtttaccaggtgtttggaacatttggaagcgtgtgatagtgaattgttattttattcaacacacgtatacaggtttcaaagggaaaagggtaactggtgctcttacagtaaaggggtaccttatagtcccctgcctaggataaaatcggggcaggttcaaaaattaagaaggaagcaggggatgccctgaaactgctacgctgtcttgttgcgctggtctggcagctaaggggcctttctctgttactgctttgtggttgcctagcgcaggaacctgctgttgatagtagggtactaccaaccaggctttatttaacccgaaacataccttttggccttatttttcaaaactgagttttttttttttttttttttttttttttttttt

SEQ ID NO: 5945 - DNA, 99 bp, Canis familiaris
agctaactaaactgcaataggaaaatactgtttgtttgttttttgtgttttgtttatttgtgtttgtctgtgttgtttgttagtttttttttttttttt

SEQ ID NO: 5946 - DNA, 658 bp, Canis familiaris
tcttttctgcagatccggaccggtaacccgggtacacaccccacagcatcagctcttgcctgaagtgtcctccctctggtcctcggtgtgtcctaagttgtgccagcaccaacacacctaacaggcagccaagccgaggctgcaaagagcatcgttacactagtttgatagggttaccatagtttaaattaccccaactaattctggtgtttagcctatctaaatatacaccgcttctgtgtaggtgtgcatttgccctggtgtggtactgtgtttcctcctatgcccgccatagtgcacattccgggttgccagagtagtcaactctgcaaagacgttcgcatcgcccaggaaattggtttcctttgcagccatccttacgcataaacgggctacgccgtggtggctttagtgtaagttttttgacacaaaccaacctgtgccaggagccaggaaaagataaccaaatctgatgctactacgttcatctatttctctatctttaagcaataaacaatttagaacaagacaggcagaagcccaccaaccagcccccctgtacttattgctgagttttagcttagaggagtttggacttttgtgttaattgtagagagtaataataatctattatttcacaaggtaggtattttttttt

SEQ ID NO: 5947 - DNA, 645 bp, Canis familiaris
agatttttgcagtatgctatataattatccatagatctcagggagttttataggctgaggttgtgaggagactgtcataatcccatccagagtcaagatagacgatgttttcgcagaatttcgaaggtctggtcaagttaactttgctagaagttgaggtatacgatctcgagaggaggttagcttgtgtagctgagccaaacccctaactaacccgtaggttacgaatctgacggaatttgacagattaaaaaaaaaacatgaagattcgagacagacaggatttatggataccataaaaggccaatcgtatccgattcttttagctactaaaagttttatccattagccttgattctgagctagcaaaggtttaaaggttgtaggaacccaaattgttgctttatctataaagtaagaactatacctgtttcagtcagttagaacacttttcgcagaaatctgatcacggagtggagggggggctggagtgggtgtgtactaagccctgcagaacttgagaaccaggaattgagcaaaatttcaggtgtggcattccactttcataaaaaaaattcagctgacatattattatttactgctcttatagcacaaatcggttttttttttttttttttttttttt

SEQ ID NO: 5948 - DNA, 256 bp, Canis familiaris
aattttttttccacccccagcccctaagtcattgattagaggcagtgttggcagcattttatagttgatactttgttacccttagaaaaactaacattaacaattgtatgatggtaatagtcttcagagtgttctaaaactaattcaaaatgagtgaaatgtgaaattaattgaccaagaatggttaatagagtcctatcttttcttcttgctgaaaataaaactgaaaaccaaatccctaaaaaaaaaaaaaaaa

SEQ ID NO: 5949 - DNA, 594 bp, Canis familiaris
gactaccatgatgaaacaggtgagataatggataaccttaccctggaggctggagatgatgctggaaaggttaaatgggtggacatcagtgatcaactccagctttatgccagtcactctcaattcatcaaactcgtggctgagaagcgagatgcacactggagtgaggactctgaaactgagtgcagtgggttgtagcccccatcattgtggggaccacaggccagcaaaggggtgcgtgctgaaagaaggcatcacagagctcatactacaagggggcagggttggtcacttggaagttagtttattcactttcaaagctatttgcatttaggtttacatcagcataaaattagtaaatacggtgaaatgcaacatggaattttccgcttttcaatccaaagaaatataaaccatcatgtttttttttttttttttttttaacaatcatattttgtatgtattctatttaagcatggcttaaaccacgtcttaacccaaagtctttgaagaatcataatctgaataaaaataaatttatgttggccatcaaaaaaaaaaaaaaaaaaaaaaaaaaaaaaaaaaaaaaaaaaa

SEQ ID NO: 5950 - DNA, 421 bp, Canis familiaris
gagcagattgcctatgccatgcagatgtccctgcagggtgcagagttcggccaggcagaatcagctgacatcgatgccagttcagccatggacacatctgagcccgccaaggaggaggatgattatgatgtgatgcaggaccccgagttccttcagagcgtcctggagaaccttccaggcgtggatcccaacaacgaagctattcgaaatgccatgggctctctggcctcgcaggccaacaaggatggcaagaaggacaaaaggaggaagataagaaatgagactgggggcaggggtggctgagcctactcagggggctgtattgtgtggggcgggaaatagagtcagatatgttatctgtaatcagtacaaccgaaataaagcttggcaactttaaaaaaaaaaaaaaaaaaaaaaaaaa

SEQ ID NO: 5951 - DNA, 160 bp, Canis familiaris
atctttaaaaacaaacaaacaaacactgagaaggcaccagctatgaaccaggaagagggtcctcaccagaactcaactctactagcaccctaatcttggacttcccagcctcgagaactgtaagaaataaatttttgttgtttataaactaaaaaaaaaa

SEQ ID NO: 5952 - DNA, 611 bp, Canis familiaris
gggccgtagctgaacccggcattcagctcaagctgtgaagtcctccacaggccccggggagcagctcggaatgcacttggcacacaggggacacagcatcacaggtgcggctgctgtggaaggacccccgcaacgtgggttggaaggacaagacatcctaccgctggttcctgcagcatcggccccaagtgggctacatcagagtgcggttctacgagggtcctgagctggtggccgacagcaacgtggtcctggacacaaccatgcggggtggccgcctgggggtctttttgcttcttccccagaggacatctatctgggcccaatttgcgctacccggggccaaatgacacccataccagaggacttacggaagaatcaagaggcttctgcaggcctagggatgggggtggggacccattgctggaagatggcaccatcgtggctacccgtttgttgctcactgcaacaaacagggagcttggcacccggctccaagaggtagctgccctagaggggctcagaaaggaccaaaataaagtgtgtgtggtggaaaaaaaaaaaaaaaaaaaaaagaaaaaaaaaaaaaaaaaaaaaaaaaaaaaaaaaaa

SEQ ID NO: 5953 - DNA, 536 bp, Canis familiaris
ctcctcactggcccgggaattcatgatccaaacccgtcgcaggaagggcctgagtgaggatgtaagcatcagcaagttcttcgatgatcccatgttgctggagctcgccaagcaggatgttgtactcaattaccccatgtgagtgctgggactcctggcagcccctgctccctgcagcaggctgtatcctggacttaaagctgggacctggtgtgacccggactcccatgttgtcagcgagcgtctgagagctgctatggccatttttaacaaccccaagccctccgacccagagtcccagcaagggaggaatatttggcttcctggttcctctgcggcctctgcctggctccattcccagggaacagagtggagcttgggctcagaagaaggggacgaagtgtttaaccccaaggggccctgtcttcaggatttacgtggaatttttttttttttttgtacaagtttgaccttagacatggtttttaactgaacagaacattcagacctctgaaaaaaaaaaaaaaaaaaaaaaa

SEQ ID NO: 5954 - DNA, 302 bp, Canis familiaris
ctccgcgcacgactcgcgcgggcgcggcgcggggcccccgcgcggctgtttcttcgagactcgtgggccacacagattcgggttcacaggggccctgaggccagggctcttcccgtttggttgagattgaaaaatgagtttttggcagctccagcgtctgatgtgccccttttcgttcgtcccttactaggtgtattttcccgagccttttcccttccaatctcctttttggctggtggcaaaacccgcgttgggacccatgagaataaagcctttgtttcctgttcaaaaaaaaaaaaaaa

SEQ ID NO: 5955 - DNA, 598 bp, Canis familiaris
acaacgagtttactagagcaggggtgacgtgcagaccatcagaccacactccagacctactgagttatgatacgtattataatatgaccggaagtctgctttctacccttcccatgaccccatgagggctaaaggatgatgaggtgcacgaagatgaaagtggttcccacttcatagctttggcctcataaagctttgttctcagaggtcaatcagctaattctgaaatttcactgaagtgttgttgcaaatccaacagcgttttctcttttccatatttatttttggtttcataaatagtccttgtccccttcacggtgtcaacatacaaactgtggctcacttttaaaatcatttggtggagtagaaaatgaactcaagcttaaaaaaaatttcctcagaggcacctgggtggctcagggcgtgatcccggagtcctgggatcgagttccgcatctggctcctggcacggagcctgcttctccctctgcctgtgtctctgcctctctgtctctctctgtgtaactatcatgaataaataaataaaatctttaaaaaaaaaaaaaaaaaaaaaaaaaaaaaaaaaaaaaaaaaaaaa

SEQ ID NO: 5956 - DNA, 469 bp, Canis familiaris
ggcttcctggtacccgagcgcagccagctcaatccattcccacctgccgccgcccggctccttacagcacccgctggcgctggcctccgggacactctattaggcggctttctcttgctgtcttttttgggactgctgtgttttgctgttttagaaaatcataaagaaaggaattcatttggggaagtttggaaaacggaaacaaaaaagatttcatgtgtaaagcttttttgcatgtaagttattgcatttcaaaggaccccgtcccccctttttttacagacaaacttttttgcgcaactgtggacactatcaatggtgccttgaaatctatgacctcaacttttcaaaaagactttttttcaatgttattttaaccatgtaaataagtgtagatagaggaattaaactgtatattctgggataaataaaattatttcgaccatgaaaaaaaaaaaaaaaaaaaaaa

SEQ ID NO: 5957 - DNA, 646 bp, Canis familiaris
agcaggctggaccggttccggaattcccgggatctctggagaccctgcggtggaagcgtgtgagagcagacggaaggtgctctaccagcgtgcgcccagaaatatccaccgccacgtggtcctgtccgaggtcaaggaagctgttgctgccctccccccggatgtgaccacgcagtctgtgatggggttcgaccctctgcctcctttggacaccatctactcctacgtgagaccagagaggctgagtcccgtcagccatggaaacacaattgcactcttcttccggtccctgttgcctaattacactatggagggggagaggctggaggatggaggggctgggggtctgaaccacaaccaaggcttgaacaggctgatgctggccgtacgagacatgatggccaacttccacttccacgacgtggaggcagctcgcgaggacaaccccgagggggatggggagtgggactgagcccgcgtagatgccacgccccaatgctgtacaattatgttcctgattgctgttctggtcggaattgaccagtaccctggagtagaaatgctgtgttgtccgcttgcctcctttgtgtctcctataaatgtgaatgggttaaaaaaaaaaaaaaaaaaaaaaaaaaaaaaaaaa

SEQ ID NO: 5958 - DNA, 653 bp, Canis familiaris
aaggaaatcctgttccgacctgtatcaatttaaagaaaattgttttttcctgagacgcagtttagtccatattttgcactgacatactggttcatgtttcctttgtttgttaaggtaaggtattcaccctcaattcaatccgacttctattttattagggtggaatatgatgtttagcagccaacttaacagaaactggcctgttctttgttacattcaaaaggccaacatggtacacattaaagaattgcggacacccaaaaactgttccaagtatgtcgaatatgtcaagccatttaggcttgtcagaaatgactcctttggttttttttctaagtcattaaaatgtatataaattatactagattggataacagtcttgcatgtctatcatggtaaaatttaatatgccatcctgcccaacccttccactcctacctttaaaaaaaaaaggccattttatgaagcattgcacaccctcttgggaaactgatcgtcaaattttgaaacagtatgaaacaattctggttggtgtctcatgaatgagctgacaccatttttttattctgtatatttagaatgaagtcatgaacaaactttataaagacatctttgatcattcccaaaaaaaaaaaaaaaaaaaaaaaaaaaaa

SEQ ID NO: 5959 - DNA, 239 bp, Canis familiaris
atggcagtgaagctgcagcttctgattccagtgaagctgacagtgacagtgactgagtcccaggcccttcagggttggtgcagacacgattataatgcgagcattatgcgtaggaaggcactttgagtggtctgtttgcgaacccttcgctttgtttccctcctctcctccaggccttgctgttaataaagccaacttctttcccctttaaaaaaaaaaaaaaaaaaaaaaaaaaaaaa

SEQ ID NO: 5960 - DNA, 601 bp, Canis familiaris
  misc_feature (99)..(99): n comprises a, c, g, or t, or includes no nucleotide
gagcagtttacagctgtcaaattgtctgattctagaattgctctgaaatctggctatggaaaataccttggtattaattcagatggacttgttgtgggncggtcagatgcaatcggaccaagagaacaatgggaaccagtctttcaagatgggaaaatggctttattggcctcaaatagctgcttcattagatgcaatgaagcaggtgatatagaagcaaaaagtaaaacagcaggagaagaagaaatgataaagattagatcatgtgctgaaagagaaactaagaaaaaagatgatattccagaagaagacaaaggaaacgttaaacagtgtgaaatcaattatgtaaagaaatttcagagtttccaagaccacaaacttaaaataagtaaagaagacagtaaaattctcaaaaaggcccggaaagatggatttttgcatgaaacacttctggacaggagagccaaattgaaagctgatagatactgcaaatgaccagaattgtgtttcttctcttgtttgtttgtttgtttgtttgtttgtttgtttgtttctgaataaaataatcactggaagtgtttttacagaaaaaaaaaaaaaa

SEQ ID NO: 5961 - DNA, 562 bp, Canis familiaris
aagagcattctaatgttgaacgcttccctgatgagaaccttcaagctgaaaccactatggggcctggctggggtgagccatgggcccaaaggcaggcaaagacaaccaacggctcccagttctttatcacgacggttaagactgcctggctagatggcaagcacgtggtgttcggcaaagttttggaaggcatggaggtagtacggaaggtggagagcacaaaaacagacagccgggacaagcccctgaaggatgtgacgatcgcagactgtggcaagattgaggtggagaagcccttcgccatcgccaaggagtagagccccagggaccgctttccctttgagccaccatctgcgagtccctgtcgccttcccatgggtgaggacggcccgccacagggcaccgtgctgcggggccctggtgctggcatctgacggagcggacccctcccctcacattccataggccagcggcctggttttgtaacaaactcaaactcctaccaatgctgaccaattaaaaaaaaaaaacggtgggttttttataaaaaaaaaaaaaaaaa

SEQ ID NO: 5962 - DNA, 639 bp, Canis familiaris
tcttttcccccctaaagaccagtgcctacatggtggccggtaccctgaatgcctggttgtcagcagcagagataaggaatactcctcttccgtggcgaatctgttactgggaggtcttctgaggagctgcagtgttgtcatgtccccaccccacccaagtttgggctgtcactgggcgggtagagtaccaggattcttctggttggttgagaaaggaagtgtggtttactctggggtttggttctacaggagaggaagaggatggagatgaagatgaggaggccgaggcagctacgggcaaacgggcagctgaagacgatgaggtgggttctggcttgggtggggtcaggatctgaggcactatatatagccagaggggctgattcggacttgggtggtgtggtcccaaaaggctcccttatcttgagcaggaacaggaaagaactctaggcctggcttttccagagctctggaagcttctggagtggcaagtgcttggtcctggtctctccccataggagttggggtgggtccaatgggctgcaggggccttgacctcctttctctgtgcaggatgacgacgtcgacaccaagaagcagaagactgatgaggatgactagacagcaaaaaaaaaaaaa

SEQ ID NO: 5963 - DNA, 652 bp, Canis familiaris
acggaagctgataacccagagtaatccttaatatcctagatggtgaaatctatgggtgagtctatgcattataacaagttaataaaacacaacgaagtacatagtagacagtgggatcctacaaccaagacgatggaaatggatgcgggaggcactgagtgagaaactacaggtattactggagaagagaaacgggactctatctttttgagcctggcttctcattgtgtcaggtagtcagcaagacataagctggcaaaaggctccttcaaaaagtataagtctctacaggagtaaagttaggttctactacattgacttattacataattgtaatataaatgagtggtaatttgcaagaggactaggaaagaattctcataaaatttgatttggtagtggcctaaggatagacatataggtcaatgtattagaattgagaatctataaaataaactctcaaattataaggggatccctgggtggcgcagcggtctggcgcctgcctttggcccggggcgcggtcctggagacccgggatcgggtcccgcgtcgggctcccggtgcatggagcctgcttctcctctgcctgtgtctctgcctcattctctctctctctgtgactatcacaaataaataaaaaaattaaaaa

SEQ ID NO: 5964 - DNA, 583 bp, Canis familiaris
aagtgtggtccagggttaaggtgttagactttacctacccatcaggtgatgttagacctggaacccctagggaaagctagggaaagctggggtcaggttgggagagagttggattggggatgctttggaattaaggagtaatcccagagggtgcctagggcctgaggattgggaacacaggccctgacagtgggaaggtaagagggtgctcctgcttgatccaggatgagtggccacatttactaaagtccccgtctgctacaagtttccttgtagcttgggaggctggggctaagggcctctttcatagaagagacgctgtcaggccactggtcaatgcagaggcatagaaaaaaaaccactctgcctgcatttcccccaagaaccagcaggaggcagccctgggaagctgcagttccgccgggctgctctcgctgtcactgccttctccccagatcctctcctctagcccactagagactgcctgtgttctgccccttgcctcctgtagaattcatctccggccctcaataaatgcttctgcatcctcctgaaaaaaaaaaaaaaaaaaaaaaaaaaaaaa

SEQ ID NO: 5965 - DNA, 476 bp, Canis familiaris
  misc_feature (278)..(278): n comprises a, c, g, or t, or includes no nucleotide
cctctgcctcctcatcttcctccctgaaggccacagcctttacctgggccagtaatgtagaagggaagcaggaggcccagagagggcaaggggctaaccttggggcccgcagcatgcccctgactactatctcagggctttctgggcactgcctgcctgcctgggccacctgcccatgctctaaggtcagttggctggggtgaggggtagcccctttgcagctcctatgcccttcatttgctggggttgagttttgcatccttatttctgtatcgtcncttgagtgttagaactataatttattcatttttctctatgtctgtgccaagaagcccaggctctgggcctaccttcttgcccaggaggccttgccagcctgtgtgcttgtgggaacaccttgtacgtgagcttacaggtaccaataaagaggctctatttttaaaaaaaaaaaaaaaaaaaaaaaaaaaaaaaaaaaa

SEQ ID NO: 5966 - DNA, 564 bp, Canis familiaris
tgtcatcatataaaggacggccatgatcatcggaaaaggctgagctgcttgccggttctccggggtatctccgtgaagcgagagtttcttcgtggacctgagccacggcgggggcccgggaggcctgcaatgggtcaacctctccgctgcctcttcggacggtgcttgtttggagaacaggttcatccaaatgtcgatttgtatttatcaccgtctttaaatgaacgaacaaacactaatataagtcctaaaatttctggcatagttcagggatcgatacagaagaggaagccgaggttcccgaaggctgcggtgacggccaaggccagaggtgccccgaggccagacacgaggccccgcagctgctcctgtccgcgggccacagcccgagtcccacgggcgggagaggaaggaacgggcgctcgtacacggttgatccgtattgaaacacaaataatttcacaggcaatcggaattaaggataaagcacactttattcagtctttattcaatctcggaataaaagcgttacctgatgggaaaaaaaaaaaaaaaaaaaaaaaa

SEQ ID NO: 5967 - DNA, 674 bp, Canis familiaris
aaagtgcagatcacctattatttgtttgggattaagaaggaccaacatatggaaaaggttgatcagttatgaagaaagggaaagcgttagcagagtcttggaacgccgcttttttggaatcttctgctaaagaaaatcagacggctgttgatgtttttagaaggataattttggaggcagaaaaaatcgatggggccgcttcacaaggaaagtcttcctgctcggtgatgtaatcctcctgcagaacctgaggacacgggagtcggtccagcctgaagaagcagactgcccgttatcctttaagataaactcagcttctttttccttctgttaacctgaaagatttcatttgggtcagagctttttcctgccccaccccccttcagattatgttaaactctgactctgtccaaatgagttcacttccattttcaaattttaagcaatcatattttcaatttatatattgtatttcttaataatattatgaccaagaattttatcggcattaatttttcagtgtagttgtttaaaatcatgtaatcatcaaaatgatacatacataattgttacactactattaactaggcttcgatatatcagtgtttatttcattgtgttaaatgtatacttgtaaataaaatagctgcaaaccttaaaaaaaaaaaaaaaaa

SEQ ID NO: 5968 - DNA, 629 bp, Canis familiaris
gagtcgttttctcatatgttgaaaaagtcaatgttctacaacttggaagttttcattttcttacactttgctataaaaatcttggccattattcaagtggaacatgagctgtccactagctttgttgcagtgttcgatattattgttttaaattaatgttcattttatacaggagagccttcaaaactattaattataagctccatgctaaaaacaattttacaaacgtttagtcgtagcaaaaataagtattttgaccgatggctcggtttttgcatgtccacgtccagaaggcgtacgtagtgcatggtagtccgtcttaaaggcttgaccgcccttgtgaaagctaggctcttaactggggaatctgctgttattctagcaacactacagtcacgttgccgatttataaactgttttcaagagctcagtttttgtaaatactgcactacaaaatcaattctgaggaagaaaatcacttatttatggtattagaaataatttctacagtaatctttaaactcaaaaccaagcaaaagatgtttgtagatacatagtatctatttggaacagaggtttttgtaactaatttgtttcattttttaaataaagacccctgaagaccaaca

SEQ ID NO: 5969 - DNA, 638 bp, Canis familiaris
ctttaggaacggctacggggaggaagcacctgcctacccctaagcagcagttccaggccccgaaggaaatggtcaggccggggccctccgcagctcttcctggccctctgtccagccctggggcctcgccccaaagcctggatatggggctggagcgacctatggacagctgaggccagagctgggccccggacccttcggcagccctgatgcgaagagaggcagcagcggcctgggaaacggctatggaggcccctgacctcttgggaggcgctgagccctgaggccctgctgctgacccctcctgagcaccctggacgcagcctggggtgttgggcaagggcgcccagagcccgggtgcgtgcgttcttggcctggggtttctctgccggctgtgaagtaataaagtgaagccaacgtgtttcccctgttgccttgccgtgctgtgtgctgctgcgggccgtcacctcattcacctgttccctaacggggcagcgctttgtcaccatccagagggggagccacatcccagttaggggacctgtgcattattgatgtccatgtttataatcaacctattaaagcaaaaaatctttttctcttaaaaaaaaaaaaaaaaaaaaaaaaaaaaaaagggc

SEQ ID NO: 5970 - DNA, 591 bp, Canis familiaris
actttttttggcattgcagccatctcttaacagctgggggccataagaaagaagaagccagccttcctcttccctattattccattaagctttatcttcaacctacccgtatgacttaggatatggaacccttctaccaagaatgaaaggtgaagctgagaacatactggagaacagaaaagagtaagttgcagctgccaagaggcatgatcacttttgaaagccttggaaaagccagaaggggacagagtaaattcttcatagaccaatgaaatcatgtttacccccccaatctccaaacacataattgttgacttgaatcactggtgttttaccactttttagatgcttgaccattttgacataatgggttttattttaaatatttaaatgcaagaggagttttgttaaactattttaaaataaaatttttaacattcaataccaaatcatggaggtactctaagccactttcatatttcctatatatggtgtatattaccaatatctaaatgtataattaataaattatattgttttgattcctgggaaaaaaaaaaaaaaaaaaaaaaaaaaaaaaaaaaaaaaaaa

SEQ ID NO: 5971 - DNA, 565 bp, Canis familiaris
ccagaccggatgaaatgatttaatgcccaaaagtacaaatacttgcttaaggtgcttgtgagaccatgcggagcctgctcagcattgcataaatgattcagtgagaaatgggagccttcaccttcaaaaatgatgagcaaatggcagtagaggtttgtagagacagtgtttgtttcttaatgtttaaaaatattaagtacatttgataccaaaatgcacttgtaaactctgtaacatcttttaaaaggctattgcagtaaaataatgctctcagttttatgcatatacagattagctataaataaatgtcagtaagatggtaagaggaaaattagagaaacttgcatttggagcctattttttatgcttggccaggaaaaaagaataaatcctattggagcacaaatttttagagaacatttttttgtaagttttctaaatatatgtacttgtaaattctttgcagtggtttaagaaatgacctcagacactttgcaattacagattcaatcgtgcaattcaattgtacaataaaactaaagatatattccttgtcaaaaaaaaa

SEQ ID NO: 5972 - DNA, 561 bp, Canis familiaris
ctgctcctgctctgtgcctggcccgggtggcataagtgggaataaactcagctgctgcttcagaagcgggaagcacctgctccagctaagactaatgtggcagtgggcgagagcaaggcccaagaattcttgagcggcctgaagcgccagaagcgacagctgtgggaccggactcggccagaggtccagcagtggtatcagcagttcctctatatgggtttcgacgaagcgaaatttgaagatgacatcacttactggctgaacagagatcgaaatgggcacgactatgattactaccagcgtcactatgacgaggacgccgccatcggtccccagagcccctacagcttcaggcatggagccagcgtcaactacgatgactactgaccaaccacccctcggccctcggcgccccggccgcggaggtgacccacctgggctgccttgcaccacgtggcttctgcacagacttataatttccctatttctgctataatggtacaaataaatttcctttaagaaatgtcaaagaaaaaaaaaataaaaaaaaaaaaaaaaaaa

SEQ ID NO: 5973 - DNA, 673 bp, Canis familiaris
tgtcccttagccaccccggtgacgataagactttggctacaagatcaccaattccatcggtgatcaaggactttcatgatccagggtggagactttacccgaggagaatggcactgggagggaaagaagcatctattggtgaacgcttcccctgatgagaacttcaagctggaacactattgggcctggctgggtgagcatgccacatgcaaggcacaagacacctacggctcccagttctttatcacgacggttaagactgcctggctagatggcaagcacgtggtgttcggccaagttttggaaggcatggaggtagtacggaaggtggagagcaccaataacagacagccgggacaagcccctgaaggatgtgacgatcgcagactgtggcaagattgaggtggagaagcccttcgccatcgccaaggagtagagccccagggaccgctttccctttgagccaccatctgcgagtccctgtcgccttcccatgggtgaggacggcccgccacagggcaccgtgctgcggggcccctggtgctggcatctgacggagcggacccctcccctcacattccataggccagcggcctggttttgtaacaaactcaaactcctaccatgctgaccaattaaaaaaaacaaacggtgggttttttataaaaaaaaa

SEQ ID NO: 5974 - DNA, 544 bp, Canis familiaris
tggagccctttgcatcaccatttccgtcccattggagagcttctcctatgccgtagtgagaacgcattctattttctgcctttttggggaaagacaagtatgcttttggtcaaggcataggaaattgcatgaaacatttgccagcaatgtctctttctaattagccttgtcagatgtcatcttcatctttaaggactgtttgaggaatgaatgctccctcctagtccccttgccactggtgaggatgctgatgcggaatgttctgagctttttgcaggagaagctgcttctttggcaaagggttgtaaggttagacagggagatgtgaggacaaaccgaaaaattgctaagtaatcttagttgaaggtgacaagctgggacgcttgggtgcctcagcagttgagatctgccttcagctcagggcgtgatcccagagttctgggatgaagtcccacatcgggcttcctgtgaggaccctgcttctcgctctgcctatgtctctaccttctctctgtgtctctcctgaataaataaataaaatctt

SEQ ID NO: 5975 - DNA, 493 bp, Canis familiaris
gaagcggggggcacggcggatacgtgtcgagtttgtgacgtttgcgccagctcctctggctgagctatctcaggagtccgtaggggccccgaccgtgcagtccatcctggtggcaggtgaggaggacatccgctgggtatgtgaggacatgggactgaaggaccccgaggagctgctgcagctacatggagaggatccggggcagctcctgacccctccccggcctgcctggtccagcactgtcagccaccagcccgggcagcctcctgctccccctggtgcttgctgatccaagtcccctgcctggtctctcaaaggacgcccactcaggccccctctgccctgcgccccccatcatggaccatgctcgtgaggaagggcttacgccccttatttatgagaaccatttcatcgtgacgttgggtacagaataaactcaaggaaccccccaaaaaaaaaaaaaaaaaaaaaaaaaaaaaaaaaaaaaaaaaaa

SEQ ID NO: 5976 - DNA, 618 bp, Canis familiaris
ttgccccccacccatgtgctctctcttgctatcttgctcagtcaaatctttcttaaaaaaaaaaaattgataaaataacctttgtttaatttacagactttttaccaaaagattttatttatttattcatgacagacagagggagaaacaggctccacacaaagagcccgatgggggactcgatcccaggactccaggatcactccctgagccaaagacagatggtgaactgctgagccacccaggtgtccctatctacagactttaatcaactgttatcaattgtctcaatgatatcctttatagaaaaaatataaaattcaacccagcattcaagacaaaatggtgaatttcatttagcagtcttcttactttcatctcctttaatttgaaagaactctttggtctctctttgccttttatgaccttggtatttttgatgagtatgtctcttttgcagattgttcctcagtttgaacaatgtttcacttatttgtacagcatgacccaggtattcttactgtattcagttagttgtaattttctactatcattttgatattaaaattgtttcatatttggctaatgggagcctcaaaaaaaaaaaaaaaaaaaaaa

SEQ ID NO: 5977 - DNA, 653 bp, Canis familiaris
ctaaggcgtgtcttgccggctccttgcagacccccccgcactctctaggccctgcttgccgccccctcagagacccgagcgccccacccccggggcccccccgcagctgctggggcccctccacggacacccttcccgagggcgcccaggctgtgaagacatgacactgagcctctgctctccccactcccaccctggggaaggagagccccccaagagcgccgctggcccccgcccccgacagagctgcccctgctgcctgggaaggtgttcttagagctatgaggatggtttgctggtggctccctcccaccagcacccggccgtgcacccggccccacccacaggggctggggactgtcctctctgcctccagggccgtggggtcgaggagggctggggcagccaggagatccaggtgcccccttggacccagctcctgttcaggggcgctccttccaggggaatcgtatctcaccactagtgtccactcgcctcgtcactccaagctctcacacaccggagggacctgctgcactttacgccccggaaggaggcacgctaggatatggtcctgtcagcacctctgtatgttaataaagtggtcgtatttatggcggccaaaaaaaaaaaaaaaaaaaaaaaaaaaaaaa

SEQ ID NO: 5978 - DNA, 567 bp, Canis familiaris
  misc_feature (1)..(1): n comprises a, c, g, or t, or includes no nucleotide
ngagacgccatccacgctgttttgacctccatagaagacaccgggaccgatccagcctccggactctagcctaggccgcgggacggataacaatttcacacaggaaacagctatgaccattaggcctatttaggtgacactatagaacaagtttgtacaaaaaagcaggctggtaccggtccggaattcccgggatcgacgagcgccacctacgcgctcagccccttcgcggcctcggcagggtgggggcgcgcggaccagctgcaccccaaaggccgcgagccggagcccgagggccggctgcttcgggaggttcgcgcgctgggggtccccttcatcccccgcacccgggtggatgcgtggctggtgcacagcgttgcggcggcggacgccgacggggcccacgggctgctcggcgccacggccagcgccgcctccgcggggggagtgggcgccggcgtggaagacagcagccaggctgcgccgggggatggggacccccgggcggctgcgagcagccccgtggccgccggggaagaggagagggcgccggcgggaccgacggcc

SEQ ID NO: 5979 - DNA, 607 bp, Canis familiaris
tccgggggtcgctgagcaccgcctcccctcccgtgtgcccctcacagcggagacaatcccacgggactcttcagttagccttcttcacgcccccgaggtctgccagcgacctcgtcgtgtgagggccagacggacggaagccagggtccaggggagttttcagccctaacccctgagtctccccctccccgctgcttggggtcagacctgggttcccgtggcctcgggccacggggctcagcacggacagactcgcaccagcgtctccagcaaacagcaggccatggcgccctcaagcccgcgtcccctgagccccgagaacaaaggtgctatcctgcagacccccccccgtctatcatcggaagacctgggccctgggcctctcgcgtggcacccaagcgaggtgttgctttttataaccaaaaaaaccaaaccaaaccaaccccaaagcttctttcttcctcaaggggagtgattggttctacgttttactgaaaaccctctttatgtgttagttttctgattccttgtgtttgctcactgtgtccacgtcagccacttttcagaataaaggtgttcattcctcaaaaaaaaaaaaaaaaaaaaa

SEQ ID NO: 5980 - DNA, 582 bp, Canis familiaris
tagccatcctcacagacctggcccccctctcaaactcctctgggtggggaaaggaaggtggggagcgtcagccaccgtcttcaggtgccccggccaccagcctgagtcccgaatctcccgccaccgtcgccgccaccaccaccgctgccaccaccgccaccaccaccaccgtccacacagttagcccacacggatagaccgttgtcagacacagattccttcagattccgagttgcctaccggttttttttttcttttttgaagaccgccataaccccagcacatattactgtagctctttgtagtgttacgtacatacatatcatagctctattctctccctttgttttgttttcgacttttttttttttttttaataaacgctcataatctttactggtgaagaggatgaaaaaaaataaattgaccaataaaacccgtttgtggggaaaagaatttttaaaaaaagcggggaaaaaaatcacctgaatgcagaggggctcgcctcctgtttagccttttgtacctgaggaaataaaaaaaaaaaaaaaaaaaaaaaaaaaaaaaaaaaaaaaaaaaaaa

SEQ ID NO: 5981 - DNA, 674 bp, Canis familiaris
  misc_feature (373)..(374): n comprises a, c, g, or t, or includes no nucleotide
ctttccccatgccccactctagctgcccatccttcccagctactgctggtttctccaaggctcctgttgaaagtccatatattattgtggctgtaagcaacctggtgctaaagcctggataagcccccacttctgcacccaactcgcactttgccatctctgcccctcggacgaggccctcaggggagcacagctcctggggtcccttgagggcacgggggcatttctgctcctcgccaaatcttaaactgttttgtttcagcaggccaaacctacaccatcagtccccttgccccattctagatgcacgtctgcttccgcgttggcttccctgcgggctgtaagccacgaggggattcacggggaagttgcnnacttttacacgccaaatctccctgctgccccttctgctccacgctgctgacggaagacccctctcctccataagcacagattcacttcttcttcacgatggcccttggcatttaacaaaaaaccggttttaaaattaaattttttagtttactctacatgtatctgttctttcttcaaaaccatgttaactttgtgaaacgacttttacactccaacacgctttacagcagaagaaataaaggaatatgaaaaataaaaaaaaaaaaaaaaaaaaaaaaaaaaaaaaaaaaaaaaaaaaa

SEQ ID NO: 5982 - DNA, 681 bp, Canis familiaris
  misc_feature (166)..(166): n comprises a, c, g, or t, or includes no nucleotide
  misc_feature (229)..(229): n comprises a, c, g, or t, or includes no nucleotide
atttgggcacagtaagctgcggatggccgtgtgcagcatcctgcgagcactgtctgagtctgcattttcccagtagcctgttcccccatgtccctgtgactcctgcccctctcctctctcctctgttctgcccacccagacatagcctttccctggccccggcccnctgggctgacccaaatgtgctttctactgtgagcccctatcccaaggaccctgggaggagagnccgtggtgtgaatgtaaaatgccaccctcgccctctttgcggcagtccttgtgggggaaggaagagggtcagggctggcctgcctttcttgcattgctctgctaaggtgggggctctttacccaccatgcccatgttggggagcctgtcttccaggattccatctggagcaggagccacagctgccacccagctcccagggcaaggggaaacctggttgtgtctgtcttttgtcctcttttcccttttttttttttttttttgccacattggcagaaatgagaccgaaaggtcccaccccgtcctgtatgtttgggttctttcactagcggttgaggctggttggacaggtttgagtcaaattgtactttggtccattgttaattgagaaactgtttcaataaaatattcttttctacagttaaaaaaaaaaaaaaaaaaaaaaaaaaaaaa

SEQ ID NO: 5983 - DNA, 593 bp, Canis familiaris
atgactgagcttcaagctggggacgagctgaccaagatagaggacgaggatgagcagggctggtgcaagggacgcttggacaacgggcaggtcggcctgtacccagcgaattacgtcgaggcgatccagtgacgggccagccggctggctggcggaggatggaggcaggggccccaggagctccgttggccgtcggccccgggcagcggcactccggtagcagccggccgtgcgagcgtccgctccttttcctgcaaaacctgatggctccgttgcccttggcttcatggtgtctctcagaggcagacgagctgggtcatttcacctgggactcggcacctttccatacgcggtgtagccggagaggtctgagtgcaggaaaatagtacaacagaactcgccccgttcccccgtcctgctcactgtgcgtgtcggcttatcatggatctgtctgttcttgaccttgcctttcctcctctcctgagtcatggtgggttccactgattcttgttccactgattacttcctctgacgagtcccatcacccgcaacataaatgaacaacttacatgcccaaaaaaaaaaaaaaaaaa

SEQ ID NO: 5984 - DNA, 660 bp, Canis familiaris
  misc_feature (38)..(38): n comprises a, c, g, or t, or includes no nucleotide
aatatagcttcctaaattaggtgagaagaaccaaagcnagtcacagaccttcttctcttttcttgggctgtcatctagaatatttctcttaatgaaccatttttaacaaccctgattctctgacttgccaagttactgattataagtgctaagttcaggtggaggagttgagataccctgttcagctttggcctgtggatagccggaagattaacgggtgcaagggcttatccacagagcagcatacacaaaagtactgatgagaacagtcagcccccatcatgatggtccagagtcacttaaagaagagagggcaatatctgtgatgttttgcaaccgtttatataaaaaagatgaaaagattcttgaggcacctggatggctcagtcggttaagcacctgcccttggttcaggtcatgatcccagggtcctgggattgagatccatgtggagctgctgctcagcagagagcttgcttccccctctccttcccggtccccctgcttgtgctcacttgctctatcaactaaagcaataaaatctttaaaaaaaattttttttgatatttcaaggagtataagattcatctctaaagtgtattcgaagacacattccttaatgatgtcaggtaactgggatattttgtggaaaaaaaaaaa

SEQ ID NO: 5985 - DNA, 639 bp, Canis familiaris
  misc_feature (13)..(13): n comprises a, c, g, or t, or includes no nucleotide
cttttgctaatgnccagaatgctctggcttttaattttctgtacggcatagattttaaaaaatgcaaatttttccacactccactttctcctggcatggacaagattttcagccatttatgacgcatatacatttctctctgtaacaaagttctgtttatgccattttaaagttgactagtcaggagtttagatttccccccctcaattctactttgaaaacaatggtagttccccctttgttcctcctctgcattccgatcaccaacccccttagagtgttagaacctactgtatatatgtggaagtcactgtagccaaacctcttagaatcgctgtgcatttagctgagacatctggcgggttgaatatatttatgtgtgtttctccatagtgctttgcctgttggtaaggattttaaatagctacccctcaaagacctgttctgattctcctctttctgtgttaagtgtccacttgcagatagtttttgcatggttaggttattgcttcgaacattctgctttactagcttcttcattagattaactgacatgtattatttaagtgatcagtgttactctgtgcattatggatgtcgaagattaaaggacatagttattaaaaaaaaaaaaaaaaa

SEQ ID NO: 5986 - DNA, 574 bp, Canis familiaris
agtaagcaccctaggactctacatggaagcaaacagacaggtgcccaaattgctgtctgttctctgtccagaagaatcactgattcattcatcagcccagattgtcaacaaacacctgattggagttgacagcctcattgggccagatacacaggttggagagaagtcatccattaagcattcagtcgttggttcatcctgtgtcataagagatagagtgactatcaccagttgccttctcatgaactcagtcaccgtggaggaaggaagcaacatccagggcagcgttatctgcaacaatgctgtgatcgagaagggagtggacatcaagaactgcctaattggaaatggccagaggattgaagcccaagcccaacgagtgaacgaagtgatcgtggggagtgaccagctcatggagatctgagttctgagccagacagactccttcctcttgtccctcagaactacagatgttggctggcccacctgtttgactctgtatttatttccccaataaagaagggctcccatggggtacctgcctggctcagtcaaaaaaaaaaaaaaaaaaaaa

SEQ ID NO: 5987 - DNA, 668 bp, Canis familiaris
  misc_feature (231)..(231): n comprises a, c, g, or t, or includes no nucleotide
cttacctgtctctcctcctcggacgatggtctgacccagccatgctggcctcgccacttgggctgtggagggtcatctggatgaattggggtaacaggacaggtccccgttgggagctggacccccctctgcctcctcctctgccccaaccgaccctactttgctgaaaaccgggaggtcctgtgacagacatggctggctgccgggtagcactggtgtgactccttgccntgggtgatccccttcctggatgcaacctcggaggagcccacactgctagtcgaggcctggctaggggccggatatggcacaagctttgtcacagccccgggtctgttccccagcacctgcttgtggggcccccaggtttgggtagctgctgagggcggggtgtgtggccctctgccaagctgcccgctctccaggtacgaaactgcacacggtgtggggaggcctcaccagccccaggctgcagaggggaggcttccggggttgcccgcagcaccccaatgacctccctgccttccctgcatcctcgctctgtccctcccaggcgaggctcccccgggcactgggcccacccacctgttggccgaccttgtactgggagaggtgtcttttgtaaccccattaaaggtagaaaagcaaaaaaaaaaaaaaaaaaaaaa

SEQ ID NO: 5988 - DNA, 639 bp, Canis familiaris
cacccacattgggctgagctcacacccccgagatcaagagtcacatgcttctccattgagccagccaggcttcccataaaattcattttagttttatgttaaaggcaaggacacacagttccatggaaaatacaaatacgtttcatcctcgagtacctggtttttccaagttttaaggagttggtagtggtgtccaacaatgtgctgcattatttctaaactgcagttttctcacatagtcacataggaataaacaccaaaccctgacttctatattactttgtagcgatattcttagtctagcctagacaaaattagattcaagcttttgctccagtacctaagcatatgagatcagaaaaaaaattttcagcactctcttggctaaaatacaaagttgtatgaggtgccttcagaccagaccttttctctgaaacatagatatactaagacagaaaatctgataaaatcaagagattaataaaatattctgtgatctcacaacctccttttaagttcacagaacatcaagaggggtgcctggctggttcagttggagcatgcaactcttgatcttggggttgtgagtttgagccccactttgggtatagagattgcttaaaatatttaaaaaaaaaa

SEQ ID NO: 5989 - DNA, 525 bp, Canis familiaris
tcctcctaagctcttccagtcatcaagtacttatgtggctactttgtccagggcaccaaatgccatggcggtatcccattaaaagcctaccaaactgcttgataacagttttgaatgtgtgagacatttatgtaatttaaatgtaaggtaccagttttaatttctgagtttctctattatatttttattaaaaagaaaataattttcagatttaattgaattggaataaaataatacttcccaccagaattatatatcctggaaaacttgtatttttgttatataaacaacttttaaagaaagatcattatccttttctctacctaaatatggggagtcttagcataatgacagatatttataatttttaaattaatggtacttgctggatccacactaacatctttgctaatatctcatgttttcctccaacttactcctacactacatcctccatcctctttccagtcttttatctagaatatgcaacctaaaataaaaatggtggtgtctcccaaaaaaaaa

SEQ ID NO: 5990 - DNA, 627 bp, Canis familiaris
ggacgggtgatgccgacagtcacgccacgcatgaagagtctgctgaccagcaagccagaagatgccacacacagccgccgcagcagaggcatggtccagagcagctctccagtcatgcctacagcagtgggccgtccactgcacccccagaagaacccccaggctccggtttacccagtgacacttcagatgagatcatggacctgctggtgcagtcagtgaccaagagcagtcctcgtgccttagctgctcgggaacgcaagcgttcccgtggcaaccgcaagtctttgagacggacattgaagagtgggctcggagaggacctggtgcaggcactgggactgagcaaaggtcctggcctggaggtgtgaaggtactgcctccaggacacctatctgggccccagcctgcagtgcaagacactagagagtaaggagggatcagcagaatttggggcctcttctcaaccccagagccactctgtgcccagtggacagtgccctcaacagtattagctgtgcatgcctgtgtgcaagtgtgtgtctgtgtgtgtgactgtgtgtgtacacgtacttgtatgagctccctgaatacatggagtataataaagttttcctagccttaaaa

SEQ ID NO: 5991 - DNA, 615 bp, Canis familiaris
  misc_feature (122)..(122): n comprises a, c, g, or t, or includes no nucleotide
ctcgacattgagattgccacctacacggaagctgctggaaggcgcaggaagatccacggatttgctctggcctcttgcccaactgtttgcttcccctgaaccttgatgggaaacccccaccntggattcacctccccttctggtttgacacctccatcttcccaatatagtatacggcctttctggagttaaagaccggcttgaaacttatgggaatggaccaggtttatcacacggaacttctcagcattcatgatgacccttgagtgaagcttgccccgattcggtgccagccattactacccagccagaatataaaaaaaaaagaaattcgtatcttaaagaaacagctttcaagtgcctttctgccgtttttcaggagcgccagatagatttggaattaggagtaacctctagttcttaagaacccacactcttaaaagatttaggagaaagtttacaacataatctagtttacgaagaaaacttgtgctagaatactttttaaaaagtatttttgaatacccttaaaactgcttttttccaacccagtatctgacccacttgtttctgcttccataaatctttggaaaactaaaaaaaaaaaaaaaaaaa

SEQ ID NO: 5992 - DNA, 624 bp, Canis familiaris
agggatttgttgtcaagacataattgtattgagtccagggaggaggagagcctcaacgtttttatgtccgccaaaaattcatctagataacttcagcaccatgtccatgccaggtgccatcttgtgcagccccacaggcaggtaaaggtataggcaagccttaaacacgacagatagcatgtataaaccttggtgtacattttcacataacctaggttggtgacggatcagtcgctgactaaataaagttggctcaaacttgagttactaaagtgtgtcaacctgaaaacttattgacagccaggcgactaatcttgtcctctccggttgcagtagtcaggtgcttaccctgctgtgttccatgggtcgcaacttttatcttggcgtttctggtcttgtacttgtccttatgttcaaacatgtgtttagttctcaacagaccacacagagttgtttgtaatacaacagcttgacttcctgtgtgttcaccaaaccacctccttcaaagtgcttggctcatatgaatcacctgagcaagttagagatcaaacacatatagtgcaggtacaaaacctcggtttcaaaccagatgcagcacctgtacaactcatttgatgattcaag

SEQ ID NO: 5993 - DNA, 597 bp, Canis familiaris
cagggtgagcaggtgtatgaaccactgtgcggtgtggacatctccagccttgaggtgctcccttgaaagtcttgcccagactccgaggttaggtgggctctgacagtaacagctctgtgcttgtagcagtgaggttacgggggcaaagaccagggacagcacaaccaagctgaggggcagaactacatcaactgtttactgttgggtctcacaggtcaactgccttctggtgcaccagtgcagttgaggtgtaggagtcccacttgtgtttttccaaccaaacctgcaacaacactgtgacctttggaaacctgcaaggcacaataacaagcatctttatctgcgcaaactatctggtacaggaaagcgcaggcaatctgagtcccagctctgcaagagaaccccttaggcacccacagcccagaccaaggtccaggttccccctgagcagtcagctgatccaatacagctaagcacaccaacgcacaacacatagctgcccattagaaacccaagctagggttcactccaacagcactgagaaacaatattgcaaaacactttatttagaggtaagttttactttttttttttttt

SEQ ID NO: 5994 - DNA, 511 bp, Canis familiaris
gttggcactgccagggtagttactgcctacggcctaaacttggaggcatccctggaacttttgaacttcactggttggagcttatatgtctttaggctataatattagaggttaggagcatcataacctttgattaaacagattaagcaacagaagcaaaaccccaggatagaataagtttgcaataagatttactgggctaaatttcattacattgtaagtgaacttaattgagaaaagtgaaagatgaacatatttatgataaaaattatagaaagatcataataatacagcattttcatcacaactagcttgagcaacatcgttaattctaattagtctcatatatcttttatagagatgaacaaattactatcatccattctcagatataatagaaattactcctactacataaaaatagagtacaaatagatacataggtaaaatactctttattttagctttccaactttttagaatattatttgtttttttttttttttttttt

SEQ ID NO: 5995 - DNA, 493 bp, Canis familiaris
cgcccactgcctcctcacacgcccccaccggccgaccccagtgggcactgacaggggtgggtgtgactccaaagcgagctctcagcacagggttgttcaaaggcacaaggcactggatgcttggtgttggtaggttaaaaaaggaacaacgtcgtgggtggcctaaacacgagcctgcctctctgacaggggctccacagtgtaggcctagcactgatccccacgtcggctccgcccccccctacctgagcccgcctccggggcctcctgggcaggtgtcaaacaaaggatttcggaccccctaacccccgcctcccccccacccccggggtagtggtgttggaggggctctccctgtttgggcttgcgggctgccccgcaaaggggtctagttcgaaaattattagaaaagcagttaaccaaatcttcatttattctctgtataagaatatttattttaagatttttttgtgttattttgtttgtttgtttg

SEQ ID NO: 5996 - DNA, 513 bp, Canis familiaris
gcttgtcttggccctgaccacagcctctaccagcaggggggtccactggtattgtgttgctaccctacaggggcccttagagcctaaccgtgagtcccagctctggtccccaggggcgaccactggctacaaggtcaggtggaccttattttggaatgcttcaatcataatttaggaagaaactgtactataagtacacaaaccaagaaaccaaaagaccaaactcagatagtcaagttactgaaaagtaacataaagattgaaaaacacgaatcatggcgccagctaaacggaagctaaaacaaaggctgatagatgggtaactgctaccaggaaaacttcccaccagctggctcagaggggaatcgtgggcctgcggtccctccactcaatccaagcagctagtaggactgatgcagtacagaataggctaactcaccctgtaattaaaacagagaaagtttatagagctatagagcaaatctgttattttccacagttaaattttttttt

SEQ ID NO: 5997 - DNA, 692 bp, Canis familiaris
tacccggtacatagcccgtgactccagcgcatcatcgatggctctggcttgaaggtctcgtgaaaggtgacgtaaacggcctgtcggtttgcaatgtatcgcgatcttctgcttaatcttttttagtagactagtactgtttggtggcaatagatctcttgtgagattaggttgttcagttgtggtaataagtagtctgagtttaatcttttgttgtagtagctaagaggccacccccagtctgtgaaggccgtctggtgcaagtgtaagattaaggtgtagttctctaaacaaaatcctctactttttatggaacacaataagtagatttactgactttggtaccagttggccaacgtgataaaatcataaaggatctggtccagtttagaaatgataaatgacaataaggtaatctaaacttgtaatttccttacatttaagatagaaaaagttgcagaaaaatataaattaatggggaaagactaaatctcataagggtaaaaatatttagagtttcaaaaaaaagatagccttcatttttattgttttatctatttatggcattaggaataacactcaagggaccttgaggaatgtctgaccaatctctagtttaacagatttattttgcttccaaaagaagtgtgaaagcacattattttctatactttgccagttttttttttttt

SEQ ID NO: 5998 - DNA, 582 bp, Canis familiaris
taagggtgcagggcccaacatttcacttccataaacccaccactccccagtctaaattggcacaactgtgaactttcacctttaacagataaaactcaagtaacactgaatggatgacaagagttgctattgctgaggctatgtgttactctttcggttttttttctttctttccctattaataaaacaagtccaagttatagtaaataaggtcatgcacccacatgtggattatgcaggagagtaacccacaacaggagtctcatggagggcccggggcagcacagaatcctcccagactcagtgactatcatccctttgcagtcaggaaccttctattgctccagtgccttacatgacttacagaaaaaacaagacttcttaaagtttaaagtttaggtgtgtccctgtgatagtgtggctcagatgccttgactaattaggctgccttgttgcttctgccacctgcagcagcacaagattaacccaatgagtccaaggtaccaacaaaccctagacagggcagagatattctccaccaccagccacttttctccctaataccccagaattttttttttt

SEQ ID NO: 5999 - DNA, 503 bp, Canis familiaris
ccttggaacatgtccaagaaggataaacctgagtataaacccgaacccccccaagaacacagatctagaaaaccgaagaggttcaagacttgaaccggaaactgaactccaaaagcacaaaaacaagttatattaatattcattaaagggttgactgaggttcagacttttatgaatgaatacacttatttggagtcaagagttaattgttattatagtggtcatcttactcattaacatcagataatttataatggtgtatatgaaagtatttctaggcaagatagttttcagtgcttgattgagatagacgaatccagatgagaacagagatgaatccaataagcaatgacagctgtgttattagtcaatgtagacagtaaagcaaactcaataatttcaagaactcctagggtagtagacatattttttactgtatcagaatataatgtaatggtaaattatttttaagagtttgcaatttttttttttttttttttttt

SEQ ID NO: 6000 - DNA, 670 bp, Canis familiaris
  misc_feature (13)..(13): n comprises a, c, g, or t, or includes no nucleotide
cgcccaactgagnaattctccctgctcaattgtgcgttactggagcttagctgttcagtttagccacggtacttattacagcaaccctgtatattggggtttttctccaaacaggaagtgaccacgttttcgagcacgcatccagacttctgcccttctagttcagatcctcctgaggggttttcagcctcttgtgcgctgggtgggagttctagtccatcagccaacactcagggcgccggcccctgagctccatccgatcatcgatcctgttcctgaacatctaagaagccagattcttcacgctgcctggcatcccacccttacaacagcaacccgacctcaatgtcgtctccgacccgcagggaccatctctcaacggaattgtccttggaggcctaagcggacccacccccagggcctggcacacactagtagacacagcaaacacaaaccaaagaagtaaccctgggaaccctatgttgtttattgatttgggccttgtagagtgtcgtgtgattgggtctgctgtcaaaggtagcaaaactgtaagggtgcacagagagtaaggttggttggcttatgggctgtgggccttgttcggccctggcccctaggaaaaccacaagctccaacggccttgcaaccaagctccagaactctgcttatt

SEQ ID NO: 6001 - DNA, 602 bp, Canis familiaris
ttgggatctgggataccctggttggaacaggtggtcttcggagggcctgaataacctacttgttctctcgacgttggagcccagtttatcctgcccatcccagactcgttgccctccaacaggggccatgagttagccacatctccgaagcatggaggcctcaggaaccctcttgactcgcaggcagccgagaaatcagagcaccatgtgcccagactagcaacatgtagagcgcagtgctgcctggtctgggcaggtgtgggcagcaggcctttatacaagtcaccctgagggttgctaaggaacggtagtttacactgagagactgccagagtttaggtagccaagtaaccaaacagccgtaaaacatgatcaactagtacacctgagtaatacccccactttttataaggacagctaaaaggaagaagcggaaactaaaaacaggctacgtagtttctgagttaggttttctttgagcacacccctagacagtggaggagaaaaacttggggtagctccatagctgtaagacaaagaattattttaaaaactattacacagtttttttttttttttttttttttttttttttttttttt

SEQ ID NO: 6002 - DNA, 606 bp, Canis familiaris
  misc_feature (463)..(463): n comprises a, c, g, or t, or includes no nucleotide
cccgtgttcccactctacaggcagctgcaggtggggccccttggtgttcgcctgctgtgccttggagttctccccacacagtcccaacgggttcttagtcacccaccccctctctgtgcctgtggtgtggtggggcagcaggggtggtacacacctcaccaaggaagacaatcaggcttccactgaggcacagtgcaaagtgggtcaaagctttacagataaatacaggtgaaaaggaaactaaactgccgagaagtgcctggaacagccttgtcaatgtctggagtaacctcactttactgcagagcagaaagggtgtaaggtgtattacctgaagggcttgctggcccatccttggttaactcagggggtagggtggcctggccgctaagcaaccaacctcctgtggaacctgatctgcacctcctccatcctgcccagagggggtgacaccctaaaccantacatagtttagagttattaagctgagacctccactaatggcaatcagagttagggtatttgctagtgaactgcttttgaatgcttagtcttactaataggaggtttatttcttatctatatcgctatttttttttttttttt

SEQ ID NO: 6003 - DNA, 455 bp, Canis familiaris
acatagtctagaccagactggaggatctctgactcacaggctctgtcccatgcacctccagtaggagtgtgcaccatactcccaggcccctccgcctcggcaccacactgtgattgcataagccttgtccacttgaccaactgttcctgtcatgggaggcctactggtaggcctctccaacctagttatccacgcaaaccacaaggacccctgtgccaaggcttaaagggtttcctttcttaacttgttaccaagcccctccccgaagcaacctgtttgggacaagtgccctatccccttgacagtctcccaccaccccacccgccgccagcctggtctcacatgctggtctcaggagcaaagccgctatcccatcagagcagctcaacaaacccttaaaaactatttatatttagatagatagatagagatttttttttttttttttttttttt

SEQ ID NO: 6004 - DNA, 516 bp, Canis familiaris
ctccaagatttctggtattcaattaaattttcctaggggcagcttagagggccagccagccactaagaaaaaaaagctaggcacagtggttctttggttagaacaattgtaaaaatctagattttagatttttttgtcagaatgcaaaatggagtgttctgaggcactttgttaagtggtctaagccacaagcatgcttagccattttataaatgaaacaggcccaaatctgttctggaaagccttcagcagcaaaaatccatatacagggtctaagtaattcatcttggagtttccttggttgcaagatgcaacctagagaattctaaaagaaaattctgacaggcttatctgggtagccagggcggcactgactgaagtgctaccttaacaagtaaacggcacgggactagtacaaggggaaagggtaagtgcccagagacgggcaccgagcatggctgggtaacagcaagtgtaacagccacaccacaccaaaagccccattacctttttttt

SEQ ID NO: 6005 - DNA, 603 bp, Canis familiaris
gggggaaaccacttcccgaggcaaaccgttgtcagacgcaccagagcgtctctgcggtgtcctagggttttgtcagaaatactactttccaacagttaacatagtctggcgaaaaaagttaaattagtttaacatctaaaagaagtcagggtaacctgatgcttaaggctattcaaaggagttagataaataaggagttgcagtgaatgctgtttaacctgttggaatctaccctgttctcagggtgataaaattgctaccatatacttgtaggtaagcccgttcaaacaaagtatgcccagttttgttaatagttttttcttaggcataccaactttaagttgcagttttggcagtaaatcggaatttggtgcaggttgagcgttggaagtagcgagcttgtggagtaggagcccaggatactgataccttcagaagtattggctcagtaagtaataacaccttttgcttcaccagtattcattacaaaataaacacattatctttcagataacacaaatggggttttcacttatttatataacagataaaaagcactctagtagttattttgtacaacctaagattttttttttttttttt

SEQ ID NO: 6006 - DNA, 566 bp, Canis familiaris
cctggccttttgtattgctgggtttacacctaggtctgccacctgttgaggccactcacagccttgcattcaactactaggtcttgccatcaacagagtggctgtagccttttttgagctactcagaggccccactcgacgtggcagttactcgagatgtgccttgcaaattcctggttgtctaaatctactcctctgtttgccaatcctcatccgcaggcctgacagggtcttcagtgtgggcagagtgaacagtgtagccagaccctgtcatatccacctaactctactacctgacaccgcggggccaagagcacttagcttcagccaagcccaagccagtctttgtgaaacacactactagaggcatcgagtgctctgtccttcagttcttttactagccgatgccaaacaaaggaaaccctcgtgcagctataaattaggagttgcgagggcatgggcgagtgagcaatttccttttattagaaatttccaaaacggggggggtagggggtgaggtaacatttagccaaaaccagtttagaagtttctattataattttttt

SEQ ID NO: 6007 - DNA, 579 bp, Canis familiaris
atgggaaagcttttataaagaccagacccaacagaaaagcctcttcttatcctcagttatctagttgttgttagagtggtttgacacttttaattaagccttggacctgttgttttgcttgcacaagggttttatttttggagactagaccaactgataaataaggttctgttgtttagtcagtctttggtcttatcttaccttagcacgagagtattctaactagactcaataagttaaaggaacaagatagatataagctatctctatttgtttaaatttgatgttgaagacttagaatttcctactacaatctaactaaattagtttactaggttatgttatttttcatgcacaagtcaattattaatattataggataaattttactggactcatctgatggtaacatttataagccttaagttttgcctggttataatattcagaagctttttcgaaggcttattacgtaaccttatgctaaaatttatcaaggtaccctcttcataaaatatttcccttgattattttaggtaaaacattaactcaaattttttttttttttttttttttttt

SEQ ID NO: 6008 - DNA, 588 bp, Canis familiaris
cgcgccttcggtgcagggcttccaggtggcccggcaccgcgtgtgagttctggcccgggcctagcaggtgtgggtggcggtggtggcctcgctggctgccaggctctacaaggggctgtgagtgccggctccccggcggtgggcccccagggccccgctggctccaaggtcccacggcggcgctgccacccagctggcgtagcacagatccagtgcaactcgccccctctggattggtggcaactggtgggcagtccacggagggagtgtgggacagggtctctgccctggggcctacaggggaaagctccatttgccagttgcagaggaaggtgtgtagggtggggtggaagtgtgcctacggaggagcatctggccgggggcctcctgcccagctgccaaccccagtcccccaggccgtgcgactcatccaggccagcagccgagaaccatgccggcccgactctgccctgccgtggcctcgtccgacaggtaaagacagagtcctaacgcacgagacctacgtcccaaagtggtccgtgtgtggctggtgcagggctgccccgtggtgcggcagctggtctgctg

SEQ ID NO: 6009 - DNA, 622 bp, Canis familiaris
  misc_feature (89)..(89): n comprises a, c, g, or t, or includes no nucleotide
gtggacatattattgctgtgcacgaaatgagttccgactggacgccaggtgtcgcctaccctcgcagaaaagtccacctatgttgtctnccgggtccgtacctgccaccgggtcacatgccatggccgcgggtcgggtattcttgaaactctctggtttctgcatagtcctaatggccataaatggagtctcatatgtgtcttgaaagatctttttttgctggcaggatccggaccggttaacccgggtacttgctagaggacaaaggcttggacttggtgggctagttctacgaggttgcctaggtgcgcaacgggacctggttaggcttgtcctgcttgttgtactcctacgccgtcagaggtctgtacagtagttacaattcaccagaaaatacagttcaacctgtccgaaccaaatgcactggtgtgcgccccacctccccctccagcaagtttatgccctgacaccgctcacactcagctgaacagcgggcaccgaggaaccaaacccctggtatgcaggtaagctgtgaactgaaatagtagtagtttattttacatttcctcttttttttttttttttttttttttttttttttttttttttttttttttttttt

SEQ ID NO: 6010 - DNA, 665 bp, Canis familiaris
ttatcagggccagttaaaataatgcaactaatatctaactcaggtggcagtataaatcacgacggagagattgaaaacattgattcgacagatgcgggtaggatatgtaaacaagaaactgagcaaaggggtctggaaagtagaatagactgacttactggaattttaagagacaaaacggaagctatgccggctttattaaaccttttagtcttcgctcacgaggagacgtggggcagggggtctgaggtgttggatttagttccttttggctatttacttgggaactgtaggtgctgaattactagaagttgaatagaaacactccaataagactagagaaatgtctaaagactctaaaaattttacccccaagaacaatttcacacgtatacaaaagtccaatcatagtaacctgtgttaacttatatgtttgttttgttgttttgttttgttttttgttttgttgtgtttgtctttctcagaggctgaggctaaattcttatattatataagatttctcttattttatgggtaatattagatagtcaaaaggctaaggcaagttgcttatattatataagatttcttgtctctgcacaatctattagttctaaaatatcagaaagatattttatttggagcagcaaatgaaaaccgtgttt

SEQ ID NO: 6011 - DNA, 506 bp, Canis familiaris
attagaagagatttagcttaattagcagggtaggctgtgacagaaaagaaagcccagaggacacactgtggtcagctaccaccgagctcagagtagatgtagggatgtagagaacaaagattgcaaagttaccataggaagacttgtgatcctagaggaacctcagaaaagaaaagaaaaaaatttcgtagtgcagtggcaaataagctgcaggaaaacttgaattttaagagtttatcaggaaaccaacccctccacccaccccgccctctcctttataaaatgacataaatttgatcttttttttttttatgaacatcaattgttttctaagcaatttagaccagagtaaacaggacttaaaatatatataaagagagagacagatagagcaaactcaaaaatccaagaaagcacacatccagagaattctgatcaaactcctaagtttggagttctaaaaaccatgctaatttttttttttttgccttttttttttttttttt

SEQ ID NO: 6012 - DNA, 578 bp, Canis familiaris
tctaacaataccaaggctaaccagtggaaaattaccgtaataacagaactaaaactcttgatctcttgggcaaccacaggtgatgccattttacaggtactacctctcctcagctagcaaggtgattgggttgtggtttcagtctagctcatatttcaggtcccaacagaactttttgagcacctactgttctggcagagtgtaacaacagaacaacagtcactataggaaaatgtttcaaccattggacaacttagatcccaaatatggtcaccggtactgtatctgagttagttataaccttagcggaatcaggaaaagggttttccgattgaccaggtcatggttacaggactcggataaaaggttcaactactaactgagacagttgctaggccctctaagagttagtgttgtgagctgcctggttgcctattttctcatgtatgttgtgcttgtactttcccctgcacaaggcggagcgcccctggttcacaccggaggacgggaagatgtagttgtgcaacctcacggcgtggcacaggaagttggtcaacaacaccaacaacgactaggag

SEQ ID NO: 6013 - DNA, 520 bp, Canis familiaris
cttggttgccgcgcaccttttgcctcctgtggtccttgtttgggtactggccgcccccagggaccaccaacgaccgcaccggcacaaggaagtcctcctccccagcagcccccggcccccaaagcgcaccccaaccagacgcacaaaccaaggtctgtaggggcactggacggctggtggccccgccacggggctgtgccctgatagagaagagaggggccggggctgagcctgggctcgaagaaagaggtggcgccgacagaccgatagaaccacagagaaacatgcctacacgcccagcctgcccttctcataagggttactaggagttgccgtagaggcgcagccggggaggggggcctggcgggggtgcggcaggggccccacagagggtagccctcggcctacctaatacaagacccaagaccccctgcctcgccccaccaccctgtcctcctcccaaattctctgacaggtaaattatttaactatagggagaaattcaatttttttttttttt

SEQ ID NO: 6014 - DNA, 618 bp, Canis familiaris
tttctgcatagtcctaatggccataaatggagtctcatatgttcttgaaagatcttttttgctggcaggatccggaccggttaacccgggtagtgcggtgcactgggcgccccgcacccgcaccagtcactccgcagaacgcagtggttcttgacggactggttgccgcgccgctgcctaggcgaaatttgtctcagggttgtcgcccgatgttcctgtggaggcgtaactccgttaatgttaatcacattcctgccgcttcgattttaccaaggggtttggagagagcagtcaagttactgtggagctttggttttgttaacactttgagtttggtcctgagcggtagccatccttgtcacagtgttactcatcgtgtttgtcaccaagaggagttggaacattgtcaagggtacgaaaactgtagtggtacctcttgcgtcactaagtacagctctgaccaacagtgtaagaattgctgtaatccacctactgataagtgccaggtgacgtggaagttgactcctacgctgtagcaatttacttccaaaaaattatttaagtataacagaagaatttttttttttttttttttttttttttttttttttttttttt

SEQ ID NO: 6015 - DNA, 537 bp, Canis familiaris
aggtgtccatcatgtacctttataagtagatgttgtaataaaagtaattttttggctaaacatgtccgtcatattaacctttatgcatttgactcttattggatttagtcagctcataaattattagtaaactggtggttgataatgttatgttataaggtttttgtatcgatttaataaagtacagatcttctcttttcagtcatcaatagatttcgatgggtaaattacaaacagtcaatgcaaaggtgctgtaaatgcatggaagaatacatcaatgccttcttcaaggacaggatagactgtgtgggtataggaaacttgtggaaatatgaaaatctgtgtgtatatgcttatacaataaagcattatactaaagataattatcaaagaaatctaaacatctgcagaatagtgcagtttactcaccaaaacagattatggccatagacagtattctcagcatacttttgaaggaatataatttttttttatttgtgaatagagttcaattttttttttttttttttttttttt

SEQ ID NO: 6016 - DNA, 588 bp, Canis familiaris
gatgctcttgaccctggcctcggaagtgtggagcaggcgcccctttagctgtgccggttcagaggggggttggcaaccaaccagttggtgctggtgggctaacgctggcggtttggtttgttgtgcaggcccggcgggtggccctgcgtgccacgaagctggaggttgtctgcccgtggcaatgcgtggcaggctctaggggagacgacgtgggtggagttcgggtttgccaggctgggcaggggctggtgggccaggctcccacggagcccaccatcggaaggggcaagtaccaggggctgaggggtgcctacgttgtcaacctgtccctgggggtagtctgtgagtcacactagaggggaattcggaggaagcaggattcttttcttggctggttgaactaattgcccggttgggtaggagtcctacagccaagagggtaggctctgtggtttttgtgggggtgtcgttaccgtttgtgttaactggggcttgtaggcaggttctaggggtgggtcgtgtctgtcagaccttttggtcaaactttttttttttttttttcttttttttttttttttcttttttttt

SEQ ID NO: 6017 - DNA, 665 bp, Canis familiaris
tgttggcgcagctcgagcacagtggtggtttggtagttagagtgctggctcaggcagcagtgcctttgggcctttgtcccccaggcactccaggcctcttggggtcccaaagagaaggtcgtttaaatttgcgcttgattcaacctttagtggtctcaaactcagagggctcaggccgataaaacaggggtgcttcaacgtattggtaggcaggaccccagaggatcgcagtgaatccgcaacccagtggtgcactcactgtccaaatagtgaagattccactactcaggttagaaccttcggaaggtcttgcagtggttgttagccaaagcctgagactaccacaaaggttccttcttctgctgcacctaaacaggtgacagggacaaccgtggcctggtgcaagccaaaccgcagtgacctgtaaggctggaggtcatcgtgaccatatctaggcggtttcaggtaccaggctgcgtggtgtccctgtcgcaggaacgtgtgatcaaaaccagggtgggggccaacctgctagagggcttttccaacttactgggcttgtacaacttgatttctacacaagactactacgccatgcagccagatccagcccaactgggtgtagggggactaatttggtttcagttctaagttttttttttttt

SEQ ID NO: 6018 - DNA, 628 bp, Canis familiaris
gccgcggccccgtgtgccgctgggcccggtgccgcaagccagggtacagcaaccctttgtaaaggaactctgtgatcaactgaacctcttgggatcgaaccattttctactcagtgaactcctccaaggcctgttgaagaccagcctgtccctgcagtggtgtcctgtctcctagctgtggacgaggggttggagttcgtgcagtacgcctctggcctgataggctggcagaaagcagaggagctcaacgcctgcctcctgaggttggagtccacagtggtccagtaaaattacttcttcgttaatgtctaagctagaggtgtgtggtatcggcaggtgttggaccataaggaaggtgcagtcttcaactcgaatcaaggcttgcctcaccaaggtttggtacacgaacgtgatgttgcctcggactaagttttgtctgttactaggcctttttaattatagtttaaattgttgtggtttttcatctggttgtcttttgaatacgagttccctctgtcagaccaacggtatttctcctaagtgtacgcacctagaaagagcagtaccagttgcactagaaatctgttagatttttatttccccagaaaacaggttttttttttttttt

SEQ ID NO: 6019 - DNA, 607 bp, Canis familiaris
cccgactgctgtatcgaatcagtactttgtaggcacgtattaccggtttgccagagtcggaccctaacccgtgcacggagcccggtttttctcacaggcccgccggttgggctggcctatagggctaaggattgtgttttggatcagccttagcacgttagccagtgttggattcgaggtagtggtggtagtgttaacatcgctggcagcactgttgtatccgagttacattgttgtgaagtccgcctctcatgatactcatgccacgagtctcagtggttgtagttggggtttggggactctggtccttcggttaaacttgggtctcttccttccttcaggttgccttgttcttggcacgcttgttgcaacaggcagtcctggcagtggcccgctgtacattgtccttggtggcccgcttgcgccgagttgttcggcacctggccttgttggtggtttactacttgtcacagaccttggtggttgtgtccttgtttattttcacccacacacaagacagatctatgaggccactgctagttactgtactgaataacttattttctttccaaatacagccttttttttttttttttttttttttttt

SEQ ID NO: 6020 - DNA, 606 bp, Canis familiaris
acccctgtgactgttggccagagtcatcggacttgggtggaaaacacagtcctatcttgagctggctgctgcagaggcacgggccctcccagcctctcacccaggtagcctccttgccaccaaatcgccccacgcagggagggtctcaggggtgttctagctagagcaaggccaagggtacctgaccgaagcaaccatgaccgctgagaagagtgctgagctttctcctagacgttttcacaacgtgagcctcctgccgctaaatggtttagagaattctgaacaccatcctgctattagtggcattcagatctgagaggggccctgttagtgggatttgtttgtgctgctgcaactccagggctgatctcaggtaagttggcttagtgagtagttgcgtaggccttaggagtaacaggagtggtggggggagtgccgggttagaagtcaacacagtagaattgagtagataccacagttagtagcacttcccacagccccaccctgggttggtttacttgtaactttgattgctagtctcatgaaggaaatcctgagaaccaaccttggtgtctatataaaaaattatttagtatgaagcttagt

SEQ ID NO: 6021 - DNA, 629 bp, Canis familiaris
tgcccatccatcttgttccggttgatagtgcagggtcgccccgcggccttctcattgtaaggccccgccgctatctctctgatcgtgaccggggtggcttattgttgatccgtgccaagtggcatgtcgaggggttcaacaccaggggcacggtgagaagatcctcgcttttcctgggtaatacgtagaagacattattagctacccttcttagttcaggaccgctccttgtccccaggagttgttcagaatacgagcactaagtctgctctccgatccgtctgaggatcgtgaccctcatcgctcagcgcccagggtctgcttgttgggggccttgtcagtcgccagtggtggttgtggtaaaatttaatttttcgtaccttggtttacctggtgttgatagttgttttgggttttggttagcccttttaccttgccttgaacaacaggtgggtgctgaaccttctgggcttgcaacaagctagctacgcaacgtgtcctggcctgagcggccgggctgtaggcatagagcatgtgggcttggtgcaggtgaacatacagtggttttactttgcccggtttggctttatttacaacagacaacggactagattttttttttttttttt

SEQ ID NO: 6022 - DNA, 558 bp, Canis familiaris
cagttcgggttgcactcaggctaggccaaccgagaccccttccccctttagatactgaagaggtacagtccagccgccaggtggtttgcagcctttatagtcgtctacttgttggatgagttgctggctacggtggtccccactttggctaccagggcatctcagtggtcctggaggacaccagagtcaacttctgagtctccctcacaacctccaacgtcgccggggcaggctaagcccacttagtcctcaaagacttgcactaaaccaggatagtcttagttaaaggcatctgcttccgggaggaggtccactaggacctctaggccaccttggtgattgtgccaccaggtcctcctgcccctgcttgttcttgtggttgtgtgtggcccactgcagcaggggtgacccagccccttcaattacccccttctctcagtgtgttacaccagtccaccttaaatctaccatgtccccttggttggggttgggcaaggggtgcccatccaagactagatcctacttatttgatatcagatccctgcgtttttttttttt

SEQ ID NO: 6023 - DNA, 581 bp, Canis familiaris
tgtcccgggttgccctgtgccgggtggtcgggccgctcctggccgccagcccgcccgccccgggtcccagtggggctggtgtgcgggtggcgtggcacccgacgccctctacccagccagcacctgtgagtgctcctagcagacagccagggggccgggccggggactggccactgccactccgaaatcctctttcccacaagccaatcacgccggccctgggccctctgggctcttcttctcttccctggccgcgggggcgcaagagcagtacgacctcttgtaagaactaacactgtttgccaatcaagactacttttaaaaagatgctggtttgaaaagagttaaagatctaagtttggtttaaatttatttggtttttccctctaagttttgttttcttcccccggcgaactggagggccaccctgagctggggcgtcgcgcctcaggccctcacggggcctcagcccgaccgtgcgtgcgccgcggaccaacggtctctccagggagcagcgccgagggccccggcaggcgcaggcgaggggagccccaccgagaccccccgtgggctctgcctcg

SEQ ID NO: 6024 - DNA, 657 bp, Canis familiaris
actatccccgatgaaggatcgtttttggtcaatcgtaatcggttatgaacaaagaatacagatactgttgataagaaacaaaagctggcaacaacagtgccaaaaatcctcacctgccatgccccatcacgcagttcaagggggaagcagtccaccatccggctaataaccacgaatccctaatgttgagccaaatcactctccactgaccaccatgccaccggtgataccataatcaaggtgccctactatgaaattatgttggattaagcttctgtatcaacttgcccgataacctagatcttagcacaccaataggggatatataaatactgcgtatatactgtcgcacacgcgtatatataatgtgtctcatacaaatgtctataacacgcgtaggggtatacgggtacatccaaaaattatgcctcgggtaaactccgggtattcttcggattaatagggcacatctaaccactacgagagcaaccaccgtctgcatatcatcctcaactctactttcctcctcaacggtaaagttgccgcagctagtataagtctcaaagaagtagatgacaggcataacaagatagatacataaataagtagtggtaccacttttttttttttttttttttttttttttttttttttttt

SEQ ID NO: 6025 - DNA, 630 bp, Canis familiaris
ttggggctccctaggtttagcgagtgagtagaagctgcagtaatttgtccggtgtctttgagggtgcctgcgtttgcgctcttcgaggactttctagcagtttctgccaccccccgagcaccgaaagggcaggtactagcctgctggagaaaagtatttaggcttgctaccatcctttcccagttgagcaggtctactctgtggtttcacaggctaacacgcaacaagggtgggagaccgcttcgaagcctgcgaatagacagctgtatggaatcccgtcagaagctactgagcccctaacatactacttaggtatcttgcgggaccaggcaaagacagaggtttcagtaatctccaaacctcaagcagttttggacttggccaacaaggcagtacctacagctaaagaggcagcagcaccagaggcagcagcctcctcagcagctccagcagcagccgctgcccctgccttggaagttgctttggttgtgacggtggttacggtcgtggtatagggtaaaggacacaaagtcattactcctttttgcttccttaactgccttgaaataaagagtttcttggtttatttggcaatcaacacaattttttttttttttttttttttttttt

SEQ ID NO: 6026 - DNA, 611 bp, Canis familiaris
ccagccactctgaggcctagttgcgctctgactacaggtgcaccttgcagatggctgggatttggattagaaatacaccactagggcaacacagccagtttgaccttacagtagcccattttaggacgtgatctgtagtgagtcgaagcgtgtgatcccacctttgggaaactgagggaccttggaatgggagtacgcttcagtgtagaactcagggccagtgaccacctgggccagcggggtcagggaggtctcacaggccagcccgcaggactcagagcacaccggtgaagaggagactaaagagtggagcaacttagaaacgaacacagtatctctcttgacctttacgaatttccgctgctgtttagataaccttaccacagcctaaaccggagtcaagtacaccaagtaaaagttgttgatgcccttggactggtttgcataagcctaggcgcagtctcagtactatttgtcctcgtggggtggccggcagcagtagatctgcaactggaacacctgggggaagtagcagttctaataacagtactgcacctcccgccccggagggctgcggcgcgccccgggcccggcccggcctgcagcacggc

SEQ ID NO: 6027 - DNA, 649 bp, Canis familiaris
acagcatatgcccccagcttcaaatagccacaggacagaccactagcccgagcccgctgggggtaaaaaggaaaaggcaaataagtgtctattaaatatctactattctaaatccgagaaaaatttagattttaactgagtaaatgtgggtagaaacctttgatctgtacactactggactcacaagcagcaattttcctaccgagtagcaaataagcccaatggtacttgtaatataaatagtacactaacaaacaggttagcaaaccagaccgtccctattgcctagaaaggggtggcaacccagtcaaaacacatcccatttgggaaaaaacagcccccagagttaggtgtcattttcactgtacataggactaaagctgcccttgaactcaaaatctgcaaataagagtatagtaaatctataccatctgaaatccctcaattttatatcttaactgaggcaaaatgatattaacatgaagagcttcctaattagcttttgtaaaatgttagaaaaaactactaaacttttagtttcctctcaccaatggctactccccccaccccggcccaacttcccatggcatcctcattacatataggtaaagccataaaaggtctaaaatatatttaggttactatcttt

SEQ ID NO: 6028 - DNA, 623 bp, Canis familiaris
tcctcattgtacacatgggggctcctaggtttacaaggtgagttagagctgcagtaattgtccggtgtctctgaggggtgcctgcgttgcctctcagcactttcttagcaggttctacacccccaagcaccaaagggcaggactacctgctggagaaagttatttaggctggctaaatcctcccaggttgagcaagttctactctgtggtttcacagcttaacacgcaaccaggtgggagaccgcttcgaagcctgcgatagacagctgtatggaatcccgtcagaagctactgagcccctaacatactacttaggtatcttgcgggaccaggcaaagacagaggtttcagtaatctccaaacctcaagcagttttggacttggccaacaaggcagtacctacagctaaagaggcagcagcaccagaggcagcagcctcctcagcagctccagcagcagccgctgcccctgccttggaagttgctttggttgtgacggtggttacggtcgtggtatagggtaaaggacacaaagtcattactcctttttgcttccttaactgccttgaaataaagagtttcttggtttatttggcaatcaacacaattttttttttttttttt

SEQ ID NO: 6029 - DNA, 612 bp, Canis familiaris
aaaatttgtggttcttggggatgtaaccctttgttattgtttctaggagcaaagggtgagggggttgcagctgttatggtgtcattgtatcctattataagtgacacccttgtagcaggcattgtctgtgattggtttagaagtgtggctgtagcctggagagttgggatccctgtttagattgtgagtgctgccctaagtagagctgggtatgctgaggtgggggagggatttatggtgacttgagagctctggggtgtggaagcagtgatttgtggcatgtagaggcctactgtttaattgtgtctgctgtccacaccactagtccagagtgcctcatggattcgtgtgtgtgtgtgatcctacagtgtgtaaaggtggtttagccttttttagtgttagtttaggttcacaaaggtttaccatttaaaagctacacagcaaaagcctaaaagcctgcctagagtacatgtctttaataaattactgtcaaaacaccaagtattttaaggttattatcagccatacactattgtcataagtgttggcatctagagctcaaactatgtagagctcaaaggaattacccggggttttatagactgctgggtt

SEQ ID NO: 6030 - DNA, 615 bp, Canis familiaris
  misc_feature (368)..(368): n comprises a, c, g, or t, or includes no nucleotide
tggtagagctgggctttatcagccagtcattaaaactaggctaggtacaatcccgagtcttttagagcacctaggacttttttaggctgtcctagtaagttgcactagaagtagatttgtcatccgtaggaattaaagcaacgacataaaagagaaggaaaatcattttttcgcctattactgtaacggttgtccacaatcgcactgctccttctggaccgcctttaacggttttgtagtagggttactagtcccgttgtggagcctttcctttgtgcaaggttgtttgaggacctaattccgttaaaccctgtcctggcttaaccgggttttggttattaatgttttttgcaagacctgaacataanatacctcacctagtagaaaaagaatgttttgatttttagcagttgttgcccttgaaagttaagggttttcactaggtgcaactaggagttggatgatgaacaggttttgcatcgggggtagtgtccggagcatttgaagttcgtgcagtaggtatagttcctcctgaccttgttacagaaattttaactgtctaaattaggagtccttatttttctataaagagtagaaattttttttttttttttt

SEQ ID NO: 6031 - DNA, 581 bp, Canis familiaris
cgggccctgggctgtccaggccctaaggccacgcaacaggccccaggggttgagccaaccgaggccccaggacctgccttcttgcccaggctacaactgagtgttcttatgcgactcttatgcctggtccccagtgggggtctgagttgagcaaccctgagtcaaggccttacccaaactgtgcacaaagttccccggtagaacttttctgcccctgtgcatcaagggagccccagccacactctggtgctcaggggcctagtgggagctacctggtcggtgggctgcatcacatgggcaggggtctgtagccgcaagacccgccccaggacccctgcagggagcagtgaggcaggctacccagccagcagcgtcaccagttgggccagacagacaaaggccactccagaccacttgtgccaaggaaaaccctcgaaaggtcttgtgcccctggggtcagagcaggctctgggcaggcaacagtcctagcaaggctgtgtttatttctcagacgcacagccgagcattttttttttttttttttttttttttttttttttttttttttttttttttttttt

SEQ ID NO: 6032 - DNA, 630 bp, Canis familiaris
gagtcagaacagaaacgaagctctcttctcgttacctctggtacaaaattggcgcagtcaacaataaagacgtcctagaactccttggtggttcttcttgaagttaggtccaaaaattttttttttagggttggtttcattgttagtactacaacccctgggagaacacagtccaggtcagagtataatgaataaatagtttttgtcaaaatttagcccaaacagctgaaggttggaaaacaaatatatcataaccctcctaggggtgcgtttttcgaattttactcttggttaaacccttaaattgctgtcaaagccaaaaaactttggaggtgcgagttatcctgttggtacctgataactgaatcaatttagttgacaaaaggactgtttaatccaaaaagtcgcttgccatcagttagcagagatatataaatatatatttatatatatatatataggtgagtttccaagagttcacaaattaatgtgaaaacaagatatgaggctgtgtagagataaacagctatctttgagattagtagatcaataactagcatttcaaaaatattttgaaatgaagatttcaattcccaaatatcttttatttacgagagaaataagtttttt

SEQ ID NO: 6033 - DNA, 567 bp, Canis familiaris
cattagagggtgcaagtgttgttgactgcagatgctgtatttctagttaagcactgacaagcatgctgcttactaaaggggttgttacatctgaagcagtaggtctgtgaggtagtttagtgccttgtattatgaatttttagttctctatctagtgggtctcgtgatttcctctgctgctgtgtctactgatactgctgcgacgcctgctggtgttatagctgcgcctgtgacggggtgttccccctcagccagtggtggtacagacctttcaaaactttcctccactgccaccagccttggtaggttaaacacatcactaagctggcctgtaattctcaatcagcctgttctacttggtgaactcagcccttttcaagggctttcacaactaggccctggcacaactggttatcttcttcagtgttttggttgaaacctgttttggtgaattctaggtcacaagtgtactctaaggggcttaccaaggttgtttatctaaagagataagttttgacaaacatgcattattattttatttttattttctttttttttttttttttt

SEQ ID NO: 6034 - DNA, 651 bp, Canis familiaris
  misc_feature (363)..(363): n comprises a, c, g, or t, or includes no nucleotide
tcagcaagagaactgtttgtgcaacagaaaccagtgggctagatgtgcaaatagccgttttggaggcctcctgtggacaatagagcataagcctggctgtgacccagcgaatctttcaccatggtggccaacagagcggtgggccagcataggaagagcagcggaactactaggtgtgaggggcctttggcaagagtgacgaggagacagggtttcaccgtggtctgtgggcatttacctagttgaaagaggtaggcaagtagtaactctgaggtgtcccagaattcatcatcgaagtctccgcagagcgcctagagcagcactgtctgggagagcagggctactttgacttgtactagcaancccagggtcccatgaggattgtaaggcccattgttgccccagcctgtactagagtgctaagaggttcccttggtagtgtatcagccctcctccccctacacggttctgttgggagggttgcctgtgccgccagcatagccgctgcctgatccctctgctatttatgggacaccaaggctgaaggtacaggtggcaggtaaaatcacagagttgtccaaattattttataaagtgattttctcgaggctgtttattttttttttttttttttttttttttttttttttt

SEQ ID NO: 6035 - DNA, 580 bp, Canis familiaris
gtaggttaaatccctgtatctgttgacaagtccatgtgtttctacagcttggatcgggagcccctgcatggcttgcttaacctaagtttctgcgaatacaggatacagaaagcggaaattaccccagagtgaggcaaggctttcttggtaaagatctactttgccaaggaaacaaagagaccgaaataacattaggtttgtgactgagttttatttatactgttgctcttagctttatttacaataaaatcagaatatcagaattcaaatgtaagagccgctagccagcaaaccagttggcagtgccctgggaaaattaataactagagctgcatagaatgtctgctaaaatcaagttatacatagcaaagtaaaaagagagagagcatataaaaaatggtattttcaagggttatctagatgatggttgataggtttcgaaaagcaaaaatttagagctcgattcactaaaaaccttaaaaagtattaagagatctaggtactgagacaagactgctgtgaagagagagagagagatagagattaattatttagaagctaattcggttttttttttttt

SEQ ID NO: 6036 - DNA, 469 bp, Canis familiaris
gacggtggtgaactgtaaaggttactgttcagctgtggtgctgcaaactgcctgtggctaggtagcaacacagacactactgacccatgatgctcaaactgtgtttaaggctgttcattttctgctgtcatatccaaagttgttttttaaggtgactataaatgtaaattagccgttccctacccaagcactggagttttaagttgttgctttgcgggttaatgtctactaagttgcagttcaatctttgttggatgtctagtaggttcagagtcctgtgacttgatagcaactacaacccatttctgtgatttaagttgtggtcaagtttgttaagaaaacacaaggctaaccaattattcaattcaccagagaacaatgtattattagactcagaagtaggttctgatgaaacctgaagatataagctaaacatagccctttatctatgaaaactaaaatttttttt

SEQ ID NO: 6037 - DNA, 606 bp, Canis familiaris
tttgctggcaggtccggaccggtaaccccgggtagcaccaacacacctaacaggcagccaaggccgaggctgcaaagagcatcgttacactagtttgataggttaccatagtttaattacccaactaattctggtgtttagccttatctaaatatacaccgcttctgtgtaggtgtgcatttgccctggtgtggtactgtgtttcctccttgcccgccatagtgcacttccgggttgccagagtagtcaacttgcaaagcgttcgcatcgcctaggaaataggtatcttagcagccatcttacgcataaaccggctacgccgtggtggctttagtgtaagttttttgacacaaaccaacctgtgccaggagccaggaaaagataaccaaatctgatgctactacgttcatctatttctctatctttaagcaataaacaatttagaacaagacaggcagaagcccaccaaccagcccccctgtacttattgctgagtttgagcttagaggagtttggacttttgtgttaattgtagagagtaataataatctattatttcacaaggtaggttttttttttttttttttttttttttttttttttttt

SEQ ID NO: 6038 - DNA, 602 bp, Canis familiaris
gcctgactgccaggtcgagctccacagctctctgctctcttgtctccagccttccttcggggctgtttggagttgctcggcccgcggccttcctcctcggctcctcctgcagccgccccggtgtgggcggccaaatttgctactcgaggatccctgacagctccgcgtttcttgcaagtggaaaggatctgtatctttaatttacatctttcagaccttatagaggacagttaaaagtctgaggtgaaaaaaggagttgataaaatggaggtggttagtttacattgtcaataaattgtcgtttctgttctatggcccgtggccagggagcagcaccttgaggcaggggacggggtgcgctccccgtgactgctcgctgtggctccgtgggtctggagcgccccgctcagtgctgctggccgccgggtcggttggctgggctggcggccccgaccgctgggggcaatccctccgggtggtgagttcgagagccaaaccaccagtgtcattcttctgttccctctccttcccccgccccaggtctggcaccgagacaggtgagtcattgcgctgtgtgtgtgttgggctgttgcacgctggag

SEQ ID NO: 6039 - DNA, 551 bp, Canis familiaris
tagaattgactgacttactgggattttaagagacaaaacggaagctatgccggctttattaaaccctttagtctttgctcacgaggagacgtggggcagggggtctgaggtgttggatttaggtccctttggctatttacttgggaactgtaggggctgaattactatgaagttgaatagaaaacactccaataagacttgagaaatgtctataagactcttaaaattttacccccaagaaaaatttcaacacgtattacaaaagtccaatcatagtaacctgtgttaacttatatgtttgttttgttgttttggtttgttttttgttttgttgtgtttgtctcttctccagaggctgaggctaaattcttatattttataagatttctcttattttatgggtaatatttgatagtcaaaaggctaaggcaagttgcttatattatataagatttcttgtctctgcaaaatctattagttctaaaatatcagaaagatattttatttggagcagcaaatgaaaactttttttttttttttttttttttttt

SEQ ID NO: 6040 - DNA, 219 bp, Canis familiaris
gatgttcaatcatctctcatatctcaagtgagtcatctcaggtgagacccccacctatcctctccgaacgttgttccatctatagagtacccttttattgtttggttggttacgttcccccattttaaggaaacttgccttagactattcctaatagacaaacacttactgtttttttttttttttttttttttttttttttttttttttttttttttt

SEQ ID NO: 6041 - DNA, 517 bp, Canis familiaris
tagaacagtaaccatgttatgagcaaatcctaacaattagttcagagtgtggttgcacttggcagagaaccacttcctattcaactgtgttgactgaacttggtttagtcagttgttttggcaggcagtagaaattgttttacgcatattcctactgaatcaggaaactggagtcttctatatttaggaaatcacgcagactaaggccttgccatcctgtaataaataaaagataaaaaggttattttgtcctaaggtcctaaccaaggttatccaaggggagccttgtgccctagatccccttagatcagcaaacttcaatttactcagtggctaaaaatcatcataacagaattttactggtaaaatgagaaagcctactcctgtagttttgaattgctgccaaacagaggtgtgattgttattaagagatctttgatgtttttataccttaatagagtcttccaaagagattatttttaaagaaatttgaattttttttttttttttttttttt

SEQ ID NO: 6042 - DNA, 605 bp, Canis familiaris
ccggtaaaggtgaggttgggttacgcaccttggctgagttaagcacaactaagtacaactctctgcaccagctgttaggagttaaacaatctcctgcgaaaggataccaggtgaaagtcccatgacatagtatttcagcaattgaaagatcttaaaatcaaaaagagaattagtagagagcacccacacccgcccaacccacaccactccaaaatgaccaactcaaccttaaaagaggttagtataaaatggtttttctgtaaaaatttgttgtgtttttgtcagttaaaccaagcaaatcaaaagctatatctgtcaggtaaaaaaaaaattctgccgaaacccctttggttagagacaagcaataatcagtctaaaggatagaaactaactaaggttataaacaataaaacatagagaagcttttgccagagtgtttctctggtaaagtatttctaaagttggctggtttttacctgtaagaaagaacaaagtgtgactagtcatccaacaggagagatgtttaagcctaaggtttttaagtctgaacagtaacaagcaggataggaatttttcagttattttggataatgatgttttttttt

SEQ ID NO: 6043 - DNA, 599 bp, Canis familiaris
ggtccctccaggcctactggagggctcctacctaactgcactgatctaaacaagcccgatggactgaagtcaacaaaatccccttctctgtgtaaaatcgcagtgctgtagcacagactcggaagagcaagagctggacagaataccaagcttcacgatagtttttgatttcataccaaaggttttgctcctgcgctaaacacacaccgccgctgattcgaggggggaggatacaatttctgcgtggccacccgttccctgacgggcaggacccccccccttggaccttaaaggtatacagcaggaagtgtgttggggccaatggtgggcaaagagtgcaacctgtgccaacagaaacgactcactgtatccagttcaggtgacggggtctttgaccgaaaagacaaaagagacaaagcaaaacaccacactcagagttccgatgcgaccgccccttgactatctcaggtcccgccgccagcagggtctggtcagagggaaacaaggactctacagagaaggagaaattagctgagaggtcgagaaaattttattttctgtagtaagcgagattttttttttttttttttttttttttt

SEQ ID NO: 6044 - DNA, 564 bp, Canis familiaris
caaaaatacgatactgttgataaaaacaaagctggcaacaacagtgccaaaatcctcacctgccatgccccatcaccagttcaagggggaagcagtccaccatccggctaatgaccacaattccctaatgttgagccacatcacattctccactgaccaccatgccaccggtgatacattaattcaagtgcccccagctatggaaattattgttgggatttacgccttctttattcaactttgccaattaactaatcttacacgcaatggcgatataaaatcgcataatctggccaccgttatcatagtgtctacaaaatcttacaccgtaggggatatcggtacatccaaaaaatatgcctcaggtaaactcggtaatctctcggattaataaggcacatctaaccactacgagagcaaccaccgtctgcatatcatcctcaactctactttcctcctcaacggtaaagttgccgcagctagtataagtctcaaagaagtagatgacaggcataacaagatagatacataaataagtagtggtaccatttttttttttttttt

SEQ ID NO: 6045 - DNA, 570 bp, Canis familiaris
ggatagattccgtatactgtagcactaggagagggttttgcaactggactcttgatgcggtacatgctgcctctctaccatatgtgtaacttatctcggcgtagttgcccaaatttagaatagttagagggttttgtaaataactgttcacactccaataattgctcctgatgtatccctctctggagtgctgcctatatcaagatgctatagctggtgtttaaaatgctggcggacttgccaacaatgtctcctgtttcacctctgttgttgggttaccagaactgatccacctgacagttgattgactcctataggtacaagtccaatgtggagtagtttgtgatattttcagagtatctacgtagtatggttcaagactccctctggtttaaagtgtggggatctagaccagcaaatctgtttggttacattgcagacacacaagaactgataagataacaaccgagccatgctcttgtcagtatctcttagtgatcaagtatttatttggtgaggtttatatttcttatatttttttttatttttacttatttttttttttgttct

SEQ ID NO: 6046 - DNA, 414 bp, Canis familiaris
cgcccctagaagcaagggcaacctctccgcccccccctcccttgtcgggccagtctgccgtggtgcagtttacccaggtagtcgacaacttctttgatatctttgccttgatcccctaagagggcatctctgcccggtggtaacacttcgtggtcggctgccccttccaggtcaacctgccagttgtcctgcccctaaaagtctcttttgtagtgaaaagtagaacatacagctgttgccagaaccagtatagagggggagcgggctgggtgtccactagagcctttacagcttttctggcctccagtgccaaagggcaccccggtccagttatttgccgtcgaagttcccggttttttttttttttttttttttttttttttttttttttttttttttttttttttttttttt

SEQ ID NO: 6047 - DNA, 629 bp, Canis familiaris
  misc_feature (222)..(222): n comprises a, c, g, or t, or includes no nucleotide
ctggcgtacaaataaacgttgaacatgctaaaaggtactattagttggttgaggaccctatgccaaagccctcttgtgtgagtctcctacagaactctcactcctctgggtgactggcacttagatctactataaactaagttccagagctgaggtaggttacagcaaagaagggagagtaggtaggtctgcagcaaagcccccttagcttagccttgaagngaacaaacttaaggataggagttctgagcactagaggtcggaggtattctccagcaaacccttatctattgttatagtgaggtagtttagttgtagcagcctgaaaagggtactctcttcgtgtttttatagttcaagagtctaaaaagtatgcaaggtttgcttcaagcagtatcaagcaagctaagcaataagactaactaggctgaaagacatgaaatatggctgacttataaactaaagtagagtctaggtttcagcaaagaatacagaattacacaatatcataaattgatgttatcaaaataggtttcctttttaagattactagatttaatataaaataaagtataattttaaaacgtagtccccttttttttttttttttttttttttttttttttttt

SEQ ID NO: 6048 - DNA, 454 bp, Canis familiaris
gagtccctggaactgccctggggccagagggaggccccagtctcttggtcgagaaatgtcccctggtgagccccctggcccgggctgcatagactgcgaccagaaagactcggaggctccagacactagggcctaaaatctctctgacccctttgggtgcagagtgattaagcagactcaagaagggggcccgtgaggggagcaactgcccctccctagagacaccctgttcataaaaaggggacagtctggagggccagggtggttgtagaaatctaaaaatttggatctcaggataaatataagcttgcttccaaaagatcattgggttcgaaaagatatgaatatagatctgaaataagtataacttatttgaggaattaaatagataatttttttttttttttttttttttttttttttttttttttttttttttttttttttttttttt

SEQ ID NO: 6049 - DNA, 398 bp, Canis familiaris
agcacatcgtgcaacttagctggccagcgcctttcagcgtgatcgtgcagctgtagcagcggctctggctcgtggcccaggcgtgggctggcgagacaggggggcccagcctctccggctacagggcccggcccctgccacagcagtgcctgctgatccagttcccggacacggcccagtcccctccttggtatcctactaagtagaggagggcgctccccactctcccttaacgtggttgcgtcgggttacggccacctgcaccacaacagagttgtttgccttgttgcctattgtggcctctcggggagagggagcagcagagatttatgttcagcagtgacggtttttttttttttttttttttttttttttatttttttttttttttttttttt

SEQ ID NO: 6050 - DNA, 102 bp, Canis familiaris
gggagtgactctttcaccctggtgtgggtgtagggtgcctatctgtatggggtgcacagcccttgccatagttcatgaatagcaccaatgtccttattttgg

SEQ ID NO: 6051 - DNA, 475 bp, Canis familiaris
  misc_feature (226)..(226): n comprises a, c, g, or t, or includes no nucleotide
ctggttatgctcccccggtggtctcaatcccaaggttgggtcaacttaaccaaggtttatgttgtgggtctccaacaaacttacccagttcacctgaaggtggaactctttagtggtttaatttagttattagtgtcatccaaatgacctaattaccgttaaaggtgtaagttgacctccagaaatatttttattattgcaaccggttaggttgccattttacttnacctcccagtaaggactggaagaagacttttcttgccaatacgggtaccaagggaggcgctgaggaaatgcgccagccaactgccctgggcgagtaccaggtgtccagggtacgttaccctcgactggcacccagctaggtgccagcaacacccacagccagagacacagctacacacacacacaaagagagtcatactatttatttttaatttttttttttttttttttttttttttttttttttttt

SEQ ID NO: 6052 - DNA, 405 bp, Canis familiaris
  misc_feature (61)..(61): n comprises a, c, g, or t, or includes no nucleotide
ttgcgacaagaagcagggttgtgaggggcgtgcatggccggaggaaggctgcccgtgctcncgggccaccacacctgggcgcgggtacgccctggccaccaaccagcggctgcgccccctccccctcttctctatgccccgagcagaagaccaaaggcaaggagagatagcaaagccaagggattttaggccgaacaaaagtcttaacttgagtcagaaaagaaatcatattccaagttttctttttcagattgttttgtaaccttagtacgagcagaggtaaaataatccttgtagaaatctccacccaaaatccagactaaaagtggttcagacgttacaacacccaattaggcaagatgacaaaccatagactattatttgcttctaaaacacagttttttt

SEQ ID NO: 6053 - DNA, 578 bp, Canis familiaris
gggggaccggggctctcgggataaaatggggctctacagtggtcagtaaaatttatggcaaattttattttggccttataatgctattcgcatattaacatcattttggcaactgtgaggctgttgaacagcaatagacaatgatggaactgttggcagctggttggactgtctatttttctggatgatgctcaaaacccttgtttttttgttgcctttatttagggttttgttctaggtccactaaactacataaaatgacattatcctaagattctaaaaaaatcaccgccttatataaccctgatttatctatatgtttgtgatggtggtcacttgacatgttttacaattaagaaatagaaaattgtttcgtttttttttcatctaataaaaagatttgataaataagtgactaagtgacaagagctacttgcgtaagagtatagtccaggaacagatgagaggttcaatggtctttatttgtgaaagaagaatagcttacaaatcaagcttttcacctggtgttgtgttatatatcattttactattattttagagaatccagcttttttttt

SEQ ID NO: 6054 - DNA, 624 bp, Canis familiaris
tgtaagaagatctggcaatgtgcaagcacagggtcttggcatcagagcaccagtgataagacatttggaggtttgcgctttgtctgcgagaggggaacaggtggaggtctgctgacagaattactacaagaatttgtgtaagtatagcagcagtttgtgataaatcacacaggtgtctatacagttgcagttctaagccaattggttaaggttgatccactaaaactcctagtgcaagatatagttgcctcaagattaggaaaatgtgacttcaggtgtttgatctaaattgtagtaaaaggtaaataattttacacaaaggtttacaacatcctaatcacatgtcctttagttttgtggaatagtgtgttaaatcttagtttaaccggtctaattacaggtagaccctctaactatcacagagcaagtgcgtaaagatgttgttagaaaactggcaggttattaaacctttcttcactgtgtacaaagaccaacgtggggctgttttcgaaaagattgagttggtgtaggtggacgacaatttcctgtttgcatcagttatattgttcacaatctgacaatgtagaataattttttatatttatatacagttaagattttttt

SEQ ID NO: 6055 - DNA, 587 bp, Canis familiaris
  misc_feature (47)..(47): n comprises a, c, g, or t, or includes no nucleotide
ctctgatggaacataactccttttaaagtggtcacatcgaaccccanaaggaaacaggcatcttacatggaaggtggtatcctttatccaattaataaagaaagaaaaaatttgattacaccttattttttacacatagcccttagaggggcaagttcactgttcacagtttacttgtgactctaccacatcctgcagtgcctgcctggagcacccttttatataattcatcaaaattctagaaaacaacaccatatctggagtgcagtgtgttctcaaagctctgaaaggcctagatcgtttgagctcagatccaaaagtctttgtgtctggtaaactatgtggatagggaagggaactaaaaacaactgttgttgtacaactgttagctcatcttcttgttttgctataataagtaggagatttgcacctctaacttgcacggcgtccctttgaaaagcttgggggactttctacagtagttgtgtttgtataaagtgtcatacacatccatgatttatttgatttttttaattttttttttttttttttttttttttttttttttttttttttttttttttttt

SEQ ID NO: 6056 - DNA, 250 bp, Canis familiaris
ggaggggtttcagtggcccggctggtcgtctgtgaaccttgaggaagtggctttgcctccggtgcacccccacctcccctccccagccccccatcaagaccactaaccacagccttgatcagctctgggtccccctcaggtggaccaccccggggtcaggcccctacctgctgccctgggtccttgtgtattagagtttagagtcagaggtcctttggcttatttttccacaaaaatggttttttttttt

SEQ ID NO: 6057 - DNA, 662 bp, Canis familiaris
caagccccacaaggagcccccgacgacgctacctggacgctcctggacgggaagggcctgccaggccccagctaaaacacagggggcctgtggaagtttgggtctgtagctggacctcagggctcggaaagcaagggccctctgaagtccaagaggccaccgaatcgtgccccaccccctgcccagactagagccaagggcaaccccagccaccctacactgcctccggggctgggtcccaccatctcatctgtggggcccgggggtcccccacaccccccatgagccaacccccccaagtacacctgtgctgcaaggccctgggtggggggagagggcgcagcaatgcagtaccaacccagtccctgtggtttccacataaataaataatgcaaaagaaatctcccaggtcaagtccccaaccacctggggacaagggtgggggtgccctgggcccaagagtccccacccaccaaccaccttacccctgaaagataaatgcagcctttattgtacccctcaggcaccccaaaaacacaggggggactgggagcagacaccaccccacagaaatctacaccccacctccccgcagatacgctataagcagtgaaaacataaaaagcttttatttgagtaggtttcacttttttttttttttt

SEQ ID NO: 6058 - DNA, 558 bp, Canis familiaris
  misc_feature (32)..(32): n comprises a, c, g, or t, or includes no nucleotide
  misc_feature (168)..(169): n comprises a, c, g, or t, or includes no nucleotide
  misc_feature (241)..(241): n comprises a, c, g, or t, or includes no nucleotide
  misc_feature (271)..(272): n comprises a, c, g, or t, or includes no nucleotide
tggaggtgatttgtaggtgctgccgggtaatnagacagacatccagggccagagagggttcaatccggacaccttggcttatcagtgttgcgctccatttgattagagccgggggcacgcgatcctgtctcgtgcccccctgttctctcctggccccttggttcaggnnttccggcaactcaagtccttggccctagttgtttgtaggtcatagagggctcaggccttaagacgcgtggcntaggccccagggcgcaggccgggccaggcnnaggtcaactacaggtccaagcagattacccttgacctttaccagttagtgtcctctccacctccacagccctgggtatagaaggtgtcagatgtggtctgacgttgtggggggtcccgacctaccaagcagaccaaaccgatcccagactcagccctccggccaactaacaacaaacccctgtgttaagaccttctgcccctttcctagagcaccggttagtgagatttattttcagggccaaggcaagggttttttttttttttttttttttttttttttttttt

SEQ ID NO: 6059 - DNA, 646 bp, Canis familiaris
gtgggtgcctaacacatgctggggtcttcagcactaaaacacatgctagaaccctagggttgacatgaaagcagaattacaggcagtgttacagtgaacagagccaatgtgtcttaaagctcaaatcctttaagagccagggtctgccgatagtaaaaaccctcctttatgcatagctttctgtttccttaactttggaggctgcctagctaatgtatttttgagtttggaatggctgctgcttagccaaagttaggaaaacagatgcattaacacaaggtgaaagaccagcaaaacaacaaacagctgagcatggagaaaactgaaaccctgatgataagcaaaagtgaatatgatattccagtgaataaccacagcacagtctaagaagcagttgttcatgcactaagaatgcctgtagaaagtttggaagtgggaggtgaggaaaggctaaacagaaaatttatttctaaatttcacactgactgagcatagccagcgctaggtccaatgactcagggtagtttctccctgtaacatggccaactagttacaaagtaacttagtgacaaatacatttatttattttgtccaagattctgtttcttctcttggttctaaagctctttatttttttttttttttt

SEQ ID NO: 6060 - DNA, 562 bp, Canis familiaris
atgttgctgacgctatgaattcctaggtcacagacaaaataagtctagtttttgtttgattgactgtttgatgacattgtgatgttaggatgaagccttgctcaggccgggtgaggggctagggatgaatgagaaattagggatctgttaaaatgaaggggttgcagatcttgaacctgtgtctgtagtaggagtatgaagctcttctcagagttatagcaattagcctcagttcagatctaatttaggaatcttaggctttaaaccatatataaatgcatattatttttaaataaggggtgggtctttttgggggtggtggggtttttaaataatttatgacattgtgtggagtggttcaaaacattttagatgagtttatatacatcctaaaccatcccttaacaatagtttccctttgctggtttaataaggttttgctacagaatcacaaatcagttcagatcccccacatccttcagaatgtattttggtgtggtggctacatagataaaggttatttaagcctcagtttctccctttttttttttttttttttttt

SEQ ID NO: 6061 - DNA, 612 bp, Canis familiaris
acaatttgagtccggacaaagagaaagtgtaactagaagacctacacacacaccagtacggagtctgactcatgcaagaccagtgctgtataaattaaaagcattctcactgcacagcccaccccagcccccggcaccccacctctctaaccacagtttattggaaacatatatctacaactgccatatatttataaagaactcatagcgacaacagagatatatatatatatatatatatatatatatagtaaatagtatatatagtagtaaacagctatattatatctcaaagataaacacagaaaaatatatagattttctcttgcctgtgtttttatagtgtgtataactatctatacattataacaacaaccccaaaaaattaaaattataaagaatacctaaattaaataagggagcatcagaaataccgattattaagagggggtttttgtataattctactctacaaagacacatgatctgaaaaacgtgtataaccgatgatctataaataaaaatttcttcttctttgtttatctgtatatacaattttttttttttgctaaaagataatttgttaaattaacagttttttttttttttttt

SEQ ID NO: 6062 - DNA, 582 bp, Canis familiaris
ggggtgggggccgcgctagcgcccccgcgcgcgggcactgatcgcggtctccaggagcaggggctgctgcaggctgccgcagaagtcgaggcagtggtccaacagcaagtgcagcgcctccagcacgcgctgctggcacgcagaggtcgcctgcaccgagaacaggcacaagtgcgacaactcaaacaccacgtggcgcgtgtagcgcacctgcaagcgcaagcggctcaatgtggctgcgtagcggaagcgctgccgcaagcgcaccgccaattagcgcaccagcgagacctagacgtagggcgtcttcggcgggcacacgccgttgcaaggctcgacgggctccgacagcggcactaccaagtgcgcggactggcggggcggcccctgcgcgccagggggcggaggcggtgggttgggctctggcaccgcggcgttggcgtccgacgctgctccccccgttcccccggagccgcccgcgatgcagcactggaacgcgatgtcgggcgccacgggcgaggcagccgcaggggcctgaacgcctggtggcgcggcgcccgctgccgagcccgtgggaccacc

SEQ ID NO: 6063 - DNA, 572 bp, Canis familiaris
gaagccgtattggacccctgtattgctagagtgtagtttattagtttgcgagtttagacttgtcatcactaatcaatctaaagaaaaaatattacatggtcaatgggatcgtatggattatgttccctagaaaaacctttgctcagaaaacttaaaaaattcggtgtatttagctcagactgccctacagtctcactcatctaaagcattgagcaatgattctctagttttagtagtgtatgttagcctgtgcagtgcttgcggttacctctgtgtagtgtaagtgaaccaagtcgccagttgagaggaccgaggtgtgtcgactcctctactccctggtgcaagacagatccccttccagtggttactgacagctaaaatacttgtcaccttggtaaagatagctctaatgctaaagtgttgctcaggaaccattaattattagaacatttcaatgtgccatatacaggtcaataatgtttctaatgagaagattttctaaataacgatgtcatcaaattatttgtcccctgtacataatcccttttttttttttttttttttttttattt

SEQ ID NO: 6064 - DNA, 494 bp, Canis familiaris
tagagtggttttaccaaggaggatgttcctaaagtctacaagtcatgaattggtatctctttccattttaatggagtaatttaagagatgttcaattatagatatggcgatctatataatgattagatttgcaggggtttccagttattttactgaggtaagatacttatactgatactcacaatactatatcatagaaaaaaaaaatatagcaggtgaaaatagattagagtcctaattgctgtgctttttttatttttacatatgcacttattgttaaaattaatttcagttttgttggtggagccaggcaggcactgactgaattgctacagccaactgcactgtactagtaccctgggaccatggtacttgcccctagaagggaaaccatcaataaggggtgccagcaacaccaacacccacagcctaacccccagcactagcacacaggcactcacgcaagaacgctcagacacacacactttatttta

SEQ ID NO: 6065 - DNA, 631 bp, Canis familiaris
ggtgtgctacagactagcccggggtcagcagttaacaggtatcgttaaagtcgttgggacatactacaaattacggaactggacagactacaccatctctgtctgttgtttgccctacaaaacccaagtgttccgaagcttgagcagtgtgctagtgatacatagtagtataagtggcagtcgagcagctgttaatccctgttatcctaaaggccttctactacatcataacacatttgggtacctcctcgtgagtgctgtgagcctggtagtctgcctaggtcttagcatgcttgttcgcaacagtgtagtaagtccttcagtcaaagtcgaacttacgctcccgcctggcagactactcccttgtgaagtaagtttactacacaggagctgctgcacaggtaattagttttcctctgaaactaccactgtattgtggatttgttgggtttaactgcccgcagtaaaataaaaatgcaatcagcagaccactactgttgtttaagaaggacctaagaaatttcatcatttgtctgcctttagaaagatttaatacaatcttatttctgcaatctattgtttttttttttttttttttttttttttttttttttttttttttttttttttt

SEQ ID NO: 6066 - DNA, 165 bp, Canis familiaris
cagggtgcctacggtgctaaacactttggtgcggtgcttgtcttcccattcctgatctgcaggggtgtgttcatcgctggctgcaccgggcagtagtgcactacccctgtgcacagcccgtctctgcgggcgtggtgaggctccaaagtccagcaggtttaggtc

SEQ ID NO: 6067 - DNA, 510 bp, Canis familiaris
accccgtgtttcgtgttgctggttctggtgctggccgcccacgctgctgcccgggtgccgcgagggccaggtgcataaagcgacgcggacagcgggggccccggggtcgccgtagtctggccggcaccaggcgcaacgcccccgaccgcgccgtcgtctcccccggcacccctccgtggtggccccaggctgcgaccgggccgcggaccagcctccggggtggcccggacccctctccgggtgccgctggccgccctccgcccgctcgcgtggccgctgcctggcaagatcccacaacccagtcgggtgcctgagtcacacggtccagtggtaccaaagtaaacaaaacaaattgggtgtaaatagcgggggcggggggggccgggcacgagagcggcctggagagctgcggcggccgagggctcgggttgtgcggccagcggtagcctgcaaaccggggtctgggccccgccgagaatgagctttattttgtatttgtgtatttttttt

SEQ ID NO: 6068 - DNA, 628 bp, Canis familiaris
catgagcagggcctgatgagccgaccagaactgcaccagcagaggcacccgacctcgacaaccccacacctagctcgactagcttgcttgtcggtgtcccatgtgggaaagaatggagaacctttgcctatgtttgatgtgacccattagtgtcctgacccctccggcggcggctcaacattgcttgatgcactcatgtaaaggttgtggaaggtttgtttggatgaggtgctgcccaagggtgtttgcctaacacccggggccccagctacaccagtgcaatatgacttgatgccactttgtcccacttcggacaggaccaaggctagtaaccaaaaacttatatcgaaaataaaaaagagctccacagcagtactagagttagtttgtggttctgcaggttgtgcagatcactcaaatcggtcagacagaccccaatcttcttttcagggaggaccagtcccgtcaggccatcctgctattactgaggttgcactaaaggggtgtttccggcaaattcagaaattttgactcagcaactcacacaattaacttcttggtttggttagtcatagccttattttcgaaaacacccaattttttttttttttttttttttttttttttg

SEQ ID NO: 6069 - DNA, 659 bp, Canis familiaris
gctctagccttcggtccccgtggccccaagcacgcggcagctctaccggaagccccgccacgccgcccgccaggcccccggtgcgcgcccagcaccgccgcggcccttgacctctcgcgtaccacccggaccgcgcacccgccggccgtctcccccgcgcgccccgcgcgccccagcccgggccccgctctctctttgccggggcccccccgctgccccctggcccctgccgccgcagcccaactccagaacccgggtttggcagcgacaccgtgccgtggcttggccgagggccgggctggtgggtgccggggacccgccggggtggccgcggtggcacgccgggccggccggtgcccccgccgcccgcgtgccgacacggtgcccgtggcacaccaaggcgtgcacacgccagccacgaccaccggcacccgcttgacaatttctcactctcgccgggtgaactgcacatatttaccagcaccacaaaccctatactattaattttttttcctgatggggtggaaaattcaaaataagcgtaaacaggtgaagggcagcggtgctatataattgaaatcgcaatagcgcacacggcggggtgggaccaaattgtttatttttacctacaattataccgctttttttttttttttttt

SEQ ID NO: 6070 - DNA, 627 bp, Canis familiaris
actctgccaactagatcctctgctcctctgcccgagggtagttcattcagttcagattctgcacaaacacccagcaaaaaatggtaggcagcccaaaaacatttgtggcattcgaatctttccacatttgttgtcggctggtttaagctcatgttgtagaaaaggatccatctaccagccccagtcctacccggcgcggcagccccacgaagcaccagacccttgtcatacaacccagtagctagcctgtgccacaggatccgaggctgtctccctggtctgctggttgttgttttctttgttagtccctgcaaaatgcttctacggttgtttttaactcgtgcgtgactatctcgagcaggtcgtggctggcttagtaaaggggtgctagctccgagccgtggagtaccggcactaggccgtgcgggtccagtggcacgagttgtgggtctgcggcacggtgccacctcggatcctgcaccacacggggcagctgtaactcgtggtgcggcagcgtcaacgggtgtaggtgttggccctcccgttgccaggatggagacgagccaccagcaccccttcgccaagggtcccatcaacagcggccgtcctaggccagggcctttgtgc

SEQ ID NO: 6071 - DNA, 628 bp, Canis familiaris
ataaatggagtctcatatgttcttgaaagatcctttttgctggcaggatccggaccggttaacccgggtagccgccgctgcctagttggacgtgcagagctgaaactgagggatcttgtaaatccccggtctaggctggcgcatcgcctggtccgtcgggttggacaacctgaaacaattcgcttttagcgtgacggccaaccaaaccttgtggttcccacggctgtacttcaggtcagaccacatctgttgtttgctctttttgggtctgacggttgtttaactgttgttttgttcccgccgagctgactttaacctgtgggcctactcaggggctacacaagcagtatattaggcattgtggttactgtttccagttgaatggttggcacttcgtgttctggcctactgggcagccttggttgcttttttggcattgcttgctacatttttgtctgcttaggcagcagcattggcaccctctttggctgctccattgcttttgtaagagttgccagagttggaaaccgctccccgtgaaggaggttttcgcattgaaaatgaggtactgtaaaaatttatttctacagtcacattcattttttttttttttttttttttttttttt

SEQ ID NO: 6072 - DNA, 336 bp, Canis familiaris
ctccaggcacaacttgaacacctaaaaggggtgtttgcctcaatagaggatcgggcccccttaaccccgctctcccaagttgtggtaagggagcccttgctgtccttgtggtagcaaggtctagtttggactgcccgtaactgggcaacactgccttgagggtcatcgtcttgttagtgaggttgtttatggtgccagcctgactacctacagttccactccgagaacagaaagactccaccaggtgcacttctctaactcaggtttcctaatagaatctgctcctgagcattatttagtgctgacatcgagtttttttttttttttttttttttg

SEQ ID NO: 6073 - DNA, 612 bp, Canis familiaris
aattggacccttgtcctggggagccgccggcgaccggtgtctttcgtcctgccggccaccccctgctgggggctgtcccttgcccctgcccttgccattgccactggagcctctgagcttggcacagatagccatagtagcactggtctctgtagttcactgcaacttagccttagtctaatacgtataatactttgttgtaccaacaggcaggaggtcgggacgtcatcgtggcttgctgggccagaaccccttcttcatagagtccttgtacagtggcgcgctgtgtcacagtcgctcgggagttggtgcacctggctgggttggggtctaacggggcacacacacagtacctatgcgtgctgaagcaaccaacaccttggccatgtgaacaacaggctccaacccctaggtggtctaagttttgcagggaaggggtcttggtgagactcacctatttcgtaccattttggatgccataaccatggtgccctggtgggcttttcttcctccatcattgtaaataaataagataaatttccaggagtgtggtctggcgtgggcctccctgtccaagaaggcacagactctgctgctgcccgcacgcactcc

SEQ ID NO: 6074 - DNA, 600 bp, Canis familiaris
ttcactggtaacggctttgtttgctaggctttggggtgagggtggtggtggttggtgctgtggttgtgtgtgtgtgtcaccattgcggtcagctcttcctgcgaggtgcccttctattggcaactaaaattagtcccagtgtactagtcagtgcgtttacttgtgactgtagaccattccttaagtacctccattggtaacacagaagacaccaggtgatggatgaccaccaaagatacctgcctcaaacccataacaagtttagaggtacacacaacacatctctaaaaatccacctagtaaaggtactgttttggcagcaaaacaaaaagaacctcaacactgtaacttccaagtgttgcacaacatggtagcttaagacaagcactgaacaccttgttgtttgttgcttcagtccagcaagaacagcaaaaaagccattaatatttgtttaataaaaggttgcagttgcagtagaatttaaagtttccggagcaaaatgtagaaggagaaagagttaacaaatccaaaagaacctttcttgttgtcatttatttatgcttgataggtagtctttttttttttttttttttttttttt

SEQ ID NO: 6075 - DNA, 155 bp, Canis familiaris
tctgaccctatgaccccaagggcccatgctgttatgccccaaaccctaaatgaagcaaaagatgtggtggttggggcggggcctgggtatgcagactgactcctgcccaatttatttgctgcgggtagctttttttttttttttttttttttttt

SEQ ID NO: 6076 - DNA, 479 bp, Canis familiaris
  misc_feature (11)..(11): n comprises a, c, g, or t, or includes no nucleotide
caacgtggcgnccgtggagccctagcagagcccgccgcagcccaggtcgacgccgctctcgggcgccaaccagcactgcccctccttgcactagcgcacgaaggtgggctcctagctgctcctgcgccagcaggtctgcagcccgcccgccgtgcagctcggcgcgcaggtcgcccactcgctgcagggcttcagcgccaggcgcgaattcggccgcgagcaggtccaggaccaggtgcacaacgccgccttgggcagcccccgccagggcgagccggccccgcccacagtggcgccctggccgcctgtgggccgccagccccccgtcgcaacgcccgcgctgttggccgtggagcggcgggtgcaggcccgcagccagttggaggcccgggtgtagctctgccagcgcaccgtcgcgcacatccgccagacgcaggccctgctccagcggctccgcgacaacaggcagccgctcttct

SEQ ID NO: 6077 - DNA, 501 bp, Canis familiaris
gccttgcttgaataatgttttttggaggaacacaaccccctttgaggttgcccttgaactactttaattagagttggttaagcaaccggtagtcaagtccctcttgtggcataacctctgtacacaggctgaggtggttgacacaaaattgttttatgaaatttctgaaagaattttaagaaccgacaacaaactaaacagattctgaagtatacaggcagaccaaaaatattagctgtgagtgttcaaacccatccgagacagtatttagaagacctggaacctcaagccttgttagagaagaccttttagccagaaatgaaaaatttgtaggttcacctcccaaagcaaggaaaattgatagataggttagaatagtatggtctatgatgatgaggaggactgtctttaggtttaggaggggtgtctttttatatctagagtttatttcactgataaaattatttgatttttttttttttttttttttttttttttttt

SEQ ID NO: 6078 - DNA, 600 bp, Canis familiaris
ggaagaattcaatatgtcaatttcatattactagtatttattttgaaacatctaagtatcttacccctacactcatcctctaactttgtgttctagtggaagaccttggcaaaatcaaaagtcagtgtgggtgcatctgtaatattttttacttgctttctcacttaatagccaggacttttttaaatctcagagcaagtttccaaaaggtaaacattttctctgctcaggaatccttggtcagctttgatttggtccaccagtaagttgaccagtgtttaatttgggtcattctgttctttgtagatcaaggtgttctgtatatcatgcctttaaggactggactttggctgtttcctaaggaaaaaatgtagataaatggttgttacttagagattataaacctcttattagcaccttatattatgatgtcattctgctgaagattgcaagactcagcctggatccctaggtggaccagactgccttaatttgattctgcttcctagcttgcacaaagtgacatattcaaaagaaattaaaatgccaaaatctaaaaaaaaaaaaaaaaaaaaaaaaaaaaaaaaaaaaaaaaaaaaa

SEQ ID NO: 6079 - DNA, 586 bp, Canis familiaris
aggaaggagttcaggaagaatttgtccacctctcttatttccatgattaagggtgaaacatcttggggactataagaaagccctctttgatggctctgtggaggtagaagatgacttgaggcatcagccagagagagatcttatggctgtgcctgccaccgccacttgcgaccgttcctgtcacagcttgcgtgcactttgtgtatatgccagtgcttgacacattgccttatgtcacgtagcgtgcgtaataaccggaagcatacatgctgcagaataaacataacggtgcttctttcttaatgttcaattaaggtctttctctttgtctgttgtagtactaaagtgtacttacgttattaaagtctaaagtctgggtcatttagattttcttttaaaagatcagactgcttttagcctttttaaaaaaacttcattatattaaattgaaaactgtatttccttaatcggaatcttagccttaaaattatgaaatcctggaagtgttattaatcaagtttgctactaaattaaacctgaaaaattatggtggttgcattcaaaagattagtaagaaataaacatt

SEQ ID NO: 6080 - DNA, 670 bp, Canis familiaris
tgggtcattacaatagaaatctttcaaacagctcaatgcctggatgggaacctgatcggtagaggtataggggaggatgtcttcgtggctgacatagtccaggcctgggatggcgtaaagggcccggctgtcatcatggttagccaagaaagtcacagcttctgtctgagatctctgagatatatgtggacagtctcgggcatcaatcagcacctgatagtaagtgtgagttttgcctttcacctccttagaaccatggccagcaggattctctgctttctccggagctgcagaagccacatcccggtcatatagtctggcctgcgcagggaaacaggcacgacaccatcggtagccagaaatacacatatgaaggaagagctgcccggtctcatattttccattctgttttggcacctcaaatacaccaaccgtctccaaaactttgccctctggtcggtttcgggacgagaggtgccatccgcgtcgatcagctgctcgaccgctggacgggaaggccaccagcatccacctgcacacacagagtggcatcggccaccgagccgccggttagcgagcgggcccacacagcggctgacccacggccagggcccgaccgggccacgcagcccgcaatgtcccgcggagcgcccgctcggcggccgacact

SEQ ID NO: 6081 - DNA, 624 bp, Canis familiaris
cctgggttttctctccattatctgtgaagaaacctatttcttgctgtattcttaggccacaggtacattttgcctcaccctagaagttggttattccaaatgatcatttccttcctttgcttctctctacaggatggttgtgactttgtgtgccgctctaaaccccgaaatgtgcctgctgcgtatcgtggtgtgggggatgatcagctgggggaggagtcagaagaaagggatgatcatttattaccaatgtgattgcactttaaatgcccagctgcttcttcagtcccccaaaccaaagcatactcagccagatttcttaagcagtctccactccagtctctcatcccacccttaacattgctcttgcttttcagtttgctgttgatttgcattctcttctactagtagaactgccttcccttgattccctattttattgttcctctagagaggtacagttgtaggacagagataaatagggcctgtgcaaaagaggccatcacactatctcttgctatcagaaggtacaagtaggatagttacagtgaacaaaaagtgtggcaggctccctgacttttttaaacacattttcacaagtttttgagacactggatttcttta

SEQ ID NO: 6082 - DNA, 602 bp, Canis familiaris
tgacaatagacagatggatgaagaagctaagaaacaagtaaactatgaagagtgtaagtatgtgtagaaaatagttttccttgaattgcaccctttttctccttaagagaattaaaaagataaagcaactgccataccacttgtgggtgacatcaaccacaaatagcaaggtagtttctgaaacatgaagctcatctcccctccccctgaccaagatctggataaggtcctagccaccaggggtctagtaaagaacttgaaacattcgctgagagttcatggataattaattcaaaagtcctaccaacttcaactatgcaaatcctattcattttaccaaagggttactctgggcccactacattcacggccctgtgctaagtatctggagaacgtgtgttagtcgcagtccttagtgagtgtaaaaaaaattatgtgttctgggggttgaataggtgagggtgtgggaactgtggggtagaggaggatgagacagctaagagggaacttcatcccagtgcaaatccacaggccatctctgcactctccccctcatcaaaaagcaaaaaaaaaaaaaaaaaaaaacaaacaaaaaaaaaaag

SEQ ID NO: 6083 - DNA, 581 bp, Canis familiaris
gtaaaaacaattttttggtaaaatgtgatgaagatggatttcacaaatagacaaaagagaagaaaactaccttctgatcctgtattttgaaagattgatgtttgcattttatttcagtaaacaattgctaaagacatcacactagaaacatatgcaatgtttttattacatacttctactgaacattacggaattctttgggttctttgtaatttaatgaataggtctaaaaacttatgaccaatacttgttataacttagaggattttgttttactccaaataaggaatgaatttgcatttaaaatcttaatgaatgttttcaaaaatgaatagataacatagtactctaactaaagtctccaagttatgtattcataatattacatagtagtatgcttaggctttactatgtattagccttttgttggacttgtgtatgtattttactatatgggttttaatgataatggtgtatgactgctttgcatatgagtccttatgcattcagatgttaaaaataaagtggaatggtctcttgaacagaaaagaaaaaaaaaaagcaatgacaaaaaaaaaaaa

SEQ ID NO: 6084 - DNA, 614 bp, Canis familiaris
ctgagtaaggggcattcctgctaccgacccaggaggactggagagaggaagcgcaaatctgttcggggttgcattgtggatgccaatctcagtgttctcaatttggttattgtgaaaaaaggggagaaggatattcctggactcacggatactactgtgcctcgtcgcctggggcccgaaagagccagcagaatccgatagctttgttaatctgatcgaatagaagacgaatgtccgccagtaagtagttagaaagcccgctacaacaaacgaaggtagaggtaaagcctacgatacgcaccgcaccaccagcaagacagcggtcgtgttatctaccacggacggtcgctccctcaccaacaacacaatcgggcggcatagtcgctgttgaaagacacagcgtatcaagagaaaatatagaggaaggaggcgcgcagaaatagtgctaaactttgggcccaaggagaatgaaggaggccaaagaaaaacgccaggaacagattgccaagagacggaggctgtcctctctgagagcttctacctctaagtctgagtccagtcaaaaatgagattttctaagagtgacaaaataaataagatcagacaccaaaaaa

SEQ ID NO: 6085 - DNA, 584 bp, Canis familiaris
cagcgccacccgcagatgacacacgctctccgccacccaaccaaaccacaacgtgaattttgcaaacaggggaggaaaaaagaacccaaacttccaaggccctgctttttttcttaaaagtactttaaaaaggaaaatttgtttgtattttttatgttacattgttaaatttttgtacatattgttaggggtcagccatttttaatgatctcggatgaccaaaccagccttcggagcgttctctgtcctacttctgactttacttgtggtgtgaccatgttcattataatctcaaaggagaaaaaaaacccttgtaaaaaaagcaaaaacaacaacaaaaaaacaatcttattccgagcattccagtaacttttttgtgtatgtacttagctgtactataagtagttggtttgtatgagatggttaaaaaggccaaagataaaaggtttctttttttccttttttgtctatgaagttgctgtttattttttttggcctgtttgatgtatgtgtgaaacaatgttgtccaacaataaaccggaattttatttaaaaaaaaaaaaaaaaaaaaaaaaaaaaaaaaa

SEQ ID NO: 6086 - DNA, 648 bp, Canis familiaris
  misc_feature (162)..(162): n comprises a, c, g, or t, or includes no nucleotide
cagagcctcgtgcaagcaggactgctgcgggaggggaggcggggatgatgagatgatggagagcttgcggctgaggcctggagggtcccccgctcccgacacccgctcctggggccccagggcggtaaccccgtaccaggccacgtctgaggtgctggtacnctggacatcgcttcctgggcttctccgaccttcctgccactccttcttggatcccttcctgggcacctcccgctcccagcggatcgccctgaaagtcctatcagcagtttcactctgggtgctaagggctgccagacactggggactttcgacctaccaggccctgtgccacgtgccttcaactcgagagccgttcagtgtagcgcctggaccacgcacacgtttcagtcctgctgtcggctacttactgaatacaccttgggcaaggcatttgcttctctgtagctcagtttcctactctttggaacggggatcacagggttctcgcctaccccacagggctcaggtgacactcctgtggcctgccacacataaagcgctttggggcgtgcccgactcgggttcactacagcagttaccctgcaactctgcacgagacccttagagagtgagtggcagagtcaggcttcacataggcagcttcag

SEQ ID NO: 6087 - DNA, 748 bp, Canis familiaris
  misc_feature (12)..(12): n comprises a, c, g, or t, or includes no nucleotide
  misc_feature (336)..(336): n comprises a, c, g, or t, or includes no nucleotide
  misc_feature (482)..(482): n comprises a, c, g, or t, or includes no nucleotide
acggcccccgcnctggtggaggctcaccccccagatgtcccctaaaccctcccccacggcccacttgcatgcccctctggccttctgaagatgaagcaatggcttatcggacagaggctttttctacttcccgacactaggacatttaccacacaaaggggtttctacctgctggggccacctgttaggccttaccccctccccctatccagcaacaagcacgagccagtcctagtccaatactgacaactgcaagacccaggtccagttccttctcgttgacatcggagttacttggtgactgggtaaccggggtcgcgctctctctacccgatnctcgtctgtcgctcagaccatgatcttctttgttctagttctatgttatgataaagccaggctcggatcgcgaccacgcgaggactggactcgaggctggtggggttgcatgacaggagagaccaccccctacagattgactaggngggtttgttgctcgcgtccttcgtgggcccgtgcacagcccggtgcctgggacagggtagatcgccattcacagggaggagaaaaaaatactaccaattggctttggcaaaacaatttctgaaaatttttttgctttatgtgggaaataggtataaatctcattttatgctgtattttatatcttagttgtgtttgaaaacgttttgatttttgaaaacatcaaaataaataatggcatttgttgtaaaaaaaaaaaaaaaaaaaa

SEQ ID NO: 6088 - DNA, 587 bp, Canis familiaris
acagcaaaacgggctccttgagagagagaaggggaaggaggcctcaaaccatgagcctgagagaagctggttccagaccaaggaagagaggaagaaggaaaaaattgccaaagctctgcaggagtttgacttggccttaagaggaaagaagaagagaaagaagtttatgaaggatgccaagaaaaagggggagatgacagcagaggaaaggtcccagtttgaaatcctcaaggcacagatgtttgctgagcggctggccaagaggaatcgcagagccaagagggcccgagcaatgcctgaggaggagccagcaagaggccccgccaagaaacaaaagcaggtgaataaatctgtatttgatgaagaacttaccaacacaagcaggaaggccctgaaacagtatcgagctggcccctcttttgaagaaaggaaacagttgggcctgccccaccagagacgaggaggaaactttaagtctaaatccaggtacaagagaaagaagtagctgtggtggcctgaagtttgtggggcagcccttagatcccttccttgtgggaagtcatcctggcttggtctcttccatttgt

SEQ ID NO: 6089 - DNA, 680 bp, Canis familiaris
  misc_feature (1)..(1): n comprises a, c, g, or t, or includes no nucleotide
  misc_feature (62)..(62): n comprises a, c, g, or t, or includes no nucleotide
ngtgagattctcagcattatcccatcccaggagtcatgcagtcttgacctggctcatctagnggaaatctcttccccctgtgtatttcatcttttctccagtaactgagacaaacaccaaccaagacaacatatctgacaacatacctgtctattccctcccagattatggagactgtattgtgcttaatgagagagtctggttagttgctggagtatgagcagatgatgactgtaaagtagtggttctaacttagagccgcctaacctctgaggggagccccaagaggcctaaggtgccttggaatcagacatggttttgtatgtgtatgtttagttttgggggaataggatttatagggtttattagagtatctcaaagatctgtgatctaaaaaagggtctctaaaagaacagatcctgaagggaaacagcaggaaggcaaagataaagcagacgtgagggatccctgggtggcacagtggtttggcgcctgcctttggcccaggacgtgatcctggagacccgggatcgaatcccacatcgggctcctggtgcatggagcctgcttctccctctgcctgtgtctctgcctctctctctctctctgtgactatcataagtaaaaaacttaaaaaaaaaaaaaagacacctgaacctgagctccaggtccattaaaaa

SEQ ID NO: 6090 - DNA, 648 bp, Canis familiaris
aggaccttctggctctgctctctggtgttctttgttgttgggaacagaacgtccagggccagctctatttgctttaaccagcatgccttctatcactgcagagttacgaagtgaagagtgtcctcgggaaggaggtggggctgttgaattgttttgtccagtccatcaccacccacccagctagctgcgttggattggaggaaatcgagctcctgagtacaggaagagcctcttcaggatcaggacactgccctcggccataggatctatgaactttgccatacagtcgccctggcggtggaggtggtagtggcttaggtagttatttgttaactgtgggcagagcaagtgtattgtatgcttttgaaatggaactcagtgatttctggggcatatgttagtaaactatacatcaaaatactttttttctagttatatttttgccattttgcaaaattaagaacatgttattaaaactgaaatagggatccctgggtggcgcagcggtttggcgcctgcctttggcccagggcgcgatcctggagacccgggatcgaatcccacatcgggctcccggtgcatggagcctgcttctccctctgcctgtgtctctgcttctctctctctctgtaactatcataaataaat

SEQ ID NO: 6091 - DNA, 592 bp, Canis familiaris
  misc_feature (319)..(319): n comprises a, c, g, or t, or includes no nucleotide
atctctggatgaaacatgctaatcaggaagatgatgtgtatcataagaaacagttgcttaatttacagagtttctaatacagtatcttatagtaagccaccaccaaagaggtcctgttactagccccagatagatgtaatttttttttttaagattttattttattttatttattcattcatgatagagagagagagagagaggcagagagacagcaggctccgtgccaggagcctgacgcgggactcgatcccgggactccagaatcacgccctgggcgaaaggcaggcgccaaacccctgagccacccagggatccnctggatagatgtaatttaaatctattaaaaatgatactaaaattatgttcatttgtaagtttttccacagacttgtattttttaggaggttagttattattaaccttctgtataataccattattcaagaaccataccttccttcttgttttatagttaagtgtatgggtggtaaaaaactgagacctaaaaatgacaactcataattttatggacaatccacctataataaaaccctctggtattcctataaaaaaaaaaaaaaaaaaaaaa

SEQ ID NO: 6092 - DNA, 628 bp, Canis familiaris
cgccccattgacgcaaatgggcggtaggcgttgtacgggtgggaggttctataataagcaggagctcgtttagtgaaccgtcagatcgcctggagacgccatccacgctgttttgacctccatagaagacaccgggaccgatccagcctccggactctagcctaggccgcgggacggataacaatttcacacaggaaacagctatgaccattaggcctatttaggtgacactatagaacaagtttgtacaaaaaagcaggctggtaccggtccggaattcccgggatggaggcaaaggtgcaactgtcttcggtcgtcccgaatccgggttcatccgacaccagctgcctccgccatgccgcctaagttcgaccccaacgagatcaaagtcgtgtacctgaggtgcaccggtggcgaggtcggtgccacgtctgccctggccccgaagatcggcccgctgggtctgtctccaaaaaaggttggtgatgacatcgccaaggcaaccggtgattggaagggtctaaggattacagtgaaactgaccattcagaacagacaggcccagattgaagtggtaccttctgcctctgcccctgattatcaaaaaaaaaaaaaaaaaaaaaaaaaa

SEQ ID NO: 6093 - DNA, 351 bp, Canis familiaris
tcccccacgagactcggccacatgtcgccgacagagacgcctctctcgacacgacacgcccgagatatggagaggggtgtgttgttccctttttggttgggtagatgacatgcaaatccaagtgggaccaacaaaacaaaacaaaaaccagaaacccacagaaccacaaaaccaacaccaaaggtgaggaacttggccggacgtagcggacgccgtccaggcctaggcatcactgtatcctgtctgtcctgttgactctcgttcctgctccatactcacaaaacgccgcatgttcaaaagttctctgctctctgtccccccccccatacccccctccccgacctgggaggg

SEQ ID NO: 6094 - DNA, 655 bp, Canis familiaris
accccttgggaaaacatccaaaacggcatttgagtaagaatctgcaattcgcacgtttcctgaaaatcaagttggaagaaatgtctttataaaattaaaaaaaaaaaaggcagagcacttcttttctggcagtttttgataagcaaggtgtagactttacatttttgtccttgctcccaatgaaatggatcaacaaaaaagaaaaccagacaataccatctactcatggattgttgttgtgttagccagtctgaaagcccaccttaatttttatataatcgtctttggctcttcccgtcggggcaggcttggtcccacgctgtgccctcctgactgttaaccccaagatgcatgcaccgcccttcttcctactcttctcgctccccccttgacctgagtctcttgtgcatcttcccgctccctccttggttagaataagtctatcagctgtgtaaatagagcaagaaaaccgtattctgcatctgtggcatttacgtagagttgcggttgtatgctgctgacaacgcaggcttttgtaaaaaaaacaatgtgatcttgactgatgcactcacaacaagtacccagtgtatttcagctattttagtagtatttgttcaataaacatgcaagctgtaaggtaaaaaaaaaaaaaaaa

SEQ ID NO: 6095 - DNA, 609 bp, Canis familiaris
gaggagccaggatctacactgtggagcttgcagggctctggtggatgaactagagtgggaaattgcccaggtggatcccaagaagaccattcagatgggctctttccgaatcaatccagatggcagccagtcagtggtggaggtgccttatgctcgctcagaggcccacctcacagagctgctagaggaggtatgtgaccggatgaaggagtatggggaacagattgacccctccacgcaccgcaagaactacgtacgtgtagtgggccggaatggagaatccagtgaactggacctaacagggcatccgaacttgattcagacatcaatggcactcatctagtatatgctgtgtgagagcaattcgtggaggaataagaggaggaagtcatcgaagtattttcctcgaggaggagtgatcgaactgattgtatagaacgacacctcctgttattataaagcgacacagtatcatatgtgcaccacatgccccggacaaatatcgcatgatgagctatgaaccactggagcggcccagactggcaggcttgatggatcacccccaggaggggaagagggtggcaatgccttttatattatgtttttact

SEQ ID NO: 6096 - DNA, 546 bp, Canis familiaris
cgcaccccatgggccacctctgggctaggagcccctctgcccctctctacaactcctcttttcgggaagggccccttgtctctctccactcccgtgcaccgtttcccaccacgctttgaagcctgtgctggtgagaagaggtctgggtggggggtggtgagcagggtcttccaagtatctttatcccccacaccaaacacacacagcttcccagtaagtggttgtggagggaggaaagcggtggagcctcccccggtctctactcctgcaatacgagctccatctacagctgagctccatctacagccctgggggattagcctggcctggaccttaggaacttggggcaaagagctttgaagagaggaggggggacttcagagagggaggaagggaagaagaggggtggctgcatgtttccttccccttacctcttcccaaaaggagggaggagcagttataagggagggagtcggttgctgttcagcctccgaataaaggcgccattcactggctcagttaaaaaaaaaaaaaaaaaaaaaaaaa

SEQ ID NO: 6097 - DNA, 658 bp, Canis familiaris
ctatgaccataaggcctattaggtgacactatagacaaggttgtacaaaaaagcaggctggtaccggtccggaattcccggatagcacttcagcgagcgctcgttcgcggtcggtgtcagcgtcgggcgccgtccagcctgcagcatgcctggtccgacccccagtggcactaacgtgggctcgtcggggcgctctcccagcaaagcagtggccgcccgggcggccgggtccacggtccggcagagaaaaaatgccagctgtgggacaaggagcgcaggtcgcaccacctcagcgggcactgggggcatgtggcgattctacacggaagactcacctgggctcaaggttggccctgttccagtattggttatgagtcttctgttcatcgcttctgtatttatgttgcacatttggggcaagtacactcgttcatagattcggctacatccatctgtctgtcatctgaagaagaaggaaaaaaaactcaacatatcttggaccaaaagcatagtgatttcctgttagtgagaaagaaatattctgttagcttattgttttgcaaggaacttaacacgaattggttttaaggaatcagtttttttctatggctaataaactttttaattcatttaaaaaaaaaaaaaaaaaaaaaaaaaa

SEQ ID NO: 6098 - DNA, 401 bp, Canis familiaris
atggggctgaagcctgagcagtggcatgtttgaagagctatctggtaacattgctgtgctgccatggatggagaaccactgagctacttctgagcggtcagtgtgatagcgatttcctgggagagcccctgtttatgcctgttgtcttgggtcccacgcagtgttcaaatttgcactgcatttgtcaattgtgtaacccgagttggaaccattaaaattggggtaccaataagccggaccagggtttagttgagctccactttttatttccagcttctgccaaggattcatctattaggatatgaagtctgtgtgtgatgggggagtgttcaaaataatcattaataaagatgacttacttaacaaaaaaaaaaaaaaaaaaaaaaaaaaaaaaaaaaaaa

SEQ ID NO: 6099 - DNA, 353 bp, Canis familiaris
ttgaaaagaatattgtcttattctataaaacatttcaaacctagttagatatttgtaatcaaaaaacatttgcgcagaaagcagcacttagggctgcctgtcctatatcctgcagttggacaggaaaagaactgaaaatgtcacccttctgacccataaggcagctggactggcagccaaggaagggagagtgatgaggtggtgcggagagggtgggcacgcatgtgagggcactctctccagagcaggcaggagtggggacagagggagagcttgtgactggggcagtgaaaataaacgattggctcttatcaatcacttgcaccaaaaaaaaaaaaaaaaaaaaaaaaaaa

SEQ ID NO: 6100 - DNA, 543 bp, Canis familiaris
aaggggacaaaatcaggattataagctggatgttctgactgcagcccacttggttttcttatcttatagttaatcttggggcaagattcggcccaccgccccctgcagtcacctgtctaccctcagaaaaccataggactaaagataaattgaagtagactaagcagaaggaaaggatgcagaacaggaaaaaaaaaaaaaaaaagaaagattctgaaattctgtaaagcatttttaaatcctatttcttcgaaaattatttttatttgccacagcacatcactggaaacatactttgcatatctcttcaccctcccgattgctaatgtgatattacgtgttttgtttgtttttttctggaaagaccaataaccgtgaagagtgtcaaaacaatatgtcagctactgtctgtctggggaacttctgagtgattattcattcctataaaacattgtttttgaatggtcctgttgcggtatagtcccgaacccccaacagtggggattcacattcttatttgggttgtgcataataaaatacatg

SEQ ID NO: 6101 - DNA, 534 bp, Canis familiaris
acttgggggagaaggaccgcacactcagtccatcgaagagtccttggaacaagcaaactgggctattgaaaaggcgcagttgtgtagcagttgagtaatgtctggttagctgttaaggtggcgtgttgcagtgcagagtgcttggctgtttcctgttttctcctgattgctcctgtgtaaagatgccttgtcgtgcagaaacaaatggctgtccagtttattaaaatgcctgacaactgcacttccagtcacccgggccttgcatataaataacggagcatacagtgagcacatctagctgatgataaatacacctttttttcccccctacccccaaaatggtaaatctgatcatcttcatgtatgaacttaaaatacggaaaatgttaaggaagcaaaatggtttgtaactttgtaagtacttataacatggtgtatctttttgctcatgaaaattctgtactataaccattgtttctgtagtttaattaaaacgttttcttggtgttagcttttctcaaaaaaaaaaaaaaa

SEQ ID NO: 6102 - DNA, 581 bp, Canis familiaris
ttaaagcaaaatgagtgacaattagtaaaaacgtggatttttgctggcaaaaggtaaacgcttattcatgagaatatagcaattagcttcctgtcccctgcctcccccagaaaagctatatcctgaaactaaccccaaatgttctattgaaaagaaacaaggttttcaggcccacagttggagagttcatcaaggctttgcagctggaggtttaaaaaatcccactttgcgaaaatatctgacaatgaagggcacagaaactaaggtgatgctgattctcaccggggcaaacagcttgtggatggcataggccaccacgaaggtactcgtgcctgctgccatttttgactgcaccagtgactctttaaatccgagtttaagcaggactgcagacatgtccacaccacttgaaaccaccgtgtaaaagatgcccaaggagactaacgagattccaatgtgcagcgacacagcaacggcgccgtactcttggaagacctttctcagctgctgtgacttgctttgcttttcctcctgtccgctgctgacagccctgcctgttgtcgcagtgattttgctggggt

SEQ ID NO: 6103 - DNA, 610 bp, Canis familiaris
ctggaaataaatgggaacaaaaagtatactcctcacatacggctacccaggtggatttaaacaagtaacagctgctcaacttcaccagaaggatccagtagcaattgtgaaactagctatttatggcatgctgccaaaaaaccttcacagaagaactctaatgcagagactgcatcttttcccagatgaggatataccagaagatattcgtaagaatttagtggaagagcttcctcaaccacgaaaagtaccaagacgtctagatgagtacacgcaggaagaaatagaggctttcccaatagtgtggtctccacctgaagattatcgactctaggagaatgaaaatggcgggaaatagccatgtggtgactggagcttcttaatgagtctctcccaagctacaagcagagtgagacatccactgcattttgacaaggaacttgtcatggacactgaaagcttgtggacaaaggtcaggaggggatactccttcaataggaaattgcaataaaatacattattttatatgattattttattatgtagtccaatttgagtgttgtaagtgatgaaagaataaaattgctttcttgtttaaaaaaaaaaaaaa

SEQ ID NO: 6104 - DNA, 629 bp, Canis familiaris
ctctgggtttggacagcagctgcagtcctccagggttcaaggagagcaataggaaaacaatatctgttgtatccagggaccagaaagaaatttctttgcatcctctaaatggtagctgtccatcaggagatgactacagagcttctgtgcttctttgtccctaagccaacatgctgagcatgctcaccaagaaggctcatccagttcctcctcctatgttctcagtatttggcccagaggtttcccaagtggttgccccgaaatcgctgtggtccaaatgtgatgacttactcaaattgtcactgtctgtagcacactttgcacacctgtcttccattctttgttgctccctcctgcattctggctccatctgttcacctgttcattgtctgcttactcacactcagttgttactcttttgccgttgttgtgtttacagtgtgcatttgggatgattagttggggttaccaaacatttttaaaagagacattatcaataaatatttttttaattctaaattttatcattaggggaccctgcctgaatctttgccagtctgaagggaaaccataataaaaacaagaaatgttataagaaaaaaaaaaaaaaaaaaaaaaaaaaaaaaaaa

SEQ ID NO: 6105 - DNA, 561 bp, Canis familiaris
  misc_feature (288)..(288): n comprises a, c, g, or t, or includes no nucleotide
ttggcaggctggtgcaaaagttattaaagatggtccaaaggagaaagatgttaattagaaatggtaatgagacttaaaggagttatgtaatctcacctacatttatgcaacagcctcaaaataggtgttttgggtagcatctggtagatcttagaatatagcccatagattctttgttgagactttaaaaatcttttagtaagggcaggtaatagttaaattttgagtttttctggtcaaagttttttttgttttttaacccaggtattcattagcattggtataaanaaaggggaatactggttgcatcaaattatttggtctgatcactagtgcattggaagattggatgctttgttttcagaattttgacaactggctgaattataatggtgtaaagctttgtgtataatcggcaggcttatttgttgacttggtcagctttaattgttctgtattaaaataaagataagttcacttaataaatttgcagagaacaaacaaaaaaaaaaaaaaaaaaaaaaaaaaaaaaaaaaaaaaaaaaaaaaaaaaaaaaaaaaa

SEQ ID NO: 6106 - DNA, 609 bp, Canis familiaris
tcactcctcccttcccccagtttgtaaaagctcctcagatttggaaaggttaaagtcaagggctcactttgttttgttttaatctactcctgatgattatttaaatagaaatctcatgtttttgtttgatgtgttcacttagtaatatggaataataatggctaacatcatgtgctcattatgtgccaagcacttatggacattatcttattcaatcttcattaaaaacctcataagataggcactagttcaacatcgtttttttaaagatgaagaaactaaagtatcagaggcaaaataatgtgttcatcacacagctagtaagtggcctgctacaaaagtcctgcttccaaccactattctgcaagtgtagcagccttcaaaatgtagcgtgtccatttctaaagagggtaagaattaaaactctgggggcacttgggtggcttggttaagtaccctacttttgatttcagctcgggtcatgatcttggggtcttaggatctagtcccatgttgggctccacactgggcgcagagcctgcttaagattctctctctcctctctccctctgcccttccttcccctcccccaccaaaaaaaaaaaaaaa

SEQ ID NO: 6107 - DNA, 570 bp, Canis familiaris
ctctggtctttttgttcctttgtaactggcctcacagctgtcacaatctttctttcccagtatggatagaggaaaaaataatgttgattctaaatggtctgattctcatatcacataacagtcttctttcactctactgtaaagtccatgattgtatatttattttcaaaataattatcccaggggctcctgggtggctcagtcggttaagcatctcagtcttggttttggctcaggtcatgatctccgggtcctgggatcaaaccctttgggaatttgcactcagtggggaatctttttaagattctccccttccctctgcttccctacatgctttttctgtctaaataaataaataaataaatccaaaaaaaaaaaagccaaaactaatcatcctattcacagctgtaagaatctagatcaataaatgccattaccttaaagcagaattttccaaacaaatcctgcctcaggagaagattctatatggtcaaataaatttgggaaaatttttaagcccacccttatcagagaatcgtaatacattttagcatgttaaaaagtcagaat

SEQ ID NO: 6108 - DNA, 673 bp, Canis familiaris
aagtgggagtctggatttttagaggtggagtcaaaagagcctccactgggatacctgaccgcagccacctgttgctctgacccacagcaatagcgcaaagctcccttcaccagcatttgtacagagcaggaattctggtgttagccgatggacgccattgtgtgtacgagaagagtccacgctacagacagtggcgggactccgtatccgtggcttctctccatcacaaaacgggtagaaacacattcactgcttcagggctctaatctgtgtgtcttcttttggctccatttctgcaagacattcggtcattttgatacatgctgtgtttcctttgggttttgttcagcaagctggccatgctgccatcgcatcttcttccctgccgtctgttcttagggtgtggctcagttactagactcgccttgtctacgcagtcaatacacgtcttcactgtttgagaggtgttacagctgttaaagaatcttcatgaacctgaagataatttcttgtgaagttgaatgcaaatgtactgtcattcatagtgtttatataaaaaacaaataccaggaatttcacttttgctaccttgatatagcattgggctatcatgttaacaacattgaaatacatcaatttattaaaaaaaatacttttataggaaaaaaaaaaa

SEQ ID NO: 6109 - DNA, 567 bp, Canis familiaris
cctcaggactcccccaagtgagggaggagggggtcttttcccaggatcaaggccacagggaggaagattgcccgggcactgttttgaggaagaaaccctgccgagctcaaatagaactcatgggtggccaacaaccaaatgtgggttgccatcctgagtggtggcagtcatgttgcaccgggaagaaatccagaaaggtggccaaccagccctggggcagtgaagtgctactggtttaaccagaaggctgagagattcagctttgtgagaactggttatcttggtaaccaagttgggatacctgtgtatagctccctactttccatgaatgcagcacatggccagtactggaaaaagggatcagttcccggttcctggccacatcctagcattctaaggccaaggagaggcctacaaggaggagggagaggaaaagcctagaggctctgagccctggggagaggggatggcaagaagtaggatctagtaggagtttattttcctactctgggtgttcctgtcactgtgacaacactaagataataaatcaaaacactacctaaaaaa

SEQ ID NO: 6110 - DNA, 618 bp, Canis familiaris
atatcgatcagagtaattctttgtggacagtgaaatgagggggctcagtttaaaacgagaccttccccaccccctactcttagaccaaccaggattggaaggtgccaccactggtgttgccttctcgttcccacagcctgtaacttgaatgttttgtacttcactgaattgtgatggttagaaacttcgtgtatagtttgtggaaatcatccaattaaacatattgcttaaaatggtgttgccgtgacttcagagacaagcctgggccaccttaggaatcctctctgcttcagttgcttgcttctgggtgtggcatcctttgaagccccagatcagatggggaaggcattggacacacagagcagtcactcgatgccctgacctcctgcagtgtttggcatgcgctctcccttctgactgaccattccgtgtggcatgaggctccaagccacccaaacctgttcactttccaaagagctagccatcttccatccactatcattgtgtcctagcctgtctgcattcgttagtggtcatattctgtacctgtaataaatttttataccctaaaaaaaaaaaaaaaaaaaaaaaaaaaaaaaaaaaaaaaaaaaaaaaaaa

SEQ ID NO: 6111 - DNA, 594 bp, Canis familiaris
ggtgaggacttaatttaggtatgacacgaggagggggaaaaagacagctggttctaaaagcaaggttttgttaaatcctggattgaattttaatttgagtggaacagagtcactgtgaagtcttgttcagatctagttacattcattgttggtgataactgttgactttgtgtagtgtagatgcaaaagcatgtaattgtagtacaaggacagtgaaggatataacatattcgcctgtgcaaaaatttaaatagtcatgtcgtgtctatatcctacgtcctgaagttttaggattagttttagttttttgtttgcttacatgagcttagcataaagaatatttttaaacatctcctttggcctttagcagtttttatattaataagtaaaatttaacccgtttggttcttgacaatccagtctttgttttaatcttaggtctcgtgatctgagtgcataccctctccaggaaggaaactgtaccaatatttgttcctgtcaaatagcgacttttagtcctggcttgttttgcattgatgtcaataaatatcaacatcactcaaaaaaaaaaaaaaaaaaaaaaaaaaaaaaaaa

SEQ ID NO: 6112 - DNA, 642 bp, Canis familiaris
tcgtctggggggaactgattttcggtaaaagaaaaagtttgatctacggttaggtttttgctgccttctggtcaaataaggttcgcaaaggcacttgggccaacctgcttggcagccagctttgcccaagcagcccgcaggttttgagcattaggagaggaaacctaagcagcccgtgctcctgaccgtggcccagcacagccagggagatcctgggcggcatggggaccctcatccccatgggtttgcccaaggacatggcccgtcggagccagagccaggatttggaccctggtcctcaactcctggtgtacctattctgtgtcgaaacccaggtttcaaattcccaagcgtaagccctttaaaaggatggcaagcttagacggatcctgctggtcccacggagccgttggaagcgggccgcgtggagggcgaggccgccgacagcgaggctcccgtgatgttgtgtgttccccttggtgtctttagattgatcagaaagttaggtgaaaggatttgcttcaaaataagttatttatttgtatatgttcaataaatagagtttttaatttatatctgtacatattagacacacattagacgtcttgtcagaattctggcagtgatgtcattttatggccc

SEQ ID NO: 6113 - DNA, 524 bp, Canis familiaris
tgttaagtatgtgacaagattctttaaatgcaatatttgtaagacttgttccagggccacatatttgcagtgacccaacctctgtgtcatgaatagtgtcctatgcaataaaattttttgcgggtctttaaaaatcattttaggaaaggatgatcaaagataatgcacccagcagtacaataaaagcaaaccacaaaaaaatacctcgggaaagaattgaaagaaagaattgaaagaattctagtgacatgcctatatgaaaataagagcctataaatgaatttatggcatttgcagatttttatattagttgctttgtaaaaaaaaaaatattgtattgctgtccttgaatgccatagttgaagagagtttttaatagaaccatgctggttacactttatagtgtttggtgctcatttaactatctgaacatttactacggtttttactgtattgtgtaatataaaagatcttacagaaaaaaaaaaaaaaaaaaaaaaaaaaaaaaaaaaaaaaaaaaaaaa

SEQ ID NO: 6114 - DNA, 590 bp, Canis familiaris
aattgacaccagtgactcgaagatgattctgctccttggaaagcattcattttgctagaacaattagaaacattgcggtatgcggtattgaaagtaggaatatagttttaaagccctttgaacaaagtgtgtgcataaccagtcatgagatgaaacaacacaatgcatgtgcctttttaatgtaaatacccttaggtatcatttaacagttttaaaatattgtggtttagtaaagttgatacgctggttataaatattatgcctttatttttggttagaagaagaattatttttagcctagatctaaccatttttcatactcttaactgactgaaacagattcaaagaagtatcaagtgctatgcattgaaacgtgtttttaaatgttacctggcactatgtatattaatgtaaaacaatgttaatttactcaagttttcagcttgtactgcctggtgtgtctgtgtaagaagccaattttgtgtattgttacagtttcaggttatttatatttgatgttttgtagaactcaaatacgactatactgtacttatggaccaaataaatggcatctgcatacttgttaaaaa

SEQ ID NO: 6115 - DNA, 626 bp, Canis familiaris
cgtgccagaccggtcagagatagggcattgggaccagagagagagccccagggggaccacagttaatgtcacttgcccagaggcggtgggctaaagcccacggccccccacaggccctcccggttactatagcatcagaaacgtgtcaaaatcgtggtccccttccggagagcagggcttgcactcttcccctagaacctactttggaaggcaatttagaagctttgttttcatttcccgctgggtattgtcttgccaggatggttaggtacacaaggacgcttattagatcactgagaagaaaaagccaaacccgcttctctggtatgaacatctagtttgagagcaagcaaaacagtaggcttgtattagtgctttaatggagtactggtaacatttttctttcttgataggaatctgcttatatttagccaggcttctatttcataccctctcccactacaaactttccgtgcagttacctttcatttttaaagcaatttcactgctaaatataaattgtatttgtggggttcatagttatataatgctgaagggaaccactctttcgttgaaaggtgataaaagttaaataaagactgtctccacagtaaaaaaaaaaaaaa

SEQ ID NO: 6116 - DNA, 586 bp, Canis familiaris
  misc_feature (185)..(185): n comprises a, c, g, or t, or includes no nucleotide
aaactggtgtacttgtctggtcaactgtgtgtgaatcagtatctacctcaggagttctgttttctttttgtgctgggacaaggttgctggccctgccggttttccacagaccaaatcctcctagctcaggagctagggctaagcagttatttctgttcgagtatttttttagttcttaaatttantgcttgtatttgattatagatgtcagtgacatttcatagtttcaaaagtccttgctgctctgagaagtgtagattctagtgaaaaattacatagtcataagagaaatgtgttttgtttttgtttttgtttccttttttaaagttgtggtattattggttctatgctcccctggaatattaactgctttgtgaaagtccagactgaacgcagcaccctccttgtacctagtacatttataaacctgggtctctcactacttgatatttttgcattagttaagacagaaatttgatagctcggttagaagggaggggaaatctgctgctagatatgtctgaactaagtgccatactcgtctgggtaagatttgggaaacataacctctgtacatacaaaaaaa

SEQ ID NO: 6117 - DNA, 602 bp, Canis familiaris
ctctcttgaaagttctgggaaagataaattactaaagcttagccaaatatattctcttatgttgaaaggtttttttttttggattatctttgttatccttactcacttcccccagacacctatgtgtcctccatatcacccctttcatcaccagtgttttataccagcaaaaaactgattgcactatgctgataaaacaaacaaatccagtttgtgaaattgaagattgaggcatattcttagaaggaccgtctgatttgagttacatcatacttgcttaaacagtgggtaggtggatcatttcttatgcctgatcaagacaattatatcttagctaaaaagaaacagatggagcttctgaggtgaaaccttcctctccagtgactgcagttactgacccttttccagccatacctctgggcctggtcgtgagattcctgctgtctccacctagtgcctaggaaagcacgcattccaagcactgagtccatggtgactcattctgggcatcgtgcatgtgacccagctcagggcacagactttcctggaggtagaatgatccaagagagagccaggtataaaaggttcattagaaacctcta

SEQ ID NO: 6118 - DNA, 557 bp, Canis familiaris
ggcaaactctgccctcaacatctgttgggggagatggagacagactgacccggcgcgggccaaaggttgctgagcagctcaacgggccaagacccccagtgttctccaaagctagggaacacggtagatcctttggtatcaggagaaatgaaagattgctgtccaactgcacagtccgtgggaccaaagcagaagaaatcctggagaaaggtctaaaggtgcgagagtatgagttaagaaaaaataacttctccgatactggaaactttggttttgggatccaggagcacatcgatctggggatcaaatatgacccaagcattggtatctacggcctggacttctatgtggtgctgggtaggccaggtttcagcatcgcagacaagaagcgcaggacaggctgcattggggccaaacacagaatcagcaaagaggaagccatgcgctggttccagcagaagtatgatgggatcatccttcctggcaaataaattcccgtttctatccaaaaggccaataaaaacttttcagtgaaaaaaaaaaaaaaaaaaaaaaaa

SEQ ID NO: 6119 - DNA, 577 bp, Canis familiaris
gagagccagtcccaggtgggggagattggacatgggacctcaccttgccaacctgccctctggcttgggttccgtttccctggctggggcctgacacccagttttgcccacaactgctgtgggtagggagggggcttgcagggccagcagctgttgccctgtcctgtatcttcgtggcctctgggcttcattcccagatcttttccttccactgccacagccaaaggctatgacaaaaccactccttggccaatggcatcactcctcaggcctgtccccagctcctggggtgtgccccctgaccaatggcagagcctcaaaggccctgtcagccaatggcagctcttctcgggctcccctgggccaatgacgttgcctccagtaccctttgtccctcctctatgcgtccccattgcagagaaggggggactgggaccaaaggggtggggagaatggggagccccatttctggccctgcatctgaatgggcttcccctctcctacccacccagtttaattgtgcttagagccctggaagattgggacctagcactaggaataaacctttcataaaagc

SEQ ID NO: 6120 - DNA, 638 bp, Canis familiaris
ggtggagggccccaggtcagcagagctcaggaggggaagaggaacgggaggcagagttctcacgcccctctttggagcttttgccattgagccacgcctctgggcccaggccgtttgaacttggatttgtcaaccagagcccttacacctgccctccaacatctactagacttgaatctactctaaatgaatatgttaatccaacatcactacatggtagcccagtgcaacaagtaatcctggagagtgggaggccttccggccttcggggaggtggctgagccgtcgcccaagggctggcggcaggagggctcgtcgccatctgtcgccaagcctcgccgttggacctcactccactcccacgtggcgcacctgtccgtgtctgtatctgttcatatgtgtgtgtccagctaaaaagacaaacgagaacccgtgggccgggctcggagggtgcatggagagagaaggctcccgccccctccgaagggctgccctcgggatggcattccgttgtgtgccttattcctggaaaacctgtatacagcttgcctatagcaatatagccttttcatgctgtattaaaagaacttctaaaagcaaaaaaaaaaaaaaaaaaaaaaaaaaaaaaaaaaaaaaaa

SEQ ID NO: 6121 - DNA, 595 bp, Canis familiaris
atggcccgcctggcattatgcccagtacatggaccttatgggactttcctacttggcagtacatctacgtattagtcatcgctattaccatggtgatgcggttttggcagtaacaatcaatgggcgtggaataacggtttgaacttcacgggggaatttccaaagtttccaccccattgaacggtcaaatggggagtttgttttggcaacccaaaatcaacgggactttccaaaatgtcgtaacaactccgccccattgacgcaaatgggcggtaggcgtgtacggtgggaggtcatataagcagagctcgtttagtgaaccgtcagatcgcctggagacgccatccacgctgttttgacctccatagaagacaccgggaccgatccagcctccggactctagcctaggccgcgggacggataacaatttcacacaggaaacagctatgaccattaggcctatttaggtgacactatagaacaagtttgtacaaaaaagcaggctggtaccggtccggaattcccgggattcgtttagtgaaccgtcagatcgcctggagacgccatccacgctgttttgacctccatagaagac

SEQ ID NO: 6122 - DNA, 496 bp, Canis familiaris
gcccgagcgtgggtaagcacgccccacagcctccgtatatagcatcagaacgtcacatctctcccttccggagagcagggcttgcactcttccctagactacttgaaggcaattagaagcttgtttcattcccctggtattgtcttgcaggatggtaggacacaaggacgcttattagatcactgagaagaaaagccaaacccgctttctggagacattagttgagagcaagcaacagtaggtgtatagtgttaatggagtactggtaacatttttctttcttgataggaatctgcttatatttagccaggcttctatttcataccctctcccactacaaactttccgtgcagttacctttcatttttaaagcaatttcactgctaaatataaattgtatttgtggggttcatagttatataatgctgaagggaaccactctttcgttgaaaggtgataaaagttaaataaagactgtctccacagtaagaaaaaa

SEQ ID NO: 6123 - DNA, 611 bp, Canis familiaris
gcgaggacggccgagctggggcagccgccatgacaccctgtaccgggaaaaggcggggcgctcccaccctgactgagttcttaacgggcatcggcctcgagatgcaggcggccctggagatcactgctcgctacttgtggccgagagctggagcaatatggccagtgtgtggtggccaagcctgagtcatggcagcgagactgtcaccaccttaagatgagtattgctcaatgcacgtcctcccacccaatcatccgtcagatccgccaggcttgtgctgagccttttgaggcctttgaagagtgtctttcgacagaatgaggcagctgtgggcaactgtgcagagcatgtgcgccgcttcctgcagtgtgctgagcaggtgcaaccaccacgctcaccctcagctatggagacaaagccacttcctacctcctgaggaccctttgaaccataggaaaactggacctgagtgactgatcacttgatgccaccagccctgaagagtgggcagatggagtcatgagagccctggatgtgagtctggcttctctggatggcaggactcacaataaataaacactctgtatataaagaaaaaaaaaaaaaaaaaa

SEQ ID NO: 6124 - DNA, 593 bp, Canis familiaris
tagtaattgaaagataatttcatggaagaaggtatttgttttataccagtgacttggggctaaccatgtatcgtccacattttttttttttagatgattactaagctgttactataaagaaatatcccatctcatttctatcaaggaaaaaatagttttatacaattgtcatgttaggaatactcattttattttaaattgttagttttagaagcttaatatcaagttcctggtacccacatatttttatctagtatctacgtatttttatccagcacccttccttggctgccctctacacactttgttggttttggagctagtgttcagttatgtaaacataaatattcttaaatgatgattttactattcaaaagagagtttttgtcaaggacatatttgaagattgatttgttcaaatggtcttttattttgttgaccttagcaaagtgtatacagtagattcccattatcattacatatttttttgtcattgaaatgtatcatttgtgtttttaaatgcattcattcattttacagttgtgactttatcattgactttaaataaagaagtagaaataaaaaatgaaaat

SEQ ID NO: 6125 - DNA, 550 bp, Canis familiaris
gactgggtagctttttgggggagatctataccccgagtacccagaaggccatgcccaactcccctgaaaatcctgggaatgagaatgcttacctccaaggttggctaactctttcctgagaaccacctgctatcgactgggcttactacaaggccaaatgtggcaaaaggctggcttggtagatgactttgagaagaagtttaatgccctgaaggttcctgtgccagaggataaatacactgtccaggtggatgctgaggaaaaagaagatgtgaaaagctgtgctgagtttttgtccctctcaaaggccaggattgaagaatatgaaaaagagctggagaagatgaagaacataattccatttgatcagatgaccattgaggacctgaatgaagtcttcccagaaaccaaattagacaagaagaagtatccctattggcctcacaagccaattgaaaatttataaacttgagttgaggagaaagccccggccctcatattataaacattggacattaaaaataatgatacggaaaaaaaaaaaaaaaaa

SEQ ID NO: 6126 - DNA, 565 bp, Canis familiaris
  misc_feature (389)..(389): n comprises a, c, g, or t, or includes no nucleotide
agaacaacgtctttgacgagtgaatctatacatgtgtctgatgttggaacatgtcgaacaacgtggttcatgacagtgtagtagaagcagaaatcgtcaccgatcctctcacaacagatgtcgtttcagaagaagtattggtagcagattgtgcctctgaagcagtcatagatgccaatggaatcccctgtggaccagcaagatgatgacaaaagcaactgtgaggactaccttaagaattccttggaagaagctggcaaaataggacacgatgggtcctctgggaagaaccaatggaatgcagaagtcgggaaaattgaacccttgtaaaggtggaatggcaaccttgcccaagaagttaatcaagggtgtacatttttaaagctganccctggagaggatgacttaggtggcaccgtagacattgtggaaagtgagcctgagaatgatcatggagttgaattacttgatcagagtagcagtattcgtgtgccaagggaaaagatggtttatatgactgtcaacgactctcagcaagaagatgaagatttaaatgttgcggaaa

SEQ ID NO: 6127 - DNA, 665 bp, Canis familiaris
  misc_feature (551)..(551): n comprises a, c, g, or t, or includes no nucleotide
gcaggtcaaaagcgtgccacgataccctccctccaagtgctttgcgagcaggactaaaaccagccccgtcacgaatatcagctgggttttactctgatttggaagaatgtaccgaagactcagatgaagttcagcgtccaaacaatgtgtcccatcgaaggatgaagggaacattgcacgttttttgttctctctgtttggccagaagcagaatgctgtaaatttgaccctcatagatagctgggtagatatagctatctttcagctgaaagagggaagcagtaaagaataagctgctgtgttccgctccatgaactctgctcttgggaagagcccctggcttgttgggaatgaactcactgtggcagatgttgtgttatggtctgtgctccagcagacgggaagctgcaatgtgacaggtgccagcccaaatggtgccagaaagtggatgagggcatgtgagaacctggcccctttcaacactgccctcaagctccttaagtgaagtttaataacttgtaaaaaggttgacttcaagaatggtgctgttntcacgtgtattgtgggtaaaggaacttgtactaaaatcggtctatctgggccagttgcctagaatcaataaaggcatcaaataaaaaaaaaaaaaaaaaaaaaaaaaaaaaaaa

SEQ ID NO: 6128 - DNA, 601 bp, Canis familiaris
tcgaggtcgtggagttcctggcagagggccctagggcttggactatggttcgtgccgaatcgtggtagaggtcggggtatgatagtcgggaagaggggctttggagccgaggcccgagcccgtggacgagggagaggtgccctcacttcgccctgtgctgaccaagggagcagctggacaaccacgttggatgcatacatgtcgaataccaaaggacaccttggatgccgagttggattgccctacatggcacaaccaggatccagaaaccccatgattgaaacctgtccaccctactgtgagagactcttattcaaaagtcaccacatctgtaaataaccttgagataacagatggagaagaaacctgatcgatgctggaaggacctatcacaataggctatggacttatttgccaccagtttgtgcatttagtgtgttccttttactttttttgatactgtgttgtatgaaacctttctttcctctgacttgggttttgttttgtgtttggggtttttttcccccatcgctctgacttctctttaaacatgaatgtggtggcccttgtggctagaacacaaaaaaaaaaaaaaaaaaaa

SEQ ID NO: 6129 - DNA, 656 bp, Canis familiaris
  misc_feature (354)..(354): n comprises a, c, g, or t, or includes no nucleotide
aactgcttcttagttcattacgtggtattggcgtgttctttttttcttaaacccagggatagattactattttgtcacatattttgcttcaggcttaaaaggtaaataaatatgtttgcttcagaaactttgttaatttcaatgttttgaatgcacaagatacctcccttctaaactgtactgtagaagcagagcagcagcgttatgtgatgcaacactcgatggtacagtaaatttactggctggcatttatcctcttaaaaattaaaaacattgccatagactatagcatggtttgaaatgctatgtctgcatgataatttaaaatggaaaaattttaactttgcactccanaagcttatttgaatttgttccttgcactgttttgtgtgatgcagaataatgattttattcctatggcattgtagatctaacatttatgtatctttattttcatattgtacagtaattttactttaaattattaaataggctatttattttaaatgcagttgagttggttctaattattgaactgtctgtgcactgtgtgtagcaagcatttttaatctattgtatacaagtggaaagggtattagaagtgtaactgtgctattatttcaataaagacctcttgacacctgaaaaaaaaaaaa

SEQ ID NO: 6130 - DNA, 701 bp, Canis familiaris
cccgttctgttgttgccctggcagacatcaacactgggcatctttttctgagtactgatttctctttgaggggcacttgttgatctactggattggcaatgacacagggacgaagctgcccttcttggactcttctggagtaagagggatgggcctgtgctgtgccctcgtggagggtcacatgcctcattcttgggctgatagaagggctctggagcacgtgtgcagccacgtctgagccacggggcctccacagagcaggcttctgcagcctgagcaccatctcctgtgtctgctttagtgcctgtggctctcagtgtggtgcttggccaacggcccttatcacccacccacccacaggcacctggcaaggtcagaggctcactgctcagactcccttgggctgagagggggctgaacccaacctcccagctttaggtccccaagacagtgtcattcagaatttgagtcactggtttagacagaaaaataaaaaaaaaaaaaaaaaagccagtgctaacccagtctgaaagcagcatgatttggaagaaaactttggattttttgaagtaaattcttaatgtttcatattgttaatatcttgaaaatttgttagatgttgttggaagccttattactattttcagatcctttcaataaacagacttgtttaaaaagttgaaaaaaaaaaaaaaaaaaaa

SEQ ID NO: 6131 - DNA, 131 bp, Canis familiaris
aaattagaaggggaagaaagaaaccagtgccatgttcattgggggttgaaatggtggtattctttgaaaaaccaagtggggaaaagtaaagtttaatctgtagcatgcatcattccttggctgaaataaaa

SEQ ID NO: 6132 - DNA, 600 bp, Canis familiaris
taagctgcctggacatgctggctccatccatgaagtggctttccaccctgatgaacccatcattctctcagcatccagtgacaagagactgtatatgggggagattcagtgaagatacggaatggaagacacccgccccaacggctgcttgacccctgagacctcaggcgtcataagtggcatccagcagtgcccaggctagcagcctcccttcagatgaagaccattcctaggaaaaagcaaagaggaggtgccatgttccagcaaccactggtaccccttccaccaggatgattaagacaagctgacagtggcctctaaaaccaccggccagatttcaggaactgtttgggattttttcctcttttttttttaagtaagatttcttcaaagagacagacacaggttggtttgtagtttcttgtttcctaatacaagcccaagacacgggaatgtcactgaaatttgttcattggggattttttttttaattcaataactggcttgtatgatatttttctttctgtgtttctctgagtcattttgtattaaaaacccaatagatgcctttttaaaaaaaaaaaaaaaaaaaaaaaaaaa

SEQ ID NO: 6133 - DNA, 522 bp, Canis familiaris
  misc_feature (83)..(83): n comprises a, c, g, or t, or includes no nucleotide
ctttatcagggaacaaacgagaatatgagaaaagagtttcggccattgttgaaccaagctggaatgattcatgatagaccacntggtctgttaatttttttcatcacttgttgtgtataatttacctctcagtagaaaggctaaccaattttaagtgccaccaggttttaaggattctgcagaaaaaaaaagtccttcagtttagaacctaccaaagcttgtgtatcttgattaatgtactttttattgcatggtgtgaactaagttattgcttacataaatttgtaatatatcctgtttgtatttttttcccagtgtataatgttggtgtggagttttcatgacagaataatacacattttgtaaatctgtacttttttcaaatattgaatgccttatttttgaattctttagatttttaaattggagaaaagcacttaaagttttttatatatgaatattacatgtaaagctgttaaaatacataacttcagtgccaaaacaaaaataaaaaaaaaaaaa

SEQ ID NO: 6134 - DNA, 669 bp, Canis familiaris
  misc_feature (501)..(501): n comprises a, c, g, or t, or includes no nucleotide
gagccaagattatggggagacctaaccgggtcctgttttctgcttgctacacagtagcttcacttgcctgcttttatgtgcacctttgtaactgtccgcccagtagccggcgtccttgaggggcggcccccctccccccctcccccgcctcttgttggcaaggcccctgccatcggtcctgctcggcccctgcccggccgtgcggcgagcggggtgggagtctgcagcagagctaaggaatccttcaccccgtggacagaaaagacttaccaagtggagggactttaaataattggctcgactggccggtagccaggaagtggctttgagagagatacccacaggctgaaagggtttggttgggggttttttttttggttttttgaaccattgaaaaggtaggttttgccctcttcaggtctatttccaaatggttgtatccaaaaaaaacttttttttcccactccccacctgtccccctgttgccacagaagcaggggncctgtcccgctccctaatacgtgtaaaatttgtacaaatatcttctatgaaaatgatttgtaatctgtagacttaatacctgggagatgtcttgagatgtaaaatcccatcctttgggttgtggggttttttgttttctccaaataaatctgatctttaaagttcaaa

SEQ ID NO: 6135 - DNA, 621 bp, Canis familiaris
tattccgagggccaaaacgtatcatcatagaatcagaagaacattgttcagggctttacatttaaagtaaatgtgtgtgtgattttaagagcctactggttttttactttttaatctacactgttagggatgaaaaatggaatattgctattaagtatatgtgtgtgtgcaaagtgtgaatctatatgcatgtatgaaaatacttgtgtactcatatatacatgtctaaaatcggtatgcactgagattaatcaaatgaaagaggacgcccaatttcaggatgctgtcaacatttttgcccctgattctgttaaggatataaacccgtaattctcattgattaaaacttgcagctaaaggagagggaaagataagatttctgtatttttggcaggcagctcaaataattagaatctttgactttaatccaagtcaataaatacgtgttgaatgcttactataccttagccatgttctgggtacaggagatacagcagaagacagaccaaaaaccccaaatgtatggattccccagtgagaggagtcagataataaatataaccaataggtaaaatatatagtttgtcgagataaaaataagtgatatttgaaaaaaaaaaa

SEQ ID NO: 6136 - DNA, 591 bp, Canis familiaris
gctctcgacattgagattgccaccctacagggaactgctggaagctgagaagacgcaggattgctctccctccttccaaacttttctttccctgaacctgagggaaaaccacacctggattcactcccctctggttgacactcactcaaaaagaacgcttctgattaagacggttgaaactagggatggacaggttatcaacgaaacttctcagcatcatgatgaccttgagtgaagcttgcccagattcggtgcagccattactaccagcacagaataaaaaaaaaaagaaattcgtatcttaaagaaacagctttcaagtgcctttctgcagtttttcaggagcgcaagatagatttggaattaggagtaacctctagttcttaagaacccacactcttaaaagatttaggagaaagtttacaacataatctagtttacgaagaaaacttgtgctagaatactttttaaaaagtatttttgaataccattaaaactgcttttttcccacaagtatctgacccacttgtttctgcttccaataaatctttggaaaactccaaaaaaaaaaaaaaaaaaaaaaaaaaaaaa

SEQ ID NO: 6137 - DNA, 586 bp, Canis familiaris
caactgggcacgttacgtgaccttcctgagctccgctgccccagctgtaacagagcatcacagtagcgcccacctacacctaaacggttggtggcgaggatgaggtggggcaatagaaggtgtgtatgtccaatgcctctgcagcctggtgcataaggaggtgcctggtaaatgctgaatgcaatgaatgaatgaatgaatgcatgaatgggggtacccagctgctgagcagctagggaggacttgaaccagggcgtctggccccacagcccatggctgaccttgacccagccgggcacctgctgcggcgccgccagcccccctgccccccctgccccccgcccgcaggtcggcgctgctgggcaaggtgctgcgcatcgacgtggaccacatcgagcgcggcccgctctaccgcatcccgcgcgacaacccgttcgtgggcgaccccgccgcgcggcccgaggtctacgccctgggcgtgcgcaacatgtggcgctgctccttcgaccgcggggacccggcgaccggcgcgggccgcgggcgcctcttctgcggagacgtgggccagaacagttcgaggaggtga

SEQ ID NO: 6138 - DNA, 626 bp, Canis familiaris
  misc_feature (1)..(1): n comprises a, c, g, or t, or includes no nucleotide
ngggtgcactgtcttcggtcgtcccggatccgggtttcatccgacaccagctgccttccgccattccgcctaagttcgacccctacgagatccagtctgtgtacctgaggtgcaccggtggcgaggtcggtgccacgtctgcctggccccgaagatcggcccgctgggtctgtctccgaaaaggttggtgatgacatcgccaaggcaaccggtgattggaaggctctaaggattacagtgaaactgaccattcagcacagacaggcccagacttgaagtggtaccttctgcctctgccctgattatcaaagccctcaaggaaccaccaagagacagaaagaagcagaaaaacattaagcacagtggaaatatcacttttgatgagattgtccatattgcccgacacgatgcgacaccgatctttagccagagaactcttctggaacccttacaagagatcctggggactgcccagtctgtgggctgcaatgttgatggccgtcaccctcatgacatcatagatgacatcaatagtggtgcagtggaatgcccagcgagttcactacacaggaaaatatttcaataaaggatcatttgaccacccaaaaaaaaaaaaaaaaaaaaaa

SEQ ID NO: 6139 - DNA, 617 bp, Canis familiaris
  misc_feature (1)..(1): n comprises a, c, g, or t, or includes no nucleotide
nacttgtccatgtcttattacttgatcgcgatgatgtggctttgaagaactttgcccaatattttctccaccgatctcatgaggagagggaacatgctgagaaacctgatgaagctgcagaaccacgaggtgctcgaatcttccttcaggatattaagaaaccagaccgtgacgattgggagaatgggctgaatgcaatggagtgtgcattacacttggaaaagagcgtgaatcagtcactactggaactgcacaaactggccactgatcaaaatgacccccacttgtgtgacttcattgagactcattatctgtacgagcaggtgaaatccatcaaagaattgggtgaccatgtaacccacctgcgcaagatgggggctcccgaatctggcatggcagagtatctctttgaccagcacaccctgggaaacagtgatagtgagagctaagccttaggctgtcttcccatagcccgtcagggtgacttcccctggtcaccgaggcagtgcatgcatgttggggttacctttaccttttctataagttgtaccgaaacatctacttctttcgtttgtatcattccttcaaataaagtaatttggtacccaaaaaaaaaa

SEQ ID NO: 6140 - DNA, 619 bp, Canis familiaris
tcacctatggatatcttgccacagaaatggaagtaaaattttagagttctgttttctgtgaggtcagaattataatttattcttcaattgtggttttctaaacatttgtacttcttgtattttcattgatatatgtctgttaaagtacttacttaatggattgataaccaaatgacccaattgtacccaagaacttaggaagaggcactttcaagactattttcttgctaggtattttctaaaattccatctaaaatgcccaaaggtaaaataattatgttgattttaatggtataaacatcataccatttgacattgacaaatactgtgtaaaaacatttgtttttccctggggccttttctttcttgtgttgttgtttgtttgtttaactataccacatttaatattgttgctttcctaaattccccatcacagtttttgtagaaagcggggcattttgtcctttttatattaatgaccttcacaggcccattcaccttacagtctctttgtttttgtttaaatcatcaccacatataaatgttttagctttgtcttaattaaacctgtcagtccttataaaaaaaaaaaaaaaaaaaaaaaaaaaaaaaaaaaaaa

SEQ ID NO: 6141 - DNA, 586 bp, Canis familiaris
ggtcccgtcggacctggtcgctgggccggtcggccgcactggcccgccgcgctgtctctgaccctcggcgggagcggagctcgggtcccacggccacagcctccctttctgaactggttccttcctctctgccttcataaaaataacaaaaggagccgctatcctggttgcgtgtggttgactgttaccgccatgtcttctcacaagactttcagaatcaagcgattcctggcccagaaacaaaagcagaatcgtcccattccccagtggattcggatgaaaactggtaataaaatcaggtacaactccaagaggaggcactggagaagaaccaagctgggtctatgaggaagcatccatcgcacatcatgaaatagcaaatataattggcacacatatttaagctgcatggagatcacatgttcctatcctgtcaatatggaaacacccttcctacctggcccatagacatgtcttattaaggaaacgttcttgtctgttcctatgcctctataccagtaggctggttcagtaataaatgcgacacctttcagctgaaaaaaaaaaaaaaaaaaaaaaaaaaaaa

SEQ ID NO: 6142 - DNA, 607 bp, Canis familiaris
atagaaggagctttccacttcgaattcaccagtggacacacactgaggacaacaggtgaacacgcttctgtcctaatgtttaccataccagtcagatccgttatgaataagtaatcttacgtgttccaatagacttccagctttatgctggcataggatagcatgtgagcagtctgctttgttgcgcctgtgggtgtgcgaggggtaatggttcggggcgctacagcctttttttcaagatttttcaggtacccctctaaaggcaccgaaggcttaagtaggacaaccatggagccttcctgtggcaagagagacaacaagcgctattacactaaggtcaataaaaatggtgtcagcctcctaaccccagcttctgcttagcaaatgaggacttggggatccctgggtggcacaggcggtttggcgcctgcctttggcccagggcgtgatcctggagacccgggatcgaatcccacgtcgggctcccggtgcatggagcctgcttctccctctgcctatgtctctgcctctctctctctctctctctctatgtgactatcataaataaataaaaattttaaaaaaaaaaaaaaaaaaaaaaaaaaaa

SEQ ID NO: 6143 - DNA, 563 bp, Canis familiaris
ctgcctagaactattgggtctcagtattaaaccatttgaagatcataatggtagaaaaggcatagtagtatcacatttttgtgtgtgtgatattctgaccatatatatcactgtgctttttacctacctctcttcactgatgacctctagttagcttgtgatttcttatgaccttaaatcattctgcaaagcttatacagtgtctgaagtaaattgtctttaatttatccctttttgaagtttgtggacaaagtcagtttatattttaaggttggttttctgtagtacttcccatgtaatattgacccttttgtttggaaaggtgcctgtttggtaacatcacataatcaaacaggattaatcaggaaagccttttacaggacgcctgggtggctcagcggttaagcacttgccttcggctcagggcgtgatcctggagtctcaggatcgagtcccacgtcaggcttcctgcatggagcctgcttctccctctgcctgtgtctctgcctccctctctctctgtctctcatgaataaataaataaaatctttaaaaaaaaaaaa

SEQ ID NO: 6144 - DNA, 559 bp, Canis familiaris
atgcacacagctcgggtgcgggatatcgaacagctcaccagtctggatttcttccgcaagacaagccgcagctatccagaaattctgacactaaagacatacctgcatacgtatgagagtgagatctaactatctgatcatctgccgtgcagtcttatccactggtgtatatttttatattgtttttgtatttattaatttgaaaccaggacattaaaaaaatgttagtattttaatcctgtacccaatctgacacattactcctgaatgactccactgtttttctctaatgcttgatttaggtagtcttgtgttctgagtagagcttgtaataaatactgcagcttgcatttttagtggaagcttctaaatggtgctgccaatttgatatttgcattgaggaaatattaattttccaatgcacagttgccacatttagtcctgtactgtatcgaaatactgattttgtaaagttgcattcatttactgttaattatgacagacatatttaagccttatagaccaatcttaaatataataaatcacacattcagttttt

SEQ ID NO: 6145 - DNA, 569 bp, Canis familiaris
gtcagcagtcgcccgaaatcccaatccccccgtaggctttgtgtcctttagctgccgtaccccccgcagtgttaacgaccgcacccgtggcagtgctgggcggggcagtgatttaaccggcaatcctacacatcctactaccgggaatgactaccctctagttgtttagttgtagtgttaacccgcctaattgtgttaggtcctttgtaaggtgcagttgtcccattgagcaagcaaaaagccccaagtcccgtatattatgtgtcatacagctaatacatagctgctcaggggaaaaataataaaaatccaattgtcgacacaaaaaggattagtatttcgagaaaaaatatttcttttttttttttttgccaggaaaaacacttatctccaaatttggaaaaatttaagaaactatacaggacctgaagtgtaaaaattgttccactaaaaattaaagattattttgaaatcctcaagtaaaaaacctttttgacttccttcggcctgcccccgcaattatttggacaatttattaatttcttttttttttatttttattttttttt

SEQ ID NO: 6146 - DNA, 589 bp, Canis familiaris
tgatgtccaacgcgcccacccctactaggtctaagcgccctaggtctatggtgggcccgtgctggttaaaggagaggtctacgggccagacagcaacaagatttttcccgttcccacaatcatctcatacctaagccttacctgtggtcccttgatcaaacctgaccctgactcacatgggcacagctcagttaggcagtccagtccagtagaccccttcaaaaaccccccccatttttttaacccctcccgcaactcctcgagaaggtccaaaaaacgaccccccaacaaaaccatatcagtagtaccaagttccagggctgtcagcctttattttacacggagaacataaataaataagacaaccagattgtccaaagggacgtggctgtggctggtttcattcaggagagtgactttcgcccccagtgagtcagacccctgccctggcttgttgtacacccaactggagccgggcgctggttcagcgagagaccatctcctaggagcataacagagactttctccacagataaaaaattttctacctaagtataatttttctttttttaataaggtttgatttttt

SEQ ID NO: 6147 - DNA, 635 bp, Canis familiaris
  misc_feature (486)..(487): n comprises a, c, g, or t, or includes no nucleotide
caaagtacgcgtagtagaggcaaagttgctcaaagccccttataaaacacctccttacactagtggtgtgggttctagcagtgtttcagtagttgcagctgttccttcgtggaggacgttacaaccaactggtataattgtttcctgtccgagtcgtaagggtgttagggcagttagcttaggtgagagctaatctcaaggttttgtgcgagttactgactcatcaggttcagctctttcaggcctcagtatttttagtccccctcaagagagtcaactaagtgtcactaatccagttcgtgctggagtttacctactttgttaagggagtcctagattccctccagcgctctgtagggggcaccacgcttatctagcacgtacgtacgtctgatgatacacaaactcgcgctctcagagggtctctgatgtatgatgtgtgacattcccaatggcagacaaccctatgccgctgggagtcaaccnnaggactccgtggctgagctagctagaaggggaatccaaatccaaaacatattgaagatccgtttctacatcaacaaacgaaagatactaaccaactttatttgattaaaggatccccttttttttttttttttttttttttttttttt

SEQ ID NO: 6148 - DNA, 483 bp, Canis familiaris
ctaccaccaggaatcagttgatgagacctattctcctgctactggagaaagtttcagtggtggttgggctatgaacaaattaaaaaatattttaagactattttttacaagtccaggttcaattaatatactctgtagactagaaagataatgaagagaaggtgaagatctaaatctgtccaaacaagccttaaaagatttaaactgatagccaaattttatgtttctacagatattcttggtttggagttttattatcattacccttatagatttatggccatgccccaggcctcgggcaccgaaagtaagaaagatttaaaagcatagtaattcagccatcagataaatgtactgttgtactgttgacaactagagcggtagggatttgcaagaaaaacagtttagcaattatgcagtgtagaagcagccactgttctacttttttttttttttttttttttttttttttttttttttttt

SEQ ID NO: 6149 - DNA, 622 bp, Canis familiaris
  misc_feature (18)..(18): n comprises a, c, g, or t, or includes no nucleotide
caaatgtgtatgttttgnccagagtgaaggtgttacaggctgtaatgatgcctgtctagaggttcgtaggctgcctcattaacccataagaccaactatactcactagaagtgtccactgcacctgtcaccgtatcattttggattataggtcaccgaggagcttgatgcctgagcatgctctgtctggtagtctgtggtagcagtcttggaaccttctgccttggcatccagcataaagcttggcagtaaatagtacttttaatacatacgtatagccaagggatagtaacaatgtgttttccttttccttgaggtttttgcatgttaggttaacacagtacatctattcctctaaacattgcccaagtgaaggaacagggctcctgggtacctagtgggagggaggactccaccaatcgagctactatccattaaactaattgattaattattaacctgctaaagccttgccaaccttatcacttaaaattttagtttagctaaaagcatatcataatttcaggcaattagatgatataccaataattcatgttagattactttgcaactttatttgaattagagtaagagaaagctacagttttttttttttttttttt

SEQ ID NO: 6150 - DNA, 606 bp, Canis familiaris
aacgtctcgcgagagtccgagcagggcctcgagctgtggggtgggtccccaacggctaaagtccgctaccagtgctgctgtagggctaggtgccgactaggcgcagcaggtggcctctgcggtctcgctggccagcgaggactgccacacggggttcctgaccgagcggcagccccactaggtgagagagctggagtccttggtggagctgttggcctaggtcgtgttgcggaacgtcgtggcctacctgcaccgcggctggtgcaaagtgttcttcaggttctaaatcttgcagcaagctctcctgttggacaccttggtgttgtccttcaacaccaaggcctaccagttcgagggggccccggcggcaggctagttcgcggccgagcgcacggcggagcggacgggctacaccctgggcctctcggagatcgacgatctcgtcggcaacgtgggacaggccttgggactggatcttgtggagtgaaggctcgtcgaggccggcaggcagggccgaggcggcacctagcaggggtcgttgtggtcgcagccctggtgcatctaggtgttgtatgaggtcttctaacgctccatcttctacctcgc

SEQ ID NO: 6151 - DNA, 674 bp, Canis familiaris
  misc_feature (1)..(1): n comprises a, c, g, or t, or includes no nucleotide
  misc_feature (61)..(61): n comprises a, c, g, or t, or includes no nucleotide
ncctccctcttgggagaccaacatcacacaagctgaacaattagctgcaaagagggtttgnacacagggatggcttgaggataaaggacagcagcaagccttcccagaaacccccctgggtagcagaggactatttgactgttattctgctataaccgttacacctttgcataagaggccagtgctctgcagtttacatgctgtgacaaactatatatgcaaatgtgattcacaacagcaacaaagactcacgattaactcgaacagccaaagcaactgttctagtgctgttgtgaccacgagtcgcatgaataataagctgactaggaagtttgactaaatgggtttggtaaacttatatttgcagaggggcagcaacaccccctaaccacccattcttaactaagagaggtcaacacactacattttggaaggaggcaaaaagcaagggtactgagcacataactagagaagcaggacacagttctctaaccagaagcgaattgtcaagtttgtaaagatgtagagagtagaactggctcctggtagcattgtgcatagaatcataacaatgaaagatttaagaccaaaagtatcctacaagaaaacaaaagatggatatttattttctcagaagtccttattttttttttttttttttttttttttttttt

SEQ ID NO: 6152 - DNA, 681 bp, Canis familiaris
  misc_feature (529)..(529): n comprises a, c, g, or t, or includes no nucleotide
  misc_feature (571)..(571): n comprises a, c, g, or t, or includes no nucleotide
tgccgcggtcggtatccttaactctctggttctgcatagtcctatgccataaatgagtctcatatgttcttgaaagatctttttgctggcagatccggaccgttaacccgggtaccgacaacccgccgccgctgcctagttggacgtgcagactgaaactgagggatcttgtaaatccccggtctaggctggcgcatcgcctggtccgtcgggttggacaacctgaaacaattcgctttagcgtgacggccaaccaaaccttgtggttcccacggctgtacttcaggtcagaccacatctgttgtttgctcttttgggtctgacggttgtttaactgttgttttgttcccgccgagctgactttaacctcgtgggcctactcaggggctacaacaagcagtatattaggcattgtggtgtacctggttccagttttaatttggtttggcaaccttcggttggttcctggccctaacttgggccagccttggttgcttttttggcattgcttgctacatttttgtctgcntaggcagcagcattggcaccctctttggctgctccattgctnttgtaagagttgccagagttggaaaccgctccccgtgaaggaggttttcgcattgaaaatgaggtactgtaaaaatttatttctacagtcacattcatgttttttttttt

SEQ ID NO: 6153 - DNA, 610 bp, Canis familiaris
cacataccgcaccaaagactgcttgtagaccccgcatgtctagttggtcggcaaccagccaaccttcatgccgaatcttcacctaatcatcgtgtcgccctcagggtacttggaggactagttatcagtcaagggagacggtccctaccgtgtagagcagctactatacatctgcgcgcagatagaggtgcaggaggagttgttaccacagagcccgcagggcccttcagagctttgagtgcacaaccgcacccggcaggtcaccatagaccgcacacagccaaacaacacagcccgggcaggcagttggttgctaccatccactccccactggtgttacccagacatccaggggcctaaccattccagaaactagagtgggccccctcagctagccccacctcccccacctgcacccctgctgcccaccaggggcttaggccatctgccctcactggagcccacccctactgtggttggttgagatctggtgacccatctccacctctcctggcccacacctgaaaataccccatccaggagcagctttgatctgttatttcaaagactcccacagctttttttttttttttttttttttttttttttt

SEQ ID NO: 6154 - DNA, 603 bp, Canis familiaris
ttctgtaaactctctgggtttctgcatagtccccaatggccataaaatggagtctcatatgttcttgaaagatctttttgctggcaggatccggaccggttaacccgggtacgcggaaactgacgccgtctagctgcacaaagaccgcgccctggtgcatctctcccacgtggagtccggcctggtgtcggacgccccttacttggcactagatgccacgcaggtgggctacgccccggttgtacttgaccagcaccaggctggcacgccacatgtggtagtggcatcccatggactgagaggtgaggtggcacagtcctcccaggtggatgccggccgctagcaaggtggatttgacctaggaacccaggcccgagcagggtttgattgtgggctgtcacccttggaggcctttctggtgtttttgttgttgttgtctggccgtgccttgcgtcgttagctgatcttccgtcgcaaagacttagaagagccctccaaaggcttgttgttgggcccctagcctcacaattgaccgaagattaccaggcacaccccttatttgcctcaaggaactgactttttttttttttttttttttttttt

SEQ ID NO: 6155 - DNA, 677 bp, Canis familiaris
  misc_feature (160)..(160): n comprises a, c, g, or t, or includes no nucleotide
  misc_feature (409)..(409): n comprises a, c, g, or t, or includes no nucleotide
  misc_feature (416)..(416): n comprises a, c, g, or t, or includes no nucleotide
  misc_feature (447)..(447): n comprises a, c, g, or t, or includes no nucleotide
gctaccgcgtgcgccacaggccgcagcaggtgctggcccgcgtgcgcttcgccttggagggcgcccaggcctcgctgccgcagcacgtgcgggccgtcgcccagggcctgctgcagcgcgggctgcaggtggtgtagtgctgccgggcccgcggcctccnaggtggtgtagcgcgtgctgtatctggtggagcgggagttgtaggtggtgctggccgtcctgtatcgccttttggccgtggccaacctggcgcgcccacttgttctaggaaacagtgctcccacgccagagtgtggtttctcacgtactcgccgcccctcgcagagagtcacgcgcgcgcaagcagagagagatgtgttttgtgtgagaagcaccttctgctgcgccggttccgatctccctcgcgcanggaaggngccgcctccctcctcatcaaccccctccctnccaccaaatattgcgcacgaagagtgggtgtccctagatggcgccccccgcttaaccctcccaagaagggcccccccccttcaccaacccgagcccccagccagcaccctccggccacctggtggccagccccagccccctgcagaccaccagtttgggcccatgcaattatttgtaactccttgcacctctgctttttttttttttttttttttttttttttttttttt

SEQ ID NO: 6156 - DNA, 568 bp, Canis familiaris
tatcgagatcatctatcaatagctcaaaggtgtgcctagttttgtgttgtgaatctgaataaatgaagaactttttttgccactgttaccaacacagacaccagggtactcctgctctctggggtagactcaagtgctgggccttccaacatgggcaatggtggacatcttgggttatggggtgagggtgtgggggcatgtgctggacaacatatctaccaggctgcaggtcaactccttggtggacaagccctgcctggggtctgatatatacaggtttgtgctgtgcgaaaaccactactggagaggcaggactagtttgggtctgaagaccttgaagggcagggtcaaggatctacacgaacgaccttacacctccaccttgttgatgaactaccctgtctcttccagcaagcgggcgcgctgctcacgctgggcgcggcagaggatggcgacgaagcacgcccggaagatcacgcgctcggcgttgacctgcgccagcagctcgcccaccaccccgtcgaccgcgaccccgcgccgcccccgcgccgggccagcagccacaccg

SEQ ID NO: 6157 - DNA, 495 bp, Canis familiaris
agagctcaaaagaacagtcccagttataaaatttttgctggattcctttaccctgttagaggggctggaaaatttgtagtcaagttggttcagtcattaggtggcctgtttgggtcctaatttatctattaaaccagaactgcctctgatgaatgtagtacaactacagttctattaatttcaaagttttgaaaatgagagaccactgtggccttacatcgcaaagtctacattctgttgcccttaaccattagcggtgtgaagttcagctgaaattcgtatccacagcagctcgagtccctgtacagatcctacactatatcctgctctgcattaaaatagcatgtagaaaactacaaatagataggctcctcctgtttttggaggaaaacatcatatttataagttaattttcaaaattaaaagatattatttaattgtcaccaatgttattttcagtttttttttttttatttttttttttctttttttttt

SEQ ID NO: 6158 - DNA, 592 bp, Canis familiaris
tcttagttaggctgcttgactccagaatacacctgtccttttacagctccaactactcttccctgagcctctaggcgacctgtcggtggggcaggtcatagtgcgccagttgctggtctaaaatgtagtttagtgttttgttaattctttgcattttgttgtgcactaagtagcgtactggcttgttcagtgcttgaccttaaacagcgatgtgtttccttcctctggtgtttatggtcaaatgacaggtgtttgttgtttgtccccagagttctctgccttaattctccttccccatctaaaagagtgcagagtgttgtttgaggtgtctttatgaaggttggtggttttccttctatcaagcttgccaactgtcgcataatcacaggcgtattgcataaacccaccctgaaagcagcaaaaaacagtccaaaacttctggtaggttgtgaaggtagtgtgaaccataaattcttaattagctgttttatcatttccctactggctgtacgccgagcaaagtttataaaactagacttgtctttccgctcgaaaaactctacctaagcattttatttgtggtgtttggcaa

SEQ ID NO: 6159 - DNA, 628 bp, Canis familiaris
ccacacaaacacattgggcttgtctctggtctccttgagaaaagctggagtaccatcaataaatttgtcagcatcagttcaaatcaaccttttgggctcggggagttggttaggaagaagtggccaccaaaatacctaccccctcccagttgaggaggaatgatatcggatcaagttctgtaatttaaacttgctttcagcagtctgggcagggcctggtcctttgatccagttaacaaaaaccagtttaacaaacacctacaatttaactaatgacctccactacaaacttaacaacagatgaatcccatctaggtatctaaaatttggtcctcaagccaaactaacagtgaagttgtgcatcccttggaccccagtgttaatatacccttagcctgtttagtctgaaaagaaatagtcctggactcctctaatgtgacccttagacctagtgcagttgtacagtaaactgtcttccagtatcttgaaatcctgccaacaaagcatatgagttggcctcacctgcctcctccatggtgggctgtgctgaaagtgcttaacataccctttgcttcctcccaacaaacaatggcctgctgatggcagacctacaatcctcttttttttt

SEQ ID NO: 6160 - DNA, 650 bp, Canis familiaris
  misc_feature (494)..(494): n comprises a, c, g, or t, or includes no nucleotide
cctggtgtccactgacattgtaaagtctcgcgctctccttccaatataaggtcaactttaaggtccttggtgccttgctaaccctgccataaccatttggtaggtcttgcaactaaatatcctatacaggtttagagatataagggccagtagtagcgcttctttttatgttccactactctctgctgagacagggggttggagtctgagacctggaggtgttcttggtaccagtgtgttgcctcaacgagcattaagcaggggtgcctaattgtgttccggaagaccttctcggacctaaagagtagttctcccttcgttgtgtaaacactggcataacaagtaaactgtttagcgtttttagggaaagtttgtgccctttccagggttatccttgtaagggtttcatgggcccctggtccgtaacaacttagccaaaaattgttgaaaaggccctgaagagcctacgacctaactgctctaagtgaaacctntgcagtcagtgccggagcaacctttgctaacctctcatttgagtattctagagtattcgagctaaagatgcttggctctagtgtataaaccaggagcgagctttatttccattaagaagcaacaaatttttttttttttttttttttttttttttt

SEQ ID NO: 6161 - DNA, 675 bp, Canis familiaris
  misc_feature (93)..(93): n comprises a, c, g, or t, or includes no nucleotide
tcgattataaacatataatttgcaattagagcaaacaatttgttaagcctttgagattattggactattcagctaaatactatttcccatttntagatctctaacatgaatcagatctaacggcagattcttggcaacaggcttcagatgtaaatgaaagtagcagcccttcagctagtgtatctcccatcttcatccttaattttaacagggactgtcaaagactattaccaggtcaagtatatgcagacagttgatgaagtcttaaaagacaaaattaaacctccaaggcaatagatactgtagtctagtgtccagagatagcagtccttcatcgtgtttcaaatctatgctcagttgtgttctgtccatggtaacttgctagagtctaggttaaatattcgttgcttcagcaacctattattatcagtagactccaaactgtctctggataaggttcctatgctgttgaacatgttcatcttcaatagatctctccatgtatgtgagactgaatttagtttccaggcaacatttatccctaaaacaccttcagataagctaaaagcttataatctacttgcttgcctgttgatttattagaactaaacaaactacctcttgctgagctagcatgacccatggagtttggcccagcaattttttttttttttt

SEQ ID NO: 6162 - DNA, 631 bp, Canis familiaris
ggcatgtcctactcccaggtggaggtgcccctgagtctcctacgttttagagttggcctctgtaacctggtatttgtgggcctaccccgccagttcctgctgtggcactacaaagctggcttgcttgcaaggtttgtaggccgcctcacaaacagttaatcctctacctggttttgtgacctcaacaccctccaggaacccaggcgccagtggggcaggataagcctgtacaaacgagtttgtccccagtcaggcttgtcctactcccaggtggaggtgccctgagtatcctaagttttagagttggccttgtacctggtatttgtgggctacccgccagtcctgctgtggcactacaaagctggcttgctgcaggttgtaggccgctcacaaacagtaatcttctacctgtttgtgacttcacacctccaggaacaccgacagtggggaggcagaattaacaacttacaagttaacaatgagcccttagtaggctaagcacagctcacatgcctaaagccccttaaattgaaatgtttaatcctgaaactgattgtgcagttactcaggaaaacacttatgcagaacctttagaattattttgaaaagaagctaggatgctatttttttt

SEQ ID NO: 6163 - DNA, 611 bp, Canis familiaris
ccgcaaagccgtggcccctgagctcggggcaccggctttgggtgccgccagcacggacccctacctgaccctgcgcccaggcacggtggcacctgtgagggagcacaggcacccggtgctgctggagacctggcgtggccaccgtaaacccggggtcaacaggcccaccactttggcccctgcccataatcggtgccgacctacccgcgccgccggtttccgcgcctccacgctgctaggcctcctgccacgggcccgtcgcaccccagctgccgtgcgcgcagaccgccctgctgtcctcgcaccagcagcagcagacggagcaggccgcggagctcgcgggcctgaggcagcagtggctgcggcggcggctgccggggaccgcgccgcccggcccgaaagcgaggccgcagtacggtttcgccgcggcgtagggccccgcgccgctccacacgaacgcgcgccaggcgcggcgcatcggcgtcgagaacctgtaccgccagggctgcagccgggaggaggagcagttcggcgtgcgcgcctaccgcctggcgcaggagctgctgggcgccgccaacgccgtccggccgcgcaacgcaaccaaacgcgag

SEQ ID NO: 6164 - DNA, 665 bp, Canis familiaris
aatctaaatgagagtgtatgcctcctatctttaaaaataaagacttttacagataatttagtgtaaaacagtacagatcaaagagaaatgcatccaaaaacataaatttttttaatttttattttgaatagaacaataatgcaatttgcaagtaaagtccagaaatttagccctttcagatcaatttagttaataaatgttaggcctatttaaagctctgaaaactatatagatatattactagaactagatctaaatgtatctatattagcaaactttagtgaaaagcacaatttactaaaggcaagcagaaatcacccaaaagatgaaaaattacattggttaaaattgacatttaaatttttattactcttaaatttgcaaacacaagagcctacagtgatatagagtgtttactcctaaggctattaaagacaatgaagtataactgggcaaatgttggctcaataaacagggtgaggattgagttaaattgagtacatcagcacatgtttgatatgtaggcccttggtcctcaaaagatacgaaaccaggaatcatgacagtaatatcagagagagcattatatcacataacaaaaagaatatgtaagacaattccgatggaattgatattatttttttgtaatttattaaatttaacat

SEQ ID NO: 6165 - DNA, 586 bp, Canis familiaris
gagatctctgtcacaccacagcgcatcgaggtcctaagcctgacccaaagcttctctctttgggtgcactcactgagggacagtagaggaggtagcatgcccgggttgaccagcgctagcgaggctcccaaacccgagtgctccctagggttgactagccagtacacatcaacatctcgtgtaccagttgtgtaagtttggttgttctggcagcagcagttttggcagattcattggtggttaaactgggagttaggtcggcaccctgcaccagtgaactcagcatcactgccagttgaagctgtcaggacagttggcgagctggagcccacagagccataactgccgaacccatcagttgtcaggtgcgcactgcccgccccagttgtaaggacagctgcacccccagcactggccccagttagggatggttctctccctcagtgaggaacaattgcagcaacaacctcctcgttggtgtccttgttaggtgttattggaagtccggtgtttattttctcgaaaacattttgaacaatattttctttttttttattatttttttttttttttttttttttttttt

SEQ ID NO: 6166 - DNA, 554 bp, Canis familiaris
taacctggtcggggagctccttgctgtacagtgcgcaaggccctctgatcctcctgtacccactgttaagttggtggctcagggatgctcatggcctctgaacgccggctgttgcaactgttcccccagccctgattggacctggaggcgctcccagaggaccagtgactgcacgaatgtccacagcacccccgggctgcacttggccccctgccccttgaggctgggcccagagcatgaatgcagcccacacccaaccccgagtagaacactttgcaaccaatgttaagcatctgttgcctgtgaagtctacaggttcccagcagggttcccatgcacagatttctagattaaggacccttactaagcaaacactccactcaacccccctgctacaggtgcctggacagacatagattattacactctggagacccccggcctgtacccccgaggaaaatagagcctgttatttttggccacctgagtcccctattttttttttttttttttttttttttttttttttttttttttttttttttttttttttt

SEQ ID NO: 6167 - DNA, 624 bp, Canis familiaris
atccattgtatcttactttgactacaagcatcctgataaatgttgccttcctagtaataattagtagaccttccctccagtcctccgtggaccaccagtctccgcacattctgcccaccacagctcaccctccagtctctcctggcgcattaacttggttaaacaatcaacaagcaacaaacatgtttgtgtttctgaaggattcaaaagagttaatggcagattcatcaaatattcattctagaccagccagactacagactgcagcttggatcacaggagtgacccatcaactgtgcaaatcaccaattctgtaagataaggctatgcacagagtaggactacctgaaaaaagttttagagcaatacctgtttggcacttgacctagctgcagaggctgtgaatctgaacagaggaaactagaatgaatccaatatgaatcagagattaatgagcctcaattagatagaatccttttttatttacatacatcccctgtcatgtagatgataaaaaagatattaaggtaaaccattatcagtataaagactacccagctgtttgagataaggaaaaaaattttttgtttgagataaagttttatttgactgtaggttttaact

SEQ ID NO: 6168 - DNA, 580 bp, Canis familiaris
cgctgccccggttgaaacaggtgtcggaggtgcagctgtactgccagttgttcatagtcccactgttggtcttcgcaacacgggctccgactggcaattgacctccccccgccccttgaaaacagagagagaaaagggggtcctgcttctcagagtagtggcctggctgaggtctaacccctctaggtctaagttgcgcagttgtttcactccttgttattttttcatgacttttgcaggttacacagtacttgctgtaacctcgttaccagggacctggccagttatttgcaggcttgaacccaaccaagcagtccctcttagtgttctaggaggcctttgaggtagttgagttgacctcctactttaacctgtagttgttggagcatagacaggctgaggcagaaggcctcgagttgtagtcggtcgtagtgcaagagatcttctacctcaatgcagacttaaaccaggagaccaagcacttgttgttaaggctgttcgaccgggcaaagatctactgtgctccctagggcttcccctgcgccaaatcagtgtcctaaattatttaccatgagcatcc

SEQ ID NO: 6169 - DNA, 554 bp, Canis familiaris
agtaggagcccctggccccgcactaggtctgtacccctctctggtactccaggcactgttcctgcaccctgtggtcactgttcacattcggggcccgtacgttcacaggggcccggggaagtacagggtccccgtcactgtcgaaggattccattcctggctgtacctggtcatctacagtgccagaacccgtccagggccaggtggcccgtacccccacagtcacgggtgttgaccggttaagccccggtccccagttggggccccgtaggattctgtacaggttccactgccaggcctgtagctggcccaccccgaccccccgtttgtgggttgcccccagaccagggccagctggtaaagggaccagcccccatgcagctcagtcgcagccccaaacacccagcccctcaaccccactccactgcaccggtctaccgggtcaataaatttcacagaagcctgagcctatttcccggcccggagcccccccagtccctgttttttttttttttttttttttttttttttttttttttttttttttttttttt

SEQ ID NO: 6170 - DNA, 537 bp, Canis familiaris
ctgcccgcaggcctaggtgatcgacttcgtcaacgtcccagcacttgaacgtcgagttgttggtgccgcaggggcgcgcggtgcggccggcccggcccagctcgcgccagctgcccgccggcacggagacgacctccccgcactgctcgccgagctgcacggagcccacgacgccctgcaactgcccctccgttctgttgtcactccaggtggtccagatcaggtaggcgtgcttcatcctgctgtagttccccgtggcgcacttccagtcgcccgtggtcgcggaggtggcgcactacgggacgctcccggagccgctgccgcagctgtgcaacgtcggcaaccgcggcgcgctcctcctcctcctcctcctcctcccgctcccgctcctcgccatcccgggcgccggcgagcccctcgtcgtgcagggcccgctcgcgctcccgctcctactcctcctcctccttgcgacgccgccgccgacctgcgccgcctgccccgcgctgctgcagccctcctgcctcccggggcccgggc

SEQ ID NO: 6171 - DNA, 565 bp, Canis familiaris
aaccctaaggtcaagagatctgtctgcaacaacgcttccgagggccggcctacgtggcctggcagctgcagtaactctgagccccagcggtgtgccagcgtgccagggagctgccgcgaggctggccctggttggctgtgaggcaacctaagactgcagggtacgcaaagcaacacaactgcttgcactggtacaataaaccagcaagggcggcccagaccactgaggagagagctggcgccaggcagaggtcaaccgtctcagccgtggaggccacccggtccaggaggagaggttcaccctgtgactacgagaattgcaggaggttgaatttggcccctagtacgccaaactctattgctgtagtacaggaaggtagtgcagctgttgaagggggccgttgatgttgacagcctcgaggaagctgaaggtgcttgtgctttgccaaaccattcattgtgcagaggagacggggagacaggaagatcaaggtcagtaaaactgttgctatttgctagtaatctaaaaattcaaagtaaaagcaaagactgattatttctgtact

SEQ ID NO: 6172 - DNA, 561 bp, Canis familiaris
ttccttccttccttgaacctattcgagatctgtgccacctatccctatgccacaactcattttttacctgttgaccccccgatactatgtactcacttaccccatgaacctaatttcaaattattcatccacctccactactaccaacttttatatgcttcttgacttctctaactgttcctccttcccgattattttgccgcatgttcctgcccaataaagtttcactctccactgggataaagcactgatgcctatgctgaaagatattcccttatcatcattatatccccggttatttaaattttatcatacttcccatttttgttcccccctttaactgttcctacgctcttccctaccctccgcattattaatgctcttgccctcctatttatggtgtaggaaatgaggcctttccctcctttcactactccttttcgtatcaattttatttatcctagatagaatactaataaccatctaggttaaattcctagtcattagtctagtttttactacgaagataaacttcatattgttcctaattttttttttttt

SEQ ID NO: 6173 - DNA, 459 bp, Canis familiaris
ggtgcacaactgggtaggggagttcagggggtggtacgagccaacaaagtgaacggaggggactagagagaggtgtgcgacttccgggtgtagacgccccaggaggtcttctacgcccagaggtagtcagtgatccagttccggctacagctctccaggtacctggtcttcggtggcagggtagccaaagaggttcagatcggcccctcctagctgccacagaaagtcaacaccaggcagacacagttggcgcagcactgacaggcccaggagggtgcaagctactcccagggagccatacagggcctattgagttgactgatggccagcctctttctttatagcttttggaactcatttgctgatgtttatatagctaagcctgagtagatcctagtttcgttgcagaggacacaatttttcgtttctattttcttttctttttctgcaaactggcac

SEQ ID NO: 6174 - DNA, 718 bp, Canis familiaris
tcctgcaatagtcctaatgccctaaattgagtcccatttgtcttgaaagatcctttttgctggcaggtccggaccgggtaacccgggtacgggcagaacgagtgcgccttggagttggcagcagccagtagctgtacgtagactccatcctagagcctgtcccggaggcctttccggccaacctgcagaccgagtgccacctggtgcccgtggccttgctgcggcggtccccgggacccgccgccaccgcagtagtcgtagtccctgcggccgtcctgctactgctggtgatcctggactcccaggtggagagctcctggaggcagctagctgggaccaccttataggccgaccaggtggagccacagcacacaggcaaccgggaggtctacgtgtgccaggtgctgcagcacaaagtcttgctaaactcgcagttgtggatcgtggaggcaggtcgctgtgaccacaacatcaaagtagtgtacccctgccggagccagtccagcgagcggaaccgcgcgcagcgagtgctagaagagggctggtcgacagcgcagcccgacacagagatcgtcatcatcgtgccagcgaacgttgcctcgcggaacatattcgactgcacgcgctgaccgcaagcccgggtgcagagcgcagggcccgcgagctcgtggaggtgcgcgccccggcactgggccccgggaggaccccgggcgtgcgt

SEQ ID NO: 6175 - DNA, 655 bp, Canis familiaris
  misc_feature (288)..(288): n comprises a, c, g, or t, or includes no nucleotide
  misc_feature (337)..(337): n comprises a, c, g, or t, or includes no nucleotide
cttagcctccctttattctagctttcttgacaacaggtactgtcatcaggaggaatacaggagaggtgattgagctaattgctagcagtcaagcactactcaaaagatcttgagggttaaaaggctctgtatatgatctggtttcacctaaggttaccagtggtctcttggaatcgagcaactctagtactcctccagctgctgttaggacatagactaacaccaacaaaggaaaaaaccagtcaatctaccgagtaaaactgttttaaacaaatcgagaggttgccntaaatctaggtaattcccacatagtctcagcaccaagcccggaattctntagttcgttctcggcatcaaacatgtgtaaatagtagttggttagtttatatacagagtagtaatagtaacactgggtaaggggtatagaactagtttgaaccaataacagcaccgtctaaaaattcctgaattacttggaagtctgagtatcagtagttatcagtattacttgtttatatttcttgcctaaagtattgaatcaaacttggcatacaacttgttgtcctagatttttctatatagccctatcaaaaaaaaattaccctgttttatttggcttggtcattttttttttttttttttttttttttttttt

SEQ ID NO: 6176 - DNA, 591 bp, Canis familiaris
ccaggggcagcccgataaaggccctcttgatctaggagttttgcagaggccttgtaggaaaactctaccgtgacggcacctacccaaccctagaataccgatacttctctgtagaagaccagagcaggtgcagtctggcagctgtctggatagcgtggagccaaagggttgcccctgggctcctgatgcctgggacctcctaaggccctgactactagacctaccgatccctgcagctgttcctggtgctagagtaagtggcccatcgctgggccctgaacttgaacccaggccgcctgttgtacctctacaccctgttgaggggcaaatcattgaaattagcggtcgttaaagttgtataggaggccgttttgcggcactaccctgtaggcagaggggactttatctacccattacgaggccccaaggtctttaggtgggcacacctcactagtgttccaagctcctcccgttcccataactagccccccctatttaccagcaaccagaccttttttttttttttttttttttttttttttttttttttttttttttttttttttttttttttttttttttttttttttt

SEQ ID NO: 6177 - DNA, 558 bp, Canis familiaris
  misc_feature (319)..(319): n comprises a, c, g, or t, or includes no nucleotide
  misc_feature (384)..(384): n comprises a, c, g, or t, or includes no nucleotide
tttgctgggagcacaaccaggcagcaggcaaaatagttttgtttacctgcttttagataaaagagtttgtacccacctacagcctgtgacctgagggtagggtgtaaaagcatctagaactccccccccctacatcgggtttgatttataaaaaatttaatttccgaacatcaatgcagccctgtagcaacagttttaggctcaaaataatccgaaaccctcataaaaaattttttatcctcgaattcccaagtgagtaaacatctcaactagagttttaataaataaataatgccctcgctccctcgtagcctcagtngcattaattacagagttaacccaagccaacagaaagccctcctcgacttcactcaagaaattttngcaacctgttcctcaactgcagaaggagagattttttttttttttttttttttttagctaagataagtaaagatcaggatgaacgattttaaattaattttccctggtctagttaggttggattctaaggtctgcattattttatagtaaagaggtatattttttttttttttt

SEQ ID NO: 6178 - DNA, 607 bp, Canis familiaris
ggtttacaatgtggtgggcagtaacttccaggccctgggaaatttgtggtctcaccagagtggctaaaggtcccagttgtttagtattgtggtgatgtagtgaaggtttggcaatgggttgtgtattgttgtgattgtttctctgaaagagtagtagctaaggttgctttgtctaactcgatgccgaccaataccagagagcaaatggccaagttaacaaaaaagacagtataattttacaggccccagcaaacaaacagaatgcgaaaacagtagatacacagtcccaagagaaatcccaattactacaggagggtaaaagaaaatggatgcaacccaagaatccctcctacactcaggtaaaagataaaagtccctaacctgtggacagaaaaacttaaggtttgaaattctataaagctaggtttatataactaacatataagatttgattttctgttctggaatctgtgctgatataaatgatcctgaactctagatggtaatttaccccttaaagagagcgagagagagatatctatctatctatatacttttaaagtcagcaatttttttttttttttttttttttttttttttttttttt

SEQ ID NO: 6179 - DNA, 632 bp, Canis familiaris
ttgtaaactatgcaccgactgcacgaaataggccgtgctgtgttcccgcaggttcaaattttatccatgttgaaactgtgttttgtgggccttccaatgggggcagttggccctagaaccctgcccggatgtacctagagatgtggtcccaatggcccgaaggccccgaccagaaactggtgtggtggctgtagtgtaagatgcggtgtccccccccaccacctggtttggcggaatcaacaccactcccagtcaaaaaaacaagacctaatgcatcctgattcagaccatccaagccaagagggatccagcaatagatattcctggttcctggcctaaagttcaaaagtttcatttagagtaatccccaactagccctctgccactactcctcgcgttaacaggagagaaggagcaaacgattattgctccaaaggattttataaatatttcagtgcacgctctaacccgtaggtccatcaaaacccaggtaaaaaggcccgacatgtataagattgggggtggggttattacatcctgttatagacacattgcattgtttagcggtaaatccctaatttgagtatatagctgttgcgagttttttttttttttttttttttttttttttt

SEQ ID NO: 6180 - DNA, 514 bp, Canis familiaris
  misc_feature (71)..(71): n comprises a, c, g, or t, or includes no nucleotide
  misc_feature (130)..(130): n comprises a, c, g, or t, or includes no nucleotide
  misc_feature (137)..(137): n comprises a, c, g, or t, or includes no nucleotide
  misc_feature (149)..(149): n comprises a, c, g, or t, or includes no nucleotide
ctgccccctggcaagcaatggcgtaccagtcgttatggtggttggcagggggcgcagtgtttagcctttgngcactggtttataacatatcttaccctacaacccctggggaaagggagtaggggctcgngaatccntgttctccgctntggttgcaaagcctccttggtttctgccctagggaacaccagtgacgggcagcgctgccctgttccccaggcctcagcgccctgctggtctggcagagccttctggtgccctgctccctgccagctggttaccctgagagccagacccagcaggcctaggcagaaggcagcctgaaaaagcagtatctggatggtagggttacaactaattataaagtcaaattgttgaaggattggtatataaaaaaaagacatagaacagaaacttcaatagatgtaataatatttaagtagatttcctcgagtgtggttttagaattatttttttagctttgcccctctaaaggctctcttttttttttttt

SEQ ID NO: 6181 - DNA, 683 bp, Canis familiaris
  misc_feature (60)..(60): n comprises a, c, g, or t, or includes no nucleotide
gtcatagagtgacgtgtcgccaggccttctgctggaagcccccccgagcaaagtcagtcnctggtctgtaggtatgtaccactgcccctgaagagccgtgtagcaagaacagttgtggtttggactctgcgttgtaacaaaaccgagctagagctccctgccaggagggtccgggaccgacgatgtagacaggtcgactgtggttgggcttaggggcagcagttgcctgctgctaactctcctctgagcaacacaacccgtggcagccgaccccggggcactaggtgcgcgaggagccaaagagccgcccggggcactcagccactggtctcggtgaccgttaaggtacaccaacgaggggagtgggctcaacagactctggagtagtttgcctacagtgtatctacggttttgcagcagatctcaacgctataggcagcacagggataaacatgttaccctgggtgcccctgtgcaagataccagggtcctaggtctccgacagtatagcaacacatgtactaacctgtttgtaacagctggtcagagaagtaagtatggacagaaatgtaaaaaccctttcgaattatagcccacgaatttggggctgggattgttaccatctagataaatatgtagacgtaggtactcattatttattttattaattttttttttttttt

SEQ ID NO: 6182 - DNA, 649 bp, Canis familiaris
  misc_feature (337)..(337): n comprises a, c, g, or t, or includes no nucleotide
ttaaactccggaaattagtcaaaattagtactgtttgattatagtgtgtaacagcaaatttactgaattccaagaaaattagcatagcagctaggataaattataacttggttgctagggtaaaataaactcaagaaaagggcacatgtttattgggcacagttttccttccacaatttagtgtctagcaatgtttgtgtctaaacaatgttcagagtatcaagttctctagtttgatttgtaatccactattgaattaagatttaaaagaacaccaagttcaaaagctcgctaaagataaaagtaagtccagaggttaggtatgatggtttccctnttaagttcctttagtttctaggataaagttgttcagtatacaaaatcaacataaagagtataactattacttcagttcatataattatctattgagcaaatctagttctgtaaaaatgtaagaacagttgaaaaattttttaggaaatgtatgttttgtaacaatagctaagttaaaggtgatcattgaattaaaaaatatagcaatccctaaaaaaggagtcctaatgtataatttgatatattgaaactggcctgaaagaaaagtttcttactgctgatttccaggtttagaaaaacagtagtatattat

SEQ ID NO: 6183 - DNA, 588 bp, Canis familiaris
  misc_feature (506)..(506): n comprises a, c, g, or t, or includes no nucleotide
agttgagctactactatgctccccctagggtcaccttagtgtcctaccaccagttccgtctccaacaaagtgtccctgtcaagtgaggaaccgacgccggctgaccaaacatactggctagttggttgcagctagctctgacgtgtgacctacccccgccaccacagccaggcccagccgcccacggtgccccaccagctgggggagcgcactcctgctgctcgctccgtcgagtaattactgcagcgagatacaacccccgtcaccccccggaggaaaaccagacacgtctctgagggcactgctccacgaggccaccccaacccactgccgcccgtcagtccctaggaaggggggggggggataacaattttgttagaaccggcaccccagccaacccgaaaaatgacagaaactgtacaagtgcttcaccgaacttcagataaataaaaagtagtgttgtcacctaaattttaaaaacacccgccactaaactcaggaggcancttggtaaaatttgtttcaaatcacaatagttttttattgttacccttcacttttttttttttttttttttttttttttttt

SEQ ID NO: 6184 - DNA, 658 bp, Canis familiaris
acaagggcaacgctggccttccagcctgctcctttcagctttgcaagctgttacactttggccacaatgggtatgccagcccccaaggctggctgacacaccaggcagccaaccatggtctgcgccccctacccctccccccttaccctgaaacagaccaaaccacgtaaaatggaggtaagcaaggtggctgttgctgccttggtccgtaccctggctcaaacagatgctttattgcagagttaggagtcgaccctagcccaacaacaggctgatagagccaccacacagtcctgaaaggtggagtcagttgtttggcgggggactagcagcagcagcaacagtcccaccacacaggtgtggggcttgttcggtgccaggactgcgagcctctaaactttccctagctggctaggggttgcgtcaggctcccccaaccggccactgtgcccacccagcttagttgaagggctggtgggttgtggcccctgctaaggggaaaggtaacatgttgggtctagtagtcacagatttagaccccccggggggtatgggtgggtatacatgagaacttgagctgtttacaacggcaaagcatcctgaacagatagtagtttttattttgaactcagtggaaaagaaaagatttttttttttt

SEQ ID NO: 6185 - DNA, 548 bp, Canis familiaris
taggcaaaggcattccaacaactgtaactgcgactagtgagtaatccaggattagcaattggcttaacgctaaaaggatctggtgcgccagtctacttgtagctgaagcccttgctttcctttcttttgtgggcaagccagaagctaatgtatttctctaacaaggaaaagtctctggtgtagctgaacaattagttgcagcactttaacagcgtaagcagctatatgttgtgcactgtgtgcatctgtcccttttaattagttgcctatgatgcagaactggcttaataagcagtacctttgtctgtcctctgtcagggatttgaaggttgtagttctaaaatggtaaactgcaacactccagtaatgatcttaagggttcctagatcgcacaggctagagaaaggtttactttagactctaaaacttgggttgttaccatgttttaagtcatagaacacttgtaaatcatactaagaaaaaaaaaaacaaattatttgaactggtttgaggttttttttttttttttttttttttttttttttttt

SEQ ID NO: 6186 - DNA, 643 bp, Canis familiaris
ttacttaaatccacaggtgcaaagggacaactctacacatttagggttgcctgccacctacaagctgggagtgcaagttttagatctattgtattatttaagttggagccagatttagccttctctctggtgagaagaggttgtcagctcaggcctcctgggcggacagccttgggcgaggttgaccctgctgtggctctgctctgtgctactgaaaatcactgtgggttggtttagaaaataattttatctcctactaggtttgtttttcatatcctactaagtggtgttagattttaactctacataaaattgtcttttcatgtagcccacttttatcaaagagcagtctggtggagccaaccctgccccatgtggagagaacgcaacaccagacttaagttgggttgcaaaggttgggaagggaacccttgtggccaagcaggactagaggtagtgtttgattgctccccctcacacgcagtggcaggttggaagaggtggtagaaaactgaggtgattgtgggaacagttaagaggttgaaaggaggggtggaacagttccacagattttactgttccttcagtaagcgtgcaacagatttctactgaactttgtcatattaaatttgctttttttttt

SEQ ID NO: 6187 - DNA, 650 bp, Canis familiaris
tagatatctatgtctctgtctccacagagaagttgggccattcgggaaaagggtgatacttcaggacccaatacacaattggagttaacaaagttcgcagaactaaatccttgagtacctgagagaccaaacagaattgattgtcatttgtgatttggcggggtgggggcctgccacctttagctgcctcggtagacaagcagcagctgcccaagcccctacagaccccagctgtctggagtggaccacaaacgttagccttttccctcataactcaggagcagtcgtctatgttaggggaagtgtgttgtactgcggggtcaactctaagactaacttttccaagagaaaaaaatagaaagaggttttccaacttgagttaggttagtaagccaagcaggagacccaaagaggtcctggggagggttgtggggtattcaaagtcccagtaggagccagggagtagagcactgggttgcaagacacagggggaacagaggctgagttctcaaacctcacacagtctcaaataccagtaaatagacacctggtaaaggtaaaagtaaaaactttcgatgcaagtttaaacttatttcaaagcacaaaaagaaaacattttttttttttttttttttttttttttttttttt

SEQ ID NO: 6188 - DNA, 643 bp, Canis familiaris
gaatgttgggaaaaatgaacttttaggtaagcaacaaacacagtccagggtcaatgttttgtttagttgaagactacatttatcttgaaatattagacatatatatctgttgacatgtagacatgtttttactagtagaattttcaacctcagtaggggctggatggtgtaatgttagttaacagttaagaatcattttgataacctataaaaaatctaagggggcttggctggggtaggagaatccaatccaagaaagtgggagaggaaaacaaaaaaaagaaagaaaagaaaaaattaaactactcaagaatacacttgtgtccccgtgcctgagtaccaaaataccagcatctgacaaactggttcaaattttttttttttttgttttttttttttttggtccgccttttcaatttactcacaagtaaacaaataaactaacacattatgaactagaaaattttatatatagatacataacagaaacaaggtattctaaaatccttggtacttttttggttttgtttttgttcacatgttaactttaggcttgtacatatctcctgtgagttaaacaacaattcagtcttagaaatggaaaattgctttatttgatccttaattagagtttttttttttt

SEQ ID NO: 6189 - DNA, 466 bp, Canis familiaris
ccctcagctgtgacaggtggccagtcccacgctgactgcacaacccccaaccgccccgtgtcctgtcctgccgatggctgctagtgttagagtgggggcgcccagagccctgggcagcagctggtggccaggaacacgagagcatgagtggctgctgggtgccctggcctccctcactggcaggcacaacagggccctgttggccctgggacaaagcctgacttggtcgaacagaaaaagtatgttcaaaacctgagtacagatatcgtaggtggacagtgggtgtggtcgacaacccgctcccggtgtgtgctcagggacagggcggcctcacccagaccctgggggtacctgcccccgtggcagtgcggagttgccctacacagctcactgagcgggtcccaaagaccaaaccagctttatttgagaagatcctgcagcatgggaggctgcggcaaggtttttt

SEQ ID NO: 6190 - DNA, 634 bp, Canis familiaris
aagaaaacttgctgagcaagacttttatttatacgagttcataaaagagttagtttagataatagaagtttgcagactgctgaactttttattgcaaacaaaaaagaaagttgtctttgagataatgtagtttcagttttgattttttttttttactatatatgctccataaagttatattacagaacaaattgtaaacaatatgccaaaactgagccttggttgttacacagagattataaaagaagattattaggcaagcattcttttatctaggattttgatctttgaaggttgtagacttggattcaaggcttttcaagcagctttgccaagctgttaggtggtggcacagccccccgggagacacacttccacacatcttcctaagccagcacagtgtagaccataagctgcttgcagctccaggggactcacagaagggtataaaagtcaaatgtcagagactctggctgttttggtgaagtagtgttaggtcacaatttttcagtctagaaagttactgagcatgtgggttctgtaagagttaaaagaaatctgctaccttataaaggtaaaaaaaacaagatttatttttgttgaataaaaaaacatttttttttttttttttttt

SEQ ID NO: 6191 - DNA, 594 bp, Canis familiaris
actaaattattcagtctatggacttatcaaaaacttgctcaaaatacattgatgtcagactaaaagtacagctttattaggcttaaaagacacaacatcagcttattaaaaaactataaataagccagcttatgcttcttcttataaatttgtatactacaaagtaaaaaatagggaaagccacatgagaaactcctaagatctaggataaatcagaaggaaacataccaaatagtataattagtataaagaacaaaaacctgtaagcactcaaaaatttttaattgttaaatagaatttcactataatttctctaaaacctataaaatagtagattaatatctataatacaataaattacataaaattaattaattttttaaattatatcagttaagatatttatgtataccattagaagttctaccaagatttaaacattttagcacccctcaaggactaatataagaaaaattatagcagagtaaagattagatatcaaagcattataaaataaatgggactaatctatgtttagttagtaattaatattaataatttgtaaataaactttggcttttttttttttttttt

SEQ ID NO: 6192 - DNA, 608 bp, Canis familiaris
acctctctccccgacccccgtattaacactggctgggtgagacaaattttatgattgggttatgtatatcacgggatcaataagtttaggtctgattatttctttagcaaaatattagcatccaggaaaaatagtttagacagaagtcttgccctttaacatcggagatgcgtacaggttttcactaaaccagggtaattcaacacttgggtaaattttctttttttgaattagagggtttaatgcagctaaactcaaatcagtttgacaaagcctcgagagtacgttaattgaagactaaatatctaggtttgctcaaggaaaaggggaaagagtgtgatcgagataatatcttgctcttctgggaaagctcatttgtgtaagactaagatgaagttcttataaagggggccctttcaattttggggttaacaaattaggctcctttttgacttattaaagactccaaggggaaaagttagaaagcaaattgagaaggcataaacatagaaaatatttccttttctgttaaacctttttcttagttggttcccttttatttataaacagctaaactttttttttttttttttttttttttttttttt

SEQ ID NO: 6193 - DNA, 604 bp, Canis familiaris
ttgtgtgttggaggaatataacgaaagcagagcccatacagccccgaggagttaggtacatcagcgatggggtggtcaaagagcacatcagaaaatgctctgactcaggctttcaggtgtgttccaagtctgaactcgtgttggtagagtaaggataagctctactcccactacttttccagtaagcatccatctgagttgtaggtcaccaatttcaacagggttcccattaaacctcaaaacaaaattttcaagcaagtgtgctagatcaattgagttggctattaactagataagcaaaaaaaaaaaaaaaaattgcatccaaaaacattgcttcagtgaatggctcttgttattaaaagaggtttaactagaacttgatgctgaatcccaaaaaatttataaaaattggataactaaatacagaaacattaaggggctcaattagatgacaacatccagttgggagtttctcagcagaaacatgtttttttcagatcaaagtaaagtttaggagtaaatttttgatccaccagctgattttccggagttattgatgatttttttttttttttttttttttttttttttttttttttttttt

SEQ ID NO: 6194 - DNA, 599 bp, Canis familiaris
aactaattgtaaggcgggtatacaaaggcaaagactctctgaatttgtcagctcgagtagaacaaagaattttagtcaagctggtaattgagagcaatagaaatttattaccaggatgcctgacaccactatatagatcgatatcagagagttctctgtgggtggtgccacaggggaagcgtaaatgctccacctctagaccactagttctgcttctggggagaaaatccagccatctcccggccatactctttagactcggctaaagtttgcacacccggaaaccatttttgagtctctccaaaactggtgggctgtgaaaagccaaagacaagagggagaagcagtgagtaacacttgtacctgatgtcaattggtctcgagatttaacaatcttaacaaggccagattaaattcggcctgtgcaaagtcaacggctgtagtgggctgctaaactggtaattctaaaaaaacttcccaaagtactagattacagagagtctgtcaggttagttagtagccaaaccgttttattttagactgcttgagtttttttttttttttttttttttttttttttttttttttttttttttttt

SEQ ID NO: 6195 - DNA, 613 bp, Canis familiaris
tacagcaagttagtgaagaagaattcaatacgaaccaggacccaaagcttgagtccccagctgcactccctaactaactcacttcaaccaactaactgctggtggaccataatcccacacctgcagcctcagcctgtgcctgtaactcgggtcaccagcttgggtgacctggcagctgcctctggatcagcagaggtggcgtgacaggcagatgaagggtgttctgagtagggccccccgccgacgggacagccccagggcagtaaggagtgagtacccagcggcgaccgtctctggggccgtgggtgtcctgctggcggtgggtgttctaggattgttgaggagcactcaaacacctaaccccctgagagtaacatcctggcatcttgggtctgcccgttttcctaagaaagctgcgtcagtgcaatagagggtctcacggcctgtccccagttcctctatgcacttgccttgtactaagcaaatcaaagataaatcatcagagagtgacttaaggaacctcaactggacacagcaatttaaccaggctatttaggttgagagaaaggaaaatttttttttttttttttttttttttttttttttttttttt

SEQ ID NO: 6196 - DNA, 575 bp, Canis familiaris
gcatttcaggaggttgcaggctgtcttgcaggtctacagtgtgtacagttacgccagttccccttgtgggtagggacagtttcgacgggacctgggttttcaacgtgagggctgctctcgaggagttggggcacctgggttctttcccgccgcaggtggtggcacatttgctgcagaaattggtgcggggtcagtctcacagtgctgggcagggtgccctacgggggccgggtccccttccaagcccaggcctgtttggtcaccataacaggccaaacggggccacacctacaccctcccattaaggaacctgccctggaaactgtggccgttggtctccagacacaacactcacagttagagaacagccatcattgcagtgcccaggtaagaggtttactgtagctgcccgacctaaccactagctccctcagcccaaacacctgtccacaggacacaaagcacaacagctccggccttcaccggccccactgggtcaagggcaacaggtttctcatgtactattgactaggttttatttgagaaaagggagtttttttttttttttttttttt

SEQ ID NO: 6197 - DNA, 138 bp, Canis familiaris
aataattgaaaatagaaactgccgttaaagggtgtatagagagaaactgaataaaagttgacatatattagctatacatacatacctcacctccctacctacatctacatacgcaactacacacatacatacttcggt

SEQ ID NO: 6198 - DNA, 638 bp, Canis familiaris
ttgctggcaggatccggaccggttaacccgggtagttgaactccttgcacatcgtcgtgcaagcagctgaccatcctggtgttgtagaacttctcgaccacccagcagttgctgcagttcgtgctgaaatgcagggagacccttcaggcattccactcactttgagttgtccctaacatacacctggactcgtcggagggaacactgtcaacagtcaccttagaacccgagggcaactcattggaggaagagttgcacaaagtaacagtcccctactcggagtagtaccctgttgctgacacctggttcttaccatttaaataggtgtcagaggctgtgttggcaccaactcggtgatacagcctctttgctcccgtgtggttagtgttagagttcttaagcaaaaccctttattagggttgggcagttgaaccaaagtcccccttgtagtgagcatggccccatgtgtgtgcacagctagactccttgagtcctggccaagccacgtggcgcaccagacaccattccctgcaaaccaaccacaggtcaccgctcagattcgccatcgaaagcagtactagggttgttcaccagagagcctcattcacttattttccgccttggttacagtttttttt

SEQ ID NO: 6199 - DNA, 685 bp, Canis familiaris
tgtaaatcctgcccgggacaaaagacatgtgcgtgcaagcgagttctcgtagcaccaacccagcgacagctttcaggcaacgcgccttccgcccgctaggggccagcgagcccctgcgacgccgcaaacggtgtgcctctacaaggcctactgcgtggggcaacctccagtcccaacagggcgtgcacagccacatactacagccgcttcacggggcaaggtccctgtgcacacctgggcccgctgtccccaaccagagccaggtgaaccttgggctacagatgcgggtagcctccctggactctggcggtgtaagggacaggggctcaggaggcaaccaccctgtgggctaaaccaggtttcagtatttactgtaagagccacaaatcacaaggcaaaagttctttacgtagaactctacagcgtagggctaggtcacctctgggctgctcctgtcccttgccaccatggtggggcatctcagtgccctgctccggggagagtttatgttaaataagaggcacagtaatagatctcgagtgtagagacaggcctgggggcctggcaggctaggaaagatcttatttttctacagagggccagcacacctctgcagcttgcgccctttttttttttttttttttttttttttttttttttttttttttttttttttttttttttt

SEQ ID NO: 6200 - DNA, 563 bp, Canis familiaris
agagttggccggcctgggtcctacccctgtgaccccagttgctgggctctgtaggaagaccccgcttgccccctggtttccgttggtttgaaccacccttcagggacccggcaggtcgggcccacatttgtctgagccttggaaggactggtgcattgcgctttggtgagctcagctactagaccccagggggatcccggcccagcctcccacgcctttgcccaccacttgtacctaccagtggcactgtgggcctaagtggcgcctcccctggtgccagtgctgtttcgctgcttgcaggtccttgtcggttttgttgttggttgcaaggctgggctgcccgccccctgagccccggcggtgggggtgccctcagctgtagcagactggcccgcgcaccagatgcaccagatgcacaagccctcgagacagcccaatcggcccgagttcaagccagagtcagcacgtccctgggtccctgccgccttcagtaaaactaacacgttctcagatattaaaaaacctttacctgctctttaatcaaaatatttatgttttttttt

SEQ ID NO: 6201 - DNA, 657 bp, Canis familiaris
aaggcaagcctttattaaacatgatgtctatgtgaaagtgtgtgttcgagttaggggtaaaccaagcaagaacagtttatgctagtgtgctgatgtagcccaatatggttactctaaaatagtgtcactcgtagggaagcaagctggcctagaacgaatcatgaatcataaccgaaaatatgagcgtaaccactatggtgaaaacatgtagtgcaaaacctgaaaaatcagaacttgctcacctgacttgcaaaactcacctcagtttcctctagacttggactgctgagtagtgctgtaagtgtggacctgacaacaaccatcaggtcaaactgaccagaaggtctgggaagtcatgaacaacaagttcactcaaagaatgcaaagaacagctgggtagagcatcaaagcaccaccgacacaagcaaatgaacagtaacaaaaaacctgggtaaagaacaatgtcgacacatctcactaaaccaagaagtttccctccaacaaaactaggcaaatttataaagagcagttgtaccttttaaatatacatgccacacacaccagttcacatgtgaagacttaagcaataaagcataaaagtaaaggtatacattatttctacacctacaattttttttttttttttttttttttttt

SEQ ID NO: 6202 - DNA, 629 bp, Canis familiaris
atccgacggtaaccgggtacactaagcggatgtgcagcggccccggtggttaccggtgacttgtttacacagcctctctccacagacgtcagcagttgagatattgtatttcaactataaacctttagggtgtcttgatagtaggagtcagatcttggtctacaacaggttacaaagtgtgtttaggttatggataactatcctcaccattagggtaagacatctctggttgcaggtttgtagtcttgtagttaggaaaaggttgtcaagtgctaaaaacgggtgctgagatagttggtctcaaattggtcttatagaaactaggttcaggggtctatatctaaaccttcaggggctttgatatcaggtttcaacttagttttatgggaggttggagttggtcttatatcagtataccttggtcatgttaggagaggattcaaactaaactcagcagcacctggccagtttcatttgcacctctagatgatataacagctaatttgaaaattagaggattcagttgcaaaatgaatatttgttttcaatgaatacagtttattcaactatctcatccacagatactattaaaagccttattttcctactaacttcgacttttttttttt

SEQ ID NO: 6203 - DNA, 633 bp, Canis familiaris
caggtgctgtttggtcacaagttgatactgccacagcgcaggtaagttaagtggcccttagaccgcaggctgattgagaaggtggctcagaccatctgctgtggccctttagttgccagcaaaccttgtattcgagcacctgtttcttgacctgcaactggaggaccacctgcttgactgtggtgagtgtgcaaaaggaaaaatgatcactctttaatgtaagagtctacttcaccaatcgactcttttgcaccattttattttttttagggtcgccagggaggcactgcggaagtgctacaaccaactgcaatggtcgagtaccctggtacctggtaagtgacacgctactggcacccagcggggtgccagccacacatagagagagacacgagttatttattatttataaaaattttttaagactacgggggtacccagggaggcgctgcggaaaggcgccagccaaaggccctgggcgcgtaccgggtgtcccgggtacgtaaccctcgacgggcaccctgagctaggtgccagcaacacccacagccagagacacagccacacacacacacagagtcatactatttatttattgttttaattttttttttttttttttttttttttttt

SEQ ID NO: 6204 - DNA, 611 bp, Canis familiaris
  misc_feature (328)..(328): n comprises a, c, g, or t, or includes no nucleotide
  misc_feature (529)..(529): n comprises a, c, g, or t, or includes no nucleotide
  misc_feature (536)..(536): n comprises a, c, g, or t, or includes no nucleotide
  misc_feature (542)..(542): n comprises a, c, g, or t, or includes no nucleotide
agtcttgtcaggggtgttaaaccgacattacatagtctcctgggacgcaaagcagaactacggtaatctccagtggtggccttgatattgaagagctttgagtgtttgtacaaagagggttcttttggttacccactccaggagtcactagtagcacgctcctaccgcataccagtaccccactacttggagttagtatcctaactgtaagtaaaggtgtcaggtttgtaatcggtaaactacttgaaagtatcaggattacagagataggagtcaggtggagccttccagggttgttaaggagagtactccttccgtgtgtgtctcncaggaacaaaagtagatgaactcgagtttgtagccttaggcttctgcaaagccttcccgttcaaaacctttcctaaaaggaataagggcctttgggcttctttccctaggtgaaacacaaccccgaggtttgggataccgccactccttagcagtgggttgtgtcctggtgtcaaggcctgccctttctggtgctcgaggngattttnaggacnctagggagtcgagtaaggttgacaaatatcaattaatttgtaacatctgctcgcatttttttttttttt

SEQ ID NO: 6205 - DNA, 603 bp, Canis familiaris
aacccagttgctcacgtatgcaaaagtaagggccgttggctctgtggtgcacatgtactccagtacccatggccacactaatggggcataagtaaccaggaacgccaaaccacaagggaccctatggaacgttaccccaacatccactgacgggtgatcaagaccaccttaggagcaacccaaccacaccaattagagggggttgtctctaggggcttagctaggcgctggtccagccaccccctttgctgacatcaagcacctcggtgtgtgttcagggacctcgagcctgtgacaagcccaaaggccctgtgatgccaggacaactaggcagatagggtgtcttgagccaacacagcaacaagaagatggagtagcattacaccaattcctttccaaagaccctgccgcattacagaacattcacacccaccacagtaacaccagcactttgacagaacccagggtcccctgtctgctagttggttgtagataacaacccccagggcttctttgcatagtcgcgtgggtggttgttctaggttgctagagttattttatgctaagttctctgtttgttttttttttttttttttttttttt

SEQ ID NO: 6206 - DNA, 637 bp, Canis familiaris
gtgtgatgtgtgtggctgtgtctcggggctgtgggtgttgctggcacctagatccgggtgcccgtatagggtaacctatctgggacacctggtacgcgccccaggggctttgtctgtgcgccccttccgcagcgcctctccgggggtatccacccctcatagagggaaacacttatacaccacaatatagtagtgtagtatcactttacacttatataccctgtgacaccttagagagacaaattaattaattaaagggggtccctttaggacaaaatttggcttggttcaacctccccttaggtgggtccttgccaagggggtgataacaattgaaccaatccaaattccaagggaaacccactacggtctcaagtctatgttaagtgaactctgagagaccattggtgtagtcagagttgctttagtgaccctacactcacaacactagacaaccaacatcaggtctaagataaagacacaccactagcaacactacaactcctagctcctgactggtggcaaggggtggggtcagtccccacctgatcaccaatctgagggaaagaactggattacctttccaacaatctgaggtaaataactggattacctttccattgacttactgtaactt

SEQ ID NO: 6207 - DNA, 667 bp, Canis familiaris
  misc_feature (255)..(255): n comprises a, c, g, or t, or includes no nucleotide
aaggtttgtttaaagaccagttgcaagatacagtaatactggctcaggtaaagatgttcaagaagcagtacagagtccacgataccttggattcagaaacccaaggatatagaaattatgcccgatctatacaaagtaaatttcccaatgctctagcggcacggactcaactcggcagtggaagtgttcttagaaatagggtgtgtttacctcagtaaaggtgttacctcttgtcctacgggaacaagtacaganctgggataactagagattgtccgccataacctggtaaacacatgtggcaggcttgtgacagttcctgaagactaaacagacaagccggacattctgggaagggttggaccgtgccaatggtccctcaaaccagacaatcccttagaaaaccagcctgttctccgagggaggaattaagccaagtgaaggttttcggaaagctaaatcttcagatttaaataactaccaaaattaaatagattggaaaaaagatctcttaacacttaacaaaattgtgtagtcttctttaaaaggaaaacatcagactagagtgttctaatggcccctgcttcgcgactaagagagtggttttatttgagcagctgatttttttttttttttttttttttttttttttttttttttttttttt

SEQ ID NO: 6208 - DNA, 619 bp, Canis familiaris
cctagcagtgtctttgctgcagtctgtttagcatccctgatacaaatttcctgcaaggagctgtctgacagtcatgaaattgttgtcaggcagttgcacagccctttcttaccgaggtaggttttgctcctcaagcatccggtgtggtagtagtagtagttgaacctgtacaagaggtgttaaaagtagttgcaaccttgttagttgctttcagttaagtgacttcaacagttgttgtattttcaagttgttgaatcagggtgcagcataaaatataatagtcagcaaaaattttaaaagaactaggtacagtattttacatgtacacattataaaaattgcccttgccccaaggtctcagctgcacaaaactgaaaaagcaatatctcttaactaacaaagctgcattaattgcagttgttgccagggttatttggaaagttttcttggaattatttgaacaaagccatggtatcggaaaataaaaaaataaactaagtctcagtaaagatctctgtttcttggaagaaatatgtttgcattactaggctagattacaggcagtattacaaagtagtttaaagtaatttgtaaaatttaggccgacattcgatttttt

SEQ ID NO: 6209 - DNA, 530 bp, Canis familiaris
cttcctagttgataaaaagattgtcaaggttcaacttccttagttaaacaactcctaagtacagacgaatcgagtcaatcctgttaatcaattctcttcattacaagggtcatctgacacagagatgcagaatattatcatcaacaggctcagttagctgaggaaggcaaaaacactctttattagtatggtaatataagcattggagcacctagcggttaataaccaattggcccttataggtttagaaaggtatacctggctaaagaaataatagatcatatatgaaggactattctttagctaagtctgttgaggcctgcaggttgaaccttaaataaggtagggatacttagagggaatgcataactgctgctgcagtattaaaaaatgttacatcagaaaactaaaccgaaaagaacccgatagtttcagccctttcaaccattagagacaggctagatcatacaacctatttagactaagtaacattttttttttttttttttttttttttttttttttttttt

SEQ ID NO: 6210 - DNA, 679 bp, Canis familiaris
gtccctgtgggatggtagtgtgtaagttcgtgtcggtggccctgttgcccaagagccccttcccttgggggtttgctgggcgaccggttgtccaccccctcccgctgcgtcgctctttcttgccaagccaaggcaataggtccaaacgctgaagcgtaggtagaaatctggttccctgcctgtgacagccaccccgcacaactccccgcgtcagctccagcaacaccctcaattacaacggtgtggtatcaactttcagcggtctcgcgctctgtggcctcaccctgcacctacagcagcctgaggtgcccgttgcccggcccgcaaaggcccgtggcaggcccatgtagcttggtaagaaactgggtgaatttactgttggtgttgttgccgctgttcgagacgggcagttgggacgagacgggcagttgggacgggcaagtcaatacctaaacttgaaccacgaacaactccttgaagcctgttcagtatctactcgccgtgggggtgagcctcgaagcaccacctgccggtttctaaaaaagttttagagtgaggagaggtatcaagtaggagtatttccaagattttgcttatcaatggtggcagtcaacaaacttaattttctagatagcttcacctttttttttttttttttttttttttttttttttttttt

SEQ ID NO: 6211 - DNA, 679 bp, Canis familiaris
taaatcagtgactacataaacaagcaaacaaggattgtcacagctattgttggacagcaaaacacaagaagcaagccttacaagtgggtgcgcaaaatcctatgataagatgattatcaccatgttagtgcaagggaagtataaagttgaaaattttaacaaagggaaacaaaatatttgttcccttctgtataacaatgtcacataacacccagccctttaaccatgcaagatttaactgtctccaacttggtaatgtttctcatctgagcaaggttaagcaaggaaatttgttgggcctttccctcacaatctccagtacactaatgtaggaccattaacccaaccccaatacccagacaaccaaaaaatggtacacacaaatccatccacactcccctgggtaaaaaaataagatattgtttgaataaacttaagaagagttagacaatactcaccataaattaatcctcacggcgcttacgatgcagaagctaaaataattttattataatgtaaagcaaagaagcttaaaaataaattatcattctcagttcagagaaatagagaagcacagtatccttgccagaaatcaatttttaattattttctttgagggtctgaatttttttttttttttttttttttttttttttttttttttttttttttttttttt

SEQ ID NO: 6212 - DNA, 633 bp, Canis familiaris
gaaccaggtttttcgaactggggactttaggtacaataggttacaccatactcaaagagtgatacaggtagttgcttttacctgggttgttgcagaagccggtagtacccatagtgtttgcaagccttttgtaggagaaagtgaataaaaccttggaaccttacaaaggattctggcaaacagtgttgtcttttattggttgtaggcacaggccattttgttgttaatcggttggttaactgcttgcatgtggtggaacagtccttattgttgtcttcaaacaaaggaggattaacacaaacatagtaagtaatccactacaggcccaggaaagttcggcaggttgcacaggtgaatttagtaagagatgtcctctcaccttttcaattgcacaggtaggctgcctagtgtgttgtaccagccgatactgcccaccacttagtggccttctcccaacgtggtaaccacttacacatcaagctgttctgccccgtggccagagtcatagggcacagtagggggcttgtgactgcttagtttagacagtataaaacaaactcatttagacagtataaaacaaactcattatagtgatttttagcgcaaactaaaatttttttttttttttttttt

SEQ ID NO: 6213 - DNA, 636 bp, Canis familiaris
tgcagctgcgtgtccttggccaaacccgttgcactgttaccaacgttgtgagtgtttttaggtagtcaacttggcagttgtcaaactgtacgtggggatcttaccactcccgtcataattttagggtttaggcagagatttgagcaaaattttgtggagtataactgacagatggggaagtcagttagccctggcaaactcacctaaagcccatgtgggtggtggtggttcatggactttttacacacgagtcctgctgcataataactaattcaatattgtagaagcctcaggctttctattacaagaggcaacacaatgattccctttgcaaagtgaaaggaagtcactcattggagagtttgagccgtgaaagggttatttgactggtttgagttctcagtttatctcaattttatagatctagctaaacttaccgaaaaatagttggacagcgttaaacttgttaatctctactgcagaattcccctttaaagtgcttgcagtggttctcctgctaacaattagatcttaagaggcatagttctaaatttgaataaagcaaatatataagaatattatttggagagataagctttttttttttttttttttttttttttttttttttttttt

SEQ ID NO: 6214 - DNA, 640 bp, Canis familiaris
  misc_feature (59)..(59): n comprises a, c, g, or t, or includes no nucleotide
ggaaggtcagctgctgatagggtgtattttcccttagaaagacgctttaggttttaaanatgctatacatgctatagtttccgaggctctgaatgaggtccaagcaccaacaagagtggctggtctaggattccttggctggtggtccccaaatgcctagcctaaacagcttccaactaactgatactcttcacagcagtggggacaagctagttgaccatccctgttacaccagtgttctctccaccaccatctccttctgcacctactgcaggtactctgctcactgggttttcaagctactggtacccaggggttagggtgagcaggtcttgtcactgcattttcctttctttggttttgttttttgtgctcagcggccagaggagaagtggcactctgcgtagcctacctgcccagcctctactgtgtggccgaacgtcgcatcggcctcttgtaaggcccccaaacccctaactcttgagccatccgctggttagggtaggcaaaacaggccagcagtagggtcagagtcagattcttctggtttggcttagaatataattggagtaaacagaaccccacaaaggtcttttattttatcttgaaatccaacacagattttttttttttttttggg

SEQ ID NO: 6215 - DNA, 651 bp, Canis familiaris
aactgatggtctgtgggattctaagtcgtcacgcaactaaggaggtttagccaccgcgggttggcccggtgggcgttggatccgtttgctctgattactccggagaagtataagactagttcctactcaagctggtttcctgcaactcctttgttgccatctctgttgatctaccttgtaatctaggttacctactcttggccttcaagttggttctgtggccctgtttgtgaattgccccaaataggtctggggcagctgttctttacttgctctaccaagcattaaactttttcatcctgaacaaataaggagttttctagttacctgtaggctaggaagctcaccaggtcatccgagtggtcggagagtccccaatatagtaaaacaaattggtaggaaatgtttaggtttttagaattcgttcaaggcagaattcaaaggtagatactccagaagaccattcaggcagcagcacaactacctctcttctcctggtcaatgtctttagggtcagtagactacaagtgcacaaataaaagtccaagtaaataaaggtgcggtggctaagaaaaattgtttttttctagactagatggaagacattattattttggctaaatttcacttttttttttttttttttttttt

SEQ ID NO: 6216 - DNA, 674 bp, Canis familiaris
agataaatttgatgacaatgagtcgcataaattctaaagttaaaagggaaaataggcgatagttctgagcaacttgagtgtggtgagcaatcacttgggagccaagaaatggactcggtgctcaatggggttgagcagtgggatgtccaaacgctaactactatcctatcttggatctttgcaggagctaagagctgccaaggttgaagcagataagactgtagggctacaggagccaaagaccatagagtagggagtcaagttttaattcctgatcaaatttacttagcatactggcccactataaaaatctatatcctgcattgtaattgattagcctcgtgactctctttgtcaaaattttaaatttgctcaatctggaccatttgtaaaaaaaatttaggtaagttatatgttggcaaattatttggccaaggcaaagttgaaaaattagttcctgggtattagtccacaattctgttagataaccaatccaacagccataggtatgctggtctaaagtgagaaactaattatagatttaaatagactaattttaattttataaaaacctaaaaagataaaaacaccagatgccaggtatgaggcctattctacacagccagcttagtttacatatagatgttctaaaaaagaaagcaaacactggtaaa

SEQ ID NO: 6217 - DNA, 111 bp, Canis familiaris
agccagcttgaggggtctgcacagtgtcccgtcgtacacctccagcaccacacatcagctgggagggtgcgctccagcaacactttccccaacacatagtttatttagcaa

SEQ ID NO: 6218 - DNA, 521 bp, Canis familiaris
cctactcccagggatttggcgactttgaagccttgccaccagacgttagacacaattgaagtcaggtagtcactcttagaatttgcatgtgatgcttcaaagccacctaagagaaaagcctactaggagaaggtgggacaaggccgcactcaggtcccccttcagggtctaccaggtggctgctttgcccaaccaacaagtttggtcctggacacacccgcagtcagctgctgagggctatctgcgggagaactacactgttcagttggccttacccgtctgccacagcagaggctgcaagttctaagaattttaagggtagctaggttgtctatccctataaaaactcacagtcaaggaaactggctacagaaagttttgcaaagggaataaaggggttgatttgggtgggttttgaccacatacctaactcaagaggttgcatgtccaggagacggggtgtcataaactgtggtttagaacagaggtggtggtctttatttcaataataaaagaaaaca

SEQ ID NO: 6219 - DNA, 611 bp, Canis familiaris
ctattactattcttgcacatacagacaccgactttctgtacaattacccaataagctatcaccactgaatgactataggctcaggaatacgatgcggaacaataactttctcctagttgaatatatggagcttctgcacattattaagccctaggaaattctaccacttatcataacagcaatgccttcaccctaatcgatcgttacctatgccgatcatattaacacgctcgtggtcaactttcacaccaaccccagttatgctgccagtagtcataatgcttgccactctttacaggcacacccaccttcttaattacaatacggtgttcataaagatgagtataccactaacactagtaccctctaatcataataccattatggttaattctaatactactccgcccatatcactcaaatatataattactcctctcttcgaggatttataaccctcctagtactttttatactttcctactaactctcgtgttttagcccattagtccaagctccatcagccccatcaccaccatacccaattcccattttaataaacacggaccctacatcattttttatctttcttgtttttttttttttttttt

SEQ ID NO: 6220 - DNA, 508 bp, Canis familiaris
aggagcgtagattgtccctactcctacagccgacgggacactggtgcccggggaacaggagaggaggggcagtgtagaacagaaggcagctaggtgccaggacacagagagcggcagaggctcgcctacaggcacagggggcccccctagaagggtctgcatagaacccaggtgtgctcacaccctgccggcacttttcaggccacggcgaccgagagaggccagtgccctgcggggcagtctggagctgactcctcccggactctcgcagcccctgtttcgaaacaacagtctaaaggaacctgtgtcggaaccaacaggccaattgggggtagtccccctcccctccttgggcctccagcgggcacccccttcggcccctccctctcgcccagaacagacaggtttagaaaatggaggaaacacatcgttgtcaaaaaaatggagggggtttgtacaataaaactaaattaaggacgtcactagttgaagctagaccaaacaggta

SEQ ID NO: 6221 - DNA, 603 bp, Canis familiaris
tgtgtatgggcttacaggtcctgtgtgtgtgccccctggggtcctctgaatagactcagccctgtgcggaggggcaatttgccttcgcccccccttctggcactcagaatccatatgctactgttcagactctacacgaccccaaccggtgtgctgggcaagctcacaaccccatgttcatcaaagttggcttaatgttgcaaagaaactaaaccccagggataagacaaagcctggtaggaatggatcttcttggtcgcaaataatgtactcagtgttgtttttgcctttcccgcaacacaggatagttctacatgaaagtgtgcttgcttttctgatggcaagataatgagcaaattaggtgatcaggattctaaaaacaaacaagtatggttacagcaatataaatgcctggcaacataaactatcccacaccctcatctttcaaaccgagctgaatccaaactaaaaatttgcttaaactcagcatttatatttaagataaagaggggaactatgaatatattagcagttgggttcctcacaaacgaagtttggagtattatcaatttgtttgtcagacacctctgatttttttttttt

SEQ ID NO: 6222 - DNA, 491 bp, Canis familiaris
tagattggcaggattggtagtcactctcttgcaataggaaaactaatcctgtaaaactgtaacagttagatgtaggtgacacgaaattgtgactcctttggagccagccccccaaaccagcattgttgtgacccaaagtgtcagacccttgtgagactgtgttcactgagggctggggaacaggacagcaagcctacatggagagggtagagtgggtctaattagtaatagaagttacatggcacatcaccacagtggtataggttctcttggatgactccatactcaatttaaatcttaaccttttgtaatcatcttcctagacctagcactgtaactttaggaaaaactatactcaaacgggatgattttagtaaatctaaaaaaacaattaaggctgctccttaagcctaaccaatctcacaaagtaaagaaaaagaaaagaaaagaaaaatcagtgcacaagctagtaaatacaagagaatcctacc

SEQ ID NO: 6223 - DNA, 565 bp, Canis familiaris
gttctagcgcaaagccttgttgctcttcttgttgggccagttgttgtagctggccttcttagccttggcctaggcagcgcgagcagtggcatacttggcacaagacttgcccttggtggaattgcccttgtaccctttgggcggctgccgcttgcacttacgtcaagccatctacgcactccccttgcacgggtttcgagcacgagcccgctaagcctttggacactggcacagccggcctttggccttggccttggcactttccttggccctggcagctgcagcgtccccggcaccggcaccggcaccggcaccggcaccggcaccagcaccagcaccagcaccagcaacatcaccagctgcgctggcaccctttggagccctggccccctctttggcccctgagatgtggcaacagccagcctgagagtggtcggttggtcaggatagtccccagggcaacagacagctagggcccggagaccaccagagcataaagatctttatttccagcggctggtacagactgtttttttttttttttttttttttttttttttttttt

SEQ ID NO: 6224 - DNA, 620 bp, Canis familiaris
cacctccttcagtaggcgcaagcgagatccctgtcagaggaggtggaaaggcagggtctgcctccgagccaacgagggactttatcgctcagagggctggtccgcgtgcattggccaagcctccatagtatttagccagtgcacttcccacttcgaggcccacggcttgtccaactcagggggagcccagatcaacgggggccacaactggcgccgactgccaggcctggccccaggttgaggtgctagaggagggcctgggctaccagctccggggcggcctgcagctaggggcccggccctagggctctggagtgcgcaggttccacgactacaggcaacgggccaaagacagagcgcttccgccagagcccctagaggcgcaagccgcctttcccgttccaaggaagggtcgtcgtggtgggcaacggcgtaggcaactcccgcgtggtgccctccgcagaggtagagagctagcagtcaagtgcctggacgggcctcgagggggatgcgaggctggcctgggcacagccaccatgggaagggagggtctggttatttcacccactgcccactggctcaagaaaggaactttttgtttttttttttttttttttttt

SEQ ID NO: 6225 - DNA, 381 bp, Canis familiaris
agattagactctccaccttaacccaccatgcacccgtggatacataatcaagtgcccctactatgagattatgttggattacgcattctatatcaacttgccaataactaatcttacaccaatggcgatataaaatcgcataatctggccaccgttatcatagtgtctacgaaatcgtacaccgtaggggatatcggtacatccaaagaatatgcctcaggtaaactcggtaatctcgattaataaggcacatctaaccactacgagagcaaccaccgatctgcatatcatcctcaactctactttcctcctcaacggtaaagttgccgcagctagtataagtctcaaagaagtagatgacaggcataacaagatagatac

SEQ ID NO: 6226 - DNA, 527 bp, Canis familiaris
taagattttagaagcatgggtgtaggggggagtggggaacaacagtgttcctctgtgcatgtcaccacaacaggactaaaggggacaaatttcccaaacagaccagacctttagaagggtgaaaactctaaagagcgaagggcaacaggagaatggtaagtgaccatgttccatgaggaacccatctttcccaacctgacacagccctgtgcctgctatcaggatcaactaactgtaccccttgatacccactaaatccaaatttgttatgcgaatgtcacaggcagccccccttcccctgtatttcccagataaactaacacatcactactgaatcgttcaactcagcctgaggccagtagtaaattgaaagggtgaaggggtgagtggcccaatcagttggacaggccaagtcacagatgccatttgatcaattactgacggagggtgttgcctggtgctttcctgtgtacaggatctgtttggttgggtataaataattctggtgaagacaaaaattttgaaaa

SEQ ID NO: 6227 - DNA, 593 bp, Canis familiaris
  misc_feature (126)..(126): n comprises a, c, g, or t, or includes no nucleotide
ttagcctgccagtaaaggtcagggaatattcactgtcacaacgtcctggtgactttcagtccccatactgcaaattacgtcggtttgttcaacttagctggtggactcttggaagggaaagggtanagttcatgttgcaattagaggaaaagtgatttgctaccgtaaagaccccggtggagttgtgttccctcatagaaaaggccaattttaacaacagagtttaaacttttgagagttcaaaaataacaacctttgttaagattaccacccctctgagttgacatgtgtacgcttgagctaccagtgggtggatcaagttggctagccaggttgaagactagaaagagcctctaaactgaagtgaaccgctgagaataaaatttagagaaccactgcgtcttagatgagactcgaatctttggtttagtcccttcccacctgaaagatctactcgaccagctagaccctctcctcaaaaactagtccaaaattattatataaggacacagagcagatgaggtttacaaaggaaaagctactgtgattttattttatttccctactctagaaggtctttttttttttttttt

SEQ ID NO: 6228 - DNA, 300 bp, Canis familiaris
caagccaccccacccagcctccccgcaccatgaataataaaaaaaaaatattcctcctagagtaattggacggcgcagccaccgtccctcactgcttagggtttagttaaggcaagacatgccccctgacagggagcagacctgcccccctcacagggcacaggggagggaggccttggggtcagggaggaaggggcacgggctcccatccccacctcctcaggtggaccctcctggcataatttggggttagaatcagctttttttttttttttttttttttttttttttttttttttt

SEQ ID NO: 6229 - DNA, 367 bp, Canis familiaris
aaacaacacactcgcattggataggaaggagggaggatgcatccagccatagattgtgtacgtaagtacagacaaagatgatccctaatactcgcgggagaaacaccacggacggaagcgagcgctccctcccagcagcgagggactatagacccgcgtcgctgtcagctgtctaagacccatctccagccagtttacaagccgttgggccaaaagcgaaaccaaagagaacagcagaccgggcgtgggagggtggacggcaggcacagaacagaaataactccttaaagatctagtaaagaagaccaaagcatcagatttctgatttatatgaaagcatttttttttttttttttttttttttttt

SEQ ID NO: 6230 - DNA, 683 bp, Canis familiaris
tggcccgttcttttgagcaactgggtcttgcccccgccgtgcgtgagaattcccggccaagggtcgtcccgtcgccggtcatctaggtccagcaacggctaagtacaaaacttgctaggagcggccaactagcagcttgccagtttgaggagcgcaaagggaggccaaacaatcagcacccaactactgcaaagccctcacccggtgcaccagtggtctcatcatcctctaagtagtgatgcaactagcaggacctcacacagcagaggactagactatacagctgttgcccgctgcacccaagtctcccccccagggagtatgactcgcccataggtctaacacaccatctctcatacacccctcggcgcagagcgcccaggcagacgacatcgcgcacaagacccactcgtcagacagaaacaggggcaccccaagtatatgtgaataaaacggggccaagcctgcaagttaaggtgggttcccggtccccaaaccccagggtaaacatcaacagcagggctgtggggttatccaatggccatcccaccagccagccaacccctcccagccagcagcagggggtgtagcagacctagaaacatcgagatacatcacgacaaaaaagaagaagaaatttcctgaattattattttaaaagctaacaggcagaacaaagcgtt

SEQ ID NO: 6231 - DNA, 646 bp, Canis familiaris
ctgtggagctaaactgacctagtttgataagagctagctaaagccaccgactgatagtagtaggtagcatccaaaactgcagacatattctgaaactgggcagataaggtagatgctttactcaaaacccgtaatttttacctaaactctttggaaaaaactgcaaaagctaatgactggtcatattggatacaaatatgtcggaatctgaggtagtatggaaattgttgtggcacagtgttagtggtccatagggctgtttgagttggttcagaggcaagccaaggagcagtggtctgtgctgcattcactgcttttacaaggccttataacaagaacaaagcagaataccaaggaggaccaatccactacaggtttcagcagacatccctattagtagttgattctgtcttatccttcagggcttgaggagtggtagtcctcgatgaagcatgtgctgttatagtaaaagcagcagatacagttgttgtttaaacaaaccgagcaggagtatagcatttcaatgcacactttggattcttttctagttatttaaggttaagtacctagttaaaaaagttaaagatttagatgataatttttcagcttatttggtacaagaactaagaatgaattcacttttttt

SEQ ID NO: 6232 - DNA, 595 bp, Canis familiaris
gggtggattgttagcaatacatgttgggctcaggcaacctcatactaaaggcaaaattgcctttaaattgtaacaggagaaaggccacaactaacaagtaagttcaaagatgccacgccgagggtggatccaggacaagtccagtggtcagtggtgtgcaggcattgagaatgtcaggatagctattgtttaattatgtgtttgtacagttttctgttgatcaccttttgtagttttaccggttctcaatttaattgcaaatgttgccttgtcaggcccggccacccaccccccccgggcgctctgcactgatcatctgctactgggccagccagaggacaaacctagcacagcctcacgtgtgcaggctcaaaaaaatttatgtctttagggagaataaaaataaatccaaaaagatttgagtaaaactgacaacagaaagtggaacggggagtaccagaccagctcaagagatttatcagggatactcgcacagtacatcccgcaagccgcacgggaggcagagctcagtggtcccaactagactcgctaagcagattcttagcattattttctacacaaacaaacaattttt

SEQ ID NO: 6233 - DNA, 573 bp, Canis familiaris
gagaccgaacccggacagccagagaaactgtccacacatgttggataaaaaaactgagaagtagttagagaagaataagtaaaaataataccaataataagaacatacataccaaatacagcaatgggtactccaagtccaaagaatagaataaatagaagagggtaggatagggagagaccgtgattggggtttactgcggagatcttctacatatactaaagatcaaattaatcttgactcttggtttcttattgaagtttaccatatattctggaaatatatatatgttatagatataaagttgcccacatctgtcagtgacatagaaaatcattaacaaagaacgcagagaatccctacaaggttatcggagagtgagaccgcaaccacacccagtggccaacctgcaaggccccactggtgtgtgcgtagcgccttggaagtgagaaaccgctcttggcaaaatccacaggaccctggtgttactgtttcacctgtctaaaaggttacaacttgggctctatcagtgttctttttattttgaagaaatagtgcttttttttttttttt

SEQ ID NO: 6234 - DNA, 611 bp, Canis familiaris
agcaggtcatggtgtcttatgaaagaactagcctacagggtgcagagtaatgttgagctgaaggggactgccagcggggcctggtttggcaaacaggacggggttgcaaacttgcatagtcaagttgctcctgctggttactccctgttgtatgtggcgctttgagtggccactgaaagagtgatcaccattgatgtgcaagccctacatacaactggcctggcaccatgtgtttctgtgccatatatatatctataaatctgtggagggctttgccactctacagctgggaatgaccacttgcaggtctgcctggtgtgcccgaggatatgaatccaacctgtggactgctggacagtgtccctgtttttttggggtataaactgaacttgaactttggctgacttgctgggctgccccggaggcactgcggaaatgcgcctccaactgccctgggccaggaccaggtgtccctggtacgtaaccctctctaagggaacccagctaggtgccagcaaaacccacagccagagacacagccacacacacaaacacagaaaaacactagttagttatttattttacaaatttttttgttttttttttttttt

SEQ ID NO: 6235 - DNA, 101 bp, Canis familiaris
ccaaaggccctgagtagaggaccaggtgtccactggtacgtgacccgctactggtacccagctaggtgccagcaacacccacagccggagacacagcctac

SEQ ID NO: 6236 - DNA, 474 bp, Canis familiaris
gccaagaggacctaacagctgagcccattccaggatagatagcaagttattgagacacccctccccccccgtagacctagaacaatacccctagttccagggttctaatcacatacgggctttggggtcaaagctgtagattaatctaattagtaaaaaaggtcttggagtcaccaggttattccccgagggcaactagattaccaggggtaaccaaccaatagggtggttggctggtggactgtgtggttgatggtgtatatgagggttggggactgtgcagaggttagctggccggcgccctctgtggcatgttttggcttctttaggtaacacccaactgtgcaaccagtgggttcctgcccagcagtctcaaagtcaaatgccctgtacaatgttaacagtcagcctgttcatattgtgttatttatcgagaagaaaatttttttttttttttttttttttttttttttt

SEQ ID NO: 6237 - DNA, 652 bp, Canis familiaris
tcaggcagtggtctaagttggtggatacacgaccccggagttgttgtctatgtaggtcttgactccaaaccctgcccgacaccactggtcactcaacgccacacctgcaactcgctgcatcctccggccagactcaagccgagctctgcgggtaagcccggtgcccactccccaccacggcgcagctcaacccctcctcgacctaccagcccctgtcggccacctccatcaacccgctctcggcctaccgcatcccgccactccacttccccctggtcccgcactttgtacacgagacgcaggccagagtcccggcctgcctgctgccaggtccgccatcacatcgcccggctcgaccccagctttccgaaccaaagagggtaatggtccttgggtacctgcgggctaaatactggctctgaccaggatacagggtattgtttgtaaacgaccctcgcccagcaccaacgacgcgggttaccctgggggacgccctgccggcccccggccctcgaaaacggaggtttgaatgtgcgtgcttgttctccccgccgtcaccctgccaggccgttttgtcttttctgtctctatctctctggtgggtttcttgcttttgtgttttgtttttttttttttttttggcttttttttt

SEQ ID NO: 6238 - DNA, 579 bp, Canis familiaris
aatggccataaatggagtctcatatgttcttgaaaagatctttttgctggcaggatccggaccggttaacccgggtacgtgacgcgcggtggcggttgcaccagagcggacttgtaacggcatctcacgattacctccgcctaggccgtggttggctaagcagcaggtggagattaggtcgaattatcagcaaatcttgtggagcagttgtccgcccactacctcgtaggccatgctcgaggttaacgcgttgcagcctttgccaatgtcttgcgccttgccctacaaagagagcaagctaccttcagagtagtgccatagatagacttgaaggaggtggcccaaagagcagttctcctttacttccattaattggaagtagtcttattgtttcatggggttagggatggccacagattttaagtctgtgtgggttttccccgatttgaggaaggaagctgaagagaggaggaattggtcataggctttgttacactggcgtttgtagaatacgtggttatcaactttagcttgtttagttctttattttttcaaggaaaaagaaccgttttttttttt

SEQ ID NO: 6239 - DNA, 526 bp, Canis familiaris
gaccgtcctttgggaaaatttagaatgtaaaaagaaaaagaaggctgccctagcagaaggtaaagcatttagattatgacagtacctagtcgcagttatttagagacaaaaaaaatttagagcagagatttgaatgacatcacagttgcctacaaggatttcatccccttctgagagttgaatgttaaccaactgggagtagcctggaacctcacgtttaaataaagcttccagcaagggctctgttgcctaagacacctctttccaaggagaggaagttcagtctgaattagagaagagtccaggtgaactccgaattttgggactcccttgctttgaccaggtgaaataaaggaataatagtaagaaggctctaccatagcttatatacatttaagttaataggatactgtattttaatatgtagggtaatttgcaagagatacgacctaatactagagattacttatttcgtaaattataacacaagtttttttttttttttttttttttttttttttttttt

SEQ ID NO: 6240 - DNA, 623 bp, Canis familiaris
  misc_feature (187)..(187): n comprises a, c, g, or t, or includes no nucleotide
gggaaggatcagatagcaagacccaaccacaagccactgtaccctcccttgacagaccaccaagctctgtagctatctcagtggcccagctgcagccaccagtggactctctgccatatgggctctatgtgcaggttccctcgccagctgcttacacccctcaaagcagcaggccctaggcaagctncccaggggccactacacccactgagctcaaaccaaccccctcaccaaaccccgtggccccaaactgactcaaggtcactggccaaggtatcacaagacacctacaccctacccagactccatgttgcttacctcccccctatccatgtgcctgctggaacaaaagtgagagtggcaggagagggctccaccttgggtacccatcccagccgcaactcctgaccaggggtggcagggtcaccccctccccctccccttgccagggcctatgcaatctaacctcatcagggtgttgtttgtggcaggggccctgtgagacacatacccagggtgccttgtcccctggggcaggacaggggctggtgaggtgtggcggagggccaccaaaatatttataatatctattgtccttttttttttttttattttttattttt

SEQ ID NO: 6241 - DNA, 667 bp, Canis familiaris
tcaccctcttaccaaaacttgagccaactggtccaacaggagcacctccgtagccaggaggccccctaagagatcctgattgaattaggtcgttagtgtggtcgcaaagcaaaaagttgatctattttttgctcttgtttgcttttataattttaagcagggaaacctcattaaaaattgtgggcctaacttaggttggttccttcaacaggcctccaacaacctgttgtttgttataacaagcccaacaaggatcaagggtaggataatgatctacagtaggtatcttactgtatttttagattttgatttactaactttagagtaaaaataacggaaaaataagttcgaatttgagtagttgatataagtatgcacaaagtatattaaagaaaatttttgaaaacgtaaagtttttttttttgaaaacgtaaagaaatttaatagtttcctctctaaatttttccattttagagggaataagaatgttacagcttccactaaggctttaataaacttgataaaaacatattactcaaaaaccccatttatttctctcaaaattttcttactctaagactattaaatttctttagtagccacacttctacaagttcagcacagacatatggtatttatttccaggaccacaagttttttttttttt

SEQ ID NO: 6242 - DNA, 609 bp, Canis familiaris
tgtagcctgtacctgggggaagtcgaaaacactaaggcagtgaaaacagggtaggactcaaaccagatggtgtagctgcagctccaccaaaccagaaggctccagagtacctagtaaacaacaccaagacggctgaacatgaggggtgccaagatttaagtcttaacaagctgggtaagtgcactggaggatccactggtgtgcccgccccccccccccctaccaaccggccacccttcaccggcaaagagtgtaaacacaacgaattatgtgccagtatgtacctgtgtgtctgtggctgaggtggtttggtgttccaggcttttgcagtcggtgggtcagtgtgttgggttgtgccctccgtgggtttgtgtcaaggtgtgtttgccggtggagggttgagtgagtggcgctagggtgactggggtaatgggctgtccttagttgtgtgcctacctgtgagaggggtttaggggagcgtagttgtgtaggagctgcaggttttctgctttgtgttccgttttgtccaagacgtgaagtttttcggtgtgtatttgcctgtcctcggtgtttttctctggttatttagggtgccagtcaaccatgtaa

SEQ ID NO: 6243 - DNA, 646 bp, Canis familiaris
aaagaatttgttcccccaaccgcgcctcaggagttatgggtaagtagttagggttgtgaagtgactgtcctgattgcccgaacagggaaacaaggtatagaaccctagatggtggattttccttaacaggttgataaatagtgcaacctatttctcaaattaaaatgctattagtaggccaaggtaagacagtccactgatgcataatttattctacttgattctacagatactggcccatctatgttctatctgaagtgagggtgatttcttttatttttgtagagagaattaggcagagcgtgtttttacgggtatttggccatttctggttcttcaactctgcgaagtagcaggtatagctattggagtaggctttggaaatgttctctaaaaaaactttgacatttacattttccctgtgatttctacatagcactgtgaatgctattaaaggtgaataactggttaagctgtgtttagctaaaactctgtttacttgtagaataaaaagatatcatatactcaatgtcttcagagaaactaaagcagattactgaaaaattttgactgtaggtttttgcttcagttgaccatgttttatgtttagattaaaatttcataccttatttgcaggtggtggttg

SEQ ID NO: 6244 - DNA, 526 bp, Canis familiaris
agtgttgaactctttccctatggatcataacaagttgtaggtgtttgagtaggcaaaaattgtagacatacagcaattcacaggcaggtaaaattccccctcagcaagaccacacggagtaggataagcacaggtaaagaagagcctcagacgcatctgcagacgtgccgatagaacccacagtgttgcagtgatacataggagtcaaggttaaagagttcgtgtcctttgaatattctgtatacctacaacaacacaagaggaagaatgtacattttcagttgtcctcagttgttgctgggccacatccatcctttgagttacaagcactaactgtttaaattgcaaacaaaaaaaaatttgatttgggaattaagtctacatttaaacctaaccactatgtgcaaacacttgtaggaaactaaggtatatgggcaatttttactcaaattttctccttatttgaatccccttacagagtttttttttttttttttttttttttttttttttttttttttttttt

SEQ ID NO: 6245 - DNA, 639 bp, Canis familiaris
acagggtagaatgtccaggaatgtaacttttgaggtaagtttaacatgtctgccattcagtgtacatacctgatagaccatatcagataggcgcccctacccgcacgggtcatcgaagaaaacgtgttctaggtggtcattaaatcctttgggggctagagcccaaaatcactccacagaggtactcgtccgggctccagaggagggggagtgtgacttagagcaccacacctggatacagtacgttcccagaggtactgggtttacatttcactccatctagagctgtgcagtcaattggggcctctagcctgtgaggatctcttttacaaacggtctacagagagctgcagttgaagagttgtaccgtgtcacaaactgcttactgttctccgtttcctttgtctcctttacatggagtaaccagttgcattgcggcctctacagcctacaggtagaaagaaacaggttgccctagccggaccaagtttgtgaggtaacagtgacatgaccagtttctttgttttcattaaatgtgagaggggtacttcatgcttaagttgtcgaaaaatttgcagcaaccagaaagaagttggacatgtaaaatggccaagtcaggttatatattgtcagagctcg

SEQ ID NO: 6246 - DNA, 614 bp, Canis familiaris
gtgcacttggtaccaaggccaccgagcaaacaaaatctggcagaaatctgtcttgtctggcctggctgtcggcccagcacaggattagaaaagcactgtggttatagtcctaagaatgaaagaagttttgggtagtagagaaaaaagagcctggagaaatattaagattaccgaaagttataatagaactaattccacaattttagtgagtcaaaacgtaagaaaattctctgatccattgtcattagcaaacagaggtctcctcagtgcacagccactttcacctcccacagggtcctgtgtccacagacccaggaattcagcatactgagaggtttcagtgcaggaagatataacatttggtgatgttggtctgaacccagtgtctgggacgaagacacagctggtggttctgaggccaagcaacatgtcggacaactcagagagaaaattttagtcttcttcttctcttttcaaaagtccagattcaatttgtactatttcaactggcttattataaaacagagattgcaaaattttaataaaaaggggtactatgcaagaaaataaaagagcatattttaattctgataatttagtcaatataacaatgt

SEQ ID NO: 6247 - DNA, 497 bp, Canis familiaris
gggaagctgttggatctgtgccagcgttgggccagaccggccgctttggcccggccacgccgtctccctcgccggacttgccgccccgccaagggcccggccggtgcgcagtcgggccgcccgcggttgccgggccagcgcaggtgcccttgccggtgactgttccgcctctggtctacgtggttgtaccagggtgtccaggggcagccgttgttgccgccgagcaactttatgtgtgagcggccagtaggcaggagcagaccgccacaccagagccagacatagccattacccttttgtttacacccacactgttagctgctaactcgccctttattggtgacttaccagctacctctgcccttcacaggccagccaaaccctgaaccaactggccggccagagaccacagtttgtggtgctcctcactctccagcaagctgactccgacttattttgattagactccattttttttttttttttttttttttttt

SEQ ID NO: 6248 - DNA, 655 bp, Canis familiaris
ccaaagggtgacaaccacaggaaaaaaaagaataaaatttgtagcaatccgtctatctagaatttggtactatacaagagatatgtagaataatctcctaatagtttaataagctcaatcttgttaggaaatgcaaaaataacctgtcctacaatttagataaaagtgtagcagcagttattaagtagtcagctctgctgaaaaacaaccacgcagtagagtcccctcgctactaataatttatggaaggaatttgggggtgggtgccacagggaagtgggtttatagagctctatatcacgagaccctcgtgtaaatgtgtatatctcgtgcagatatatgataataatgagggtttctcttataacattgtcgcaaaaaaaacataacctttgtagcaaacataggggagccctaattgacatgtttatcctgtattatccttaaaagactaacaaagattaagatgatacttatttactaaataatttgtaaagccatcaaacctgtcaaggaggcctccattagattaacaagcacaccacagggttggtcttagtttaaataaccagaagccaatttttatttatcccaacaccgagctaagagtaagactttttttttttttttttttttttttttttttttttttttt

SEQ ID NO: 6249 - DNA, 195 bp, Canis familiaris
gaaggtgaacaggattattgagggcccttacaagtctaaggactgtgaaatgtgtgtagattgtcaaccctaattagacaataaatcaacaaatagaagtaatgacaaagtatctagagcagttacagtttccatttatttgtattaaaaaattttagccttttttttttttttttttttttttttttttttttt

SEQ ID NO: 6250 - DNA, 581 bp, Canis familiaris
acagttactgcagcttgcctggaaccggcgggcctgaggccactacaggatcatctaccagcaactagctgtgtctaacagcttagtgagaacactgcaggggtgggggagtgttagtaaacaatccaaggatttataaaatttcatctctaaagggaatacatgccttaggtgaaaagaaacccacaaggccttcagagactttaaccttaccttgactccaacctcagtgggtgtccagagtctccaaagattattgaagtgttgcatgtgataagctttttgtgctaccatttagccattgttttataaccacagtagctttatgccaacttcccatagccagataagaagttgggtgtgttgtctaaaacaatttaatatttccctgctgcaaaattcactaggaccctccctgccaaaaagcatctgtgttattagagatacattccttggtagtacatggtattgattaaccagaaaatataagggatcaaatgggggacaaattttgtcaagaaaatatacatatttaaatggaataatctttatattgtaaaaagatccaatttttttttttt

SEQ ID NO: 6251 - DNA, 604 bp, Canis familiaris
gctgtatcgtttcagtactttgtagggcagtattaccggttgccagaagtcagacctaacccgtgcacggagccggtttttctcacgaggcccgccggttgggctggctatagggctaaggattgtgttttggatcagccttagcacgttagccagtgttggattcgaggtagtggtggtagtgttaacatcgctggcagcactgttgtatccgagttacattgttgtaagtccgcctctagatactatgccagatccagtttgagttgggattagagaacttgttcttgcggtaacactaggttctctgacctcttgcagttggctgtcttggcacgacttgttgcaacaggcagtcctggcagtgtgcccgcgtgtgacattgtgcctctggtgggcccgcttgcgccgagttgttccggccacccttggcccttgttggtggtttactacttgtcacagaccttggtggttgtgtccttgtttattttcacccacacacaagacagatctatgaggccactgctagttactgtactgaataacttattttctttccaaatacagccttttttttctttttttttctttttttttttttttt

SEQ ID NO: 6252 - DNA, 644 bp, Canis familiaris
ccaaacagaagcgagtttcaccagtgggcctttcaggttactgtgtgaacagagtggggactcgccagtcgagtagatcaaccctggggccgaaagagcaaagaaccaaccgaaaagaattaaccatcgttgtatgccctagaaaaatagacggaaattgagaaagagtgaaaagggggcgtaaaaatatatttgtgtttcatataacacaaccatttagttaattctctccaggaaagatgaaataaacgttcctattccaggttattctaaaaattgcactctgtcccagccaaaaacctttcaagcagtcgcccttgagcaatttttttgaattagtttacttgaggacatttttatttttattttttttgtttacttgaggacatatcagagattatccatagtaagttttgccctttttgtaatatgagaagttaccctgctttagtagaaaaatgtttagcaaaatatgtcttgctatagagttagtaataatctcttcctaataaataaaacagcttcttttgttggttatttttcaatcgaagagagagaaaaaaatttcaaagagaaaaggcttaagaaaatattcattttattttagtttgcagttatattttttttttttttttttttttttt

SEQ ID NO: 6253 - DNA, 609 bp, Canis familiaris
aagtgacgggcgtagacttggcctcgagactgaacaagtgaaactaccacacctgagcgcgccttgcttcttgaagaggtaggcgtgaccaagacctgagttcagctgctgcaggggcaaccctttgtgctcgcggcctgccacagacgcagaatagtggtgtttctttgcccccagctggtgctccagcgggccagctgccagcgtgagttatggcaggctggcgagggcaggcgggaggtcatctcccagtgcacctgccagcaccggaccgaggttgtgccctaggagctccagtggcaggtggaggaggcaaccacgggagccccggccctgccagaggcctagacccacacggctgtcttgaacctggaccaccaggctgttcagttgctggcactgtcccagtagttcttccagggcagtggtgttggccgcccacccctcacccctcggccggcccggcaccgggtcccaggtggccaggcaagcagggaaccccccagtgttcgctgctattggtaaccggggtcaacacctcgaagccaacccaccccctcgtttggctcaagactgctgaaaactcttgctggttgttatttcatgaga

SEQ ID NO: 6254 - DNA, 559 bp, Canis familiaris
ggctcctactgttgggagacttccttctggggcacctgttcctaccccgagcggccaccaaacagccctgctgctgcccactcccacccttttcagtgcagagcctttatagctgaacaggggtaaggtgtagagaaacatgttgaatccagaggttcacttggaaagctttgccaaagtcacggggacagggcgtaacctgggcctgagagcccagccctgggacaacatgccctagaaagcacttgagatcctggctcaaagacctctaccaagaaaatattgttgggttcaatccggttaaccagttcctgtcccaccctgcgcctaccaccggtgcccgaggccccaaccgagccacacagcggcccaggggagcgggcctctcccctcagtgccccgcccagctagcaacatgggtgcgacacaacagaaaaagttgttaaacagaacaggggcaagatcaaccaaagctgcagaaaagttagatgaaaaaccaaaacataaataaagctctaatttgaatttttcatttataagtccattttttttttttttt

SEQ ID NO: 6255 - DNA, 639 bp, Canis familiaris
ttgttcaagctgcagtgtaccacaaactactttgttgccccagaaacaattgactccgtccgtgagtctgataggcttgtgactcttcgagatagccttcatcgagactagactttcttggttctgttaccctaaactcagtgcctgtgctcgagtccagaggtagttgcaaacgaggataggcaagttatgtttttctaagagggccaaagggactccccttgctactggctggctagtggccacccgtacaccctttccagccagacttctgacatgtctcctggagtcttataaaagaaactgcttttagagaaactaggcgctgtgcagaaatggtaggctttgaacaggtcaggggaggagggttagaaagatcttctcagagttagagcacggaggctcaaatttttaggaactttggggccccaggaggcactgaggaagtgctacacccaacagcactggaagagtacccggggaccaggttaagtgaccctctactggcaccccgctgggtgccagcaacacaagccacacacaccgacacactagttatttagtttacagattttcttctttttaattttaatttatttttaggaacttggtatttttttttttttttttttttttttt

SEQ ID NO: 6256 - DNA, 382 bp, Canis familiaris
cttgtctccttgggcgtcatcctgtttgcgcagcagatccagagaggaggggtagtcagttgccctcctcggctagtgcgacatggtttggagccccaaagaaagctgcattctgaacatgttttatgcaagagtcattctgaccccaatagccctacccagcgtggtaggagaatgctatgcccccacccctaccaataaaatgaatccattgctaagccagccacactagacatgacacaccaaaatgcctttgtttagttctaaccttggtgaaggttgagtttacatagtagagtttctcaaagccacaagagatcagagactatttctgtagttatttcagttaaaaatctaatatttttttttttttttttttttt

SEQ ID NO: 6257 - DNA, 606 bp, Canis familiaris
ggacttgaagggggtagggcaggtgaaaatttatgaggccaactttatttatttatttatttatttatttatttatttatttatttatttatttgttatttgaggccaacacaaagtgttggattataaagtgcttggtccagtggggtagtgtgttagttcctatcaggataatgggggttgtgctaacctagaggtgggtactgcctgagctttggccccgtggcttgagatgaccaggagtcaaggtgtgtttctgcttggtggacctcgagacaggtgaggttcaggagttgctgttggatgaagtgcacttagctctaagcccaagccagcagtgtgccagtctcagaacagggccctcgggtaaatttgttaccaagtggagcaatagtaccttaggttttctgactcttggggtacccagggaggcactgcggaaatgcgccagccaactgccctgggcgagtaccaggtgacccgggtacgtgaccctcttcgggcaccccgctaggggccagcaacacccacagccatagacacagccacacacagagctacagactagttatttatttattttacaatttttttttgttttttttt

SEQ ID NO: 6258 - DNA, 334 bp, Canis familiaris
tgtagatgtgtgctcccttgtgtttataacagtggtgtaaacatatattttgccctcagagtagaattgttttgacctcccagacaaataaaatgtgtagtgcacacctaacttttattaaaggggggggggggggatagggccttttgggtttttttgctataagcagaggttctagtgttagttttatttagctaaacttagaaattattggaaagtatggagttatttgttagactcaaaaaaaataaattcagtattggaaaaagcataaaagaataaatcttaaaagtagtgatttcccttgttataaagctaacattttttttttttt

SEQ ID NO: 6259 - DNA, 608 bp, Canis familiaris
  misc_feature (85)..(85): n comprises a, c, g, or t, or includes no nucleotide
cccctcaatagagggccctctaggagacctgtagtgatagtgctgcacaccacagttgcccaggtgcagcccgataaagagcctncttgattctaggagttttgcaggaggctttgtaggaaaactctaccgtgagcggcacctacccaacctagaataccgatacatcttgtagaagaaccagagcaggtgcagatctggcagctgtcttggataagcgtgggagccaaagggttgcccctgggctctgatagcctggggacctctaaggcctttgactactgagacctaccgataccttgcagctgtatcttggtgctagagtaagtggcccatcgctgggccttgaacttgaacccaggccgccttgttgtacctctaccaccctgttaggggcaaatcattgaaattaccgttcgttaaagttgtatagaggccgttttgcggcactaccctgtaggcagaggggactttatctacccattacgaggccccaaggtctttaggtgggcacacctcactagtgttccaagctcctcccgttcccataactagccctccttatttaccagcaaccagacttttttttttttttttttttttttttt

SEQ ID NO: 6260 - DNA, 501 bp, Canis familiaris
  misc_feature (218)..(218): n comprises a, c, g, or t, or includes no nucleotide
ttgacctcttcaacttaggctcttgcatagttggggactcctttgccctagggctcctagttctgtctgcatttgaagccactgtacctgttgtactagtaggttaaaagtgcggctggccgtgtactaggtctagttggtggtttagtagtttagtagcctaagtagtagcctagggagtagtggttgtagttgtggtgtgagtcgcagaagatacnctggaccaggtagtgcagggtaagtgccagtctgtagtgcagactttccaccccacctccggtggcactcactgagaggcagcctgagggttgtttgctgtggcagacagccactgcccatgatgtagccgtcgctgtccaggtggtgcggcacttgttacagcggtgggtcattactcccatatcatcctagtgagggtggagggcttacgtagccctgaaaagcagatcatcaacagattattttgtaaggtctcattttttttttttttttttttttttt

SEQ ID NO: 6261 - DNA, 537 bp, Canis familiaris
cactacaaagctggcttgctgcaggtttttagccgctcacaaacagtaatcttctacctgtttgtgacttcacacctccaggaccaagcgccagtgggagagattagctgtacaacggagttgtcccagtcaggcttgtcctactcccaggtggaggtgccctgagtatcctaagttttagagttggccttgtacctggtatttgtgggctacccgccagtcctgctgtggcactacaaagctggcttgtctcgcaggttgtatggccgctcacacaacagtgaatcctcttcacctcgtgttgttgacttcaacaccctccaggaaacaccgaaaagttggggaggcaggattaacaacttacaagttaacaatgagcccttagtaggctaagcacagctcacatgcctaaagccccttaaattgaaatgtttaatcctgaaactgattgtgcagttactcaggaaaacacttatgcagaacttttagaattattttgaaaagaagctaggatttttttttttttttttttttttt

SEQ ID NO: 6262 - DNA, 591 bp, Canis familiaris
gagctaagatgaccctgttagtctaatcatagacaggtcaagttatggattctcatttgcttcagatagggttttatttagatggtttttttatagaaatcaaaacccgagcaaatgataccaataccaccatgtagtttaagtggaaagtataatatatagactgaaaccaaatctatcaaatagatcaatatatagagatttcttgctatataagttgacataatggggcttacatccagaaggtggaagttctaaggtaaatttattataataaaaggtgactcatctcacatatgcttataaaaataacacgactctttgcataaaaccctatttaagaaattcataggaagaataattttatccaatagccaattcctggtttaattcctttgcaattggctaatgggggtttagggcaaaaatgttgcctggttaacattgatatgaacagaacaactttatttagactaaaacaacaaatttataagttattgaaaatagttcttatacaaacaaagcttcacgttaatctagagcaaggttaattgaaaatgaaaaaaactcagctcttattatttgccagtg

SEQ ID NO: 6263 - DNA, 482 bp, Canis familiaris
accaacccgcgggacaactgcgacgaggccaccgcgacgggggtcggcgcacgagggcccagcagaaggggtctgccgggtcgccagacggcacggggcacacacctaccacgactgcacccgtgccagttgcggtggcgatgacgacgacgacgtagggtatctcacccgtggcaaccacttcggtgcagaagacctggatctagaccaagacggtggactgcaccgcccacgccgccgccgcgctggccgcctggccctgggcgtgctggtctcctggcgcgcctgctagaacccgggtccggcctgcaccggtcgcgccagctgcgtgcgcctcgcgggccgcctgccttcctgcgcactgccgccgggccgggccggccgggacgtggacgtggacgggacgggacgggccgggccgggacggggcacgccggccacacccgcgcccgcagcgccgcccgcagcgcccggttcgcggc

SEQ ID NO: 6264 - DNA, 312 bp, Canis familiaris
  misc_feature (21)..(21): n comprises a, c, g, or t, or includes no nucleotide
  misc_feature (35)..(35): n comprises a, c, g, or t, or includes no nucleotide
tagggagcgcctcaactcagncaggaggggcgccnacagagttgtaacagagtttccctccgggcgccgccgccacaagagaagactcacaactattctccagaagaaggtggggcttatactaagtttaatgcggacgaattttgaagatattggtggcccgaaaagcggctcatcccagatggctgtggggtcaaatacatccctaatcgtggccccttggacaaatggagggctctccactcatgagaaccttgcaccacccgaaccctattcatgcccaccaataaatcctgcttcctgtcaaaaaaa

SEQ ID NO: 6265 - DNA, 673 bp, Canis familiaris
  misc_feature (517)..(517): n comprises a, c, g, or t, or includes no nucleotide
  misc_feature (529)..(529): n comprises a, c, g, or t, or includes no nucleotide
  misc_feature (544)..(545): n comprises a, c, g, or t, or includes no nucleotide
  misc_feature (555)..(556): n comprises a, c, g, or t, or includes no nucleotide
  misc_feature (586)..(586): n comprises a, c, g, or t, or includes no nucleotide
  misc_feature (601)..(601): n comprises a, c, g, or t, or includes no nucleotide
tgtgaccgtggtcattgaggtgaaggagattctaaaggcttccctggtaaacattccaagggacaccgttaacctgtacaccagctctggctgcctgtgtcctccgctcagcgtcaacgaggagtacgtcatcatgggctatgaggatgaggagcgtgccagattactgttggtggaagggtctattgctgagaaatggaaggatcgacttggtaaaaaagtcaagcgctgggacatgaagctccgtcatcttggactgaataaaagtgattctagccacagtgattccacccagagtcagaagtctggcagggaacgccaacccccggcaagcacgcaactaaatcctgaaatgcagaaagaacaccagtggacttcctactaagacttgcgttgctggatcagcaaaggaaaattgcactattgcacgccatattctattttttacccccaaaattcacagggggtttacctgaaataattaacctttcctaatttttcttctgtttttctgttngtcgtctctctnctctctctttttgtnntgtctgagtnngcagaattcctgtaaatagtatgtatgtcntgtttcactaatccntgggaaaactgttctttgcaataataataataaattaaacatgttgataaaaaaaaaaaaaaaaaaaaaaaa

SEQ ID NO: 6266 - DNA, 485 bp, Canis familiaris
agacctgcccatggggtttgcaggctgcccccttcctgccagaccggaggggctgcgggggatcccagcagggggagggcaatccctgtcaccccagttgccaaacagccccctcaccccctggaccttcctcctccctctatccctgacggttctggctttccccaaccgcttttgatcttctgattcctcttgggttgaagcacgacccagtgtccccccaggcacccccacgatttggggggggcccgtgatatttttttaacgacaacaccccgtgtcctcacccgttcctccccttttcccaagcttcccaactttttacccggccaatagttgcctctgtgcttgtctgtttagttctgtgtataaatggaatgttgtggagatgacccttccttgcgccacctggttcccctccccttttcccctggtcttggcactcatggaaacaggaccagtaagggaccttcaattaaaaaaaa

SEQ ID NO: 6267 - DNA, 566 bp, Canis familiaris
ctctcattttgaatgtagagagcccggtcggtactttcctcttgctgtgggatggggcgaggaccacggattcccccacccctggcacggccacttgtaatgcccagctcgagccctgtcatcccttcagggtgacgatcccattgctgactcccctcctgcggggggaggcgctatgcccgtgtaaggtggcttagctttgctttgtaagtggccagcctggcctccacgtctcagcacaaggacgctgcctttgcacggaatgagcgtcgagctttgttcagacaacgtgaatgtatttgggagggatgggagtgcgggttgattccacagcacagtgccttttctgagtgagtgtgtgctgggagggctagagtggatgcagagcgcggtttatttttgtactgatgttggtaagagactgtatagcatctatttatttagatgatttatctggtaaatgaggccaaaaaattattaaaaataccattaaagatgattttgaaaaaaaaaaaaaaaaaaaaaaaaaaaaaaaaaaaaaaaaaaaaaaaaaaaaaaaaaaaaag

SEQ ID NO: 6268 - DNA, 633 bp, Canis familiaris
gaacaagtttgtacaaaaaagcaggctggtaccggtccggaattcccgggatgtggctcataacccaattgctggcttgttgcgaaggtcttgcaaggaagaaggaggtggaggtggaggccctgcctcttctcaggtgggcccgtggccccaaatggaaaccaatcaaggtgcgatttatgttcattaagtgcttgtcaaaactgaaaaattttctaatcaacagcaatctagcggcggccccctcgatggctgggagtgccacctctgctgcatcggctctttgcctgttacaactctaggcgaaaatccgctgatgattacattaggctaagctgcggagtaaatgaaccatgtcttatttaggtgccactagcttcagtgtagtcctgccccgcagggcacttgatagcgttttatggctttaaaattagtgtggcttcccatttgctgcagggtgctgcatgttatgcctttgaactcaataagcaaagggaagggggccttttgtttttcccccgtatttttctcccttgcattttagcaattttgttttgcatcttttccagacggcattttgcaataaaaatgtctgactactgtgtacttgcctccccaaccaaaaaaaaaaaa

SEQ ID NO: 6269 - DNA, 605 bp, Canis familiaris
caagtcaatgtttttggagtgacttgggtcccgatgttggctatgaagctattggtctttgtggacagtagtttgcccacagttggtgtgttcgcaaaagcaactgcacaagacaaccccaaatctgccacagagcagtcagggactggtatccgctcagagagtgagacagagtctgaggcctcagaaattgctgttcctcccagcaatcctgcagtcccccagacccctgcccaaggggaagactacggcaaaggtgtcatcttctacctcagggataaagtggtggtggggattgtgctgtggaacatcttcaaccgaatgccaatagcaaggaagatcattaaggatggtgagcaacacgaagatctcaacgaagtagccaaactgttcaacattcatgaagactgaagcccccagcagaacaggcaaactccctgctgtccttgatggcagcttggatgagtaaaggagcattttttattcagcagactccctctgtatgtatgagtgtgaatggcaaagtcctttgtgaatatttcaaccatgtaggcaaattcttaatgttcacatcactaaataaaacctgattcttctaaaaaaaa

SEQ ID NO: 6270 - DNA, 573 bp, Canis familiaris
cacagggcatgagggcccctaagccgaccacctggctctgttgtctacgcaagtgtgacctccatgctgcccagaaagaggctgcagcctctggggttgtacccacctaacatttccttggccctttgagcaataaaatccttaaccagggaagggggatgtggggagcagggcccctcccaggccctccatctgtgcccctgagcccccagaccccggtcctctccctgtcaggaagggccccactgggaggaaaggcagagacattatggggcaggggacacagatgtgtcctgagtgctgggcaggcgtcccgggttgcccagggcaaagtgaaaagggaaagaggacaagattttatgagctatgcagtcttccaaaacccacagctgggctgcaccccaacccccccaatgtgaagctgggaggatggtgggcccagggctctgctctgtccctggctctgagccctgggcaccccaccccctgctctcctgagatgtggaattttcactggtgcatcctacccacacatatgtgaattcccagtagtaaagcactttgatgtcccaa

SEQ ID NO: 6271 - DNA, 681 bp, Canis familiaris
gccaccgccccgaccaaggggtccccgcgggccgcgggctacgacctgtacagtgcctatgattatatactacccaccccatgggagaaaagccaattgtgaaaacaaacaattcaagtagctcttccttctgggtgctacatggaagagtagctccccgttctggcttggctgccagaacacttcatttgacgtaggagctggcgtcatagatgaagattatagaggaaatgtgggtgttgtgctatttaattttggcaaagaaaagtttgaagtcaaaaagggcgatcggattgcacagctcatttgtgaacggattttttatcccagaaatagaggaagttcaggttttagagtgacacctgaagaagaggggttcacgagagagttttggtgtttaatggggagagaattacacataagcccagagattagaaaatgagaaaacataccttttttccttaaaaatagtttttgcttaaagtgtttggatgttttgcacatctgtaaatttaatagctttagcttctaaaactgtttggttttcttaagattaaggaaaagatacctctgttggggtctcataaaaccttacttgcttatgttttacgcatttgattattgtataaataaatatatgtgatgacctaatacaaaaaaaaaaaaaaaaaaaaaaaaaaa

SEQ ID NO: 6272 - DNA, 374 bp, Canis familiaris
tttagattccaccgtggaaggaaaggttataagcccctaaccccgcctttctctgggtatgaaccattctaagttttgagaggcaagccaatacacgtaggcttgtattagtgcttttaatgggagtactggtaacattgtttctttcttgataggaatctgcttatatttagccaggcttctatttcataccctctcccactacaaactttccgtgcagttacctttcatttttaaagcaatttcactgctaaatataaattgtatttgtggggttcatagttatataatgctgaagggaaccactctttcgttgaaaggtgataaaagttaaataaagactgtctccacagtaaaaaaaaaaaaaaaaaaaa

SEQ ID NO: 6273 - DNA, 413 bp, Canis familiaris
  misc_feature (66)..(66): n comprises a, c, g, or t, or includes no nucleotide
  misc_feature (262)..(262): n comprises a, c, g, or t, or includes no nucleotide
  misc_feature (280)..(281): n comprises a, c, g, or t, or includes no nucleotide
  misc_feature (292)..(293): n comprises a, c, g, or t, or includes no nucleotide
  misc_feature (297)..(297): n comprises a, c, g, or t, or includes no nucleotide
ccccggggaaggccacccccccccttgggttccggggcccagaaccttacctccccttcgttgggntggttgctacacccagccgacggaaggacgtcgtcgccccgctggttggttgtcttacagcgacagtgctctcttctgagcacaaaagcgccaaggatatttagaagcgccagcgcttccaaggcccccacggttcttcataccaaggccttggggtggcggtagaccttgggaggggcacggcccggtggccctncggcacctgtgcattgannaaagcgtgctnnaagncggctatctgacctcattgtcaagtcacgtgtcatgatttgtgtgcaaatagtcctgtatttgtggtttcaaataaatgtggttttgcaacataaaaaaaaaaaaaaaaaaaaaaa

SEQ ID NO: 6274 - DNA, 677 bp, Canis familiaris
  misc_feature (528)..(528): n comprises a, c, g, or t, or includes no nucleotide
gttggctttcatcgaagagcttttttcactgtatggttgtcaatcgcctgaccgaagaactcggctgtgatgagattattgacagagagtgattacacgctgttaaaagaggaggaagctacttgaggagagacccgacattccacggtcttttgggctcattccagatagatagtaacggtgccaagggaataaagtcgatcttcaaagaaaatttttgttgttgtcgtgcagagtagaatagggcagtgactgcgctcttatgaaagcattgttggagaagaagaagaaacgtatcaggcactgtggaaatctgttctttcatagcaatgttcctcaatacacctcccgccttagaacgatctgttgatctgatgctcggctgtattattcttcgtcatcttggggggaatatcactctctcatatatctcaatatagagggatagtggtgtttttcacagagatatagagttattggacccaagaccaaacccgcccagtaccaaagaccccccagctgataccnaattaccgtgagaaaaagtagtaacatccaatttaggacacaagatgtctgaatcgtttggactgaaagcctactgagagaactctggaggttccactttgtggtctgtccaagccagtgttcaaaggctaaatttttagtgtaaaaaa

SEQ ID NO: 6275 - DNA, 619 bp, Canis familiaris
acacaagttattgtcacttgcccagaggcggtgggcctaaaaccactgccccccccatcaggcctccctgttactatagcatcagaaactgtcacatctctccccttccggagatgcagggcttgcactgcttcccctagaacctactttgaaggcaattagaagctttgttttcatttcccccctggtattgtcttgccaggatggttaggtacacaaggacgccttattagatcacctgagaagaagaagcccacacccgccttcttctggtgatgaacatatattttgtagagcacgcgcaacactagacgtctgtataatgatgcgctatatagtgagatatcacggggacacattgtctctttctttagaataggaatcgtcgctaatattatagccagggcttctatttcataccctctcccactaccaaactttcccgtgcagttacctttcatttttaaagcaatttcactgctaaatataaattgtatttgtggggttcatagttatataatgctgaagggaaccactctttcgttgaaaggtgataaaagttaaataaagactgtctccacagtaaaaaaaaaaaaaaaaaaaaaaaaaaaaaaaaaaa

SEQ ID NO: 6276 - DNA, 663 bp, Canis familiaris
gtaccggtccggaattcccgggatgcggtgtgtgtgtgcggtgatcgccaaggagaattaatcctcgtttacatccgcagcatccccacggagaatgaactgaaattccactacatggtgcacacgtccctggatgtggtggacgatgaagatctctgccatggggaaggccttggtggaccagatgggagctgtacctgggcctgctgtaccccacagaggactacaaggtgtatggctacgtgaccatctccaaggtgaagtttgtcatggtggtagattcctcctacacggcgcttcgagacaacgagatccgcagtatgttccggaagctgcacaattccctatcacacgatgtgatagtgcaaacccccttctacccattctgtggggcccacatcacatttatgggcctcttgcagacacagcacatggtaacacatcccattgatgattccagggtgttgcctgaggccattgagcctgtgctgcccggtgctggaggaggaagtgctgttgacataaccgtattgttgatacagatatttattatcacttgcctattctcaagtgtcacagacgtgctgctgggggcaaagcctcaggcacagtgcatgcagactaaaggtcttctgagattggaaaaaaaaaaaaaaaaaaaaa

SEQ ID NO: 6277 - DNA, 673 bp, Canis familiaris
cgtacctgcgaccggtcccggacaatcaggaagttttctgccaccgcttgactgaccagagcctgatcgtggaacttctggagctgcaggcccacgtgcagggcgaggaggctgcgcggtaccactttgaggacgtggtgcgggatgcaggaggtctagggccctgcaagtggacagtgtgcagcccctcctttcggagaacctggctctccggagctactgtcaagaagcctgggtcctctctggcaagcagcaggtagctaaagaaaaccaccaggtagcaaaggacgtgatggtgcaccaggctttgttgcggctgccccgctatcagactgatgtcctggtcaccttcaatgagcccccccctgacaataggttatctcttggtcctgaaaatctgtcacttctgccctggagcctgggtgactttgaacagctggtgactagtctgacccttcacgatcccaacatctttggtccccagtaaagatgctgaaacactgcgtaaagctgctgaagcacacagggaccccgttctgcaaggggaccaaggagttggatatatgcccttaattccttccctgtgcataaacataagacacctcctgtctgcagaaataaacttgctttataacgaaaaaaaaaaaaaaaaaaaaaaaaaaaaaaaaaaaaa

SEQ ID NO: 6278 - DNA, 633 bp, Canis familiaris
agctgtgttggcccctggttgccttattttcgcccagtggcacaaacctgctgcaccttgctcttgttgaggttctgggtacagtttgcaagtttcagcctgattaatgtggcacaacaggttggggcaccgcagccctctgccacaacaggcctccctaagctactacaaggcgcaagttggggagacccctacagtcccatgagcatgaaagcaccttgaaatttgcaccctgtttcttaaggtatttttaaatgcagtgtttttatctaataatttaagcatatgcaacactttggttttaacggatgctttgttctcttggaatggtgtttctcttaagacttttccgattcctttcccttttaaagtggacttttgctgtttgcccacctggagagggggcagccagccccatctgatttctctaagtggatgtgtcacctctgaccagccagtgtctgtcacaactgggttaaaagtgtcagcaccaagaatcaggttcatgacagatggccaccatggcaggccatgctaggcacattgcactaattaaaaagcgtgagcattgctgtgtgtggaaaaaaaaaaaaaaaaaaaaaaaaaaaaaaaaaaaaaaaaaaaaaaaaaaaa

SEQ ID NO: 6279 - DNA, 593 bp, Canis familiaris
cagcttcatgaaggatgaaatggaagcctctgcaaagaaaattgctttaaaacccacatgcccccccccaagtacctatatgaaaaggccagttgtgtcaacactggctaacatcagatgagatgattagaagcatttaaagttcacatgcaactctggaaaagttgacagtattttattactctaccactgtcaaatttagagacccctgactttctggaaatagtgtaggtgtagttacctgttattctgatcataatctcccacctgtctaagaggtatttattccttatttagagggcctctattgccatgtgcctggaattattaaatgctcatcactttacgaaggataaaatgtttttcctgccttaaagttaaattcgttcttccgctcaattcctgatcttgtccattaaagagtgctcgcagacaagtttctgaaagattagagaagaatccccccaagattgcccaacactaactacaaacaaacaatactttatttaaatgaggagacagctttctaaaagcatacattctctagattaaaatgttttattttgaagtatttaatgttttctatacaacgt

SEQ ID NO: 6280 - DNA, 606 bp, Canis familiaris
agcattcctggcgtctagccccagttcagaccctctgtctcttgagttggaggtgacttctactactctgtcttagctcctgaatcgtttcttctgcttcctttcttccagggaactagtgccacaatgccttttcctgccagttttggtacctttttctggcttctctattcctgctcacttctctatttttaaagtgccaaataaatcccttcccctttgtcagaaagcacagtgatggccctgagccctacctgagacctcatgggaggggcccggcttgctctttgttaggggcagcaatgtttgctgagttgagtctgtgcggggtgtgtgtcagagctcctgcgccctaggaggacgcatagggaccatggtgcccccggtgccccaggtgaattaaattactgaagctgcccaaactttttatattcagaggagcccaaggggaagggggggaaggctcacccccgctatttttggggagggagggctgtggatagagccatgttctccagaatctattttactaactgacctgttttgggacttgttacccgaataaaagcagtttctatacgtttaaaaaaaaaaaaaaaaaaaaaa

SEQ ID NO: 6281 - DNA, 609 bp, Canis familiaris
  misc_feature (1)..(1): n comprises a, c, g, or t, or includes no nucleotide
  misc_feature (463)..(463): n comprises a, c, g, or t, or includes no nucleotide
ngaaacccggatccacacccttcaggaatcacatcagactcagacaaattccatttcacccttactacacaatcaaggatatcctaggagccttactcctactcctaatcctaatatcactagttttattttcacctgacctattaggagacccagataactacacccctgcaaccccccttacacccctccacatattaaacctcgagtgatattttctattcgcctatgctatcttacgatccattcctaataaattagagagagtggtactctgcccctatgtatttctcccactctctcatatatcttgtgcactatctactatctcacatctctctcacaacaactattcatagaccaaccccgagacataatattcccggcccccttagcccaatgccctattcctgaccttttagtcgcccgatcttctcactttaacatgaattggaggacaacncagttgaacaccctttcatcattatcggacaagtcgcttcaatcttatatttcaccatcttattgatcctaatacccacagttagcgttatcgaaaacaaccttctaaaatgaagaaaaaaaaaaaaaaaaaaaaaaaaaaaaaaa

SEQ ID NO: 6282 - DNA, 620 bp, Canis familiaris
tagtagcgggccactggccttttcccgcaccagaatcactttgccaaaggtgcccttgcccagaagtttgagatagtcgaagtcattcatggtcaccttggcccgagccttgctaactgccacttccatctcctcagccgcagaagggtcactgggagagccacacttatagtccatggggtcctcacccgggccccgctgcttgaggctgttggcgaccatctgaatagcccgcatccactcctccctctcatctggagagtctacgtggaaggtcctctcgatgacagtggtccactgcaggcagcgtatgacaaaggtgttgggccgtggcctctcagtcttcatcagctggcattctgcgacagagaagttgttcagggggggcagggtctggtcaggggcgtcaggccgctccttgtatccaataaaggagccgtcactcttcaacaggaagtaccggggcctccaggtcttgatgtattcaccacgcttatggagccagccttctttgatgacagacacctcgttcatggtggcagcgtgacacgctgtcacctagcttgggacagcccagggcagcaggacatgcaggaggcgcggtggacagagcacagtct

SEQ ID NO: 6283 - DNA, 107 bp, Canis familiaris
tgatttttatgagcacagactttcaagaaaatacttgaaaataaattacattgccttttgtccattaatcagcaaataaaacatggccttaacagagaaaaaaaaaa

SEQ ID NO: 6284 - DNA, 637 bp, Canis familiaris
ttggtggcagactaacccattttctagaattaaagattataactaccatacgctggtactgaggcttgaatgtgttgagcccaacctcagatgctaagagaatgctggctaataagccaacatttgacctgacaggaagagctaaggccatgggatacagttctaagcttcatatcttgttttattatgaggacatcttttaaaaaaaatacaaagtaaaaagatcttatttatttgagagagagtactcacatatatgtatgcatgtgtgtaggggttggggatgagagggagaggaacagaactgcactcagtgcagagctgcactcagtgcagagctggatgggggactcacacgtcagatgtttgactgaaccccccaggcgcccctgaaaataataaaatcttgagtttatgttcaaaaaaagtaagagaaggggatcccggggtggctcagaggtttagtgcctgccttcggcccagggtgtgatcctggaatcccgggatcaagtcccacatcaggctccctgcatggaacctgcttctccctctgcctgtgtctctgcctctctctctctctctctctgtgtctctcatgaataaataaataaaatcttaaaaaaaaaaaaaaaaaaaa

SEQ ID NO: 6285 - DNA, 649 bp, Canis familiaris
acatactggcaggcgaatcccttcagggccgtaggctgaacccgggcattcagctcaaggctgtgaagtcctccacaggccccggggagcagctgcggaatgcactctggcacacaggggacacagcatcacaggtgcggctgctgtggaaggacccccgcaacgtgggttggaaggacaagacatcctgaccgctggttcctgcagcatcggccccaagtgggctacatcagagtgcggttctacgagggtcctgagctggtggccgacagcaacgtggtcctggacacaaccatgcggggtggccagcctgggggtcttttgcttctcccaagagaacatctatctgggcccatcgtgcgctaacgcgtgcacatgagcacccataccacgaggactacgagaactcacgaaggctttttcaaggcctaagggaattgggggttggggaacccaattgctggaagatggcaccatcgtggctacccgtttgttgctcactgcaacaaacagggagcttggcacccggctccaagaggtagctgccctagaggggctcagaaaggaccaaaataaagtgtgtgtggtggaaaaaaaaaaaaaaaaaaaaaaaaaaaaaaaaaaaaaaaaaaaaaaaaaaaaaaaaaaa

SEQ ID NO: 6286 - DNA, 626 bp, Canis familiaris
ctctaagtgatagtcattccatatgacctcgaaagtcactcccatcccattccctctttcactgcagcccaagacaggaaattactttccagaaccacgtagctagttcatggctccaatccttgcaccccactgcaccaatccttgcgctccttcccatccccattgtagtttatcaaatggtcatcatgtttacattgtgacatccagccccctgaggacggctgggagttgctcaggcctctaaggaaaagtggggaatgctgccacctggtgacagcatgtagatttgggcagtgactagggattgccataccccaccttcgcacctcaccccctcatcacgccctgactcccaacacaacacaaaccctgcaaacccaaagataatatgaatacttgaagcaagaagggtgcatgccagtccctctcagacatgccaggggatgccaggcctggtgcccctggactcctagccccaccctgggcaagagggcctttccctagagctactgagctgctttgtgatgttggagggtagtaccgccagcagcaggtggaggagggagggccctgtggctctgacccatctggaggaaaaccaccagatcggacaaaaaaaaaaa

SEQ ID NO: 6287 - DNA, 614 bp, Canis familiaris
tttggagatgatgatgacgacgatgacacttgactggctaggatgaagacctgggaaactggtgggaaggcctctctgtcgacccttctctaagcatggtcatgcacagccagccctgggtctagacaagccacaggtgaggtgaaggtgagcattctgaggacaacagtgcacacatctgagttaaccaacatctgagcaccttgcccggctggtcggagaggagtgtgagcctgtcttcacaacgtcgggtcctgtcttagaatcccctggggaggaagggctggtgggttgcctgcagtgtcacctacaagaatcctgccctcttccaagctttttattctcttcactaagactgatgtgcctctcaatgctcaactgtgcaccagcaaccggacctgtcatctcgggtgaggtctccctggtggaacccagggtggactacactatctaaaccccggttcagttaaccagggacgtgtatcttttctctgccttaaatctgatacaagaggtcaatgaatatttgaaattaacaaaactaaaataaatgtctgcgatgaaacttgcctcaaaaaaaaaaaaaaaaaaaaaaaaaaaaaaaaaaaaaaaaa

SEQ ID NO: 6288 - DNA, 425 bp, Canis familiaris
ttagattttctatgattttttttaaaattctgcactttgacagtggtggcgaaatacactaatcccaaagtgatctttctattgatggaggtggatttttttttcccttttgattccaacctttctccccgtgacaaagcataaatcatggacaccaaaaaataaggtggacctcaggaatcccgaaaggactgagcagcttacattcttcctctggagggaagggtggtgtgtttttagccatctctggaacctaaaacgaaaacatgagttgcgtgccatggaaaggagacaaggccaaatctgaatctttggagatgccccagctgccggtgaagatgcatgaacaagatcccaccaactgtacattttgggaaataaaactttattaaatgaaaaaaaaaaaaaaaaaaaaaaaaaaaaaa

SEQ ID NO: 6289 - DNA, 446 bp, Canis familiaris
catggacagcaggaccacccagggcacgtccagggcctcgatgatcatccgggccacggtggtcttccccgaggcgctgccaccgcccaggccaatggcaaaggcctccttggactgcgtgccgtgctcgttgtaccagggcggccggccggccgtgtagatggtgcgcttgctggtgcgcagcagggggggctcagacttgcactggctggtggtgcgcttccggggtgagcgtctggcaaccacgggtgggaggaacctgtccaaggattccgcgttgcttcagtcctcgcgcgcgggctcgctcctgtccgccggccggtcgggcccgtctccggcggcgggcggcggcggcggcggcggcggcggcggcgagcggggcgcgtccgcggaggctgggggcgccgccatggagctcggaggcctgggcgcggggcgcagggccg

SEQ ID NO: 6290 - DNA, 667 bp, Canis familiaris
cgtgagcgcattgctaagctcactctgggagatggaggtgtctgggcggttgtggatcctgtggatggccggacactcaacagcagcctcatgaggagcctcggtgtagacctcctccctggctaccaggacccctactcgggccgcacactgaccaagggcgaggtgggctgcttcctcagccactactccatctgggaagaggtggttgccaggcgcctggcccgcatcttggtgtttgaggatgacgtgcgctttgagagcaacttcagggggcgactggagcggctgatggaagaagtggaggcagagaaactgccatgggacctaatctacctcggtcgcaaacaggtgaaccctgaagaggaggcagctgtggaggggctgccacacctggtggtggctgggtactcctactggaccctggcatacgtcttgagcctggcgggtgctcgcaagttgctggcctcccagccgctgcaccgaatgctgcctgtggacgagttcctgcccatcatgtttgaccagcaccctaatgagcagtacaaggcacacttctggcctcgggacctgcgtgccttctccgcacggcccttgctcgcggcgcccacccactacgcaggggacgctgagtggctcagcgacacggaaacatcctcgcctggga

SEQ ID NO: 6291 - DNA, 305 bp, Canis familiaris
cacttcccctggagcctggcctctgcaaaaaaaaaaaaaaaaaaaaaaaaaaaatccaaatccttgggactcccctccctcccctttcctgctttggtttgtcccttggacacttcttcaccatcacccctgttcttggtcctccactggagactttagaggagtgttgggtctgctgtagccccctcactctggacactactcagcctctcctccctttcttgggaggaggcagaaggagctgttttaaaaaggacaccaaaatagaaaaaaaaaaaaaaaaaaaaaaaaaaaaaaaaaaaaaa

SEQ ID NO: 6292 - DNA, 555 bp, Canis familiaris
gggagccctggagtcctgcacggaagaaggaaagttctatagattacgggggaagcgaaggagagggcactcgggagtgaataagagatgaggcgcaccaagcacggccaacgaggtgcatcctaggagaaggtacctcagcatgcctcaaagaggatggtcgtttctttctcacgcagcagcgacgtcatcaacgatggctaccccagagacaatatgctctctgatatactctgttcgtgctctctcccatgtggcccacctctctttggggcacagggtggatctagagtgtctctgccggtcctctgagcccaccttcctcccctggacttgctgggtgactgctggtgggtgacccaccccgaggtggccgtctgaagcggccccactacttcctccctgcgtccctcccatctgagtatttaagcacccctcccccttctcttcctggccttacccccacccaccctgagatccaccccagcctttctgtaaataaactccccccccgccccgacttgggtacaaactaaaaaaaaaaaaaaaaaaaaa

SEQ ID NO: 6293 - DNA, 606 bp, Canis familiaris
gtgtacggttgggaggtctatagtaagcagagctcgtctagtgacccgtcagatcgcctggagacgccatccacgctgttttgacctccatagaagacaccggggaccgatccagcctccggactctagcctagtccgcgggacggataacaatttcacacaggaaacagctatgaccattaggcctatttaggtgacactatagaacaagtttgtactaaataagcatggctggtaccggtccggaattcccgggatcgggcagatcgacgcggtgaccctgaggggcgaggacacctacctggcgggacagaagcacggcctggtgcccgcggcgggggagcgctatgccccggacgacacgagcagctcgtacttcgccgtggccgtggtgaagcggaacagctcggacgccttctccctggacgagctgcggggacaggcgctcgtgccacccgggcttggcagccccacgggctgggacatccccgtgggcgccctgctgcggaggggcttcctccggcccagggactgcgacgtcctcacagccgtgagccagttcttcagcgccagctgcgtgcctgtcaacaaccccaagaactaccc

SEQ ID NO: 6294 - DNA, 647 bp, Canis familiaris
cactcatgggctggcctggaatgattgatgggccaacccaatgtatcccgacgtaatttatgaagattacgggactgcagcgaaatgacattggggacaccacaaacagaagtaacgaaatcccgttctacagatgttgctgacaaaagcggtcgggaacatctttcggtctatgctgtggtggtaattgcatctgtggtgggattttgtctgctggtgatgctgtttctgctgaagttggcaagacactccaagtttggcatgaaaggttttgttttgtttcataagatcccactggatgggtagctgaaataaagaaaaagacagagaaaggggctgtggtgcttgttggttgatgctgccttgtaagctggactcttgggacgggcattggcttctcccaggaggtgccgcttagttggggttttctggcagatgtgggtggtatttgcaggaggtcctgcatgaagcctgcggctgttgtgagctgtgtttggggcgcactgctgctgcagaggcagctcgcaggcagctaagaaaatgctcaagaaaacattttaaattcatgcttccctcttgttcttacaattgctcaaatacaaaattgaaatgggaaaaaaaaaaaataaaaaaaaaaaaaaaaaaaa

SEQ ID NO: 6295 - DNA, 650 bp, Canis familiaris
tctgggaaagtggaattagtggatcagtggagtattaacactctgcttagtttcctaagctgtcttgactctgcccagcctcttttctctgcccacattcgggtaccttcactctgtcctctgttgcccccatctcattcagaatccttttttgtatatcctgacccctggaaaggaaaacagagtagtaatcattgtggagagtgctttaactcaaaccgctcacaagtactaattaaaaataaagtcagcctagaatattctccggttttttaaatgccctgcctgaagtgtgttttagcaagtacatcttgtctgaacatcttattgtctccactggtgagttgtgtggagcagaatgagctactgaccaagagcataggttttgaaactgaaaataatggagtccaccttttatctgcccctttcctggtaaacagagtaaaaccatcttcttttgggttgctgtgaggaataaatgtaatactatgtcaatgtaaatcctttaacccagtgcatgtcctagaaagtattttatacacgagagttttttttaaagcataactatgagaaattttacttgtgtatttaaaagttactattgcaaattgaacaccaataaaaaatacatttataaaaaaaaaaaaaaa

SEQ ID NO: 6296 - DNA, 600 bp, Canis familiaris
gagttcttcattttgcgtacagctcttgctaataaaatcgtggccattattcaagtggacatgagctgtccactagctttgttgcagtgttcgatatgattgtttaaattaatttcatgttatacaggagagccttcaaaacgtattaattataagctccatgctaaaaacaatgtttacaaacgttttagtcgtagcaaaaataagtattttgaccgatggctcggtttttgcatgtccacgtccagaaggcgtacgtagtgcatggtagtccgtcttaaaggcttgaccgcccttgtgaaagctaggctcttaactggggaatctgctgttattctagcaacacgtacagtcacgttgccgatttataaactgttttcaagagctcagtttttgtaaatactgcagctacaaaatcaattctgaggaagaaaatcacttatttatggtattagaaataatttctacagtaatcgtttaaactcaaaaccaagcaaaagatgtttgtagatacatagtatctatttggaacagaggtttttgtaactaatttgtttcattttttaaataaagactcctgaagaccaaaaaaaaaaaaaa

SEQ ID NO: 6297 - DNA, 185 bp, Canis familiaris
actggatgggcagctctcctgtcttctggagcctgctgagaagtgctgaggagctctgagggtgcccactatacccacagcccaaacgcttagagaaaggagggctgggaacatatgcagacatgggtttatttttcaatgtttttaaaaaataaaatcttccacgctcaaaaaaaaaaaaaaaa

SEQ ID NO: 6298 - DNA, 585 bp, Canis familiaris
gatgaaattgccatcaatcccccccccaatagtggagggtagtgtctctggagccatttaggaaagatctgaagtgaaattgaagagaaacctaagatataataaattcactgctgagaaactctccgtagatgaagtctcacagttggtgatttctccactcttgtggtgcagtctccctattttgtagggactacaagaaacaactttgaagggaaaaaagtcattagtttagaatatgaagcatatgctaccgatggcagaaaatgaaatcagaaagatctgtagtgacattaggcagaaatggccagtcaaacacatagcagtgtttcatagacttggcttagttccagtatcagaagcgagcgttaatcaattgctgtgtcctcggtccatagggcctcatccctccaggctgtgagctatgccattgatactttaaaagccaaggtgcccatatggaaaaaggaaatgtatgaagaatcatcatcatcttggaaaagaaacaaagaatgtttttgggcaactgatgattaagtcacattttttaagagtactaaaattaaatttggtgaacaactgaaa

SEQ ID NO: 6299 - DNA, 613 bp, Canis familiaris
tatctgatggtgctggagccggtatcatagctagtgaagatgctgttaaagacagaacgtcacaccactggcaagaattgtgggctattttgtgtctggatgtgacccctccatcatgggtattgggcctgtccctgcaatcaatggagcactgaaaaaaataggacggagtctcaaggacatggatttggtagaggtgaatgaagcttttgctcctcagtacttagcagttgaaaagagtttggatcttgacccaagtaaaaccaatgtgaatggcggagccattgctttaggtcatcccctgggaggatctggaacaagaattatggcacacgttggttcacgaattaaggcgtcggggtgggaagtatgccatgggctcagcttgcatcggaggcggccaaggcattgctgttgtcattgaaagcacggcctgagggatggggagcccagcgaagccccctcacactgggggccaggccacagcaaagcaagtgacctccagaaaccagacctgattctgctgcacgtggctgagtgtgattaagggataatgaggcagagatgtatttctcatgaatgaataaataaataagttctctaaaaaaaaaaa

SEQ ID NO: 6300 - DNA, 654 bp, Canis familiaris
atcatgttgagggtggactacttagctctggtaaaagccagacttatcacataacgtgatcctgggcctttacattgagctcttgagagtggagacactcttttaaagtctaaccccaagtatagggggatataaattcccctgctcttccagagttcccccattgttttattcgttaaagaagatcagagataataatgtcaacctgggattaagagagagcacatgacttgagccctgcagctcccctaggtacagagaacccaggccttatgttttaaatgttcatgcacttagtaagcaaatcctacgatttgtgttttttgtttatagtaagtatagaagcaaaccttcatatgctaaaatggcaacttctggatgctgggtgctcagcagcaagtgttgtactctaatctctaatgatccccctggattatctttttggtttaagtcaagcctgaggctggtgaacagtagctacacacccacattgtgtgttctgtgaatgtctagctctcttgaatttggatactggttattttttatagagtgtaaaccaagttttatattctataatgcaaacaggtacctatctgtttctaaataaaactgtttacattcaaaaaaaaaaaaaaaaaaaaaaaaaaaaaaaaa

SEQ ID NO: 6301 - DNA, 696 bp, Canis familiaris
actctaaggtgcccggcagtcacgcaggggcttcccatcagaccagggcactgtggccacacagcacgtcctgctcttgggacacacacgccaggacacagtcaaaggaagggtgcaggcagcccggtggcgcagaggtttagcgccgcctgcagcccggggtgtgatcctggagacccgggatcgagtcccacgtcgggctccctgcatggagcctgcttctccctctgcctgtgtctctgcctctctctctccctctctctctctctctctgtctgaatgaatgaatgaatgaatgaataaataaataaataaataaataaataaataaataaataaataacaaaggaagggtacagaaaaagagattatctgtccatggagaaaggagactaccaagtgagactctgggtggacaagtcacaccttcaagttagctgtaagctggaaattattttattctacttatttattaaaatatattacttatttacgtatgcttcagaggagaagccagatgaagcaatgactgcatcgacagcaacgagagctcactgggggccccatcccacaaccaggaggtttgctcagaaccggaccgggattacaggagctggaagccttcaccgactggagccacccagatcgtagttttaaaataaaagttgtcttaaaaatatttcagaataataaaaa

SEQ ID NO: 6302 - DNA, 572 bp, Canis familiaris
ttcagccctaaattacccgtagttccatgtttcttgatgtagaaccgtggattataccagcaactaagtgctcaagtagtagaaatagagcagaagtagtttttggatttaaaccaagtggatgatcatcaggtccagtttatgctgcctgttagctatcctccagacctcgtcatttattaagtaatattgtgataccagacaagtaggaatttgttacagaactgctttgacaaccagtgttactcttggagaaaaaatagattaaattaacttgtagtttcttttattttcaagatccaagtttttttgtttgtttgtttttaatgttaaattaattgcatactcagatgtcaagctctgaacttgacttcaaatgtgataaagctgggtggcccctggtggctcagcagtttagccctgccttcggcctggggcctgatcctggagacccaggatcgagtcccaggtcgggctccctatgtggagcctgcttctccctctgcctgtgtctctgcctctctctctctgtgtgtgtgtgactatcataaattaaaaaaaaaaaaaaaatc

SEQ ID NO: 6303 - DNA, 584 bp, Canis familiaris
ctagttggttgtccgtggtgtgtttaacggagtgagaggggctgcttggtgagggggctgggccttggctcccgttccctcctggccagccttgggctacccatggcgccccatctctggttccctgggctgtaggcagagtccagagcagtctctcctgccgtggtgaggccgagcccccagagccgtggtcgtgagcccagagggcagtgtggcccctcgcccccgttccccaccccacccaggccccagcttgctgcctgtgccagttgcctgttttgcctcagtgtttgactctagcacttacatgtgtcctccccagccaagccctcctgtctcctgccgcctgaccccgacccccttcccatacagtgacttctcctgggaggaaaagggggcgggagctgttagccttggtttgcacagagtgggtgggccttggggaaagggggtgagctgctgtgtggctggggtccccccttcggccctccgctacgatgtatgaaatgtatgtacagcccagagatgtttatacagccaataaagacggagtttctgtatttaaaaaaaaaaaaaaaaaaaaa

SEQ ID NO: 6304 - DNA, 592 bp, Canis familiaris
agagtcagccatcaacgtggcagaggggaagaagcaggcacagatcctggcctccgaggcggaaaaggctgaacaaataaatcaggcagcaggagaggccagtgcagttttggccaaggccaaggctaaggctgaagctattcggatcctggctgcagctctgacacaacataatggagatgcagcagcctcgctgactgtggctgagcagtatgtcagtgcgttctccaaactggccaaggactccaacactatcctgctgccttccaaccccggcgatgtcaccagtatggtagctcaggccatgggtgtgtatggggccctcaccaaagccccagtgccaggggcccaggactcagtctccagtgggagcagcagagatgtccagggcacagatgcaagtcttgatgaggaatttgatcgagtcaaactgagttaacggagctgggcttggccagggaggctgaggacaggaaaacaacactcccagactcgctctagcttccctgccaagattttgttatttttttatttgaactttaatcatgtaataaacttgccagtggcaaatcaaaaaaaaaaaaaaaaaaaa

SEQ ID NO: 6305 - DNA, 580 bp, Canis familiaris
tcctcggcgtcaacgacacctgcctgctgtataacgagtacattgtctatgacatcgctcaggtcaacctgaaatacctgctgaagctcaaggttcaacttcaagacgtccctgtggtgagctggggcgtgaggctgaggcacagcctggtggcagggatgagggtgcccagtgccccgcactgcctgactgggcaatggccgctgtaccaccacctggagatcgacctccattccgtctccttaggaaggattttctacgaatgtttgctcacgtgttaagcgatgtttcccccgcttttcaaatcctttgtttgtatgggtctgggggtggggcagggggtacccctgcggccagcaccctggtggggacgactgacagtagaagaggaagggggttctagactagttctgcaggaagaaccacgcacgtcacgacgtctgccttactcactggcttcccggggggtattccttccgcccttctaagtgttcacgtttagtttcagttttggaaaaatgttaagcgtttattttgaggtaaaaataaaaactaatttcatactaaaaaaaaaaaaaaa

SEQ ID NO: 6306 - DNA, 549 bp, Canis familiaris
gccaatctcaagtgttctccactgggtaatgtggaaaaaaggggagaaggatattccctgggactcacgggatactactgtgcctcgtcgcctgggggccccaaagagccagcagaatccggaagctttttaatctgtcgaaagaagacgatgtccgccagtatgttgttagaaagcccctaaacaaagaaggtaagaaacctagaaccaaagcacccaagattcagcgtcttgttactccacgtgtcctcgcaacacaaacgtcggcgtattgctttgaagaaacagcgtactaagaaaataaggaagaggctgcagaatatgctaaacttttggccaagagaatgaaggaggccaaagaaaaacgccagggacagattgccaagagacggaggctgtcctctctgagagcttctacctctaagtctgagtccagtcaaaaatgagattttttaagagtgacaaaataaataagatcagacaccaaaaaaaaaaaaaaaaaaaaaaaaaaaaaaaaaaaaaaaaaaaaaaaaaaaaaaaaaaaaaaaa

SEQ ID NO: 6307 - DNA, 639 bp, Canis familiaris
ccacctgggcagtaggacgaaaggccacagttgctgggtgtttatatagagagtaggttgatttttattttacatgcttttgagttaatgttggaaaactaatcacaagcagtttctaaaccgaaatgacatgttgtaaaaggacaataaacgttgggtcaaaaatggagcctgagttctggcccgtgtgcctgcttcttttcctgggaaggggccttgggctacgccttaactgtcaaggcactcttcaaatgtgaagtactgaaagcaggattgcaccctcttccccacctgattaacagtggtatgatctgctgcctagtgccttgccccatgactgcatgggaggtagtgcagcctgccctgatggagctctagttgtggagaatatggtattcctcacccgtgtttgacgtggatggtaaagctaggcctacagagctctcttttcctgaccaaggactgaattggggtgccctcccaaaataagggttgtagaaagatagaacttctgaggtgggtgttcttttcatgcatctaaaagtcctaaacatttatgctctggttgaggatcacttataattatgtccacctttactttatgtaatttgtattatataaaaaaaaaaaaaaaaaaaa

SEQ ID NO: 6308 - DNA, 638 bp, Canis familiaris
ctgtggcatagccatgttttgaaatgttagtagggcatttcccgttattcttcctaaaagtgttcttggctagtttaataaattaaaacattccctcccatgttccgtctactatatttttacttggcaagttacagttttagattgaatatatgaatgacccattgggattctgcttataattacattacatttataggttaatttggagttgatgatatccttacaatattgagtcattgcatacaataacatcatatttctttacatttatttgggtattcttttatgtatttgcattggttttcttcatgagggtcttatgcatttttgctaaactttctggtactttaaagattttttaaaaattttattaatttattcatgagagacacagagagagaggcagagatataagcagaggcagatgcagggctccaatcctaggaccccgggatcgtgacctgagccaaaggcagaccactcaaccactgtgtgcccacccaggtgtcccaaacagtttttgtttctgttgtacttggaaccttgttgtctatttcctatttatagcactttttggttgtatgtatttatctgcttagaaaggcattaattaaaaaaaaaaaaaaaaaaaaaaa

SEQ ID NO: 6309 - DNA, 682 bp, Canis familiaris
cttcagaaggctttctggagcttccgtaactgcatgggtgcgagcagcaggggagcattctcttagcaaacaagtcgaactctgaggacaacgatcccgattcctgtaaaatgaggcctaaattgtgggaaccgcgcaatccatgtgtgatacgcctctacggctacgtaggcggagggacggtctactgaaggcggagggacggcctactgaaggcgggccagcaagggacagggcctcgcgggccaggcaggcctacatgtcgtacaggcggagctgctcctgcacgtcgccgtcggacatctccccaaacgtctccttgttctccttcatgagcttgaagatagccgccagctgctccttctgcactctctgctcctcctccagctcctctttggtcatcatcttcctgtactggttccccacgcagcttccccgggctgtatttaaaggagaagacctcgtcccccgtcctcttcctcaggccctgcttgggctggtccctccgggccatcactgctcacggctctggctgcggctccggctgcggctccggctgtggctccaggctccagctctggctcctcttcctgcctggcctacagcggcctgctcctccgcctcacaccggcgccgccgccgccgccgcgagctcaccccgggccctcgggctcccccgggc

SEQ ID NO: 6310 - DNA, 532 bp, Canis familiaris
gtcccagaggaaaatgcaggctggaagagctgagaagcagacattaggtacgggctgccagcagagagatcaaaggaacaaaacagagcacggaaatagactcaaatgtctatgtgggcagatagcagatgagaaaggggtattgcaaagcagtggaggatggggggaaatcaattaataagtgctcttgggcaactagctagataattggaagaaaaaagttaaatagaatcccttcctcactcgcttatagacaaaataaattccacctggatgaaaggtagacaaataaaaccataagagaaagagaaaatgtatagtgtgtgtgtgtgtgtgtgtgtgcatgcatgcttgtgtgtgtttgtacacaaagtcagagggtaaaaaatatcatctgtgaaaaaaatatctgtaacagaaatgatgaagggctaatttctttcattttgtcatctgagagttcttaaaatacaataaaggagaaagttcttatgagccagtagaaaaactggtcaaaggacattcaccaaaa

SEQ ID NO: 6311 - DNA, 602 bp, Canis familiaris
ttgtgtcgaattgtccgccacaatgggatgcaggtacacaaccttgtttaaatggaagtatctgtgtgtgagtatagttatgaaaaaaaggtaaagttctactggtaggaccctattattgaggcaaattttgctcaatgttgaaaagatatagagaaactagtggagtaaaagataaagagttgaaggaaaagacagaagagcagtggttaactatgttgagttagaaatttaagagtagccttacctatttgtttaaccagtgcttgccaatcataccatagttgggattatatagtcttggctccttcatgcttatgttctataattttgtttgtctgtttgtttttctttgatgtaattgaggttgcacatcatgctatttttggcgatgcctgattttattatattgtacttttatcagtcatttcctttagaaggatggggggaaaagttttatttctttttttaatttaaaatttgtttaatgcactggaaataaaattggacacatttcactgttcaaaaattcaaaaacaaaacagaacaaacaccacaaagaaaaaaccagcaaccaaataagcaacaggagaaaaaaaaaa

SEQ ID NO: 6312 - DNA, 591 bp, Canis familiaris
tctccaagcatcaccctgggagtgttttgagacttttctcataaatgagggcaagtacaagtcctgtgtttgctccgaagtattcaagtaccgctcaggtattgttgaaatggaaatggagttctcaccttgtgatttggtttgggatcaatagggaaggcacaaggcaccagacccaacatatacaatgtatttgaaatgatttttctcagaattttgaagtaggaaagttacccaaacacttctgcttccactttaactggcctgcaatattgtaagaatggcatatccttgttactgtgatatttaaaatatccacagtgtccaccttttccaaaagattctagtaatgatctagaaatatctttctcttatctgttatttatcaatttttcccagtatttttatatggaaaaaattgtattgaagacatttagtatgcagttgataagaggaatttggtataattatggttggtgattattttttatactgtatgtgccaaagctttactactgtggaaagacaactgtttaataaaagatttacattccacaacttgaaaaaaaaaaaaaaaaaaaaaaaaaaaaa

SEQ ID NO: 6313 - DNA, 607 bp, Canis familiaris
ggcgagtacgggctcccggaacaatacgtgaggttctggagggtcaagttaccctggccaagatccgcaagccgcccgggagctgctgacgctggacgaaaaggacccgcggcgcctgttcgaaggtaatgccctactgcgggcgacttgtacgcatcgggggtgctggatgaagggcaaaatgaagttggattacattctgggcctgaagatcgaggatttcttagagagacgcctgcagacccaggtctttaagctgggcttggccaagtccatccaccatgcgccgtgtgctgatactcgccagcgccatatcagggtccgaaagcacggtagtgaacactcccgtccttcaacatggccggctggaacttccaaggaggcaacaattggacctttccttcccttcccggttccttcccggaatggggggtgcccgccagggccgcgtgaagaggaagaatgccaagaagggccagggtggggctggagccggtgatgacgaagaggaggactgaacccacccttccatccctttcaggcccgtggattatctagttttctaggccaataataaaacagtgttttggaatcgttaaaaaaaaaa

SEQ ID NO: 6314 - DNA, 640 bp, Canis familiaris
ggacctggccactaatcccgcgcaacttcccctgagtaggagctggagtcaatccgggaggatgcttaaacaccttgggagcctaaatttgaaaagcacaagctctatccaggaatcatttgggaaatttcacatcagtacctgtaaacattgtggagagctttggggaccgggatgcacgtgagccggtacaatggagaagtatgccatgcctggaggagaagatccaaggagctgggcttacaaggtaaagaagcacctgcaggatcttcggccgcatctcgagagctcttccacaacgaactctgaagactgcaggagccctctggtcgggaagaagttggggccgggggccaggcgtccgcctgaggacaggcctgggtgcttcggggcggcacctgacacggacaggaccctggaggaggtgtgaaggggaccggccaggcgtccttcatgcagaaggacagtgagcagtggtgtgccagatcgtgtgactctgcccctggaagtactgtgttcttaaaaacatgtcacggggtttaaatggtcatgatctaacctgtcactcgatggtcaaaaaaaaaaaaaaaaaaaaaaaaaaaaaaaaaaaaaaaaaaaaaaaaaaaaaaaaaaaaaaaaa

SEQ ID NO: 6315 - DNA, 629 bp, Canis familiaris
gtccatttatttaacgcctaggccttttgtgtctagactctttttctatagtacattatttgggctcacagtagcaaattcttccgtgttaaaactgttctctgttttcacatttggacaaaccttatgggtttgggggattttcttgtagctcttatatatccctatatattatatctatatcgtgaaatttgactgtcagctacatgttggtaagacacaagcaaagtattactgtaactaagtatttttaaagttaaaatatatttttatgtgcctttggctttttattgcagagtctacattttatagatattacatccaatgttgtcatatgacttgttaccattggggctccattgtaagctgtgtatgtatatgtttggaaaagtgtattcatacttagctttatttctttttcttcatctgtcagcatacttttcacagcacccagcaatggattgtaaagtataaaggcacaggctactcatgatgcttctgcagagactgtgggctacaccatataatgttatttggaaatataggtattttagtacagtacatacttgcattacataggtacttcatgcaacacaataaagagtaaatgttgaaatgaaaaaaaaaaa

SEQ ID NO: 6316 - DNA, 587 bp, Canis familiaris
cagggccagggacttacttgtggcttactatgatgtggactatgaaaagaatgctaaaggttccaactactggagaaacagagtgatgatggtagcaaagaaattcctagatgctggaaacaagctcaactttgctgtagctagccgcaaaaactttttagccacgaactttctgattttggcttggaaagcactgctggagagattcctgttgttgctatcagaactgcaaaaggagagaagtttgtcatgcaagaggagttctcacgtgatggcaaggctcttgaaagattcctgcaggattactttgatggcaacctgaagaggtatctgaagtctgagcccatcccagaaagcaatgatgggccagtaaaggtagtggtagcggagaattttgatgaaatagtgaatgacgaaaataaagatgtgctgaccgaattttatgctccttggtgtggtcactgtaagaatctggagcctaagtataaagaactgggagagaagctcagaaaagaccccaatattatcatagccaagatggatgccacagccaatgatgtgccttctccatatgaagtcagcggttt

SEQ ID NO: 6317 - DNA, 650 bp, Canis familiaris
ccggattcccgggatgtgagcaagacactgcacgtgtgtgtgtgtgttctgtaaaagcctggcaagaggtatggccgaggccccgtcctgctggcttgcaggtccctccactgcgtccctgcccaggctgcctggggcactgggccctccccagagtgtggctgggttgtggacctcgctgttcaggtgggctttgcaggttctcacttcagaacttatggaatggaggttttagcacctttaagtaaataaatagatgaaccctagccttgttaatttatatagcgggtatgctgacaggctgggcgccgaagctctcgtcgcctccgcacgcagggtgcaggtagctgttctaagaggcactggtctgtgtgtaaagatacttggcttgttttgtatctcttttcctggtggctgtcctagcgcttgctgaagtcatctgtggtaagggaggtgacaagaggcaacccctcccccacacaccctccaccgctttgtgtctttcttgttcagttaccgaaacagctgtaagcccatctacaactaggtgcgtggacattgtgctagggtagttccagtgtgtcaactttatgaattgaaatataaaccagtaaaattgtattactaaaaaaaaaaaaaaaaaaaaaaaa

SEQ ID NO: 6318 - DNA, 637 bp, Canis familiaris
tctcgccttcgatcactgcgggacgtgatcgaatctcaggaggaactgatccagcagctgaggaacgtgatggttctccaggacgaaaatttgtcagtaaagaagagttccaggcaagtggaaaagaagctggtggaagagaaagctgctcatggccaagaccaaggccctcctggccaaggaagaggagaagttgcagtttgccctcggagaggttgaggtgctgtctaaacagctggagaaagagaagctggcttttgaaaaggcgctctccagtgtcaagagcagagccctgcaggaaaccagtaagaaggaccagcttatcaccaagtgcaatgaaattgagtctcacattataaagcaagaagatatacttaatggcaaagagaatgagattaaggagttgcagcaagttatcagccagcagaaacaaatgttcaggaatcacgtgtctgactaccggagtccagaagcaacaggagaactacatggcccaagtgctggaccagaagcataagaaagcctcagggatgcgtcaggcccggagccaccagcgtcccagggaaaaataaaatggtcgtcgccttcctaaaaaaaaaaaaaaaaaaaaaaaaaaaaaaaaaaaaaaaaaaaaaaa

SEQ ID NO: 6319 - DNA, 644 bp, Canis familiaris
ctttttgttgctgccgcgtcccatgcttcaagaaggcctgatggcgtcggactattccgagaagtggccacctccgaaattcccctttagaacatgtagacacttgagaaatgtttctgtttgaagaaatagagggagaaacagaagtcttaagtctgtggcacactgtgtcttcagacagtttgggaggaatgaaaacctagagatttaaaatcatgaattgaacagtgtaaaattccagtaaaatgtaaaaatggaataatgcatcgctcgtgaaccttgagcatagtgacttagagacactgtatctcaggtttgccaataagactgtggacttcgtgattgttgttgaacttctgggtcaaaactcaaatgaggtgaattttgcctttaaagagtttatttgctaagaaccaatttaatagtcacgagagaatcaaataatagatgtcagtacaagtagttcatatatttaaccatttagtttggggctctatattacttgattgagccttaaatcaatgtggttttaatcaatggtttgttctttgaatggttgctaatgctgtagataatcttactgaggactgtacaaacaaacataaaggtgtggtatcaaaaaaaaaaaaaaaaaaaaaaaaaaa

SEQ ID NO: 6320 - DNA, 561 bp, Canis familiaris
tgacgggtaaatggcccgcctggcatatgcccagtacatgaccttatgggactgtcctacttggcagtacatctacgtattagtcatcgctattaccatggtgatgcggttttggcagtacatcaatgggcgtggatagcggtttgactcacggggatttccaagtctccaccccattgacgtcaatgggagtttgttttggcaccaaaatcaacgggactttccaaaatgtcgtaacaactccgccccattgacgcaaatgggcggtaggcgtgtacggtgggaggtctatataagcagagctcgtttagtgaaccgtcagatcgcctggagacgccatccacgctgttttgacctccatagaagacaccgggaccgatccagcctccggactctagcctaggccgcgggacggataacaatttcacacaggaaacagctatgaccattaggcctatttaggtgacactatagaacaagtttgtacaaaaaagcaggctggtaccggtccggaattcccgggatctctctctctcaagtaaatatataaagtcctaaaaa

SEQ ID NO: 6321 - DNA, 624 bp, Canis familiaris
tatgggcagaggcaggggcaagcattcaagtattctgccaggggaacagcacatgcaaagggatggtattaaaggagagaatgacattttaatgaaactaggaaaagttcagaattgctgtaaacacaatgggaaagtggggagaggggagagaagaggtacaagatatgaaaagtaagcagcggttatgtgtggatagagcttttatatatcatcataaggtctttgaaactactaggtaacagatgaagggttttaagcagtgagatgtcaagatctgatttgtgttttggagagctcactcctgatagagcgttagagggggcaagtccagaggctgatgggccaattgaatggctattctataatctggaagagaaaagatgttgatataaaccaatatagaggtagaaatgattgagagaagtccaaaaaagagggatgcctgggttgctcagtggttgaacatctgcctttggttcaggttatcatcccgagatcctgggatcaggtcctatatcagtctccctgcaggatgctgcagggttccctccctctgcctatgtctctgcctctctctgtctctcatgaataaataaataaaatcttttaaaaaaaaaaaaa

SEQ ID NO: 6322 - DNA, 673 bp, Canis familiaris
tcagtcacacagtcgtgaaacagttttgcgcatgacagcgtcaccagggagcatgtgttgtgtttttgtaactggttgtgttttttttttgttgttttttgggtttttttttgttttgttttgttttgtttttttagactgtattaagaaacacgtacagcacaagctggccttgtgttgctggttcctgttcagtatttcctggggattgtttgcttctttaagtaaaacacttctgaccaatagtacagtatgtcttaatggcacaggtcacatcagcatctttctgcttttgagactctctcggctggctgcttcacctggattcagggagacccgtagcctgtgcttgggtttccacgtgctgcgatgtatcttgtatagataagcacaaaagagaaggtgctcactaacagaggtacattactacaatgttctcttaacagttaaacaagctgtttacagtttcaactgctgaatactatttgagctatttaaagctatattttagtatgaactaaatgaaggttaagacatgctttagaaaaatgcactgatttctgcattatgtgtacagtattggacaaaggatgttattcatttttgttgcattattttgaatattgtcttttcattttaataaagttataatactatttatgaaaaaaaaaaa

SEQ ID NO: 6323 - DNA, 519 bp, Canis familiaris
tccttgctactctgccttcctgggacagatgcagagtctgtgggagtctcctggggcctgagccaggggcatcactgaagtctccattcctgcttgtctgtctggcccagcttcagcaagggcctggctgtgtgctcagggacctgcttccccctgtggggcaggaggaagaagaggaccaagaggggatggggctgtcctgtggtcacatggggttgctatggggcacagaggcctaacccactacctgactggggctggtgctctgtgtgggctcagaagccgctttcacccattcaggggaagctgtgagtcccactgccctctccttccacctttccagcagtttctctgacctctctgcttcagctgtgcctgaagtagcatgccccacctgtggcagggcttcctcacccttacctgacctctaaaagaggttcatttcatcacagactgattaaagtcggtcatttctattcccaaaaaaaaaaaaaaaaaaaaaaaaaaaaaaaaaaaggg

SEQ ID NO: 6324 - DNA, 511 bp, Canis familiaris
tttttgtcaggttctacaacgaattgattctgcagatccctcgtttgtaatgtataatgtattggatacattttgttaatatgtttgtactcctatgttttgctatgacgtataattttataacatttccaagactgtatttaattacaagtttatgctgtgtaagaatttatgtaattgataacttcactaaatctaatcttgttagtttaggagttatttgggttttgacactggacttgcaccgagtaagcatccgaattgtgagatgcctaaccattgctacactgctcgtcttggttgggggtttgggtttgggggttctctggtttgattttaatttttcttttcagatttaaaagccttaaatgtactgtaagcctcagattgttgtacagctggattgtggttgattgccagtttgtgtactgtggcttggatgcagcacagcggttggtcatggaataaaggatgcatggatcagaaaaaataaataaataaataaaaaaaa

SEQ ID NO: 6325 - DNA, 662 bp, Canis familiaris
gaccgtcagagatagggcatctggaccagagagagagccccaggggaccacagttatgtcactgcccagaggcggtgggctaagccacgccccccagcaggcctccctgttactatagcatcagaaactgtcacatctctccccttccggagagcagggcttgcactcttcccctagaacctgactttgaaggcaattagaagctttgttttcatttccccctggtgattgtcttgccaggatggttaggtacacaaggacgcttattagatctactgagagagagaaagcccctacccgcgttctcttcggtgattagtagacaactattatgatgttgtaggaggacacagacgcaaaccgatgtgggttttgaattaagggcttaaagggagtacgggtaacatttttctttccttgataggggaatctggcttaataatttagccaggcttctatttcataccctctcccactacaaactttccgtgcagttacctttcatttttaaagcaatttcactgctaaatataaattgtatttgtggggttcatagttatataatgctgaagggaaccactctttcgttgaaaggtgataaaagttaaataaagactgtctccacagtaaaaaaaaaaaaaaaaaaaaaaaaaaaaaaaaaa

SEQ ID NO: 6326 - DNA, 597 bp, Canis familiaris
gttgttcttcgtctctggcctcttgccatgccctatccctgaggactactcaacgttggaagtgaattgaaatccttgttctaggtggacactgattttgttggcgtgggagtgggctgtgcggagaagtctgtgccatctggaggcccccacgtgtccttttgcctcagccccgcacggagacccgggacgtgcagggcacacacaccgttggtgatcactcttcgtaaaacttgaacatcaggaatggaaatggaacgtggttttgatttcgaatggtttctttaaacaccctgcccctgtccagtccaaccccctgtcccacctccactagcgaaagtctcttataaaaccaagagttgttgacgtctaacttccttccattaaattaataagtactgacctcctaatatttaagtgtttactatctattgctgtaaagttttgatattttgtaaacttctcttcccaaatagtagatgtctaaaatcgttgtacatctgattcttttatattccattgtttggcacaaagtgtggtttttatttagaataaaaaaaggaaatttgaaaaaaaaaaaaaaaaaaaaaaaaaaaa

SEQ ID NO: 6327 - DNA, 168 bp, Canis familiaris
ctgggggctctagggaagctgcgaagggctcgttgagatttcgagtttgtgagtttattttctgtgccctgtctcctcttgctgaatatatttaggagttggctgagatagttgatgttcatttgattcatgttaaactccatggcctgtgagtcttgtgttttaatc

SEQ ID NO: 6328 - DNA, 530 bp, Canis familiaris
aaagactgtttaatgccctttctgtcattggaagctcttctttattatacttattcccaaccatgggtatgcgttatactgttataatcacaaggaatttcccatttaagcagactttgccttttgtcaaggttggagcgtgataccagaaggatccagtattcagttactttaatgaagtcttttggtcagaaattacctttttgacgctagcctactgtatttctgtgtatatatttatatataaatatatatatatatatggagtgaaaccttgtgaactctttacttagagttttcttgtatagtggcagagatgtgtatttctgcatacatagtgtaatgatgtacttattcatgctaaactttttataaaagtttagttgtaaacttaacccttttatacaaaataaatcgtgtgtttattgaatggtgattgcctgctttatttcagaggaccagtgctttgatttttattctgctatgttataactgaacccaaataaatacaagttcaaatttatgtagac

SEQ ID NO: 6329 - DNA, 607 bp, Canis familiaris
tttcttcttgctaatgccaccaaatgggcgtacatttcttatagcttgtggctaaattctgacagagggtagatgccttcaccataactgtattttctctctgaagttttctggtttcttgtgctaacttatattaggttaaagccagaaaagctgaagctagccacacttaatctggagagttaggctcgctgcccaattaaagacaaagatgggtttcagtattcttcattggtttcttagtctcacatttttgaccgtaggtgcttgacttgagctgtctgagctgacccagatggctttgtgtcctcaagagctaattcagagaaggtcatttcagctgctgaatattcaaggaggtgtcttggtccaaggttacttcagctcataactcaagggatgatcctgagatttctgaagcttcctctaacctcacaattattgtcttggtcccgcacataattaaatgtataattaaatgatggcagtgaaatagaagtacggctgccagcagtggtcatccccccaacaggatggccagtacttgagtgataatgatgttattaccgccctgttagtgcttctgaagatatgatatacttgagaa

SEQ ID NO: 6330 - DNA, 136 bp, Canis familiaris
ttgtaaacttcttgttaagactgttatgtttctattgcttttgtatgggatgatattgccaaaataaaaagaaaagaaccctttaaaaaaaaaaaaaaaaaaaaaaaaaaaaaaaaaaaaaaaaaaaaaaaaaaaa

SEQ ID NO: 6331 - DNA, 568 bp, Canis familiaris
aggggcgcacgggagtcggcgcccgcctggctgcaccatggtccagctcactcctgtcctgcgcaaggcctaccacgggggccacttaaccatccgccttgtcctgagcggctgtaccaaccggcctttctaccgcattgtggctgctcacaacaagtgcccccgggatggccgtttcgtggagcagctgggctcctatgatccactgcccaacagtcacggggagaaaatcgttgctctcaacctagagcggatccggcattggattggctgtggggcccacctctctaagcctgtggagaggcttctgggtctttctggctttttccctctgcatcccatgatgatcacaaatgctgagaggctgcgaaggaaacgggcacgtgaagtcgtcttagcatctcagaaaacagatacagaggctacagaaacaaaaaccagctgacttcagtgagcagagaacattgggagaaaggtcaaagccatcttaaaacacctgtgcagagctcttagttttattagatttggaggtcaataaatgggagttttctgagtcaaaaaaaaaaaa

SEQ ID NO: 6332 - DNA, 608 bp, Canis familiaris
ccccttttgcagttaagggcatttaattgaaggccatactcattttgtccctcaggtcagaggcagtagggaggatttcacagtgacctaatagagacctccttgtgtcagtattttttttttttttaagttcatttaatggtgataatggagggagtataagagtaaaggataatgcaggcatgaagaaagaaactgaaagatcccactgcttgctaaattaattcgtcttcttaggctacctgactccagccatcacctacatcctaaacagctgtatttagctggctagagaggcttctcaggatgtctgaacttccattagggactacgatgtggtttcaaatcaatagtgtactctgccagagaagcattatttaatcataattccacattacctgataaactaatctatagaaatagatactttgatctgttctgtgcatgtagctaacaaaattgtgactcattctcttgtatagtttgctatgattttggttttctgagatatttgttccttatggtcttgaaaatggaattctatattaataaagtaattatgtattttttgctgaaaaacaaatgtatgaagtaagaataaattattt

SEQ ID NO: 6333 - DNA, 516 bp, Canis familiaris
ttaacccttaccttttaatatctgtgtctgtctgttctaagtgtggtgtcttttatcttgaattagtagttgtatgaagtcatagatatatatacacttcaccatagatcttatgtgttaggaagaacttaaatttctttaattcatttatccagatttttatgtttgaattatgcattttccagaagaggggttatctcaagaataatcatatatatgcatacgtaaaaatggaccacagtgacttattagtagttgttagctgccctgctacttagtttgttagagcatttgagcacacattttaattttacctaattaaaatgtgcagtattttcagtgtcatatttaactatttagagtatgatttccacctcgatgttttaatatcctagacatctgctgtaataatattttagaaaatgtttggaatttaaggaataacttgtgttactaatttgtataacccgtatctgtgcaatggaatataaatatcacgaagttgtttgaaaaaaa

SEQ ID NO: 6334 - DNA, 565 bp, Canis familiaris
ctctacccagcacccaattactgcaagcagcacttttttgtgacgatgggaaagagagagatggatttcttcctggcggggccttgaacttgttcaagggttccggcatttctgagtgcagcagcacacctcatacacgctatgctgctcacagagggaacgtcaaggcaaattagaccaagtctttgccttaaggggcctccaggccagccgagcaaatattggcacattgtcagcctctatcgttgcattgtctgccacttaggtacaagcaagaagtttggggaacggtctgagggttctgagaagcccaattacgtgtcccacgtcagattttcttgctgtgatctgcactgtggagcagccagaccttcacagtccaacacagaagccaccagccatgtagggctatttaaattcatattcaggagctcctgggtggctcatttggttacgctgccaacccttgatggcagcccaagtctccatctcagggtcgtgagtccacacccccgagttgggctccgtgctgagcgtggagcctacttacaaaaaacaaaaaaaa

SEQ ID NO: 6335 - DNA, 543 bp, Canis familiaris
cacatcagactcatgacaaatgtccagtgtcaaccctttactacacaatctagggatatcctaggaggccttactccgtactcctaatcctaatatcacttagtttattttcacctgacctactaggagacccagatatctacacccctgctaacccccctgaacacccctgccacatattaaacctgagtgatattttctgattcgcctatgtctatcctacgatccattcctgaataaattaggaggtgtactcgccctagtattctccatcctaatcttggcattcattccactcctccacacatctaagcaacgcagcataatattccggccccttagccaatgcctattctgacttttagtcgccgatcttctcactttaacatgaattggaggacaaccagttgaacaccctttcatcattatcggacaagtcgcttcaatcttatatttcaccatcttattgatcctaataccaacagttagcgttatcgaaaacaaccttctaaaatgaagaaaaaaaaaaaaaaaaaaaaaaaa

SEQ ID NO: 6336 - DNA, 585 bp, Canis familiaris
gtgatcctaagtgtattgatgctggttccccctcttacccttctggcaagatcttggctatcctgttatcagattggttgtgacttttgttgttccgctctttgacccgcgtatgtgccctgcctgcgtatcttggtttgtggggaatgatcattctgtggggaggagtcagaagtaagggatgatcattattacctatgtgattgcactttaaatgcccagctgcttcttcagtcccccataacctaagcatactcagccagatttctgaagcagtctccactccagtctctcatcccacccttaacattgctcttgcttttcagtttgctgttgatttgcattctcttctactagtagaaatgccttcccttgattccctattttattgttcctctagagaggtacagttgtaggacagagataaatagggcctgtgcaaaagaggccatcacactatctcttgctatcagaaggtacaagtaggatagttacagtgaacaaaaaaaaagtgtggcaggctcccctgacttttttaaacacattttcacaagtttttgagacactggatttctttaattaaaa

SEQ ID NO: 6337 - DNA, 651 bp, Canis familiaris
gggaagtttctactgacaggacagtgtgactttggctccaactgcagattttcccacatgtcagagagagacctgcaggaacctgagtatccaggtggaggaggagagccggccagggagtggccactagatgttgtcgaactccctgagggccatctggaagactggttggaaaagagagccaagcggctgagctcagctccgagcagcagggctgaacccatgagaagcaccatcttccagtaccccataggctggccaccagtccaggagctgcctccatccctgcgggcacccccacccggggggtggcccctgcagcccagcgtccagtggggctgagcccctcatccccactttgacccccatctggtcagcttttgtgtcagtcacaataaagataagggctactggggatgccaagggcctctcccccgcctgctgccccctgtggagcctctgaaaccacatgctgctgggcctggcttgactaaggccccagagttgccccagcaggtatagccctggtcctagctctgctccagacagctccatcctccctccctcttgggacatcttgagaagatgggtggtaaaacttccttctggatgtttataaagaaagtctgtcaccaaaaaaaaaaaaaaaaa

SEQ ID NO: 6338 - DNA, 603 bp, Canis familiaris
tctcatataaccccagttcctgcaaccattttcctctcatccctcagtgccatttctcttcatgttagctgttgtacaaacttttggagccgggttggtacagcagttctcttggaatccgtccaggccgctggggggtggatcaccacaccctgtagggcttctcccctcctagctgtctttgggaaacgcaggactgggaggctgttttgaccagagaggccaaggtcaagagcaaggtgtagaaaaattgtaagaatagaagaaagtggtgttggtgaattggttttgttttgttttgttttgttttcacatttggatagctgtcacaagaggtctttccctcagtttccagcatgttcttccttttctccctttctcacgtttttcctcctattaatcaagagaaacttcaaagtccatgggatggtcggatctcacaggctgagaactcgttcacctccaagcatttcatgaaaaagctgcttcttattaatcgtgcaaactcttgccacgatgtggggagtttgacaaatctttcaaaataaaaagtaatgacttagaaaaaaaaaaaaaaaaaaaaaaaaaaaaaaaaaaaaaaaa

SEQ ID NO: 6339 - DNA, 579 bp, Canis familiaris
aaccgcctccaagatgcagattttcgtgaagaccctacggggaagaccatcactctcgaggttgagccctcggatacattagaaatgtaaaggccaagattcaggataaggaaggaatccctcctgatcagcagagactgatatttgctggcaagcaactggaggatggccgtactttgtctgactacaacattcaaaaggagtccactcttcatcttgtgttgagacttcgtggtggtgctaagaaaaggaagaagaagtcttacaccactccccagagaggattagcataagagaaagaaggttaaactggctgtcctggaatacttaccaggtggacggagatggccaaatccagtcgccttcgtcgagagtgcccttcagatgaatgtggtgctggagtttttatggctagccacttcgacagacattattgtggcaaatgttgtctgacctattgcttcaacaaaccagaagacaagtaattgtatatggattgataataaaagaagtgaactgataacatttaaaaaaaaaaaaaaaaaaaaaaaaaaaaaaaaaaaaaaaaaaaaaaaaaaa

SEQ ID NO: 6340 - DNA, 529 bp, Canis familiaris
tcatctttggcatctcttggcctggtggggaaacagaggcccagggcagagacctaagcgggtataaggccaggtggcctgctccttttctgggctctagcacgggtgggtgccccctcaacccagcttctgctggtccctccaatcttaggctgggacttggaaagaggaagaggctgtcccagggctgggccagcacgccgtgcactttgaccctggctccttgccagcacggctgctaacagactgccacttgagtgagctttgcaggcactcccagagtggccaaggaaggagctgggccttacaccatccacctccacgctgcctcctggccagctgcccaccccagtgccaggtgggagagggagcaaaacagccagccccttccaggtggcagttgggagggtttttttgtttttgtttctgttgccatttgtgtaaatactagtctttttggaaaaaaataatgtaaagatgttttgtataaactctgaattattaaaaaaaaaaaaaaaaaaaaaaaaaa

SEQ ID NO: 6341 - DNA, 575 bp, Canis familiaris
cggcggtcatcaggatctcagcacgactccgagcatttcgtgctcgccgtccgggtccctgccccgcccgccttctctccgctcctcccgatgcactccggagccctgctgtatgcctcagtcaggctgtcgtccggacgcttctggcacactgaccctccgcccccctcccgggacgcctggggcacatctgaccctccgcccccctcccgggacgtccggggcacactgaccctccgcccccctcccgggacgccggggcacactgaccctccgcccccctcccgggacgccggggcacactgaccctccgcccccctcccgggacgccggggcacactgaccctccgcccccctcccaggacgctggggcacactgaccccatcccctccccctcccagggctctggggcacattgaccctcccctcccaggaatggccaagaggactaaggaccaaacaccaggttcatcgagggtgtggcagctggagctggcacctgttgctcacgaagttcgcataactacattggcaacattgacaagacataaacctgtgacctaaaaaaaaaaaa

SEQ ID NO: 6342 - DNA, 592 bp, Canis familiaris
cctttaaaaaaatgttaattattagaacttctaagaaaacaagaaacattatggcttaaattacttacccagaagatatacatattgtgctttaattccacactactttattatgttaaaaaaaatcttttactttaaattactttatcatatcatttgatgtatgcaagtctgttctttttgccaaaatcaacatacaatgaatacatggctttgcttactgagattcaaacgtgatgcaatgttttaaaataaagtcagtcctttagaaacataatttatgtgttcccagagtttctaagtataatagtaatttaagatgagtaatacatgtttcagaaggtgtgaaaggagaaaagaacaataacagaaagaaaataatttgaatacagtttctaagtttccttttttaagattctaaactttgctgtatacactagaatcgcacaaggaactattccattgttttctctacaaaaataggccatgaagaacaataaatgaaacagggtgccttgtaatagattctggaaaatactaaaaaaacgtttggtcaataatttctcttgagctttattaaatactgatgatg

SEQ ID NO: 6343 - DNA, 623 bp, Canis familiaris
tgttcaactaagatcaaccagatctccataaatgtatgtaaatccataggataaacacattttttgtatgatgccaattcatgcagaagtgattgatcattttctaggatctgtttccgcaaaactatggctttagaattttaaaaattaaccttggcatgatggccaactcccaaaagctatgtaaagttcccagtgggtggtatggaaactgcctcccactcttgcccagccctcagagcacttgacttcgcgagagatcctttttctaggaaaaatgagcctcctgttattttattctatttttttgacacaaactgtagattttagcagccctggcccaaaggaatttgattacttttgttttaaacagtacaaaggggacactataattatgaaaaacatcctgattttagttgtttttaattttatttcttaggatacgttttcagagtggtaaattgtgtgtgagcattacaaatgatgattcttttagtggtttcttagcctctcttacagcccatggggatagtactgtacatcaataccttcatatgaaatttttatatgcaatgaaaataaaagcatgggttgattctgcctaaaaaaaaaaaaaaaaaaaa

SEQ ID NO: 6344 - DNA, 593 bp, Canis familiaris
tcccaaggtgacatactcatttaggtgtaagtgggaatttctagatatttatggagcataaatataggccattttccatgtcaccttcctttctgatcatagagcagagcagatgcacctaagcgaaggagaagtgatgtcataaaaggacagcctcccattttatattgtatcctattttgctatgtagggaattgtttattcagaaacaggttgataaagtggtgttcgagggattttatttaatgtattttaaccaaatggactgcagtaccatcaaatcatttatgttaccacaagcaacatttccatggagatttaattcaaagtttgtggtacacaactggagcctttacttatttaagaccataataagtttatcctggtgtgtggccatatttctagaaggctgagcccaatttgcaagttgtactgtatgcaattttgcaaagaagtgaaaataatttgttgtactttttattcaattctgtatacattatgaaattatttttattaaataaatattttacattatatttttccctttataaaaaaaaaaaaaaaaaaaaaaaaaaaaaaaaaaaaaaaaaaaa

SEQ ID NO: 6345 - DNA, 597 bp, Canis familiaris
gagccttcgagcagtagctcaaacaatcctcataatgaagtaacgctagcaattattctcctatcagtcctcctaataaacgggtcatttacactatccacgctaattattacccaagaacatatatgattaatctttccggcctgacccctagccatgatatgattcatctctaccctagcagaaactaatcgagcccccttcgacttaactgaaggagaatccgaactagtctctggatttaacgtagagtatgcagcaggtccttttgccctattctttctagcagagtacgcaaatattattataataaacatctctcaccaacaaattctattctttcggcggcattccaccacccaattcaaacccaggacttttaccttcttaatttaaacctttccacctattaaaaacccctcttattaaccatctgcttcctatgaattcgagcatcataccctcgattccgctacgatcaattaatacacttattatgaaaaaattttctacccttaactttagccctatgcatatgacatgttgccttacccattatcaccgcaagtatcccaccccaaacataaaaaaaaaaaa

SEQ ID NO: 6346 - DNA, 503 bp, Canis familiaris
caagtgttgtacaaaaaagcaagggctggtaccggtccggaatttccccgggatctgcagccccagcagagcagggccctcagccggggtcacacgggttggcttcatgcacgccgcagggatcgctgcccctgggcccttgggaccccgtgggaccccggccacccgggctgcctggaactggctggctgccactgagcatccgcacccctgtggggaccggcccactggcccgtctttgtccctcacgggcttccccgaggcagcagccggcgtggaatctgactgggggcgaacccggcatcccggggggaggcccacctgctgctggcggcccacgtgtcctgtcacgttggagtcggaagcgcctgcgcggtggcctgcgctccttggccgcggtgggcagccccggggcagctcacagccccgtctcggggacagctccttgctctgcctttttctgctgcgacaataaaacctcccacctgtttggaaaaaaaaaa

SEQ ID NO: 6347 - DNA, 535 bp, Canis familiaris
  misc_feature (1)..(1): n comprises a, c, g, or t, or includes no nucleotide
nctaatcctaatcgctctaccttccctccgaatccgttatataatggacgaaattgtataacccctctttataccgtgagaaacaataggccaccaatgatactgaagctatgaatatactgactatgaagacttaaaactttgactcctacataatcccgacacaagaattaaagccaggagaactccgactattagaagtagacaaccgagttgtcctcccaatagaaataaccatccggatacttatctcttcagaagacgttttgcattcatgagccgttccatcactaggtctaaaaactgacgctattccaggacgactaaaccaaaccacccttatagccacacgaccaggactgtactatggccagtgctctgaaatctgcggatctaaccacagctttatacccattgttcttgaaatagtccccctatcttactttgagacctgatctgccttaatagtataacctagactagatctactaaaaaaaaaaaaaaaaaaacaaaaaaaaaaaaaaaaaaaaaaaaa

SEQ ID NO: 6348 - DNA, 621 bp, Canis familiaris
gcggggacattctactcgtgagtaatcttgattgggttctttcattagcatcctccctaagtactagcaatctattttccacaaaagaaaggttgattttcgactgtcacaggaatccaagctgaaatcctcactgcacacatgagggatattgcctatggagagctcatgctttcaatcggtgccctgcaaacctacaccccatttaataaacagagcagaaaagctgctctgtgctacagagccagtggctgcctgaattccaggcaagctggagcagtcctgagatagataagttcagttagagacatcgagaataccaacgccctacgtgtccgcaaatagagttgcttatcgaagtcatccaccactcaaagacttaatttatttttctgactcagtaaaacaacggttcttttatgcagtatctgaataacgtaaacttaatacaggcgagggaaatcctatcatcagatgtgacaggggacacgggctttaagtgttgagtagaaatgatccctttcacaatatcacaggacagtgggtagaaagatgaatgtcggtcctgcacctggagtggagttgggtaatcctagcccctagtgtggagggactagcatg

SEQ ID NO: 6349 - DNA, 620 bp, Canis familiaris
tgggatgagtttccccattatgtggccacatgggtgtcagaatgagttatgtagcagctctccttctgagagcccttggaggctgcccgtatttgtgccaacaagtacatggtgaaaagctgtggcaaagatggttttcacatccgagtgcggctccatcccttccatgttatccgtatctacaagatgttgtcctgttgctggagctgacaggctgcagacaggtatgcgaggtgcctttgggaagccccagggcacagtagtccagggtccacattggccaagtcatcatgtccatccgtaccaagctgcagatacaaggagcatgtgattgaggccctacgcagggccaagttcaagttccctggccgccagaagatccacatctccaagaagtggggctttactaagtttaatgcggacgaatttgaagatatggtggccgaaaagcggctcatcccagatggctgtggggtcaaatacatccctaatcgtggccccttggacaaatggagggctctccactcatgagaaccttgcaccacccgaaccctattcatgcccaccaataaatcctgcttcctgtcaaaaaaaaaaaaaaaaaaaaaaaaaaaaaaaaa

SEQ ID NO: 6350 - DNA, 615 bp, Canis familiaris
attgttggcaacagtgttaagccttgagtgaaatctctggttcccttcagctttttgttctctgcggagcccctgtgctaactctagccatgtgccaaaagcaggacggtccgggaagtgagctgctgatggtccggagcagtggctggtctgccctctgctttttccttgaaagaaaaccatttttctaccttttctttccattcttaaatagtagctactgagtggtgcttcatctggacaggcctggactgaagccaaagagaaaatggagctggcttccagcaggaagtgaattacttcagaatctgtgagcctctgcctggtgcctgtgagcccatctgagtaaggcccgttggcaggggaccttctcatatgctatcctttaaagttttaactaaatatctgtaatagcaacaatctgaggcaagtaaaaggaatagtaaggaatgaaatctgaatcaagggaattactgtttttttattggtttgcttaattcatggtttggtatttggatacgatttgtatgttttggctctgtactccagacaaaaacagtaacttgaaatcgtgtctaaagcaattctgttctgtcattaaattatttacctaaa

SEQ ID NO: 6351 - DNA, 693 bp, Canis familiaris
cgcgaaccggcgggaggctccggcttggtagaagggcttcctgtgagaactgccactaagggcttgcgggcgaaaacctccacggagagagaccgtgctctaggttgagaagagttgtgagttgtcaacgcacacccgtgaatagacgtacggcgagtcataccccagccagtagaggccctcgaattgttccacacagcctgcctgttggcaaagtttgtgttggtgttggcaaccaggtgctgccacacctaagtagtttttgaagttaagatccgctacttgaacttcgtgtgcaaagcagtttagttctggtgctctttagttaggttgtcggaagagggctccgcccagaacaaatacggcaactcagcacactaacactaaagggtgttgctcatagagatcggcccctacccgctctccaaagttgtggtgagggaggccttgctgtccttgtggtagcaagtctagtttgactgcccgtaactgggcaacactgccttgagggtcatcgtcttgttagtgaggttgtttatggtgccagcctgactacctacagttccactccgagaacagaaagactccaccaggtgcacttctctaactcaggtttcctaatagaatctgctcctgagcattatttagtgctgacatcgagtttttttttttttttttttttttttttttttt

SEQ ID NO: 6352 - DNA, 649 bp, Canis familiaris
cgcgtgcggcgccgggtgtgccgggcccgcgcttgggctctgcagccctgtgagagctcgagacaacgcctgcccacagcggcagctgtgcctccgcgagacgctcacggtccacttgcccaactcgagcggcgccagcggctttgccagacttgcgcacctgcctccagacgcggctccgcgcctcgctccgcgcccgggctggcccgccgctctccagcccacagagcccgcgccgcaatcctggtcgccgccgtgcaggcgctgctcgagcgccagctcagttacccggtccgacggggccccgcgggcctctcggcggtacccccttgcgctccccgctcaccaccgcggcctcagcctaatcccggggccagggagacaccgaccgccccggggtctgtctcctaaccaaccaatccatcccgcctatgctagcgagtaccccacccatgcccggcagagcagagcgtgccaaagcaggagtctcttccacacccggccacggacaacactgaggcgtccgggagagcgctcggttgtcaagtctttgtgctcggctcggacaggcacgaaacagatacaccctcaaacctaactccccaacaccccaatcacttatttctaaccgctcacctttttttttttt

SEQ ID NO: 6353 - DNA, 438 bp, Canis familiaris
cagtccctgtctgtggctatgtgacagtggccggcctcggcctgtacggttaggatggtagctgccgctgaccaggtacagcttctcatctgtctctgttggtctgaactgatagatggacggaccacacagctgagctggggcgtgagctagtcatgtacaaggtagttgtccaagtcgggattgtcctactacgaatggtggatggtgctcctgagtctcctgacgtgttagactttgggttgtaccttgtttttgtgggctaccccccagtcctgctgtggaagtacaaagcaggctttctgcaggttgtagggcgctcccagaccgtcatcttctacctgttggtgacctcacagctcaaggaccagcgcaagtggggtggagacattaaacccccaaattgcagaagtcttttaactaagctcaaaacaaact

SEQ ID NO: 6354 - DNA, 152 bp, Canis familiaris
accaggtgtcccgggtacgttaccctcgactggcacccggagctaggtgccagcaacacccacagccatagacacagccacacacacacacacacacacacacacacacacacagatagtcatactatttatttaaaaaaaattttttaaaa

SEQ ID NO: 6355 - DNA, 567 bp, Canis familiaris
tctctaattaccggttgcatgtgggcctcctttgctgagaagaaacaggagtcaaagcaccccagtcaccgccagagctaagactccgcaacaatagtatccgttagagtactagagggtccccatatcaggcgtgtggcagtggaatcacctcctctcgcttcaagtccccccctaggtagtctgcgtcgacctctaatgcacccagtgtacagagagcaacacaccagttggcaagatccacgcctctgaggctgtagtctgtcaccactggtacagggccacaggttcagttttcaccttaagctaaagcaccatagtccttaggacaaagcagctctaaaaaacctctaggaggtgaataagacctctgggtacttgggtgaggtcctccgacctgaacaggtctgcaccacgggaccagaccactcagtatgctcaatagccgttttgcccaacgttgaaaccagtcctccatccttgagcatgctcagccgtaccccttgcttttagtttgtgaaccactctatctggtcaaagattgcctcgcgctttttcttttctttt

SEQ ID NO: 6356 - DNA, 401 bp, Canis familiaris
agggattaagacaaagccatggtaaggaaatggaatcttcttgggtcgcaatacatgtactacagtgttgatttaccattccccgcaacacaggatagttctacatgaaaagtgtgcttgctctctgatggcaagataatgagcaaattaggtgatcaggattctaaagacaaacaagtatggttacagcaatataaatgcctggcaacataaactatcccacaccctcatctttcaaaccgagctgaatccaaactaaaaatttgcataaactcagcatttatatttaagataaagaggggaactatgaatatattagcagttgggttcctcacaaacgaagtttggagtattttgaatttatttgtcagacacctctgatatttttttttaattttttt

SEQ ID NO: 6357 - DNA, 519 bp, Canis familiaris
catatactggtttcattatgttgcaggtttttattgatattttaaagggtgaaggaataatttacaagactgacaaaaacatttgtgaaccaacataagttgagttattgtaggtgagtacagaataaagatagtgtttacattgctatcgatcagggggttttaataaataaataaataaatgcccacatgatattttactgaaaatcaaaactacctaaaggagatgctatgcctgggtgaaccaagaacgaacaacacagatccctgaggttcagctcactcacaggttaatagaaaattgtaaggctaaagaaatattatgtaatgatgagcttagttgacacttaagtatcagacaaatctttagtcaaattaatacaattagaatattttgattaataacaaataaggtggcttatgtgaagtataaactctgactttattagtctgcttaagtcatttaaaagatatccaactgtattttagaattttaaaatttttttttttttttttttt

SEQ ID NO: 6358 - DNA, 622 bp, Canis familiaris
ctgttgaggtcgaagggtaaacccgcaaggagtcttatctgccagcagactcgtgggcagttgccttcggccttgtcagtgactaaagatcacaattacactgcctgcaaagagccccggcagctgaccctctcagtctgctagagcactaaggttactacctcctctctttgttttgctcccagtaccgcctcagttttggcctgggcaccatctccccgcacgttggccccctgaccttacaccagctgcaactgctgagacactgtgaccctgtctagttcctctggaagctggggcaaacctacaaatacctcccctgcagacagaccagtggcatctcggtctcctacggggaggtcggcctggctacgttcgctgaccgagaggccccggattagacacaggcctcctccacctggtcccccagggccacccactggccggatctgctcctcctcgctggcgtagttgatgtcctccacccctgtgcgctgctctttctgtaatgtgcgggtgactcgtccccagatccctatttccctgacttggcagtgggacaccgggggagggccgcagggctgcaccacttggcagcggtagcctgtagggtagatctagg

SEQ ID NO: 6359 - DNA, 143 bp, Canis familiaris
cctgagttgtttctgactcgacaatccaccagaccatgaccctgggtacccatactatttcaaaaaattttttgggctcagcatgtttgccatccaaggccttactaagacttaaatagcagaaggatatatgaaagtaatgt

SEQ ID NO: 6360 - DNA, 629 bp, Canis familiaris
tcttgcactttgggcctgttttacgagaccagccgctacagcttgggcgtcctcaggtcatcccgcagccccatcttggtctcgcaggggccctagctgttggtgcaggcagtgctgcagggccagacctccggcgtgttggtgttgcagcccggtgtgcaggtgcccgagctggcagccctgttcttgtcggggttgatagagcctccgtgccagcgggtaggggcctgccgccgaggcgtgacctagctgcccttccgctgtgccgtcgtcttagcctcataccgagactccttccagactgtggtctcacgagtgtcagtcaatctggttcacaaccgtcccaaaggcacctacacacgctacatcaaggctttggtcttgtcctcaggcctgaccttgggaaaagccaactactgcaacctccgccgagtggtagccgctcgtgcctaagcaggggagacaggcaaaggtatcgtcctccactaccacttcgaagtgagggccttgcctacttccttcattgcctgaagcctagaaagcagcagcagacaggccccggcccctggtccctcttaggccaatggtggatgcacccgtttgctgggggcacaaggcttatttttggc

SEQ ID NO: 6361 - DNA, 591 bp, Canis familiaris
gctgatacccaggctaagtgtacgtgacgcgccaggggggctctggggccaaagtgtacgtttacttaggtctgcaggagaacaccttgcaggtgttcgggggcaaaccaatagtgtttgtacactaagtggcctaccgttgtgcctgattcggtgttccccatgtgttgtactctttctgccgaccacccagcgactaccagattcgtctagggtaacagggaaccagcacagaacaggggcccttgccaaggacaccccaaaggaccagcagtgggcccccctcagccaaaaaccccactcaagggaccctgattgcattgtgtcacaggccacctcaaagacctaaagggatcctggtaggttatgttgcagcagaggacaagggggagggtgtgtgtgtccacctaggtctaaacctctgccgccaatatcccccaacccaggtactgagcccttgtttgacagcaccccgcacctgcagatcagtactgtagcctcctgggaacattccacccaacctcatgcccaggtcttagactgcttaaggcttatttgaggctcatctttctttttttttttttttttttt

SEQ ID NO: 6362 - DNA, 628 bp, Canis familiaris
caccaggtgcttaagcactgcacttgaccaattgcgtctcctacgtgttgcacttggtagtggaccaattggtgtcagatacactgcgcccaggtgcctctgacccctccgtcaaagcctccaaccccactactgcaaaccaatgggccttggtggtgctgcttgtagtctcagacatctagggctttgagtccaacacgagagctgcaggccaaggtctgcgtctccggcaggagcagtccctggtgctgcagctcctgcaactaggacgccactacaccattgagcactaccctccctcaacatcccactgcccagcaggagcctcacagccagcagctctgcccagactgcatgacccctaggatgtgcagagagagttctgcagaacaagcccagaactgcaaagccacctccagactagcccagacccagcccctaactcaagggaaccccagaaacctaaccaaggccacctgttaaagcagaactgcagcacccaccaaccaggggggccactgggctagaggggggatggcagtgtccctcctcctttggaactgagtggacccccagtatgtggtcaactccccaagtaatttgcttcaacagcaactttttttttttt

SEQ ID NO: 6363 - DNA, 587 bp, Canis familiaris
agatcaaatatgctggcaggatccggaccggttaacccggggtactcagggtccccaccaactgagctggggtcccaacagtccgttacagctcccaataccaggtctgtgtagaccagggtggttgtagggtgagcgtgtaggaattggctggccttctgaacagaaagtcctcctggtttggtgggggatggctcccaggtggggggggcgctctctttgtggtccccacccaatctggaagaaaaacacaggagccttccacccacaccccacccttgcactgtgccaccacaagagcccaagtacgagcctgccttagcctgccccctcccagggctctgactctcccaccctatccctcatgtcccagcacctcaacaccccccacggtggggggcacttgcctctcagcccagaaagcagcctagtggcccccccctgcttataccctggggcgggcccgtagccctcagatctagtggcagctagtagggacagcaggggctaagcagtgccccctgtcccaatttatttagaaacaagacccttttttttttttttttttttttttttttttttttttt

SEQ ID NO: 6364 - DNA, 669 bp, Canis familiaris
  misc_feature (60)..(60): n comprises a, c, g, or t, or includes no nucleotide
ggttgaaattgaggatctatcagggcacacccctgagcccaggcgcccgaggaacagagngcttaagcatagcacttttactacgatgttttgtcccccctgggttaatggtagcagtggcaactggtttttggcctgcaaggtaactagcacattctcaactaagattaaaatgaaggcctggaaataaacctaaagaaagagtggagaaactttaattaaccagtactaaaagataggttttaagtatgatcatcatcctgacaaagctgataacgcaaacaagttgaatatttcctggctctgggaactctaaccggaaaattgctcaaaatattcttagtgttgagccaaaaaggttaagggagtcaaacttctgaaagaattcaggtctacacagcccaaaatgaaaacagggctgtaacctcgagaccagcccccaccccaaaagctaattactttactaaaatatgtggaggttacattgagaaagagagacctaaaacaaagctagagctgccagaagcagagctagaactgagaaagtagccattaaggtctaagttacttattgagatttatgtgcaaaagtacagattagcaaaatatctttgaaaaaataaaattattattttctaaaataccattttttttttttttttttttttt

SEQ ID NO: 6365 - DNA, 496 bp, Canis familiaris
  misc_feature (14)..(14): n comprises a, c, g, or t, or includes no nucleotide
  misc_feature (41)..(41): n comprises a, c, g, or t, or includes no nucleotide
caggcctgagaagngagttcaagtcctgtgctaccatacgngtctgtgaaacaagtcactaaaacagtgcaagcgagccaaagtcgttgcaaacaacacggagctcctcaggttctccagcgtgattcgacgcaaacacaagttggttgagagttcccccttcctggtattggctctactccccaggttggtgaaggggcctccagcacaagggttaatattgtgtggtgtgctataggcggtttaaaaccacgaaaaggttatttttaaggttggttacctttcctaacccttggcttaacccaccacctaaacagtcctcaccagttttatatagctgcctcttatcaagatgtaaatataaatgcttttagaaagctagacagtgttgtcttagtgtgattaagcaagcattctgagatagctccttgctaaattctaatgcaaagttttattttcaaattttaatttatttgacttctatagcttttttttt

SEQ ID NO: 6366 - DNA, 642 bp, Canis familiaris
  misc_feature (44)..(44): n comprises a, c, g, or t, or includes no nucleotide
ttatcagtcccccactggctagtggccacacccccaagaagcanggatattttaacatttcatacgagccaagaagagtgttgatttccacagctgctcagttgataacagaagttgcccaaataaccagtaacaaggggatgtccaaatcacacaatacagaaaaacctgacagctaatttatggctctggtttagtaaaagctttaaagggttgtttagctacctataaaacacctgttcagaaaaatttgaagcgatctctaacatgcaacgggattgtctgttgaaactcacagactgctaaaggtttttatctaaaggtgataatcaatctggcgaggcataaaatagaaccagaatctacaaataaaaaagtttactgtgttgcaaaagactatgaaggcttaacatctgtacttaacattgaaacatttcatggatgtttcagttttagctaaatgttgttacatttgttttaagttaatttttttacagtttgaacttgaacatttatacaggttgatggaggttttattgagataagaacagtggtactctagtaggtttgctaataaaagtcttttatttgcttatattcaagaatcatatttttttttttttttttttttttttttttttt

SEQ ID NO: 6367 - DNA, 518 bp, Canis familiaris
catattgcaggtgtagcgttggtttgtggttgttgacagtggtccctgcacaggaaacggtacacagactccaccgctctaaacatccccctgactcgaaaccagcaccacgaagacctgtagaggctggccgccgcacccgccgctacagctgcctgagtttgcctccaacacttgaccccacgaaaccagagggtcaaatgtacaagtgtgcaccagaaccctgcggtttgtgggttttccactcaccccaccagcccctgggctgggccaaactggcctgacggtggacacgctgtacctctgcacaggcccaatctggagggcttcccctgctttggggctgctgttataacccagccactgagaatgatgggggcggggtgtgcgtgaaccggtggtgggttcccactccacaggcagccccagttgagcccggtgttccagggcaaccagcgctactaaaagataagccgccaaaagctaattttggttttacctcagcttttttttttttt

SEQ ID NO: 6368 - DNA, 603 bp, Canis familiaris
tgtctaccctgcatgctcgcccgctatcgggtgtcgagcaattgttacctcataggtaggttttctaaactaacaagattttttataattttttaaagaaaaagagagaacagcaacaaccagaataaggatgaacacagttcgaatgtataaaaaaaaaacctaggggacttttggatccattgatatcgtaagcttgaggtttttatggggtctgtttactggataaggctgaaaaacctaaaactaaagagagagttaaaaattatatttagcggggtctatttgctaattagcttgaccttttagaaactgagtttcttcggaaactgctgaacttcaaatattcctaatatttatttccagaatttaaaaacaggtcttagcctgctaaaggtaaaaaaattttccttgatttaaacaataagtaggcttcatttaggagaaagatgctaaaaatactatctgatgtaacctacctaactcatatcaaaacattcagtgaagaccatctagcttgatctagaaaaattagaagacagacaacagagcagaaccagattgaaagcataattttatctaatttcattttttttttttttt

SEQ ID NO: 6369 - DNA, 618 bp, Canis familiaris
tagtggtccagtgccgttcgcgggctgcgtccgaggccaggggacaggttctccctcgcagtcaagccgtcgtgagccccttgcctgtgcagcaggcctaccgcaaccatttagcagtgttagctctgtttaaacttttctttgaaagttgttagctggttttgtgtatgttgtgtgtgttttgtttgctgggacgggctttttagtagtagccgtgttggagtcagtgttgcatgttgcacacacggagttggtggtgtgcttggtgactgttgtagccgtgtgcttggcaggtgcggtggtggtgcttattgccgccaccccaagaaaacacaaccaaccgaacaaaaccaccaaaaaacaaaaaaatttaaaagcccagccccaacaaaactgaaagaaaaataacagaaaagaaaaatcttgggtcaaatatatttgttcagttaaccttctaactggaagaaaaaaacattgaaaaagcccataagttgttgtcaactgttttacctaacccctgactagttttagatcagagcactcaaacaaaacctatgaggtttctcaataaatatgactactttttatgcgttatttcgtctctaaagtttccagctt

SEQ ID NO: 6370 - DNA, 703 bp, Canis familiaris
ctgacctgccttacaggctacggatctttataacccttcagcggccaccaagcaacccttaagcagccacatccgtctttgatgtctgcacttagtggtgaaacactttctgtggagacccggttccgacgtcgcgccagtgggggcaaagtcccgaccacctgcggcagacagcttggtgttgtacaggcaggcgtttggtagcgcagctcaagacaggagaactcatcggtagtagagcccctctaagctcatgtaggttttcaggggggccaggagctgcctctagtaggcctgagactccagttcgtggccttcgtgatctcagagaccttactgtaggtcataccgacccaagccaagcaaggtgtgtttaaggccgtgttcttctacttccactacaaagctgagtcattttgcctaatatagcacatcttgttaaactctgcccagtatccagggtcttctgaggtgtaaaatctcggtgtcacctttttatactaccttcagtaatacttagctatcttatgctaccggacatttgaggtgcagacagacagggtactgccagtggtacaattccacaacaactcagcatccagcctggtcggagagaccatcccaggcctgtggttgagcgttggccagttttaaggggtctcggcgtccaacgtggaggcggcggtggcccggggcagcccgg

SEQ ID NO: 6371 - DNA, 607 bp, Canis familiaris
acttcttataagtgctcaatcacaggcctggatctgatcagtgctttttgtctttttaccaagccaaataggtgcaatctaacaaaccacatttagaatgattgttaaatctaacatggtgagtacttcatgagaaattactgtttgaactctcaccctttgctgcatcattttgccgactgttgcataaccataatctattctgtatcaccaaattgattctgtagaatgtttagggcacaaaaagtttaaggagtctaaagtatctagagttaagccatttataaaagttgtataaccccaatcaatgtttctggtctatgtacaggatttcaaatataacaaacccacaatgttaggctaagtctgagtttagaggttcagtaaaaggatgtaaaattaagccagaagccctcatcttggattctgattagccataggggataagaagctacagacaggtgagttccaaaatagctttttaagttgctccctttgtttctcttttcagtttaaactaagtgatatcctttctgagctttcaaaaaaagcagtgagcattattaaaagaccttatttagaaataagccaagcatttttttttttt

SEQ ID NO: 6372 - DNA, 584 bp, Canis familiaris
  misc_feature (267)..(267): n comprises a, c, g, or t, or includes no nucleotide
aggggcctcttcataggataccatatcagactccgtcctggtcccacgctctgccttggtgtaagctcaagccggagcaaagtaggctttatccgtaggcaccacctgtgactagttgtgcttcgagggtgaggcccactccaattcagcgatgtgtgtctggagggccgcctgtgagccaacctgagtccacctgtgcccccccacccggcccccagcctcttgctcagactgtggttgtgagaccacttggtgtctgcctcgggncattatggggaaggccttgcgcgggagtgttggcgaggccacacagtggaaaccagggtaagcaccactgccacagtgcttcattgactataggatcaaaacaaccccctccactagagtctgcctaagagtgtcagtagatatttcagactcaaggaattaaattgctctacagaacaggagcttaaagcaagaaaacaactagccaaatcaatcagacaaatcccctagtatccgtaaggctcgatgccccctgtgtagacttttatttacaaaaaagacaagaacaaatttttttttttttttttttttttttt

SEQ ID NO: 6373 - DNA, 267 bp, Canis familiaris
gggcactgttgtcccctctcccccgcgtccaagacagcagaccagggcaagcaaccaacctccaggctgacggggcgctatccaggctgcctattctctttgtcttctactaggcaggtaccacgtcaagcgtttttggcatttccacctgttgtgagctttgtgttagccatttgcccctttgggtttttcagatggtcgagttttttttgactacctacctatatgatgttttgctgcactttaatcttgtgtggacctctttct

SEQ ID NO: 6374 - DNA, 726 bp, Canis familiaris
tgctccgaacaaataccctcataggtttgtgaactccttactatccttcgccagaagggaactatgcttcctatgcaacaagtagtaattagctgatactttaggtcttgaccgtggagtatgaaatctgagttggaagccaggggactttctggagcacgctaaaggcacaactaaggaaactagcaggccaaaggtacacagtaagctacctagaggtaacacaaaggtggaatagaagcatttgtttttgcctacgatatccccaggttaagcagataaaaacctctttagccaactacaaaaaaggtggtcaggaaaaattgaaaggccgctcagttgtcaataggctgagttttctccagtaaatcaacagctctgctgcccagcgagggaaaaatcagcacgcacccttaaaaaagattagcctaaaacatttcactaaaaagtgagatgacactgcaactgaaagagattatcattttactagtgttaaaccatagatttcttcttctttttacagaagagagctacggtaattcaatattttagaagttttatagcctctagtgattaaagataattgaaaatactaggagattaaagatttttatttaatctttttttataataggtagctacaatatctttctaaagactatcccttggaccttttcatattaatttgagcacagttgtaaatttttttttttttttttttttttt

SEQ ID NO: 6375 - DNA, 551 bp, Canis familiaris
ggatgttaggagatggtgtgaaacagtaaaaactttaccgtagttaatcccaactgacatcttaaagaaaatttgtcttttaataaacctcaggaactgccccttgaggtccaatggagggtcagcccgtgtggggtaacacagggccccgggccaggaggcggtccacaggctccagcccagcacctccacttactgggatgtgcgcaggttggctgttcctggacatgaggaggcaggtgtgaacctgctcggggaggggtattgacccacgaggtagcaagctcttttcagccaattttagactgacttatctgtatatccataaaaataaaaaatcacagattgttttgggcactttgtgcaaacacaaaattcaagacattttttatcaggcatctgttagttggatgtagtctcatcggaattattaactagcagatatattgctaaaagcaaagagttttattttatcagatgatagaagatttctcactttgcaaaaaccaacatattatttaacaaaagtttcaagtttttttttttttttt

SEQ ID NO: 6376 - DNA, 601 bp, Canis familiaris
tgtgcataggtttcaccacggtaaccctgtatagtagtaggttgtggcccttctgggtttcccacccctgttgtagggacgttaattactacttcgaggcccatgaccaccaccttaggcaggaggtagtggttggatttgacagcacattgatgctgtcttcaggtctagctctaactattctgttggtttcctacttgttgatgtgagctgtcctatcaggtcttgattaagttagagatagccctttcttggtaagcacagagccaactctgtcggtagtggaagagcatggttaacccacccctgggtacaggctagtcagtctagctgaacatatttagctctagaaagacactaatacaaaaaagatatgaaatagtttgataattatatgaaaattattgatttataaaaatggaatcttttcaagtcaactctacaaagatattaatttcacctttaaagttgtttttattttgtaagagataactgatcttaatgagactccaaaaattcaacagtttatcataactaagaattaaagaacactatttatttactccaagataaattttttttttttttttttttttttttt

SEQ ID NO: 6377 - DNA, 525 bp, Canis familiaris
ctcgggagcagggctacccccctgctctctcccccttgcaaggccgcagctgggccttcagggcccgggaaacgctgcagcgctgcccctcccctacgtcatttactggtacagctgtgttttgcccggtgttagtggctacacctcgcgctccaacgcagtgttgcgacccggtttggccggcctgtggcagcgtgttccgcggccaactgtgctctctcgagcgctctcgagcgctgccgtcgctcgggcccacgggcctcagggtggcctccttctaacgagcgccttttccagtggcaggtggctggtagatctaacaccccgagacactccagctgtggtttgcagcgttcccgagacccgccgtgggctcgaccccctctctggcagcgcaggcccagctggagcccagccccacccaccccaactcctgccagctgcaacacaataaccgtccctgagccagtctctctgtagccagagaggagcaaacctgttatttggaagagataacgttttttt

SEQ ID NO: 6378 - DNA, 657 bp, Canis familiaris
  misc_feature (299)..(299): n comprises a, c, g, or t, or includes no nucleotide
attaacacagctcaaaaagttttatttgggctttcggttaaatttgcgcagcccctaataaacgatccagaaccccctaatgcttgattgtttggtttctattctggtagtctgtgggctctggggttttaaactttcatatcttaactagctagtagaacagaatcttccggcagactctcactggttgacctcagtacgctcacacttaaatgacccaacgtagatagacctcctgtatggaagggcaagttgggtaacaacacattatctagtgattctgctagcggcggcttctnaatgatggtatcatccttcattctcctagaaacatcttgctcaccgcaaatgttggtgacactaaagtatcgctgttataggacatatgtgaacactttatcactacagctctgtttgaaagctcacattgttattatatctcggtctgtccaactgtcccactaactgaaccaaatgccatagaaaagcagctgagcaatttatcaatctgttagtgggagccaaggaattgctacagccaggtaaactgcactgtactagtacactgagactcctggacgtaaccccacctctcactgagctgtgccagcaattgtaacacaccagccctccaagcagagcagtctcactcacaca

SEQ ID NO: 6379 - DNA, 544 bp, Canis familiaris
gaccggagttgaccccgcgctggccctggagtacggttcaccgccagctcctcgccgggcgagcagcccagcggcccctcgtgcatgttcccggtccacctctgtcaccgactccaaacggtcaacacgggctaaagtatgctgaaatttgatcatagttgccaaccagcacacggtcgcctgccgcgcggaagacaaacatccgaaataaccagtgtttcacagattctggcaaatgcggccaaagatacctatctgacccgccgagattgtactaaccagccaagtgagatggaagcagtgcacccgcccacctctacctctcagagatacagtacccaacaggggatcagtgccctcgcctgggtccaggtgggcagacacggacccctcgcaaaaaacagtttatgcccattgtgctgcagtacattccacttggtttccgagttgcactgtgagccaattaaaattcctgaaaacttttttaggaaattatctctcaaagaagttatcttttttttttttttttttttttttttttttt

SEQ ID NO: 6380 - DNA, 545 bp, Canis familiaris
caactaatatgttattaagtagagtgctcagaatttgttcagagctgtcgcaggatacctgttgttatagttaaagctcctttgttggcagccacactctgggcgcaagtagtctaatgcgtttgctactttgttcaactgaaaatccgtttattctacaacttgttgttttctgtagttttgttgtggttttaatatgttttcggggttttagtgttgtcagagtgaagtaggctgagcactagcagacggctctatgaacacgggttgctgcagcaggatgaagctaaaggaaaacagaaaagaaccagcagtaagcaaggctctgctccaacaaactcaagagacacctgtaataactttctgtctactccagtttatactaaaaacaccattctaacagaaaactaaatagtctctgctgctacacagattgatcctggactagacctacccacggatctatacagctaaagcaaaatgtcctaaacaaaagaaattattattattattatttgcatgaacataagtttagcttttttttt

SEQ ID NO: 6381 - DNA, 682 bp, Canis familiaris
ccccgtctccccggatcgtgcgaacgggtggaccagctcgggttctgcgctgcgccggttgaaaacaggtgtcgagggtgcagctgtactgccagttgttcataagtccccactgttggtctttcgcaacacggctccgactggcaattgaacctccccccgccccttgaaaacagagagagaaaagggggtcctgctttctcagagtagtggccttggctgaggtctaacccctctaggtctaagttgcgcagattgtttcactcttggtaattttcatgactttttgcaggccttgttgatagtatgccaaaaaggcaactgttacacagtacttgctgtaacctcggtaaccagggaacctggccaggtttaattgcagggcttgaaaccaaaccaagcagtccctcttagtgttctaggaggcctttgaggtagttgagttgacctcctactttaacctgtagttgttggagcatagacaggctgaggcagaaggcctcgagttgtagtcggtcgtagtgcaagagatcttctacctcaatgcagacttaaaccaggagaccaagcacttgttgttaaggctgttcgaccgggcaaagatctacttgtgctcctagggctttcccctgcgccaaatcagtgtcctaaattatttaccatgagcatccgaatttttttt

SEQ ID NO: 6382 - DNA, 655 bp, Canis familiaris
gcagctcttgcctgggtgtccttcccctctggtaccacggtggtgtcctagttgtgcaaagcaccaacaacacctaacaggcagccaaggccgaggctgcaaaagaggccatcggttaacacttagtttgatagggttacccatggtttgatttagccgaacgtaattctgggtgtttagccttttctagatattacaccgcttctgtgtaggtgtgcatttgcctgggtgtggtactgtgtttcctccttgccccgccatagtgcacttcccgggttgccagagtagtcacacttgtcacaagcgttcgcatctgcctaggaaattggtttctttgcagccatcctacggattaaccgggtaagccgtggttggcctttggtggtaggttttttgaaaacaaacccaacctgtgccagggagccaggaaaagataaccaaatctgatgctactacgttcatctatttctctatctttaagcaataaacaatttagaacaagacaggcagaagcccaccaaccagcccccctgtacttattgctgagtttgagcttagaggagtttggacttttgtgttaattgtagagagtaataataatctattatttcacaaggtaggtatcaaactttttttttttttttttttttttttt

SEQ ID NO: 6383 - DNA, 780 bp, Canis familiaris
tgcccaggcagccggacagcactaacaaacaaaatttatctttgattatacaccaggttgaaagtataggattgacacagcatcaactggtataaaagacgatgtatctgatcaaacaacccagtatgtagctactaagctgccccaggggtttggtggtggttgacgtttgaaagaggttatgttgatcggggcaaggaagtgcactattataaaaaagatgtgcaaaaaccagcgcagcaggtttattcactgcgcaggaattgctaaaacactagcacaatattgaccaaatcttcggcctaaaagtggtattagactcaacagacgaattctccctgtcgagagaatctgtagcgacacaagagagcaactccgctctagcgcacttcattaactcgaagtagggtttatgaacggtgtgagaccagggcgaattaggcagcttccctcagtcttacagtgttaactaggaaacttttggacaccaatacctactcaagtagcaacagatctatgtgataagagtcttcgagccacgccacaatcctcatttcaagtccacagctcatagttctcatgacactaattatcaattggtgttgtaataaagtgggtggatcaattcttgcttaacaaggatatactgtaaatgtaagattgcacgtaggctgggtctcatataagaatttattgcaaaatatatgcttcctaagctgatatcacaaggagcaattatttagcactagtaataattgttattttttttttttttttttt

SEQ ID NO: 6384 - DNA, 614 bp, Canis familiaris
agggcctaacttcgggacagtgaaacttggtaaggacattatctagtgtagtagggaagtcacacttgaggccaactaggcatcaactcaggtctagggagctggattccttaggaagaccctgaggttcgacaccgtcttaacaaactccaacactggctattgtaaggggcccagagccccaccccctagaagcaaaacaggccctcaaaccccagccaccaatagaattaccctaaaaaggaccgaatggagcattccaggaagaccccacttctcagtgcagctctctaatcctcacacccacacctggatgaggttaaacagggagggccagagggacaccacccaccaggtccaagaacagttcggtggtgcagtaactttacattaaacctgttgtgtcaagtttgatgtacttgggtagccagggaggcactgaaggaattggcacagtcacaagtaaacggagctggactagtacaatggtaatagtgtgcccagctcagtgcacagagcactgagaggtgccaggaagtgtaacacacacccacactcacagacccaaactcacgagcacacacacacaaacaaacattttatttattcacaat

SEQ ID NO: 6385 - DNA, 546 bp, Canis familiaris
ggatttaagttgttagtggttgtgacactatgagtgctgtccccttgagtttcccttgaggttggtgcaatcactgataaaaggttacttagtatggaaagtccccccagaattgttgtttttttacgtattgacgggccaagttttgtgctatgtctggcagaggttgttaggttctacgtgttggcagtggttcactgcttcctgcatgcatcacgtgtgcaaggagaattttaagcctttgctgaagccagcctcttcaaagattttgcctttttggtagcagttttaacgctggaagcacgttttttgttttttcaagctagggggaaagttgctttgttgtgtagggtttccttgtgcttctagggtatatagattcaagcctgttaaccacttgtctaaagtgacaagtcaagggaaaaatccagtgacaacttcagcacttaaagcagtattagaattcatatactggtttcattatgttgcaggtttttattgatatttttttttttttttttttttttttttttttttttttttttt

SEQ ID NO: 6386 - DNA, 556 bp, Canis familiaris
gaactgtccagcgtctgcctccggatgactccccgagatacgagaaggcaggaacaggatgcagtccgccctcgcatgcagcccgggagccgcgtgggccctggagcctatttgcgtcgtcgtctgcgggggcccctgggactgccgatgacaggcctggctcctggcgcttcgcccccgtcccgcgcctgacgacacccccggctccccacccgaggaggccctggcatgcgtccgggcctgcggtccatgccaccggggaggcccggtccccacaccgggagccgcaggccgcccaccgcccgcacgcgaggccgcagccaggcttgtaccctcttccctgacgggagccagtgactctcggacctgaggatcctttgatttcttttctttaagggagatttatgcgggggcggggggggccgggctctgtgtgcggccaggtgtgcagcggcggccgtgggcacgggaagagcggcctgcggatgccagctttccggggacagggccccgccgtgttagtgcaaataaaagataaagagataaaaaaaataaa

SEQ ID NO: 6387 - DNA, 507 bp, Canis familiaris
tggaccttctggctcctcccgaggagagggaggaggacatgctggacatggcaccccttcttcaggagaactcccggctgggctgccaaatcgtgctgacgcccgagctggagggggccgaattcaccctgcccaagatcaccaggaacttctacgtggacggccacgtccccaagccccactgacgcgggcagccgggccaccccgacgcccgcggccccagggccaggactggaggaatagccacggggccagcgcagcccagggcgtggacaggccccagagatgctggaagcaaccagaagaccaaagcccctgcctcagagagaccccgtgccccggcgccggttgggtggggggacccagccgtgctggggcagcctcccccacactcctgagaatcagtatgtagagaagggtggaatctgcccggaaagacaataaaactctcgcacacccacaaaaaaaaaaaaaaaaaaaaaaaaaaaaaaaaaaaaaaaaaaaaaa

SEQ ID NO: 6388 - DNA, 205 bp, Canis familiaris
agctgtggcttgggcatcttacttttgttcatttgattttgagtgcagtatcagagtttagagggatttttgtctccttgattaatatgattttccaggttgttgcatccaggatataggggcaacagccttaaactttgtgtctgctcctaccccagagcccctggggcatggggagggtctggccaccccacccctgcccggc

SEQ ID NO: 6389 - DNA, 533 bp, Canis familiaris
  misc_feature (1)..(1): n comprises a, c, g, or t, or includes no nucleotide
nacccatagcctccttcacttaactccagagtcccccgtatcatagatcactcaatcccctattgccattaaactgttaatactacctccacctcgtcatcctgtcaaatatagcaagcagtcaacaattcagactacaaaccagtaataaaagccgctagtacagccttatttgaaactcacacctcagggtattgctcagtagccatagcagttgtataaccaaatactactaatataccccctaaataaattaaaatactatcaaccctataaaaagaaccccccaaattcagaacaatcgcacaaccaatcccaccgctaataattagcacaagcccaccataaataggagatggtttagtggcaaaacccactaaactcatcacaaaaacgatacttaaaataaatacaatgtatgttatcattattcctacatggaatttaaccatgactaatgacatgaaaaatcatcgttgtatttcaactataagaacattaaaaaaaaaaaaaaaaaaaaaaaaaaaaaaaaa

SEQ ID NO: 6390 - DNA, 632 bp, Canis familiaris
gcccctggcagtcttgcccataactatccatttccccacggcagtgttcatgtactggctctcctccaatatgttttcctgggccaggtggctgcctccggattccagccgtacgaactatactaaaatcccccagcgtgttgtgcatgactccaacaaattacttccacgggaaggtttcttaaaaagcttcaaaagagggtggaagaatgccgaactggcacatcagctacaggagcgtgaacggcgcatgcagaatcagttggaactagcagctaggggtcctttacgacagacctttacccacaaccctctgctacagcatggaaagaatcagcctcacagcagctctgatagcagcagtgccaagccaaagtcaaagcagccctggcgtgacacgcttggctgaattctgttcatgctcgactggtaggaactctctcttcaaagactcagcctcaaaacaagatttgatacggagtccatgccccagacctggaaacgggagtgaggggcatagagatcttcatttttaaaagtggattccattacaggctctcacatctaaaagagccaagtgatcttgccatccacagaattaataaacttctgtactacaaaaaaaaaaaaaa

SEQ ID NO: 6391 - DNA, 572 bp, Canis familiaris
tgttgctgctgccctgagcgcagaggcaggaaggtccaagtgcggcccatgaccccaccgtgaaggacagagaggaggagacattggaaaggaggctgccaaagccatgaccccaggtgacacctggccttgtggccctcacctcacaagactgtgatccgtggccccagctctggccctgcctaggaacctgacacctgcagcccttaccaaggaaacaagggctggtacagccaccaaactgacctgccggtgaatcctgggtgccaaggaggagttaacggtttaaaacccctgagtaaacaaaaattggggatttcccccaacctgtaccttttaacaaaacacagaagcagagtctccgtacttggatggagaagagcctgcacctgtggggagctggcccgtggggctcccatgccaaagaggagctttgtgcaatagctactggagcctaagcttccccctggaggggagcatgtcagtattctactccagtattttcccatttctttcccagtaaaagctttcctgttaaaaaaaaaaaaaaaaaaaaaaaaaaaaaaaaaaaa

SEQ ID NO: 6392 - DNA, 606 bp, Canis familiaris
cctccaagtgctcacgaggcctcgcactggtttctggcttggcctgaagcaggacgcagtcagctcactcccagcccctggttgggtaggtaggttggtctttggctttgggggcgttcatcccgcacacacaccccttcctctcctggcgtgtgtcccgtctgccctgccttctggggccacctgaacttttgggccggcttcatccaaggttggtgggccaggggttccctttggccttccaggactctggccctccttgcaccagatgctccagggccagtcctgtgactcagagccacggctaaccccaggaggcacctgggccgctgggccccaggtgtgggcttccctgctctgcttgtccccctccaggtgggctttgcatcgtgggcccccagcctaggtcggtggacagtctcccagtctgtgtgctatctgaggcgcagcttggcagcaacgtgtccccccagccagggtgggagaagggaacatagcagggcagtttctctcctcagcccttgtcccagcacacatcacttgctgtgtcaactgcatgaaataaacctctttttaaattcctaaaaaaaaaaaaaaaaaaaaaaa

SEQ ID NO: 6393 - DNA, 591 bp, Canis familiaris
ttgtaccccttctcccttaccccccactgctgagccttactctgctgttcagccctaactggctagggaaaatggggccaatgaattgccatgggctagcaaagaccatcttctaactacttggaaagaccttttagctgatgagcttagcaggagaactatgtttcttgaggctgactgagacctttgacgctaaatgcctgaagactgagtttaagatctgtaccaatgagattttccttttttcacttttcttttgtacatacttgtagttgggatgggccttgtggcaaatttaattatggcaagaacaagacaactgtgccgttttgtaatggtgagctggcatactctctggtgatttagtggcaaatagatttcccaccagcctcttagttgcatctgtactacactgtaagccctgcctgggaggtggagtccatttggttcataagctctacctgccggtttggaatctaatctcacttcttagcctcagtaggctggctcagggccttctcattctccagctctcagcccaaataaagctttttttttcctggaaaaaaaaaaaaaaaaaaaaaaaaaagg

SEQ ID NO: 6394 - DNA, 586 bp, Canis familiaris
cttgataggaatgatgctggtctggacacagatttctcgggagccaagtgccctgtttgggcaacaatgtggcctgtggccctggcttacactgattatcacaaggcagtccatgggacttggggcacagggtcttgctgctctcacgggagaaagaagtatcaggtgttgaggtgcttcgtgatgctcaacagcatgtgccgagatggccacccagtttgtggtctacatcctcattgggaggacaggacttccgtagatggctccatcgctgtgtagggcctctctgggtcagtacccttggcttccccatccttggactgtgcctggctgggttagagtccttgcctgccttcgacctggcctatcaggtccagtgactctagaaccctgccctgaagatggggtggagatggaggggtcagagctcagtgaggctcactggaaagctcctggacctctttctctgggggcacaactgccctctctcccttcttctcatccacactgaataaaccatctctggtccatgtgttcatgggggcccgaacactccaaaaaaaaaaaaaaaaaaaaaaaaaaaaaa

SEQ ID NO: 6395 - DNA, 696 bp, Canis familiaris
aacggattgtgtaccggagttggattcacatggagaccagctacactcagacccacagatgcccagcccttccgtgacagccagcatcgaacatgagacgtcatgattttagtagattctccattgtccagaatgccttccgtcccagatttcaaacttggattttgaactgcagacctgtatgagaccccattgtcgtaggaaatattgttttgccaaaatctataagctgcttattaaaaatagagtcccgtgtttcctaaaaatctcctaaaaccagtctatgaactcagggctttaaaacatttttaatttatttggtcattcaatttacttgtttttaacacatgattctctatgaaattggtgggctcaaactagctgtgaacgttctcagagagtgaaagcaacgcagatcgtggctgtggttttaaagccttgagcattctgaggtggtcactaaagttttatgtcagagtgatactagtgtgctcctgacagggctgacgcaagctcttcaggacctcgggcaggtggcccgccgaggcgcccatgggtgtcttgtcctgccattgcctgcctttcactcagcttgaaataaggagcgggggcagaggatgggccatgtgtgtttacaacatttataggtccagagagattggcagacaagtgccattttaataaaaatttatttaa

SEQ ID NO: 6396 - DNA, 553 bp, Canis familiaris
ttgtcacttggaagaaaatagtgtaccttcatatttatttaaggagtgctcaaggccatacctactagcataaataggtctagccaagacgttactggctgtgtcattagctgggagtgctctccataagctgattaaggtactgataggaatgttttcttcttagtattggtcggggattggaactttgtttttgtacatttatttcaaatgaggaggaggtcattttctcaaaaaatgaatatttattattgtcttactgatttcttttgattatatacctctcctcctcacttcatactcctgtttttttctctttctctttgacttgtgcttttgctctctcctcctcctcctctctcctcttttttttttttttttttattttgccgcataggtagagtgctgtatggctagcattgtattgtatgtaattaattttgcacaaaggcaaacatttagaatagtaggttaattttgtttgtttttatgaccatgccaaaataatattctgggctggtggagaacaaaggactgttctttaggactgaaa

SEQ ID NO: 6397 - DNA, 667 bp, Canis familiaris
ttctgagctgggatcctgggaatgaaagttattccaaagcacgaaaaagaaatattacagtaatgtcttttgcattgggaaatgggcaacttgttgctatgttactgtattctaattgctatagttatatatggttatactaattactcatacacaaatctggggaaacctgaaaacacaaaacgtgaaaacgtgctgaaaattcctcggaggtaataatgctgacaaagtgaagattaaaaattttatagtaactcagtgtagctgtctcttgaaattttgtttatatcaattaagagagaaaaaatattttttaacttaaaaaatatagtgcagcattgaaaggctttaggctatttctggctggtagattgaacatataattggttttaagtaaaaatttctcccatcgtgggaggtttgattgctctgaaaccaatgaaattgaggtaaaaaagcatcctaagcggtattttttcccctctctcccatttttctatttctttaaaaaccctgatccatacttaaagcttggcaaaaacaaaactcacaaaatttggtaatttctgattgcctcctcatactggtcagctttatcatttcaacttactgagtgtgatagagttaccctttatatttaggattggatctatgtaaaaaaaaaaaa

SEQ ID NO: 6398 - DNA, 671 bp, Canis familiaris
agtagatgattaatgtagtcagaggagaatggaagaaatgaaaagagtacggaacaaactgatggtcatgcattggaaggcctagactgggaaccgtccttatcctaatttaaatgtatttcggctgttaattctggtttttgcctgatacaagtattgccaccctgaacgtgtgcatttttctcgtatacctttccccatctcatgtgtttaacttttcgtgtggctttagtttaggtatttcacgttgtaactggcataaaattgggttttccccacccacaagctgcaagtctcccttttttcaatcatgagtctcacccatttgcatgaaaagatgtacattatatattgtgaagtgaaaaaaacaattttcaaaaagtatatgttgcatctcatttttgtaaaaaatgtatatttatatattaatatgcaaagaaaaaagtatatacttaaatggcttaacagtggctatctgtgcggtaataggtgttttggtttgttttttcatttttgcttcatcagaactaatttttaaagacaaacatgttactttcattgcaaaaaatataatgggaaaaacataaaaacctgtcaatcagcttataaagacaatgtggcacttaataaatacttgtcagaactttaaagaaaagtaaaaaaaaaaaaaa

SEQ ID NO: 6399 - DNA, 667 bp, Canis familiaris
taacccagtatatatatgatgcctgcgtaagtttggaacggggctatatttctgtagttctagaattattatattaatttgttttggtagttaatgtttttgtttggatctacacagtttggtttttgcacagaagtaatttcttagaaagtctgaataattgccacaatattagaaaaaaggtgttcttcgagttaagaatacagttttttgtcaaagtggccattacctcctcttcttctgtaataatacagacacttgaataagtcatggtcatgtcatatatgccaagaaagttcttttcatcggtgcctatactgtaacaattacttttaatgcattgtattttgaaggaatggttcagttgaaattttcacctgccatgtgactgaaacgcaattccactttataatctatagaggcctagaaataattttgcaactcatatcatgggttggatgaatatttttgtaaaagcaaaagcaacaagtttataaatggattatttgaaactttacaacacagctgcgtcgtgaaatggaattaatattgcttattccttagagttatagtcctgtaaactgttttctaggtgaagcatactccagtgttgtgaggggtttaaaaataaatatttaaatttcaaaaaaaaaaaaaaaaaaaaaaa

SEQ ID NO: 6400 - DNA, 571 bp, Canis familiaris
ttccccacatctgttcttgagagtgcctgtgtcttgtgcaggttcttcaggattatgaggcttgatcccctctcaagcccgggcttgaggttgatggggcctccactgccctgtctctgcagcacctccctcccagggggtgctggccttctgctcccgaggatgacaccttgggttgtggagttcccagcccccttacaggcaccagaggtgcaggccttcacccctgtggctttttgcttccatgtctgtcctctctgggtcccaaccttcttgcctactggccccctcccagccggactaacagcctgttatggcaccgtcccttcccgagatacagccaagctgtaagcggtggctgggcgcctctggcctgtggtagcagtccctccatacgtgcacctgggacaggcagctgctttctggactgcatgacactaagatgcttgtccccccagggccccacccaggccccaagatgcgcacggaggcaagaccagacttttctgtcatttattttcaataaataagcagctcagctcaaaaaaaaaaaaaaaaataaaaaaaaaaa

SEQ ID NO: 6401 - DNA, 728 bp, Canis familiaris
gctccacctgactgcgtgagactggggcgtctttagcgtcaaccagggctgtgagagccgcctcctctgctcagccatgatgtcagtgacggggttctcttcacctgcctgctggagatggcctttgctgggatttgtgggatagaggtgcatgtgcctgccctggggtcgatgcattgtctgtcctgtttgctgaggagccgggcctggtgctggaggtgcaggagtccgacctggcccaggtgctgaagcgctatcgggttgcaggcctccactgcatggagctgggccccacgggtgatgccgggccccacgccttggtgcgagtatcggtgaacggggccgtggtcctggaggaggctgttgggcagctccgagccgtctgggaggagaccagtttccagctggaccggctgcaggcagagccccgctgcgtggccgaggaagaacaggggctgagggagcggatggggccccgctactgcctgcccgcagccttccccaaagcttccgtgccccgtgagcctggtgggccggtgccccgagttgccatcttgcgagaggagggcagcaacggagaccgggagatggccgatgccttccacttggctggcttcgaggtgtgggacgtgaccacgcaggacctctgctctggggcaatcggtctggacacgttccgtggcgtggccttcgtgggcggctttagctacgcagatgtcctgggctct

SEQ ID NO: 6402 - DNA, 504 bp, Canis familiaris
cggtacttcgcttcactaatccgggtgcgctctggagggacgcgggtccccgccgcccccgagcccctcccgcgacccgcgggctccacaccgcctgccccccccgagggagggcccccgcgtgggcgtgggcgtgggcactgcccgctgtgcgccccccaccccacgccccgagccgtctgacacccgcagagcgggatgcggcagggcctgggagtggatccccgatcccggctcctcggggggccggccgccagctgcctgctggtccgagggtgttgtctgacctggcggtttgttttgggttgttgatcaagcatgtcttgagtttggtcggtggcgccagttagtctgcagcgggaaggttcacacaccccctctattcattcgtcttccacaggtgtgcggcccgcctgagcccgagccaggagcactagaaagggagggggaaagagcagaaattgcagaaaaagccacccgaggaaaggaaaaaaaaaaaaaaaa

SEQ ID NO: 6403 - DNA, 582 bp, Canis familiaris
  misc_feature (1)..(1): n comprises a, c, g, or t, or includes no nucleotide
nggtgggggtccataaatgcagctctgtgcccaagtggaggagtgagtagtggaggcctccatggagcttctccaggtccccggagtctccagagcgtgtcagcttggctctttgctgacctctggactcccttagaaaccggaggattttaacagaaagtataagtaaggaggtagaaggaagagtatgacaccgactctggaatctgcccacttctcaccccttccccaacccccagctggtctggtcccatcgctcacctggaccagcacagtagcctcctcccagggctcccagctccaccctttacttcctagtatattttccccagaaaagcctgaggatgttgggatcactgggtggcgcagcggtgtggcgcagcggtgtggcgcctgcctttggcccagggcgcgatcctggagacccgggatcgaatcccacgtcgggctcccggtgcatggagcctgcttctccctctgcctgtgtttctgcctctctctctctctctctctttctctgtgtgatgactatcataaataaataaaattaaaaaaaaaaaaaaaaaaaaaaaaaaaaaaaaa

SEQ ID NO: 6404 - DNA, 528 bp, Canis familiaris
  misc_feature (1)..(1): n comprises a, c, g, or t, or includes no nucleotide
ncgaatcctttatataatggacgaaatttatatacccctctttaacctgtgtaaacaataggccaccccatgatatctgaagctatgaatatactgactatgaagacttaaactttgactccttacataatcccgacacaagaattaaagccaggagaactccgactattagaagtagacaatccgagttgtcctcccccatagaaataaccatccggatacttatctcttcagaagacgttttgcattcatgagccgtcccatcactaggtctataaaactgacgctattccaggacgactaatacccaaccacccttatagccatacgaccagggctgtaactatggcccagtgctttggaaatctgcggatctaaccacagctttatacccattgttcttgaaatagtccccctatcttactttgagacctgatctgccttaatagtataacctagactagatctactaaaaaaaaaaaaaaaaaaaaaaaaaaaaaaaaaaaaaaaaaaaaaaaaaaaaaaaaa

SEQ ID NO: 6405 - DNA, 636 bp, Canis familiaris
tggttttcctgagggcagtgtagagctctatgcccgaaaaggtggccacaagaggtctatgtgctattgcccaggcagagtcactgcgttacaaactcctaggaggccttgctgtgcggagggcctgctatggtgtgctgcggttcatcatggagagtggggccaaaggctgtgaggtcgtggtgtctgggaaactccgaggacagagggctaaatccatgaagtttgtggatggcttgatgattcacagtggagaccctgttaactactacgttgacaccgctgtgcgccatgtgctgctcagacagggtgtgctgggcatcaaagtcaagatcatgctttccctgggaccctagtggtaagattggccgctaagaagccacctgccagactcatgtgaggcatctgtggatagacacaagagaggaggaagactagctgcaccaaccacccccatcggggaacagaagggtgggaagcacagagccgcctgctatgccgcagccagtacccacagcataaatagggtctccttggcagttggatctggaggctggattttactctgtgaagacctttaataaaatatttgagtaaaacacgtggcacaaaaaaaaaaaaaaaaaaaaaaaaaaa

SEQ ID NO: 6406 - DNA, 581 bp, Canis familiaris
gcattggactttaagtgtatggacatcgcgatagctgggatggtaaaaaatgtcacatgttcagagtgtgcttatacaatggcacctaaagtcatgcgttgaaagttgtgtgtgttagtcatgccgataaggatttgtgtttaaaagtggttcttggatctagaagacatttgtaaattcatggtatgcacagaaatgaacttggttgcaataatggattggaaattccaagctggagaactattaagccttggtaaagaatacacgttaaaccgacgagatagacctcttgtagtggacatttctgggcctgtgtgtgtgtttgtttgtttcagcatgacaggaagcagctgttggcatgttcagtgagataaattggaagcagaatcatttggacatgttgtcatttgtgctaattgttgattgtgcacacatgacatgtggaaatgaactgtagcagtggtcactccttttaacagttgaactccactatggtggtgatttacccgttgtcaagcaaggaaaaatggtatttttttcctaaataaatttattttttatcacaaaaaaaaaagaaaaaa

SEQ ID NO: 6407 - DNA, 529 bp, Canis familiaris
ttttgttgaagtagagttgtatactgggtcataaggtgtttgggaatttgttgtcgctggaataattgtattccacgtcgtgacatcagtgcacgcgtctgcctatcctgagtccatctgcaaaaggaagttgctctcctcgtcccgattgtcaggtttccagtcttttattaagtgttgttttgaatctccgtgttggcaaacaaggggtagtgcatttctagaattgaccgttcatatgcgttgttaagaataagagcaaatctacttgataatgtactgttttatttgatctcgagttgtataaaaccaataaatttgtgttactgtgtactgcagtagtgaaccttatgcacacggtgattccatgttaaatgcaaagtagttaggcgactgttttcttagttacaggagtttcgagcttcacttttgtgcagtaaaagcaaaagtaggctacagtctgtgccatgttgatgtacagtttctgaaattgttttacaagactttgataataaaacccttaaactta

SEQ ID NO: 6408 - DNA, 674 bp, Canis familiaris
gctgttcgagccttcaggacgtgcgcagaaattctgccggctcggcctttctgacggcccctgggagggctccctcttagtcagggccgcctctgcgcccgcttcgtatttagagagagcctggtttcaaggaatccccgacttgcggcagctgcaaccggcacaatcctgcagttaggaaagcggggtgtgcgtttccatcctgttctccgtgtcgatcacgtggccccgaggctgtccttttgcttgggtgacgggggcgaagtggtccagcccccgtcctccctgcgactggcggagcctgctgggtaatggtgtcgaatagcaaccgttgggggcgggggttggtgctcagtggcttatctcccgggggccgaccactctggagcagccatcgctacccgctctgttctgcttatcgcccagtcccacttgaagcagggaaatctccccttttgcgcacacggttgtcttagtcatccgtcctcttgcccgggcatttagtactttatccttttgtggctgaacccttggttttagaataaactacaccaacagtcactgggcaaggaaactttccgtgctgatcgatggaatccattttccaaaatcctggttttaggcggtgtggtgggcgttttccttaggattgcaaaagaaaaaaaaaaaaaaaa

SEQ ID NO: 6409 - DNA, 553 bp, Canis familiaris
atggatgaataatacagagcacagagtcggcgggagaaggccgcccagaagatgcgggtacagcaggccccaggagcgggcttcccggtatccaggcatccaggagctctttccaggctacgtcgggatcaaggcccaggtggcacggcggctggcggagctggcacggcggcgggaggcaacggcgagtgcaacggctggcggaggcagacagagccccgcaggctggggcggctcaagtatcaggcccctgaagtggacgtgcagctcagctcggagctggctgactcgctcaggactctgaagcccgaaggcaacattctccgtgaccgtttcaagagcttccagaagaggacatgattgagcctcgggagagagccaagttcaagcgcaagtacaaagtgaagctggtggaaaagcgggcgttccgcgagatccagttatagccatcactgaatgctggagcccccaccctacaataaaacaccactgatcgacaaaaaaaaaaaaaaaaaaaaaaaaaaaaaaaaaataaaaaaaaaaaaaaaaaaaa

SEQ ID NO: 6410 - DNA, 629 bp, Canis familiaris
tacaaaaaagcaggctggtaccggtccgggatttcccgggattctggatgaagcatatccagggaagaagctgttgccggatgatccctatgagaaagcttgccaaagatggtgtttgagttattttccaaggttccatctttggtaacaggctttctgagaagaccaaataaggaagatggctctggcctaaaagaagaattacggaaggaattcagcaagctagaggaggttctgacccataagaagacaactttctttggtggtaattctctttctatgattgattacctcatctggccctggtttgaacggctggaagctctggagttaaatgattgtgtagaccacactccaaaacttaagctctggatggcagccatgagagaagatcctgccgtatcagccctcctcaatgaggccaacacccctcgaggattcctcaatctctacttgcagaacagccccgaggcctgtgactatgggctctgatgggggcaagagtcagcaatgaaatgtctgatattttctttcactaaatgtctgatattttctttcactaatatgagtaaaaatgcgctttcattttaaaaaaaaaaaaaaaaaaaaaaaaaaaaaaaaaaaaaaaa

SEQ ID NO: 6411 - DNA, 643 bp, Canis familiaris
tattcagggagctggtctgtctagcacgtagcaacaatgcactataatggtcatagagaagttcaacaattcctcctggtgtaggatttatggcctctaatgtttatgataccactgtttgtacctgaaattgtaaagaactgaggcttttcttccacttgaaagtagtaaaatacagaatgaaatgataatctgggtagatggtatctttgctgaaaaataattaatcaatcaccacttattcttaggcaaattatgtgcattacagataaatgtcattttctgggaactaatctagcagggtgtattcagttttggtttccaattatctcaacttctttcctgttctattatgaagaaagcaggctattctttatacagacctaataatagcattagtgcaacatttttaattattatatgaacagaatagtaaatgcaaaaaacttgagaccgatccccaccaatagagaaatacattatttgcaggattactcacctgaagaaataaaaacttgctgattttcagtagttcaaaagagcaatgcatgcccaaaatgtaactaatttagtgatttgtttaacacagagattgtcaaatatattgtaaatgtgcaataaagagtggcttttaaaaaaaaaa

SEQ ID NO: 6412 - DNA, 583 bp, Canis familiaris
accgcctcccgagggtccagcaccgggaagccccacggggcccgaggcagcgtcggaacacgtggacgcgaagatcgccaactcatgggggagggctacgccttcgaggaagtgaagagggcgctggagatcgcccagaacaacgtcgaggtggcccggagcatcctgcgcgagttcgcctacccgccgcccgtctccccgcggctgcacctctagcggccgggcccgggcccggggcctcgccctgccagccatacttttcgaatcagggttgaactgacagaaataatttaaagacgtttacttcccttgaacttcgagatctgtgaaccgcttctccttgtttacacgtcggccgactcgcggcccgctgcgcgcctccgggttcgctgccgcggcccccgcgaggccgccgtcggggctgcggcgacgtcacggcggcggcgacgtcacgcggtcacgcgcccgccccgccccgccccacgcgccgccgggtccaacgccatttcgcccagttacaggatgcttcagaggttctgatcttcagcgtatcgaactaatgcaaaaaaagaaaaaaaaaaaa

SEQ ID NO: 6413 - DNA, 456 bp, Canis familiaris
  misc_feature (102)..(102): n comprises a, c, g, or t, or includes no nucleotide
tagccaaatgagccatccagaagccctgctttcctttgtttaaatatttgtttatttattagacagatggaatgagagcataagcaggggtagaatgggggntggggagtggcagggaggagagggagagagaatctcaagcagacttcctgctgagcatggagctggatgcagggcttcatcttatgaccttgagatcacggcctgagctgaaatcaagtcagccacttaactgacttgagccacccaggcaccccttaacctttcacctacaaacaccctggctgaaggctgtgagctgagagcagaaatctcatcagcatctgggaatctgctgtgactataggttagtcaacagaagtacaaggtctcaactagcagttgtattctggtacataaaaactgggacacaaaaaaaaaaaaaaaaaaaaaaaaaaaaaaaaaaaaaaaaaaaaa

SEQ ID NO: 6414 - DNA, 620 bp, Canis familiaris
atgtaggtagtgactaccatactggccagcacagagagagtctctttccatcgtcacagaaagtgctgctttgcagtacttggtgctgggtagagagagatggattcttcctggcggggcgtgaacgttgtcaagggttccgtgcattgctgagtgcagcagcacacctcatacacgctatgctgctcacagagggaacgtcaaggcaaattagacaagtctttgccttaaggggcctccaggccagccgagcaaatattggcacattgtcagcctctatcgttgcattgtctgccacttaggtacaagcaagaagtttggggaacggtctgagggttctgagaagcccaattacgtgtcccacgtcagattttcttgctgtgatctgcactgtggagcagccagaccttcacagtccaacacagaagccaccagccatgtagggctatttaaattcatattcaggagctcctgggtggctcatttggttacgctgccaacccttgatggcagcccaagtctccatctcagggtcgtgagtccacacccccgagttgggctccgtgctgagcgtggagcctacttacaaaaaacaaaaaaaaaagaagaaaaaaaaaaaa

SEQ ID NO: 6415 - DNA, 179 bp, Canis familiaris
tggatccgtcagtctggtccccgcctccctatctcagagagaaggcagcagccccagggccggctcggtgtttgtacattgcacagaaacttgtgtgggtgctttagtaaaaaacgtgaatggagccaaaaaaaaaaaaaaaaaaaaaaaaaaaaaaaaaaaaaaaaaaaaaaaaaaaa

SEQ ID NO: 6416 - DNA, 578 bp, Canis familiaris
caatagtgtagttttagctacagactaaagtctgttctagtattagtaagggatatttcttggtttcaaagtcatgggttttgctagatgcgaattcatttttgtcctcagaagacagaccttgcattgagtggcagacagtcgtgtgtgcttcacatgaccttgacagttgcctccaggctttgaattttccttcacgtgacagaccatcctgatctgtctctgtcgtctgcctcgatgccctgggtgttctgaccattctgaacatgctacagtttgaagtaaagcccctgaaaagccagaaagtaccttttactgttgatacaaattgtatctttttaactataagaactattttgatttgtagatctagtgaaaacacaaatgtgtaactatgattagacttttgggcaacattttatcccttatttaaatacaaaattttaaagtaaaattgaggtctaggatagggtagaaaaataaaagtaacgatttaggtaaataaaattgtctgtcttagttttatagaatatattaaaatatattaaatacaaaaaaaaaaaaaaaaaaaaaaaaaa

SEQ ID NO: 6417 - DNA, 518 bp, Canis familiaris
cactggcaggcccggccttatccagctcgcgcgacatgcagctctttgtccgcgcccaggagctacacaccctcgaggtgaccggccaggagacggtcgcccaaatcaaggctcatgtagcctcgctggagggcatcgccccggaagatcaagtcctgctcctggcaggctcgcctctagaggatgaggctaccctaggtcagtgtggagtggaggctctgaccaccctggaggtagccggccgcatgcttggaggtaaagtccatggttcccctggcccgtgctgggaaagtaagagggcagactcccaaggtggccaaacaggagaaaaagaagaagaagacaggccgagccaagcgacgaatgcagtacaaccgacgctttgtcaatgttgtgcccacctttggcaagaagaagggccccaatgccaactcttaagtccgttgtaatcctggctctccccaataaagccacttggttcagtcaaaaaaaaaaaaaaaaaaaaaaaaaaaaaaaaa

SEQ ID NO: 6418 - DNA, 501 bp, Canis familiaris
cacgtctgaagtggcagtacattttttggtcacctcagggaacttcttgcatctgcctggcatgtagtcagcaagggtgcctactcctgtcccacacggctctgcctcacgccctcacccatatggctctttgaagagcacttatataggaaaatcggggatgtgtggggggaggggacaacaactgaggcagttgactgtgttcagctttatttatttttttaatcgatttttttttctccaagactaccagtctcagaagttagaacaataggcagtatgatatgtttgtgcctaatcatgttgtgattctttcttcttagtagaatggaatgtttggcccccataagaaggattatacttgatagacttgtcttatttaggttctgtaattgcccactgtactgagattcatattaaattccatgtatttttgttatgtatcttctggggaaaaaaaaaaaaaaactgtgaaacattaaaaggtattaatatgcaaaa

SEQ ID NO: 6419 - DNA, 710 bp, Canis familiaris
tccggattcccgggatgaagctgacatgaccaactttgatgtggagttcttttgaacatccatgataaagaaattgttgtgggcattgcattgacagaagagagtctccaccgaagagatattacacattttggacctacaactcttagatctactcttgcctatgggatgctcagcaaagtgtcctggggcttgcccatagatgctgttcagtgggatatctgcaatctgccattgagaactggctctgtggacattattgtaacagacatgccatttggaaaaaggatgggctccaaaaagagaaactggaacctttatccagcttgcctacgggagatgagccgtgtctgtagaccagggacaggccgagcgtgcactacttactcaggacaagaaatgctttgccaaggcattatctggaatgggacatgtttggcggaaggtacatactgtctgggtgaatatagggggtcttcatgcagcagtttatcttctgaaacgtacacctcaagcttttattcatccttcagaaccaagaatgggggaagactccttggtgatgcaaataatgaagacggttaatggtatctgtacctcccaacacagggaatgtcagcatgatgaacttggtttaagagaaaaatagtgttaataaaattgcagcttgcagtttaaaaaaaaaaaaaaaaaaaaaaaaaaaaaaaaaa

SEQ ID NO: 6420 - DNA, 753 bp, Canis familiaris
aatgtgcctcgcttagagactgattcgggacctttgtggggccgaccacggggcgccactggtgaccaatggcggagcccacccagaagtaggggaccagggccatggaggggtacttcaaccatcacaggaggaggagttcgcccaatcggaagagctgtgcgcaaaggccccgcctcctatgttgtacgacgaacctccaggaatcgacatcacctgctgggatgcagacccagtaccagaagaggaggagggcttcgagggcgggtgattagcggtggtgcctgccctcaggctgcccttgccaaggccgcccacctgtgtcggcctctggccagacggcccgccgcgcctgcactcgcagcagctccgcctggcatccattccggattccggccctggcccaggacttggccgcttccctacccacagggcccaacttttacagcttttctcttttttttaaagttgataggagacttgtacagttgactggttttcctcccgttggtagttgagacgctgttgcaaattctaccccttccccgcccggtccagattgtagctcttagccctccctgctcactcagctggccggggtggaggcctcaccctacttggggcctggtgtcgggggagctctgggtgggaaaatgtcccacctcttttcctagttttatgtttcttggaaaaatatcactttgtattctctgtccaaaaaaaaaaaaaaaaaaaaaaaaaaaaaaaaaaaaa

SEQ ID NO: 6421 - DNA, 621 bp, Canis familiaris
gagctttagtgtctagaagatcccacgaaatagcgtattgtgcacagtgcttaattatctgcctgtaagtggggaacaaattgatacgtgttcagtgtgctgggggggggttcatcacacagataatacactgaaaaaagtagtctataattcatatgtgctagttagaaaaagggtcaaagaagtcagatgactgaaattttcatattatttcatagtttcagagttttcaaagtgaaataggaagaaggaaacccttacccagaatcctaggaaattgcccgtgcctcctccatcactgaggagtcttttctccacatttttattagtttttcgttctgttatctcccaaattaatgttgtatttagatattaaatacagtcagtcagagattaaaatttttatttcttgggggagaagtaagaaaaatgtattcaatgtatctaatattgaaatgaagaaaatatttaatgtaaaaaagttactttatattgacattgaaatggagacgagatttaatgtaaaaaaaaaagctttatactaactgagttaacatttccatcatgagaagtactatgttaaatataaacccattatgttttaagttaaaaaaaaaaaaa

SEQ ID NO: 6422 - DNA, 573 bp, Canis familiaris
caaaccgagcacctggaacctactccaacagcaggtagcccagcagcagtgaagatccggatctatgataccacctccaccgctgagcagtgaccttcctcactttcccttgcccagcttctccccggggggcctgagagaccctctccttccttctgccccatcttccgtgttgtaaaggaacagcccccagtgcactggggaaggggggagtgaggggcagtggtgcccttcctgctggagagacatgcagcagtagcgccggcgccatctgcagggagctggcgggctggccttcttctgggccctggcttctccccactgtaacgcctgttacacacaaactgttgtgggttcccgccaggcttgaagaaaatgatctgaatttcttcctccttttggttttattttgttggtttattttgtgttttttctccttttttggggtattcagagtgggccgggccctgggcgagacacagctacctctgttggcatctttttaataccaggaacccagcggctccagccactgagcagctagaatgaaataaagtggaaaaaaaaaaaaaa

SEQ ID NO: 6423 - DNA, 628 bp, Canis familiaris
gggagcatagtaagctaagagtgtatcaatgtcctgtgtagtatgttacaaatatggcataaatatgtatttttaaaccccacttatatgtgtgattatccatataatccatggtaagatagtattcctggcatttaaactatggggaaaataagtactatctattttaaattagaagtcagatgttcttttggaagataccggttaaacatttttcaaactgccacagtaaactgacttaatatgagtgacatattagcgaatattagtaaattagtgaaatattagtaaatattagtgaaatattaaaactgattaagcctagttcattaaaagaaaataaatatgtcttatatttactgagggctatcagcaaacactgttcttaatattttgtgtgcattatttaatcttaacagaaaccagggctcctgggtggctcagtcggttgggtatctgcctttggctcaagtcatggtcctggagtcctggtattgagccgtactttgggctccctgctcagttgggagtctgcgtctccctctgcctctgccccttcccccaacttgtgctcccttatgctctggctctctcaaataaaatcgttaaaaaaaaaaaaaaaaaaaaa

SEQ ID NO: 6424 - DNA, 572 bp, Canis familiaris
agccccctcccaggtcttcctagacgctctgcaccccgttctcgcctgtgccgtagtttgtctcctgggactgggggaggagttccgaggtggggttggttacctatcccgaggggaaccctgtccgggtccttgctcggagagtacggcctgatggttctgtgcagtacctggttgagtggggaggtgggggcatcttctgaacagcctgcctctgcctacttccccattcacacacaccggcactttcataccctgacctctgacctcacctacagctgggatgtacctggggaggtagggggatagttctccctactgcccaggctggaatccaggtgaggggtctggggaagaggctctctcttctctattcccttcccgattcctgacccttcctccatccctcttcctatttcctttgatgttattttgttacagctttttaaatattttttaaaattatttaacccctggggacggagactgaggagggggggaatgataaggggtcccagactctgtatgattgaaataaaggtaaataaacaaaaaaaaaaaaaaaaaaaaaa

SEQ ID NO: 6425 - DNA, 614 bp, Canis familiaris
tttgatctggattaacagtatctattagagcctggccatttggcaaggtacctgtttaacagggttttaaagtttactttattatccactaatgtcatccacggcagttcatctgtacagatactataccatcttgttcaattgttttttaagaggttaatttaattaacattattatgctctctggggtccctctccccctgtctgtatagaaagggagaattagacaaagcatgcttttggaaagcaaataggaattgtttggaatgatttaaactttttgttgttgttcacttgtggttctacattcctggtgaatgatgaatattgctgtcaaaaggctgctccttccccataagggttgctgggcatttgatggcaggaagattttaaaagctagactgaagttggtctaaaatttagttctgtgaacctggtgataaagcaaagaaaaggttcatttttgtaaatactgctggtttggaatagtgatgttagacttaccctaatttatgaacaagagattaatctccatgcatagttttagacaaaaaagatgtttcaataaaatattgttgtcttgtaaaaaaaaaaaaaaaaaaaaaaaaaaaaaa

SEQ ID NO: 6426 - DNA, 596 bp, Canis familiaris
gataagtggaactgtagacttaggggtcctcttacatttttgcagttacttccttcttggatgcctcttggtatgtatagtttaaaagttaagtgaagacatagaattttaacaacaaagttattaaagtcattccagactgtcctgtgagcagcagcatatgtaactattttacagcaaataagttgtcccttagtgcgtcttgcttttagctctgctgtgaaacaactttcagaaataccctggaatggaaaaatgtctcacaactgtcattattctcttttgcttttaagaggaaaaataggtcatagctcagttgaatcatatttcaattgtagttacacttgaacttaatttatcaaggtatatttaacagtaatagctttgggaggaaaaaatttatcattgctatattctaggaagttcagcttgattttgaggtttccgtgtgtgcagtccagacctatactgggtcttccgcattaaggcttctcgccgactcctgtaatgtattttacacatgctttatagccacggagataattcctatcataaaatagctgttgacatacgcaaaaaaaaaaaaaaaaaaaaac

SEQ ID NO: 6427 - DNA, 508 bp, Canis familiaris
aaccgctgcgccacccagggatcccgaagatatgtgtaaatggatttaagttcagatttttgacacgtgatgtacatccttagagtagagctgactgaaacttggtgctccctagagcagaacctgagttcccagccaaggcaatttaggagctagaagtgctgccaagacctcattttcacactgcctcatgactgaagcctgagactcattagaataaaatggccttaaatttaaaagtaggacctgagagttgatactccttacagaattagccagaaagggggtcagtggagagggagggaggatctgcctcagatctgcccctccgcttgtctctggctgaccttctatataattcacaccataaagtcaaatttacggaaactatcttcttatggaaataactacttataattttactagttacattttcctaatctcttgttacttattttgaagggcaaggacactaatagggcaagtgaggaaaaagcagtcatctttg

SEQ ID NO: 6428 - DNA, 620 bp, Canis familiaris
  misc_feature (48)..(48): n comprises a, c, g, or t, or includes no nucleotide
tcctggagccccgagtgggactcgatccccgggactgcaggattgcgncctgagccaaaggcagatgctcaaccgatgagccacccaggcatcccccgttgttgttttctaaataaagactggatagataccagattcttaatacagttggggaggggggcacaatatgaatgaggtatgttattcaatacataacttgtagagagtgttttatgttcaccaaggacacaggatgagaaagaaaaaaccatgtccccatcctcgaggtgtttgcattctggtgataaaatgaattgaattgcagttctgataagtattttgagagcttctgatgcagattgaaaggaccttttcccccttagttttgaaactttctataatgaacatgtactaggttcataccccttttgtttctttttttgtgtcttatgttataaaagattggcactgaggggcacctgggtggctcagtcaattaagcatctgactttggctcaggtagtgatctcagggccctgggattgttcagtgtggaatctgcttctcctttctctgcccctcctcctccttctctacctgctcacgcacgctctcttaaataaatctttaaaaaaaaaaaa

SEQ ID NO: 6429 - DNA, 626 bp, Canis familiaris
cttagtcaggccatagctttccaagcaagccaaaatttgaagaagaaccaaagaaatggaacccacgttcagggggtccctcaacatcagatgattcaagacgcccacaggataaagaaagcacatatttcagtgatgaggaagaactgagtgattaaaattatatttaatatgtaaatatcattaaacatttttgtttaaatcttagagttcgaagttcagttgggactaaagactaattttagaatttgagcataaaggacacttagtacccaataatttttttactataaagtaggttcataggaaattgaaaataatttaaaagtatcatgtttctatcttgcctgagcagagtaataaagatcaagatttgctagtaaccgttaatcttaaaaccagttcacttgaattaaaaaggaatcttaatactatcatagtattgctgttgtcatcccaagataaaaaatattaaaaagatatgtttgagaaactcattataaaagtttattcatgaagactggaaaatgctaactgatttattgttgttaaatgttaataaaattttcaagagaattttgtttttaaaaaaaaaaaaaaaaaaaaaaaaaaaaaaaaaaaaaaaa

SEQ ID NO: 6430 - DNA, 597 bp, Canis familiaris
ttgacctccatagaagacaccgggagccgatccagcctccggactctagccctaggcccgcgggacgtgataaccatttcacacagggaacagctatgacccttaggcctatttaggtgacactataggacaagtttgtaccaaaaagcaggctggtaccggtccggaattcccgggatacaggaagatgccccccaagacagttgggaggtgactgcggaacaccagcctctctagagggcaggtgtggcgccaatctactgagccatggagaggaatcagactggggaggggggtgggtgacagaaggaagctcagtggagccagaaagctacagcctccatggagccggatggccctggcagggaatctatgaggctttcctgaggctttgccacttggtttagtttttctttggggttggcaatctgagccaatattgcatctgttccaattggtataaagaggaggcctggatcacttaaactgactgttcctttccaggtcataattttaaattaaaaatatatcactttttttacaccaaaaaaaaaaaaaaaaaaaaaaaaaaaaaaaaaaaaaaaaaaaaaaaaaaaa

SEQ ID NO: 6431 - DNA, 662 bp, Canis familiaris
cactggctaagctcagtgaccttgcgtgctcttggtgcttggtcttctggcatggaccataatacatacctacttggaattgtccagtaggttaagtatgatgagatcctgtttagcacaggattttggtatacacagaagtggttttgtaaagtgaacctgaatgtttggggttcactgtggattgaaggctcttaggttgtttcagggagctgagcttaattttcttaacgttctaaattgagactgacttcaggctagggattagacctgatttggttgaaattgggtcaaggaacagccacagttttgccaagctagtcctctctttctggctttttcttcagtacagagttcagaagatatttcatttagttgagatggcaaggggcacctggattgctcagatggttaaacttctgcctttggctcaggtcatgatttgtgggtcctgggattgggctctctgctcagcagagtctgctccttctccctctgcctgtctcccctgctcctactctttttctctctctgtctgaaatgaataaattaaaaagtaattgagatggcaatctttattcttccatcctttgctttcatggaaataaagtctaaacaggtgaaaaaaaagaaaaaaaaaaaaaaaaaaaaaaaaaaaaaaa

SEQ ID NO: 6432 - DNA, 647 bp, Canis familiaris
cccccggtattcagtgttaacgggaaggtttctgtgactgggagcaaccttgcaaaagagcctgggcccaagccagcctgatgtggatggcttcctcgtggtggggcttccctcaagcctgagtttgtggatatcatcaacgccaacaataagcccatccatctcccctattcctgctaagccagggactaggtagctcagaagctcagtaactgtgctcctacccccacccccaccctgcacatgcttctgatggtgtcacctgccccctttgtggccaaactatacctcttccttaccgtttacaccttaccctgtaatggttgggaccaggccaatcccttctccacttactgtaatggttggaactaaacatgtcaccaaggtgacttctccttggctgagaggtggaaggggtgggatttgcctatgggccccctcagtccccagtgagggcaggagaaagaagccgtcctcctctcccatctcgctccatgaggccaagggctgagagaaaagccctgtcctcccctcagaggccaggggtgctgctctctcccatggtgccaacgcctgtgtgtgttgtgtatgtgagcaatcccacatgtggggggaaataaacacctggcactgaaaaaaaaaaaaaa

SEQ ID NO: 6433 - DNA, 619 bp, Canis familiaris
  misc_feature (248)..(248): n comprises a, c, g, or t, or includes no nucleotide
tgatgctactggcatcttgctggtaagcccgggatactgctagccatcccatcatgcgcatcttacagtaccccccacacaaagattatggcccaaatgttaatagtcccgaaaccctgccttaagtttattagggctacccgccccccgccccactggggtctgcttctcctcgagacacatcactcacttgtcctaggtggggctcaatccttgccagccagcttcccagggtccccagatcatanccctgggcttccctccatgtaacagaaggtggcctcaggcctcctctgtggagctttccaactggcttttgttcagatacttaagcactttatagtaatatttcaaattaataaaattacaagaggcttcctagaggttttgccttgtgcatctatgttaacctaccttgaggacacctgggtggttcagcgtttgagcatctgcctttggctcagggcgtgatccctgtccctggatggagtcccacatcgggctcctgcagggagcctgcctctccctctgtctcatgaataaatgaataaaatcttaaaaaagaaaagaaggaagagaaagaaagagaaagaaagaaagaaagaaagaaaaaaaaaaa

SEQ ID NO: 6434 - DNA, 593 bp, Canis familiaris
gccccgccttcctgcggccccggcccgcctcctgtggcctggcccccgcctcctgcggccccggccccgcctcctgtggccccagccccgcccccaccccggggaaaacccaggccttgacctcgttcttcccatggcctctccgcggagtttaataaaagcatttccacgtttgaatttgtgttaatgatggaccacgtgaccgtcacatgcagcatccgtagactgatgtcaccatgtccccacctgggcaggtacacaacgggtcgggtcggagcccttgtctgtgtgtcattcagcctcctactttcctgaccgtagctatgaatgatcggcttcggtgtttgctcggccccctccaggacgtgcttgcctttgaaggccgagcctggacgcccccttccaggccagtcagtgggcgggatggtggtttttctgaccctcttccagcaccgggatgggctcgctgcaaaggccctcagactgcctgtggtcgccctcacttgcaccagtgatgtgtgtttgtttaagcaattaaagtaatcggttttaacgaaaaaaaaaaaaaaaaaaaaaaaaaaaaaaaaaaaaaa

SEQ ID NO: 6435 - DNA, 601 bp, Canis familiaris
caaaaaagtcaaggctggtaccggtgccgagaattccccgggatagcaagctgaacgagcacgttaactgggtgtccccactgggctaacctcactcaaaagtgaagacccattctatctccaaggtcacgacggtgggttctcagacttctgactccaatagttcccgtgggcttcacacaaggtggttgtgaagctctttgattctgaccccatcacggtgatgatcccagaagcagtctccaggaacaatcctaaatttatggagactgtggcagagaaggctcttcaggagtatcgcccaaagcaccgagaggaatgagatgtgaacattgcttctccaaatatgggagggctgagttcctttgaccccaagatgagtgctaggcccctagagagagctctgcatgtcaccaagtgaccaggccttgcctcgaggcgctcctgtctcctaacccagctttccttcctctggactccgcactgtaacgcctacgtttgctgatcatgggaagaactcctgtgtgccactaactcaataaaaccgccaaggaatctgaaaaaaaaaaaaaaaaaaaaaaaaaaaaaaaaaaaaaaaaaa

SEQ ID NO: 6436 - DNA, 650 bp, Canis familiaris
  misc_feature (1)..(1): n comprises a, c, g, or t, or includes no nucleotide
ngagtttgttttggcacccaattcaacgggacttttccaaatgtctgtgacaattccgccccattgacgcagatggcgctaggcgtgtacgttgggaggtctaaataagcagagctcgtttagtgaaccgtcagatcgcctggagacgccatccacgctgttttgacctgccatagaagacaaccgggaccgatccagcctccggactctagcctaggccgtcgggacggataacaatttcacacaggaaacagctatgaccattaggcctatttaggtgacactatagaacaagtttgtaccataaagcaggctggtaccggtccggaattcccgggatagtagctttgtggcttcgtgtccaaccctcttgcccttcgcctgtgtgcctggagccagtcccaccacgctcgcgttttctcctgtagtgctcacaggtcccagcaccgatggcattccctttgccctgagtctgcagcgggtcccttttgtgcttccttcccctcaggtagcctctctccccctgggccacgcctgggggtgagggggttaccacttcccagtgttttttattcctgtggggctcaccccaaagtattaaaagtagctttgtaatttcaaaaaaaaaaaaaaaaaaaaaaaaaaaaaaa

SEQ ID NO: 6437 - DNA, 577 bp, Canis familiaris
gaggtgcaaacaatgacttggaagaagtggtccataaactggattcccagacagcatcgggaaagatatagaaaaagcttgtcaggtcttaatgttatccaactccatgaagttttttgttagaaaagtaaaaatgctgaagaagcccaagtttgaattgggaaaactcatggagcttcatggtgaaggtagtagttctggaaaagctacggggggatgagaccggtgcctaaagttgaacgagctgatggatatgaaccaccagtccaagaatctgtttaaaattcagacatttaatggtgacccataaaaacatatttgtgatgtttaatttcttatcattctttttaaataatcaggctcggtgaagcagatgttttgaactgaccgtgtgaacttttcagaactattgtatggatcttatccacttgctcttggctactaaatagctgcaaaagggtagtgatctattttaagctgtagtgatctggatggaagtgttctagatggttaataaaaggaaacttttttaacgtgaaaaaaaaaaaaaaaaaaaaaaaaaaaaaaaaaaaaaaaa

SEQ ID NO: 6438 - DNA, 612 bp, Canis familiaris
ggccaacgggaccaggttcaaggcattcgttgccatcggagatttacacacggacacgtgggtctcgggcgtcaaagtgctccaaggaggtagccctgccatccgtggggccatcatcctggcccagctttcccttgtccccgtgcgacgaggctactgggggaccagatcggccagccccaccctgtccccatgccaggtgactggtcccctgtgggttcctggtgctggttggccgtcttcaatccctgccccccagaggcactggcattgtctcggcccctgtgcccaagaagctactgatgatggctggtattgacgactgctatacttcggccaggggctgcactgccaccctggggaactttgccaaggctacttttgatgcgatctctaagacctacagctatctcacccctgatctctggaaagagactgtgttcaccaagtctccctatcaggaattcactgaccatcttgtaaagacccacaccagagtctccgtgcagaggacccaggctccagctgtggccaccacatagttttatacaagaaaaataaaagtgaattaaagcttgttaaaaaaaaaaaaaaaaaaaaaaaaaaaaaaaa

SEQ ID NO: 6439 - DNA, 644 bp, Canis familiaris
  misc_feature (21)..(21): n comprises a, c, g, or t, or includes no nucleotide
gtgaaagatactgaaggaagngacccagcttcaccgaaggcatcttcaatacagacagcaactctatttctttggcatccttttaatggactgacgctggccttcaggcagtaaccgtaatcagattaagaactgcggggttttctatggccacaatgtgttttcagttgctcttatttttgtgactgcattccagggcctctccgtggcttttatcctgaagttcctggataacatgttccatgtcttgatggcccaggtcaccactgtcatcatcacaacagtgtctgtgctggtctttgacttcaggccctccctagaatttttcttagaagctccctcagttcttctctccatatttatttacaaagccagcaagcctcaaggtctggaatatgcacctaggcaagaaagagtccgagatctaggtggcagtctttgggagcgctcctctggggatggagaagaactggagagacttaccaaaccgaaaagtgacattgaatcagatgaagatactttttaattggtaccgaaatgattgacaactctcagaaacccttattttcacattttcagcatgtgtgatgtttatcttttcactttgataaacaagaacatttctcaagcaaaaaaaaaaaaaa

SEQ ID NO: 6440 - DNA, 605 bp, Canis familiaris
gtgtgtccgtgtgtgcttaggttctaacagcaagttttggagaacctctctttaagtaacgcattacttctgtcagaagtgtctttagggtggttatctagttcagtactcccaattattggggacctcgaggcttaagtatttttctgcatataatgctaaaggtaagttacattcatttacactaatagagtagatagagctcggcactatctaatgactttcacgtccgtggtttcagttgtatatacattaggacgtggagaggggaggtagacggggggaggttccgtagctcataagcacttgtaagggggaggtcatctgcaccccagtcttcagcctactgtcttactgatttacggactcctgtcaatcactgaggtacacattaggtgagtcagaggaaaccagaacacttgttcatagttgtttttttttccccgaaagcaaattactgtatttttatggcaggagggagaaagtgttaaacggtttctaatgaagtcagatatttaaatgatgaatgactaatgtgttttgtagaaaccaaaataaacccaataaatgataaaaaaaaaaaaaaaaaaaaaaaaaaaaaaaaa

SEQ ID NO: 6441 - DNA, 560 bp, Canis familiaris
gagctctgccgacattgtgtgaccgtaatagaaaggtgatggaaaaggtggtgtacgtagacttcgtgctacaggcccgcacaatccgccagttcgatgagcgctacaccaactgtggcctttggatacccagactgtgttacctactacccaacagcaagccccaggaccacaggtagatgccatccagacacctgtgctctgtctcaatgcagctgatgaccccttttccccagtccatgcccttccgctacaggctgcccaacactctccccatgtggcactgcttatcacagcccggggtggccacattggctttcctggaagggctgttcccctggcaacactgctacatgaaccgtctcttgcatcagtatgcccaagccatcttccagcatccagtggagctgctcaaactcagggatctctcatgctctgagggaggccagagctaacaggagtacccatggggtcttaattccgtcttcacttatttattaaatatcaacttttccctgaaaaaaaaaaaaaaaaaaaaaaaaaaaaaaaaaaaaaaaaaa

SEQ ID NO: 6442 - DNA, 596 bp, Canis familiaris
cgagctcatgatccactgctggaagaaggaccccgaggtacggcccaccttcgagtacttgcagggcttcctggaagactacttcaacggccacggagccccagtaccagcccggcgagaacctgtgagcccgggtctgcaggcttccccccccccattagctttcagttccgtagccgcagctgctcgagcagtgagagccgtcctggaccagattgcatgtgactccgaagctgacgaacttccgcggccctcactcatgacacttgtcccccaatccgaacctcctctgtgaagcatacgagacagaaccttgttatttctcagactttggaaaattgcattgtatcgatgtttatgtaaaaggcccaacctctgttcagtgtaaatagttaactccagtgccaacgatcctagtgctttcctttttttaaaatgcgaatcctatgtgattttaactgtcttcacctgattcaactaaaaaaaaaaaaaaaaaaggtattattttcccaaagtggcctctttgtctaaaacaataaaattttttttcatgttttaaccaaaaaaaaaaaaaaaaaaaaaaaaaaaaaaaaaaa

SEQ ID NO: 6443 - DNA, 649 bp, Canis familiaris
gggaagaaaatggctcgttcaacctttcggggagtaaccagggaaccctgctgaatggtaagatgggctcctcgacattgagattgccacctacaggaagctgctggaaagggcgaagggagagcaggatttgctctgcctcttccaaacttttcttccctggaacctgaggggaaacccaacctggattcactcccctctggttgacactcactcaaaagaacgcttctgattaagacggttgaaactagggatggacaggttatcaacgaaacttctcagcatcatgatgaccttgagtgaagcttgcccagattcggtgcagcaattactaccagcaagaataaaaaaaaaaagaaattcgtatcttaaagaaacagctttcaagtgcctttctgcagtttttcaggagcgcaagatagatttggaattaggagtaacctctagttcttaagaaccaacactcttaaaagatttaggagaaagtttacaacataatctagtttacgaagaaaacttgtgctagaatactttttaaaaagtatttttgaataccattaaaactgcttttttccaacaagtatctgaccacttgtttctgcttcaataaatctttggaaaactcaaaaaaaaaaaaaaaaaaaaaaaa

SEQ ID NO: 6444 - DNA, 645 bp, Canis familiaris
ttttcaatcgtgattgtgtcaattcttctattttctttattcctgtttgcctcacttgacagttgcagttggggagctggtttcagcttggggtgggtacaaactccccaacccaagccatgcagctggtgaacagggttcccgccatttcttccagccccactggtgggttccccggcccttttgatacctaatactccagtcaaatggctagattaatgctgctctagaggctaactcaagtccttgacatgtttcatttacaagtatgtggattatttattttaggagcttttcttttaaagggcccaatagccctacagataaatgagctgctgggctgtgtagaaaatattgttcaaatgttgccaaataattgactttgtaagggggatattaagctgctgtttataaatctgaatgtcttaaaagcattcttgcttgctctctctgttgtagatggtgtcttagcaagtcctgagtttttccaatgaacccaattttaatatatggtatttttgtatgccaaactggtgtcttgtcctttgtatatgtggtaatgttgattttatgactactgttaaaacacatttgctatgattaaaattcataaaacgatttcaaaaaaaaaaaaaaaaaaaaaaa

SEQ ID NO: 6445 - DNA, 593 bp, Canis familiaris
  misc_feature (308)..(308): n comprises a, c, g, or t, or includes no nucleotide
gccagcctggccccctctgaacttgcagctcttgtctggggagctcagaacatctccccagtctctttaaccactcccgctctaaaactggggccccagccccctgactctggtgaacttctaacaatcacccaagggccgaggcctgggcagcccatctgtaacagcccgcgcggtctctaaccacccgcggggacggggtcaacctcccctaatctctaactgctcctgaggccagggctgcctctgaaacacctaactgttctggacaggggccccaagggctccccagggctccccagagcccnctgggctctctactgctcctagggcagcctgtggccaagtagaccaagtctaccctgggtggagtgtggaccctccaaacgtaacacactctgggggcagctgagcctgaaggcctcccaagtctgtgcctcccaccaccaaagtgggtgctgggccccttccctggggacccacttcctccgtggggaggggcagataacgttgcttattgaatacaaaataaaagtgaaaacaactaacaaaaaaaaaaaaaaaaaaaaaaaaaaaaaaaaaaaaaaaaaaaa

SEQ ID NO: 6446 - DNA, 668 bp, Canis familiaris
ccgtccggaatcccggatcgccgcctcccgacccgggcgccccccggcgacaactccgagcgggccgcggagtccatgttggggaacttggcgtcgtgacggggacccgccggagcgagcgcctccacctcggcctgaggaaaccctgtctcaaggagaaatgaagaggaagactgtatataccttaaatgtgggagatcgggagtatgaagatatggaaggtaactttttattttttataaagcttgtgtgttgaaagcaaacttagtgtttctgaactgttcatttgaatatatttcaaataccagagtggttttttgttttgttttgttttcacttctttttattgttctacctgaatatgctattaacaatgtgaaatgactttttttaatacataattttttttaagattttatttatttattcatgagagacacacagagagaaggaggcagagacacaggcagagggagaagcaggctccatgcagggagcctgacatgggactccatcctgggtctccaggatcatgccctgggctgaaggtggcgctaaaccgctgagccacctgggctgcccgaaatgacagtttttcattgtaacatgtttgtaatagccacaagttggaaataagtgaatgtccatcaataagttaaaaaaaaaaa

SEQ ID NO: 6447 - DNA, 555 bp, Canis familiaris
acatcgagtagacacgagcattccatttgtcctacggcggtgtcctgcccactcgcatgcaaaggaaaacacttttgcagcatagcaagagaagtcgcagcagcaagacatgcaccgtcagccatttgctgagaaaagatagaaatcccgcaacttggaaaggaggaggaacactggattattattttttgggtcttgacactgggctgccaaatccaccttcctttctcctgagctcccctccccctcgactcacacgtctcgttgtcatttctgtctcggctctccccctctccctcccccaccctctgtatccccggccctgccaagggctgctgcagatgactctggtttgaaacaaggaaaaggaaagaaagcgagatacagacaacccagccacaggaaggaaagtagacattgtatgtttatgggttctcattatgaaggtgcagcttgtaggagatgtgtatggatgtgcttttaagttatgtatattacatataacaggaaacaaatattaaaataaacagtgctggtaagtatgaaaaaaaaaaa

SEQ ID NO: 6448 - DNA, 586 bp, Canis familiaris
catgtcaagtggccacctcattgtccatagagttccccacaagtgttgtgttcttctcccatatattctttattagtggtggcaccaccggagttacccaactagagacctacgagttatcctgttttgtcttgttctgttttactatccacacctgtattagattacctagtctttttgtatattaccccctaaagtatttctgtgaatttaccctttctgttttgcctctttttaccactgtcctctcttgggtctacaccatcattctgcccagtctactgaagcagtcctgttgccttcatcttgattctctccagtctgtcttctgcactacagtgatagctaccatattaaatacttaaacctactgctcctcgaaaacccttcagtggttcattttgcttacagaataatttccaagtaccttaatatgttgtagaaattctactttaggggcacctgagtggctcagtggttgagcatctgcctttggctcagggcgtaatcccagggtcttgggatcgagtcccgcatggggccccccgcaggaagcctgcttctccctctgcctatgtctctgcct

SEQ ID NO: 6449 - DNA, 544 bp, Canis familiaris
cctactcttggggagctcaggacctgggtgtttgtagttttttgccttttagagaagaagagaatctgttccactatttagttttttgattctgatgactcctgtctcttcttactctctggcccccgaatctttgtataaactgtttttgagtgtcccatggggcagggttgcatatctttgccctccttccaagccgctcggctccctcccagatcctaccctccagcctcgccagttgccaaacactaaatatgcagacactcacctgtctgacctcccaccatggccatgaacacagcgctcccccactaaacccccctcaaagttcaggattggggagagggaggaggggaggaacagtctccctgatttttcaatataatttttttccagagtttgggttttttgggcttatccttattttttgacaatttaggggggacgaggggccgggcatggcaagggggttggcctgagggtcaccatttggctcaacagccacgtttttgtacagaattgatggttgattctttgttctctt

SEQ ID NO: 6450 - DNA, 649 bp, Canis familiaris
tgattctagtactcgagcactcccccaatctaccagcagccccaagtgcagtgggaggacggccatctgcaaggaggtgctgaacgacacctgggtctcattcccctcctggtcagaggactccactttcgtcagctccaagaaaactccctacgaagagcaactgcaccgctgtgaggatgagcgtttcgagttagatgtcgtcctggagaccaacctggccacaatccgtgtgttggaaagtgtgcagaagaagctctcacggatggcgcctgaagaccaggagaagttccggctggatgactgtctggggggcacatcggaggtgatccagcgccgcgccatccaccgtatttacggtgacaaggctccagagatcatcgagagcctcaagaaaaaccccgtcactgctgtccctgtcgtcctgaaaaggctgaaggccaaggaggaggagtggcgggaggcccagcagggcttcaacaagatctggcgggaacagtacgagaaggcatatctcaagtccctggaccatcaggccgtaaacttcaaacagaacgacaccaaggcccttcgctccaagagcttactcaacgagatcgagagcgtctatgatgaacaccaggagcaacactcggaaggccgcagcgcc

SEQ ID NO: 6451 - DNA, 583 bp, Canis familiaris
tgggctctgggagcccagtgcatactagctgagaggaagtcctggtgtccgtgctattgtcgggcggtgcatgtgatgtgttcttctagcccccatcggtatgtgggggtcatggtggcaggctcatgggcctgctacatggggacagttgtattgggctttggatctttctgtcggatgatggagttcagctcggggagcggtgacctgcttagccctctcgatggctcccaagacctgctgctggtgctcttgggaaagtgtagggtaggacctgggcacaaatcccattcagcctcttgacgatctcggcctgcttgtgcatctcgatgttcaagccgtaggacatctcgtagtacatcacataatgacgctgcatctcggacttctcgctggccagcttgtcacattcgagcttcaggctgtggtactgagcctgcacgcagctgaaactcgtctttgatagcggtctgcaggagtccgaggtggtgaatttgagttgttggggtaggtgagaggagcccgaatgcctgctttgtggaaacatcatgtcagtcgcggcggggggcgcgggctgcgcccc

SEQ ID NO: 6452 - DNA, 584 bp, Canis familiaris
  misc_feature (104)..(104): n comprises a, c, g, or t, or includes no nucleotide
  misc_feature (261)..(261): n comprises a, c, g, or t, or includes no nucleotide
agaaagaacatatgtgaaggattggaacatgttcaagaaaagagtttaaaaggaaaggggcgtataattcttggaatgatttacaggaaagcttatggaagacnatcaccagatccagcctttccatttgctccatttgcacttgtaaaaaaaaaaaaaaaaaaaaaattcatgaaggcagtgcttactaggtaagttgtgataaagccaacagaggaaaattagaatttcagctgaaccaatcctgggtcatttttaacnatttgcagtgaccacagagaggctcaggagcctggcaccagagtccaggtcaggtatttgcccactgggccaaatgtatttggagtatttgaaaagatgtccctgaaatgtgatgatctgggcatttgtacatttaagatcagctaagttttagaataaagaaaacgatgtgtatattaccccacatttgactgtcttgcatatctcagttccatactacattttccatgacttaatgcaaaaatgtagaaaagcaggtctggagtagaatatggtaattaatagccatatttccagagccaaattgaaactgaaaaaaaaaa

SEQ ID NO: 6453 - DNA, 536 bp, Canis familiaris
ggtctccgcgagagcattgtcctccatggagccacgtctgcaggagcacacgtgcgttctacacaccatcgtgggctggtgggagcaccgtggggcgctgggcccgtgtggagggtacccccaacgaccccaatcccaacgacccccgagcacacatggacagtgagagcctcttcaaggatgggaagctgctgcctgccatcaccatcctaggctgcagggtccggatcccagctgaggtgctcatcctgaactcgattgttctgccccacaaggagctgagccgcagcttcaccaaccagatcatcctctgaggggggctgccaggaggcccccaccccccaactcccagctcccagccgctccccttgaggctgccgcctgcttggccggcctccatccgagaggaccagaggagaggaagccaggcaggatcgccacaggccaggagcgccctgggtggccggaggactcctggcctcttcaccctctaataaaccccggtgaaccttggagccagaaaaaaaaaaaaaaaa

SEQ ID NO: 6454 - DNA, 618 bp, Canis familiaris
  misc_feature (1)..(1): n comprises a, c, g, or t, or includes no nucleotide
ntcaactcgttgtacggtaacccagtgcactgaggttttcgtccaggcggcatgtgctcgaccatccggttgtccagcctagtcggccactgggaaaaaaccctcgcatcacctgcacagacccctccacttacaagcgcagactacagaatcggagctcacgggccccacggaggagccgccccagcacagcccactgagaggagcttcccaggacgcacccaggatgctgagcccaggagccccgccaggctgacatcccacatggatggtgtcctcttcttgccgctttctgtcatataaggaattccattaaagaaggaaaaataataccaatcccacattgtgtatgcacccacctctccccaccccacccccacaatcgcccaaaccgcatctgagtttttccctcctcgatgcccaagcaaagcaaacctattgtaagccactggactgagtttagagacatttctccaatctctcgttgtgcctttccagggaccagagcagggacagggggagaaggggaggggttaagttaaataaagaagattattttttgtttcctgactttaaaaaaaaaaaaaaaaaaaaaaaaaaaaaaaaaaaaaaaaaaaa

SEQ ID NO: 6455 - DNA, 543 bp, Canis familiaris
agctgctccccatgttggcgcccattctgggcccctgacgactttccctcactctcacacctttggtcaccgctgtccttcgttggtttggacccacctctctaacctctacctgtgaaaattccatccttctgtcaaaggcccagttctcccctttcgtattccttcaaccaatgttgtcttttactcgtatgaatttgttcatttacccaacatttattgagaacggtcatgtgctaggccctggggattctccagtatgcaaaacagatcaacaggtagctgtacacggcgttgcctttatctttgggtttgctatagctgtggctttacaactgaaaaaaaaacacaaaaaacaaacacccaccttagtatatataaccctgacataacacatacacgtaatgatttaagaagcaatatttgcctttatcatatgtaatcactctgataatttaaactcgattcactttcatttcaatcagcaaatgccaactgaattggttttatagcctataaatattttggaacattcaaaaaaaa

SEQ ID NO: 6456 - DNA, 627 bp, Canis familiaris
gaatattatataaatacacgatataatatctgcagaatctgacagttcctctgtgttcatttgcaatgttcacatgctactaccattcacactgagttttaatttgaattagtaagtgtgaattctgtcaccatacactaaagttgtgtgtttttggcactagggacttggataaagcctgtacatgctttaaaaatatgtttagaattgcaactaagagcaaattgttattaacaccataattatgaggttaccatttatctcccattcactatgtgctaggggccattctaaggattcacaaacaatggctcatttaatccttactgaaatagctaagaaatagttcccatttgacagatgaggatactgaggctcaaagtaagaattagcagagctgggattgaaattcagatccaaaggcactgctttcagcagtgatcataaatgtggctcctctaagaactagatgtcttttttccaggcatcatgtatttgagcctgtcaggagcaactctcatttctcttgattttgctttcatgacagccattttcatatgtcactgccacctttggacattgaggaaagaaaaggcaaatagtaaacccactgatggaacaaaaaaa

SEQ ID NO: 6457 - DNA, 610 bp, Canis familiaris
caaatttttttccctggagaagccagaagtccagacttttatatgaaatcttatagtttttaaatattggcaacagatgatttttttaaaacactgtgcaggccaaagggcaaaccgacatgtcagtaggggaaatctggcccactgtggccagtttgcatcctctgatgtaagaacatgcattccttgtcctttcagtcttgagacgactcctccagggttgtttgtccctctgcagggccggatccatagggtctgacccacagagcaggctcttgcagggctagggacgggggaggcagcctctcagagctgtcggtggcagggatcatgaggctgcctgccccagccttgcagcattgtcaggctgaatggggcaaatgcggaagagttggaacccaccagcagctgctctgtggagcaaagatccaatgaagagaggtggactcacctcgggttcctgggttcgcccatcgtcccgtcctccatgacaacctactgacccctggattacccccagctcctgggatcatttgaagcttggaatggcaataaacctttttaacttgctgagaaaaaaaaaaaaaaaaaaaaaaaaaaaaaaaaaaaa

SEQ ID NO: 6458 - DNA, 575 bp, Canis familiaris
  misc_feature (46)..(46): n comprises a, c, g, or t, or includes no nucleotide
caaaagatggagaactcgggggcattctccagatcattcaggaaanccctggagatcaagtcctcttttcgcttcatcccaatagtgataggaccggatgtctttaaacccagcggcggaaaacacaccattatgattctcccaggttggtgaggacacatagacaggcgtgtccttgttgttcgttccattgtaccatcgtgctaagaactcggctccgattcgaagtgcacctgttccccccaaagactgcacacctccaacccgcttctcctggagagctgggctgtcatccccaagaacaaggcgggaagcacaggtccggaactccgctaggccaaggatcggcaggtactcgtggtttaggctatggtcattggcaatcttctgctccaccttcctcacaactggcaaaacccagggctggcaatcgtctgtgcgataagctcccactcccaggttgaccttgcgcgggtccggatcctcccggaagtcggcagtgagcttgaagaccagcaccggctgggcctgcggcacctcggcgaacacggacggaggcgccatggccggagcgc

SEQ ID NO: 6459 - DNA, 585 bp, Canis familiaris
caacagtggggtcacaggataaccaaggagagctctgaagagcccctctcagaggagggtcaggatgcccccatctacacagaatttgatgaggattttgaggaggaaccggcatcccccataggtcactgtgtggccatctaccactttgaagggtccagcgagggcaccatctccatggccgagggtgaagacctcagtctcatggaagaggacaaaggcgacggctggacccgggtcaggcggaaacagggaggtgagggctacgtgcccacctcctatctccgtgtcacgctcaactgaaccctgccacaggcgggaagaagggggctgttggctgctgcttctgggccacggggggccccaggacctacgcactttatttctgcccccgtggcttcagctgagacctgtgtaacctgctgccccccatcccactcctcatcccaaatggacccgctgtgccttccaccattgatgtacatactcgtgtttcagatcttttcttcctgccgctgggctagggccattttgttttatataaaaaattctataaaaaaaaaaaaaaaaaaaaaaaaaaaaaaa

SEQ ID NO: 6460 - DNA, 617 bp, Canis familiaris
tatttttctgatacctacttacagatgtttttgttccttaattcttgtacgagagctgaccccagaacagtgggctactgtattatccccatatgcttggcagttatttgcaatcgccaccaggcatttgtcaaggcttctaatcagatcagcagactacaactgattgacacgtaaaatcagtcaccattttttcattacagttaaaaaactgccagtaccatatggagcccgatcacaagactgcagtttctttgcagacctcaggaagttgtggtgggacagcggctttctaaaaagtgtgactagggggctgtctttatctgaataataatgaatttttaagtgaagcccgagatacagtactacaaaatcatgttgatgacttcagattttggaagtaaaatcgtgtctgttatttgcattctttagaaacttgaataagtacctgaactcctatttttattctactgtgcaacatagtgatgattcagaaatttttcctatggggaaaaatgaatatgaacatttccattgtgcttaatgtaaaaaggtcccaacatggtcataaaatttaaattttataccaaaaaaaaaaaaaaaaaaaaaaaaaaaaa

SEQ ID NO: 6461 - DNA, 608 bp, Canis familiaris
acccatataagtattttttaaaggttgtatttttcaaagtcatacgatgattgttcttgttttcgctcatagaatagattgttgtgggataaagagtggtccctagcttctatttttcccattaagtagaacatgttcttgggattatactattaaatgttaattttctcttaaaagaaagaagaaagatttctgtctgccaaagttttacgttaatactcagattggggtagaaaacaaaaaagtgctaggtttaacactaggatgactcaggttgtgttcctctaggtttaaaaagggttttcccacccttcttaggggggcactgactgttttaaacacagagacttgattggttgggtggttttgtattgattatcctgaaaaaaaaagctgttgggaagaaacgctggccttggtgtgaatgttagccccacccccagtgccagcatccacagggcgttttcctcaatcggtgttcagtatattgttttccatgtgaatgttattaattggttcagttattttggcctttgtcatttagccaaataaaggcaagtggttttacctaaaaaaaaaaaaaaaaaaaaaaaaaaaaaaaaaaaaaa

SEQ ID NO: 6462 - DNA, 628 bp, Canis familiaris
  misc_feature (1)..(1): n comprises a, c, g, or t, or includes no nucleotide
nggggcctgctgccccgtgtcgccgctttcgttggaggtgattgtgccatctccaccagttgccttggcccgctccctgcatccgagcgtcctgatgcagtctgcagctgtctggatgggtcagcctaccgcttcgaggtgcccgccgccaagttccaggagctgcggtacagcgtggcgctggtgctgaaggagatggccgacctggagaagaagtgtgagctcaaactgcaggactgaccgggcttgcagccccaccgcagtcacgtgggaggagccggcccttcctggaggcgtcctcagtgagatgtaagaatctcatcatgtcctactcggttcagttgaggaggttgtattttccctttttattgcaaataaagcaacaacaaaaaaaagtgtcctgggggatccctgggtggcgcagcggtttggcgcctgcctttggccccagggcgcgatcctggagacccgggatcgaatcccacatcgggctcccggtgcatggagcctgcttctccctctgcctgtgtctctgcgcctctctctctctgtgactatcataaataaataaaaaaaaaagtgtcctgggagggcatcacactgcgaaaaaaaaaaaaaaaaaaaaaaa

SEQ ID NO: 6463 - DNA, 589 bp, Canis familiaris
cattattctcctattcagtcctcctaataaacgggtcatttacactatccaccgctaattattaaaccccaggacaatatatgattaatccttttccggcctgacccccctagcccccatgatatgattttccaatctctacccctagctagaaactaatcgagcccccttcgacttaactgaaggagaatccgaactagtctctggatttaacgtagagtatgcagcaggtcctttcgccctattctttctagcagagtacgccaaatattattataataaacatcctcacaaccattctgttcttcggcgcattccacaacccattcataccagaactctactctattaacttcactataaaaaccctcttattaaccatctgcttcctatgaattcgagcatcataccctcgattccgctacgatcagttaatacacttattatgaaaaaattttctacccttaactttagccctatgcatatgacatgttgccttacccattatcaccgcaagtatcccaccccaaacataaaaaaaaaaaaaaaaaaaaaaaaaaaaaaaaaaaaagaaaaaaaaaaaaaaaaa

SEQ ID NO: 6464 - DNA, 516 bp, Canis familiaris
attgttgcatggttttggatagcacataagacttttatttgtttatctaatgcatcaagagtgtccctaacctgggtgttgaacaacttgatgtcgactgcatatggaagtactgttcttgtgtcttctcgccagtaacctactgtagtcccagttttataatgcagtatcagtggaattaaacaccatagaacttgaaagccatccattgccaaaagtagttgcggtcaggtagttttattatgtaaatttgcacaattttggaaaaatcccacaacaagttctactctggggttaggagggcctctggtacgataaccatacaaatgagcctgaaagaatgctactattaaacgagtatatcagttaatttctggaatcttaacattaagttccttcacctctgaacatccaagttctctgtctgtgtgcactgacaaaattgtatttgtttgcctttatgtttaatgctaataaaatagattctaaagttcaaaaaaaaaaaaaataaaaaaa

SEQ ID NO: 6465 - DNA, 572 bp, Canis familiaris
agcctgccagatatgcaccccacccagccccattgctatagtgactaacccacagtactacggttgaaatagaaaggctattaaaaccctttcctatattggccagctcctctgccctagttaaatgctgtcttctggatgcgcaagcacacacacacacacacacacacacactcacgcagagtacaaatgtgtacacacccctctttcaggctaaaaatagcaaactgctttaaaccacagttacagtttcacccaaagcatttgcacttcttttttttcccttttatctcactgataagcaaataatatggtaatcttctcaagacactcatgacttgttaaccgtaattgatatttccaactatgttatttacatgcttgaataatctaagctctttagttaggatgtgaaaaagagctagatagtgtggcattttgttttgttttaaaacatcacttccaaacaatttagggaactgttagattttatgtgagaagactgcttagtgctccagtgttgagatacttgttatagtgtgtgtcaaaaaaaaaaaaaaaaaaaaaaaaaa

SEQ ID NO: 6466 - DNA, 303 bp, Canis familiaris
atgtcccgattttcttcatgctggtcatgacccgaaggagtggattggcgcgtgctgtatgtcaggtgtttttaacttgatcatgatcggctctgaggtgcagctttacttcccacgtgtacatacctgtgaccactcttgggagtgctgcagtctaatcatgctgtctaaacttgtggcacaagttctcttgtcgcgaataaaatttattaataagattatatagagagatatatacacttctgattgttttctagatgtctgcaaataaatgcaatttgtgacctgtaaaaaaaaaaaaaa

SEQ ID NO: 6467 - DNA, 538 bp, Canis familiaris
agcagccctacctgcagcagccctacctaggagcagccctacctggagcagccctacctgcagcagccctacctagggagcagccctacctaggagcagccctacctggagcagccctacctgcagcagccctacctaggagcagccctacctgcagcagccctacctaggagcagccctacctaggagcagccctacctgcagcagccctacctgcagcagccctacctaggagcagccctacctaggagcagccctacctaggagcagccctacctgcagcagccctacctaggagcagccctacctagcccgccatgacacagggtagaggcgtggcccagctccctcgaccgcccgccccgcccctggggagggaccggcaacaagaccccggccacatgcactgggccctggggacacaggaattcccaaagcagccagcctaggaagcagcaatcaagggcctgggcagcggcaggtgcctggatctcgggcgttggcgccgacctggggtttccgagggggggacggcacc

SEQ ID NO: 6468 - DNA, 619 bp, Canis familiaris
agccggtttgctttcttggggaggctggaaaagattcatcccaactggaaaaatgtttattcttgtctgatggagaaggaaaaaatggaaccattgagttgatggagccccttgatgaagaaatctctggaatcgtggaagtagttggaagagtaacggccaaggcaaccattatgtgtgcatcatatgtccagtttaaagaagataaccatcctttcgatcttggcctttacaatgaagctgtgaaaattacccatgagtttcctcagttttttcctttgggggttgtgcaatatgattgatcttgatgagcacattgaagactgtcatagtaaacccctgatatttgagggagatttctgtgatttttaatatttaacttgttctcttttttatttcatttacctaaccttatgaggtactgcaatatcccacttttgatgaaacctgtctgtatattgaaacttaagtcctcctaaagaatcccatctccagtaatatggtcagatcagatgcaagaacaaagcagtcaccttgaatttagttttctgttttactaataaaagctgaaatggtacatactgttgataaaaaaaaaaaaaaaaaaaaaaaaaaaaaa

SEQ ID NO: 6469 - DNA, 581 bp, Canis familiaris
ctggttaaaaggatcaacagacatttcgacaagaatggattagtaacttggggttggtctactagcattaggagcattaggaatttcttaaccgtatagaactaggcattacacaaaatcaggttgatgaaaatctcatgaaaattatggtatgtgggtatcttgtgtaccaaatactcccatgagattaagtacaaaaagaatttccagcaaaaaaggaactcttcttgcttagaaagacaaagccttgcaaactcattgtaaaagtgaagactttgcttgcttctttacccatttatagacttgtttttaaacattcataatgataaatttggcaagtcatttaaaaaatacctgtttttgtacagtcctcttaaatggtgttaaacaaatttaattcatcctaagaaaataatataaaccaccagaatgaaaagttcgtattatgctatgctgttaattctgtttcatcattatgtagaataatagctttagagatatcttgaagacattgtattcccacttgtggttccaacagaattttgtggttcaactggactttgttttaaaatcaataaaag

SEQ ID NO: 6470 - DNA, 592 bp, Canis familiaris
ttattggctgtcttgaggaacctttattgacgctgagggtcattcactgattgcgggcagcttgcaagaaaggtgcttgtggaaggtaaggctccctagtggacaagcgaagatggatgagcgtgttccgtgctgtgggattgagttaatttgcttggttagcaggtatttgtgaccgacgtgatttagccgatggaaccatcttgaagtagctggtctctcaggggtagaagatacttgtgatgaagtatcagccagagtctgaagatgcacagtgacaacaaagtgagaattgcatcacatcttcaacttatttgaaggttcttcatcttaacctgtgcatctcaagttgacattcagaagataaattgtaatgatttgagtatctgaagtatctttggaaaatcccaaccagccagtttttaatgaagagtttaaaccgttttctgtaatcacatgcttttaagacaaattgagtgccatttattggtgaaacatcctgtacagaaactgtatgatgaaattttacttagatccttggtgctgtttcattgttaataataaactcttattgagaatgtgaaaaaaaaaa

SEQ ID NO: 6471 - DNA, 570 bp, Canis familiaris
aatcaatcgcgggggtgactgggcctaatcgcgtacaagcctctttggctaatgatgcttatatcaccttcccccttgcggcagtccctaggacattacagcagcgccgcttctggatcctgcaagatggccccggttgtaaggtgaactccctgtcagtgtctctctgaaacctggcaaatgacacttcccatcgaaaggactcctccctgcccttatacactcccagccaactcccagccccttactgaagtacaagtgcctttattgggagaatctgtcttcctgtcctgccagtcctccctcctgggtgtggccatctttatgggtgtgcctatgtccccctaccttctgcagtacccaacaggagacactgttctgcctggactatgcgcccacttaagccacaaaataaggggaggagggagcctcagatttcagactctaggccccaggctgtgacctgcaccaaataaactcctcagtgtgggggggatggttctgtggagggataaataaacagattgttaaaacaaaaaaaaaaaaaaaaaaaaaaaaaaaaaaaaaaaa

SEQ ID NO: 6472 - DNA, 630 bp, Canis familiaris
tcaggcgtatccctcccgcatgcctgcactcaggcatcatgcgaaggactccctgagtgcagcaagcaccggctccacaggagcagcgggcaagcaagggggtgacattcgccggggatgttggcaggatggtgagggcgggcccaagggagggcaagcccatggaatgctgactgcagcttcaccctcctcccatcctgaaggtttcttcagtgctttttcttttccctccagtgaattcagaacagaagccatgcgtctcccccacaccagggcccaccatggagcttgtacactcagaatctgctgaccaacacaactgtgcaagaagaccccagtactgagggagtaaaaagctttcaaaggggcatggagagtcctgcttccataggaaagagccaaacatgtgggaactatttactatatatagaaggtatcagttctgcagccaaccatcctcatgcctccacctccccaggcaagggtcaaccactaagcaatcccactcaagccctgatgcttctagagggcatactcccagctgaccaagtgtatggggtgtactcacactagacttagcaacagcccaataaaaatgctggaaactaggaaaaaaaaaaaaaaaaaaaa

SEQ ID NO: 6473 - DNA, 192 bp, Canis familiaris
tgtatttacacttgtttttatggaaactaggggaaataaaacatctattttaaaaatgtaagccattgttcattcctaattttgtatctgaccaaatgagctgcttaagttccctgaaacaaataaacatctttgtagtttatgaagaaaaaaaaaaaaaaaaaaaaaaaaaaaaaaaaaaaaaaaaaaaaa

SEQ ID NO: 6474 - DNA, 663 bp, Canis familiaris
cttcgcccggtccgggggtcgggccccgtctgctttggtgactgctagataaccctcgggccgatcgcacgccccccgtggcggcgacgacccattcggtacgtctgcccctatcgactttcgatggtatccccgtgcctaccatggtgaccacgggtgacggggaatcagggttcgattccggagagggagcctgagaaacggctaccacatccaaggaaggcagcaggcgcgcaaattacccactcccgacccggggaggtagtgacgaaaaatgacaatacaggactctttcgaggccctgtaattggaatgagtccactttaaatcctttaacgaggatccattggagggcaagtctggtgccagcagccgcggtaattccagctccaatagcgtatattaaagttgctgcagttaaaaagctcgtagttggatcttgggagcgggcgggcggtccgccgcgaggcgagccaccgcccgtccccgccccttgcctctcggcgccccctcgatgctcttagctgagtgtcccgcggggcccgaagcgtttactttgaaaaaattagagtgttcaaagcaggcctgagccgcctggataccgcagctaggaataatggaataggaccgcggttctattttgttggttttcggaactgaggc

SEQ ID NO: 6475 - DNA, 535 bp, Canis familiaris
  misc_feature (181)..(181): n comprises a, c, g, or t, or includes no nucleotide
tgttcgcccttctgcccagaatctgtcaaatggcaacctttttgttaagcttcaaccaaggcttccaagttgaacaatgctaaaaggattgtgtgaaccgtaatatacgcatagggggtacccaagacctggaagtcaaagtgaatggaatttgatcttacaaggcgtggttatggcacangatcaacacagtaaggcgaattgcccctgaccagataacacattggattgctcggtctcttggtaaatatggcatcatctgcatggaggatctgattcacgagatctataccgttggaaaacgtttcaaagaagccaacaactttttatggcccttcaaattatcttctccacgtggcggaatgaagaaaaagaccacccattttgtagaaggtggagatgctggcaacagggaagaccagatcaataggcttattagaaggatgaactaaggtatctaccatgattatttttgtaatctggtcagttaataaatgactactttcaaatggaaaaaaaaaaaaaaaaaaaaaaa

SEQ ID NO: 6476 - DNA, 597 bp, Canis familiaris
ataaataaataaatgtgtgttaaaatgtgataaaggaatatatgtgtggtgcctggatggcacagtcagttgaacatccaactcttggttttggctcaggccgtggtctcggggtcctgggatcaaggctcaagtccagttttgtgctcagctcagagtcggcttgggactctctccttctttttaatcttttaaaaaaaatttagacaatgcaataaatgtaaattggcttttacagctttcttccacactttcttggttctgaagaagggaatgtaattgctttaaatccagaaagttataaaatacagtcttaaatgcttctagcttcctaaggtttcttctgggtagtttataccaggactgaatgggatgatgtatgcgaaagcacatcataaactgttatatacctatgtgttatttgttaatgctcttattgaaagggaaaagctgtcttggaagggcagtcaagttctttagcctgctaggtattcctgcttgggagagtcctatgaacttcctacctcagacatactatgggaatgtacatagcaaccctaaagagaaatgagctcaaaaggaaacagccaaaaaaaa

SEQ ID NO: 6477 - DNA, 646 bp, Canis familiaris
ctcccagtgatttctggacaggcagccgttccgtttttcatttcttgaagttactttgttttcttgaagcttccagggttttttgttttattgccaaaatagaaggagcagacagcagatggggaacactgggccccagccccctcattggtgtgagctggtgagaacttcatggttggtactgagctgggcccagctccgtgcacagctgaccgcctgaccagcccttctcagaggcttcctgccactccccagtctgtcctcacaccagtgacgcttgtgaacagagatgttggagacctttaccatgactttgctacatttgattcttctggacttggttgtccctgggtgtcctgtgtggtcagttgtgtttgaacagccttgacactctagactgtgatgtgagaccccagagggagggtcagagtgctgtctggcttttcttccacaatgccggcctcgccttactccctggctgtggtcgctcagggcaccacatgctgggggttcagagaagaccccgactgccctggtgcccactgggcaccaagctccatggctgtggctcatcaaagagcagtgggcatgtttgcccgttttcctaaaatgctattgtgagtaaacacattgatccctgagaaaa

SEQ ID NO: 6478 - DNA, 501 bp, Canis familiaris
catgttggccttcatcgacttgagacgacttttggatctcgtcatccagtgggattggtcaacctaccttgctgactatggtcagcccaactgcaagtacctgcgggtaaacccagtgacggctctgaccctgcttgagaagatgaaggacaccagccgcaaggacaacatgtttgcacagtttcggagaaaatggacgagacaagcagaaattgatcgacactgtggccaagcagctccggggactcatcagcagccaccactcatgaaggctggcctccagcccacagaggccacccacgacagccccatagtccaggacccagccctggctgccctgcatttgtgcattcttcttcaaagagagcaaatgtatttttttaataacatatgtacagtattcgcataatctttccctatagtaaaagaggcacacaggaaaagccaaaaaaaaaaaaaaaaaaaaaaaaaaaaaaaaaaaaaaaaaaaaaaaaaaaaaaa

SEQ ID NO: 6479 - DNA, 599 bp, Canis familiaris
gttttggggccccttgggccaatctgttgcaaccctgcgccttacccttgggctcccctggttttgatgtccggatgttggatgacacccacaagaggatcaagggcttacgggcattgggcaataacactgtccaacaaagtggttccagagctcagctggggccagtccactgggtcaactttttggaatgttgggatctttctatcgtctcataggctgaggcaacacccctggtggacccacatagctttcctcaagattcctcgctcagggtgccagccctgatgggagatgagggaaggccctatctctaagtcttgacccctctccatccttgatccgcctgacacccctacacacacacacacacacacacacacaatttccatgcctgtcgatccccactacaccacaaggcgggaagggggtggtccctgctggggcctagagatggaggatgcttggggaagcagagaggggtagatccagggcctccccgccttccttctccctttttatatacagtttgttattgtcaaataaaagtaggaaagataaaaaaaaaaaaaaaaaaaaaaaaaaaaaaaaaaaaaaaa

SEQ ID NO: 6480 - DNA, 637 bp, Canis familiaris
cacagcatccacgatctcttcctagtctctgttacaggaagtttttaatgtcccagttactcgttcatggaatgacatattttgaaccagtaattttcttgaccagaaagaatgtatagaagcctccttgcaattaaatttccaatgtttacattttttgtaactagacctgtgggatttctgcagattaatatggaacggagctcctggtctgtgtatgtgtttgacgtgttgtagccgaagccttgtgtgtcttttaaacactagttggaaagctctccaataaaatgcccgttgctgacagcccagggaaccggggaggaggagcctcgagcacagtctcacagtttccactaatgcctttgtaacctgcagttaccttctgtttttacatctcccttgggagcagatgtccgggctggcagctgtgtagggccctcctccactcccgcgcgcagggaacgagggctgctcctcctcatcccctcgcccttcagtattttcatggatatgaatgtaagatatataaatatataaacctgcggctttaacaactgtaatacaaccttttgaattagttacgtgtatagataattaaattcttcatataaaagttaaaaaaaaaaaaaaaaaaaaa

SEQ ID NO: 6481 - DNA, 631 bp, Canis familiaris
cgaaaacacacaggagaaagccctatcagtgcaaggagtgtgggaaaagcttagtcaacgaggtagtctgccgttcatgaaagactccacactggacagaaaccctatgaatgtgctatttgtcagagaagcttcagaaatcaaagtaaccttgctgttcatagaagagttcacagtggtgaaaagccctatagatgtgatcagtgtggaaaagccttcagtcagaaaggaagcttaattgttcacatcagagtccacacaggcctgaaaccctatgcctgcacacagtgcaggaagagtttccacaccaggggcaattgtatcctgcatggcaaaatccacacaggagagacaccctatctgtgtggccagtgtgggaaaagcttcactcaaagagggagtctggccgtgcaccagcgaagctgctcacaaagactcaccctttgaccactctcttcaaaggaagttttctttatgaattaaaagtacaaaatcctcagatcaagcaacctatccaattctatggaatgaatggagactctttcagaaagaccatcattgggtagggcaaactgacttttccctttccccccaaataagtatgaaaaataaatgtcttgtttattatcat

SEQ ID NO: 6482 - DNA, 564 bp, Canis familiaris
ttcaggtattcttttaaaatttcagcctaagttttctaagaggtatgttgaaataaattgcttgaatccagcttaagggtcatggcagccttagttttgggggaagcaatggatctgaagggatcaaacctctttcagcaatgccttgatagatgtagtctccactttccaaggtgactgcctccaagtgctctgtggctgtgatggatcggctgcttcacgctgcaggtgggcaattccgagcttggtgtgcagctgaactgggccggctgaccctcgggcaccttccactcctcatcttcttcttcctaaggtcacttcctaagagggtttctgtgatctttcagaaaccaaagtgcatagctttgctccactatggaagttctgcaaccttgggaatcattaccagtatcaactattagttgctttttaaagcctcaaaggtggagtggggatagggggcctggtggaagcctggttcttactttaccccaactgtgtataaagaataaagttagcagaaaaacacaaaaaaaaaaaaaaaaaaaaaaaaaaaaaaaaaaa

SEQ ID NO: 6483 - DNA, 586 bp, Canis familiaris
ggccaacactaagatggccccgccgcatacacacagtacgagtccggggaggcaataagaagtaccgagcctgagggctagacgtgggggaacttctcctggggctcggagtgttgaacacgcaaaaccagggattatcgatgttgtcctataaaggcaatcccaaacaaggaactggtccgcaaccaagaccctggtgaagaactgtatcgtgctcattgacagcacaccgtaccgacagtggtacgagtcccactacgcactgcccctgggacgcaaagaaagggggccaagctgacgcctgaggaggaagagattttaaataaaaaacgatcaaagaaaatccagaagaagtatgatgaaaggaaaaagaatgccaaaatcagcagtcttctggaggagcagttccaacagggcaagcttcttgcatgcatcgcttcgagaccaggccagtgcggccgggcagatggctatgtgctagagggcaaggagctggagttctatctgaggaaaatcaaagcccggaaaggcaaataaatcttctgtcttcggtcatgtaataaaggtgtttattgttcaaaaaaaa

SEQ ID NO: 6484 - DNA, 527 bp, Canis familiaris
gtccccccaggcctgtcaccccagaccccaccacccagccctgccccctgccgaaccccaccaccctgaaccctgccaccccagccctgcttgccagtcctacctgttttcatcccgatgctgtgcccctgatgttgtgcggtcctggtcgcagcttttccgcatctgccttcgttccgtgtagattgatgcgtttctttgtaatttcagtgtttctgacaagatttaaaaagggaaaaagaaaaaaaaaagaaaaaatgaatttactgctgcaggtttttttctctctccatgtgtcactaagtgaagtttgtgccttctatagcacaagagaatattttttacatcctactaacagtagatttttttgtagtgaacattttttgtatttttatttataagtctcataagaaaaatagcaatgttcagttgtataccttgaatctgcagttagaagagaataaagttaattcagttgtcaaaaaaaaaaaaaaaaaaaaaaaaaaaaataaaaaaaaaaaaaaaaa

SEQ ID NO: 6485 - DNA, 584 bp, Canis familiaris
  misc_feature (141)..(141): n comprises a, c, g, or t, or includes no nucleotide
tctgaactgtctccatttattcatccatgatttagagtggttgaactgttctgttaaatgttaggttgagactgactacttattgagaatcccacaccgtttccttaagaccccatgagactccaggcctcttcagttagnccctggtttctctgcgtaaaattcaccctcagtgtgtaaggcttctggatttcagagtcacttgtacttaggtccaggccattctcaaataaggcaagaagcatctgctgttaatagttgacagtaaattacacaaagtaaaacatggaaaattaaagttagaaaagctggggagcttttctatcattttcaattttctgcacaagcacggacataatcagtgtttaggatctgcttgtgacggataaattacatctgtaattcattcttttccatgttactgcattcagacgataatttgctttcagatatctttgctcatctaatattctaaaatcgttcataggctgaaaataagtctagttacatctcccagtcccaggaagcttttaaaactaaagagtgttagcttacccaacaggtcaaatttaaaaaaaaaaaaa

SEQ ID NO: 6486 - DNA, 557 bp, Canis familiaris
ttgggccgtggcagctttgtgtacggatcctcatgaaaagtatggtaatcctagtggaattgaatcccgttcgagtaacaggagaaatgccaatacatgtgatatctccgcaacaggaggatggagagctaaagtcccaggagaggatcagagaaccaccaagcccgcctatgagctcaaccgggaagcctgtgatgacttcaagctttgcgaacgctacgccatggtttatggatacaatgcgtgcctacaatcgctatttccggcatcgccgaggaggcaaatgagattgaaaaaagtctctttccttccagagcctggtgcctggttttgtattcctttacagtagcatcatcgaactacataaacacatacaaattgcttatttcttaaatgttcttgtctggctgttgccctccttcctgccccccagatcaataagcagtgaaagtgcaatgtggtgaaaggtcaaaagagaattaagatgtgtgattattattacataataaactcttggatggataaaaaaaaaaaaaaaaaaaaaaaaaaaaaaaaaa

SEQ ID NO: 6487 - DNA, 592 bp, Canis familiaris
caatcgcttgggtaaaccgagggtgtaaatgcagacaaggttggaattgaagctgctgaaatgctattagcaaatcttagacatggtggtgctgttgatgagtatttgcaagaccagttgatcattttcatggcattagcttgtggagtttccagaataaaaacaggaccagttacactccatacacaaacagctatacattttgctgaacaattagcaaaggctaaattctctgtgaagaaatcagaagatgaagaagatgcagctaaagatgcttatattattgagtgccaaggaattgggatgacaaatccctatctataggatatttgccttttaaataatacttcaatgatgtattgcactaattcatttcataaatactagaaaacaacgaagaagaagtaacttattaaaggacctgacataaatatggagatgaagtatagagtgttgtagatttgcggagaatgcttcatcaaattaatctcactttgactatctcctaagataaggacaatgaaatataagagttgatgagtatgtatgatggctgatttcaatattaaagtattgagatggaaaaaaaaaa

SEQ ID NO: 6488 - DNA, 488 bp, Canis familiaris
atcggcattatcctcatgcgaccatacattctcagaagatggttcggcaaagcgcttgacgcccaccagcgcttcccaattcccaccggtcttagagattccgtccaaggagcacccctatgatgccaccaaggactccaatcctgcgcagggccaggggcataagttcacggccgaggacctgcgctagagccctccccatagccatgcagcctttccccaggcttgccttcagcccgtctctgatttcccagccccctgccccttcccaacccactgagaggctaggtgaggtgcttccagattgctggggctttgccattaaagtcaaggctggttagggacaggaagcctgagtatcttctctccactacatcttccctgtgctgttacacagtgtctctgttcatgttaaattaaagcaacattcccgtttctctcccaaaaaaaaaaaaaaaaaaaaaaaaaaaaaaaaaaaaaaaaaaaaa

SEQ ID NO: 6489 - DNA, 533 bp, Canis familiaris
gcgaacctagtgtggtggttgtagagcttctcgtgactgatcctgccttggggccgcttttgctgttcgggacatgaggcagagcggttgctgtgggtgtcatccaagcagtggacgagaaggcagtctggagctggcaaagtcaccaagtctgcccagaagctcagaaggctaaatggatattatccctgaatacctgccaccgccagttttaatcagtggtggaagaacggtttcagaactgtttgtgtcaattggccactttaagtttaatagttaaagactggttaatgataacaaatgcatcgtataaaccttcagaaggaaaggagaatgttttgtggaccacattgtttttttttttttttttttgtgcgtgtgtggcagttttaagttattagtttttaaaatcagtactttttaatggaaacaacttgacccaaaatctgtcacagaattttgagacccattaaaaccaaagtttaatgagaaaaaaaaaaaaaaaaaaaaaaaaaaaaaaaaaaaaaaaaaaa

SEQ ID NO: 6490 - DNA, 562 bp, Canis familiaris
ttgaacctgtccgtcaagtcctgcttagccagagccaaatgtctctggggtaaaggttgaattggttacttgacggcttgggccaagcccactgtatcactgtcatcttcttctgggatgggagtccattctgaatttgtaggcattttttggcacattcaccttccacatctgggctttccctagagattgccttttccaagaggtaagacatctctggttttccaaaggccgctggaaacttcatgatatcctcttggatctgcctgcctcccagcctgatgtagctaccttctcctcctcttcctcctcttcctcctcctcctcctccccggcggagctgtaggcctcacagtggagacgcggggtcatccgcgggcccgttaccacctcattttcctcagcgcgcggcggccgggcgcgcgggacgcgggcgggaccgactgaggagggagaagagggggaagcgggcgcgggcccgggccggggagcggggagcgggcggtcgagcgggacgcagggctgcggccggcgggtcagcgcaccagctccatgactgccc

SEQ ID NO: 6491 - DNA, 633 bp, Canis familiaris
gtgtctgaccgtgaccggcaacctcatgggggacatgtacctgccagaagccaaagagagcttcgggggcaagcgcctgctccgcgggcggacttccacgtgggtgcccacgtgaacacgttctggaggaccccgtgccggggggcagcggagggacccagcaagaagtcggttgtgtgggagaataagcacatcacgtggttcgccacactggatgggggcatcgggctgctgctgcccatgcaggagaagacgtaccggcggctactgatgctgcagaacgcgctgaccaccatgctgccccaccatgccggcctcaaccccagggccttccggatgctacacgtggaccggcgtatcctgcagaatgccgtgcggaatgtcctagacggggagctgctcaaccgctacctgtacctgagcaccatggagcgcggcgagctggccaagaagatcggcacaaccccagacattatcttggatgaccttctggagacggaccgtgtcactgcgcatttctagaccccacatgctgccccgacccgacccctacccccacccctttttgtacaaaacacgaggaaaagatgtttgatttaaaaaaaaaaaaaaaaaaaaaaaaaaaaaaaaaaa

SEQ ID NO: 6492 - DNA, 497 bp, Canis familiaris
tagagaatttgtgctatggacttcggggacaatatctttaaggttgaaaggtaacaatgctaaattgagatcaataacgtcaatatcagaatttttacaatgtaaactgccttttgtgccatacccagaaagatgacagtaacatgaagcattttaacaacaaaagtattaatgaaattctgtgacatcatgtcttatgtctgcttttgctagtgtaatgacagttggctctagactgtaaaaatagtcttcagtctttgggtgtttcaggtgcctgggtggaggagttggttaaacatctgcctttggctcaggtcatgatttcaaggttaggagatggagccccacacgggtggtctccaggctcagtgggggaagtctacttgaattctctcccttcctttgcctctccacctcccacccccatgcttactcatgcacttgctctcttggtctcaaatcaaaaaatcttaaaaaaaaaaaaaaaaaaaaaaaaa

SEQ ID NO: 6493 - DNA, 641 bp, Canis familiaris
gccaagaaaaggaggagactcgcgttgctaagttcccggatgatacggtgctccatcctccccattcctcgtcacagtgttaaggagccaggaggagctacctcgcccggcctctgctttcccatctcgtgtgtcatgagtttgcccagtgccaccactagcctcagctgctgacatcagccctgttaccacatggtccttcagaagagacacttggaggcggggtcttgggtggggagtcgccattgggagggcagactccccagattttggttccagtttctgtcccaggcgcctggcacacacatagccctctcagcgcctggtggctagaagccacctcactttagatcactcaccgggggtctcccgtgttagaagggtccccaccttagatcaatcacttggacactaaggcacgttttagcgtctcttgtcttaaagattatgtccatttgtctgtccatttgtgttttctgcgtcatgtccgcggatgtaatcctcagataatgcacactagcctttgatgaccatgaagcaatccgttacatgagggtctgaacttgtagactctgttcaaatatcaaataaatctataacagaaagtaaaaaaaaaaaaaaaaaaaaaaaaaaaaaaaaaa

SEQ ID NO: 6494 - DNA, 584 bp, Canis familiaris
tggctgcattggccgtggcagctttgtgctacgaattctcattgaaagtttggatcctgatgaaattgatcccttcattaacagggagaaatgcccatacatttatatgctcccgcaaccagagatggaagagctaaagcccaggagaggatcagagtaccaccaagcccgcctatggagctcaaccgggaagcctgtgatgacttcaagctttgcgaacgctacgccatggtttatggataacaatgctgcctacaatcgctatttccggcatcgccgaggaggcaaatgagattgaaaaagtctctttccttccagagcctggtgcctggttttgtattcctttacagtagcatcatcgaactacataaacacatacaaattgcttatttcttaaatgttcttgtctggctgttgccctccttcctgccccccagatcaataagcagtgaaaatgcaatgtggtgaaaggtcaaaagagaattaagatgtgtgattattattacataataaactcttggatggatactttcaaaaaaaaaaaaaaaaaaaaaaaaaaaaaaaaaaaaaaaaaaaaaaaaaag

SEQ ID NO: 6495 - DNA, 580 bp, Canis familiaris
aggttcaaggaaaaagtactggaatagttgagaatttttagtattagaattaggatgtgattaacttaacacctttgttttttatctcaaagacaatgtcttactcatagttgattctgatttgaaacacggtagagggcagccccggtggtgcagcagtttagcgccacctgcagcccagggcatgatcctggagaccctgaatcaagtcccgcgtcaggctctctgcgcggagcctgcttctccctctgcctgtgtctctgcctctcattctctctctgtatctctatgaatgaataagtaaaatttttaaaaaaaaaaaaaaaaagaaagaaacacggtagagcagaaccattcataaatgttgtaaactgaaatagcattactgattggagggaacagactattaatgttagccaactaatggaaggtggttttaaaaaattggtagtgaggcatctggatggctcagtcagttaagcatctggttcttgatactgatcaggtcttgatcttagagttgtgagttcaagtcccacttgtgctcccctctgtgtgggagcctactttaaaaaaaaaa

SEQ ID NO: 6496 - DNA, 549 bp, Canis familiaris
ctccagtgggacgatgcatgatgactctgagcgggtggcacggcgcccccaggactttggaccgtgttgtttgtccagcagaaacacctggccaacgagaatccttcgttgatagtttgcaggcgaaacaaatgtaatgtcgtagatctgcaggcagaagctcgcccttctgtatcctatgtacgcagtgtgcttttccttgccagcttggacatgttcctgcttagacagtcaacgtttgtctcttcctgtttaccgagtcatcatcttagtccgactaaggcagttaatgtaaagcgtagatggaggaaagttcccgcggggaaccaaggaaccggttcttggggcaacgtttatgctttcctcctagtcagcacccagaggaggtcgacgccagagaccaccgctgggtggatgctggcttccagaagggccagagtccctcttttaggaaactcttcagaactgggagcacagtgactgagtttgagctattaaaacccttcttcataaaaaaaaaaaaaaaaaaaaaaaaaaaaaaaaaaaaaa

SEQ ID NO: 6497 - DNA, 642 bp, Canis familiaris
gacaggatggagattgggggtcatcattgtgtggcaaagatcaccccagagacgggagagcaactaagagagcagcaggactgcagaaaagggcatgaagcccacgcgcatataacttgctttgtcgtataatagagatgatctgtcctgttgtcagggttttgagttgtcagaaaacagttgtcaagctttaatacttagtactgtgtatccttttacctcatcagcatagccttagagatgatccccttggtattgtccattatccagaaaaatttcctgtctctacctggatgtcttaaggcctgttgcagtcctacccactcttgtatgtatcatctaaaaaaaaaaaaaattactccaaatactgcatcttatagtcagccttcaatctgggcgattttacccgtgaactcctggtttcaaaaccccctaacctaatatcttctcttcttcctgtaactgtctagaagtacttttaagaattttaccccatttgtcaattatgcctcaataaaggtgaaagaaaaaaaaagaattttactccatctctaaatgcaattggaaaaatgtccttgttgatactctgccgttagaaatggacatggggggtggggattgcggaaaaaaaaaaaaaaaaaa

SEQ ID NO: 6498 - DNA, 513 bp, Canis familiaris
attttgtccttgctcccaatgaaatggatccaccgtgaagtttaccagtctataccatgctactcatggattgttgttgtgttagccagtctggaagcccaccttgaattttgtatataatcgtctttggctcttcccgtcggggcaggcttggtcccacgctgtgccctcctgactgttaaccccaagatgcatgcaccgcccttcttcctactcttctcgctccccccttgacctgagtctcttgtgcatcttcccgctccctccttggttagaataagtctatcagctgtgtaaatagagcaagaaaaccgtattctgcatctgtggcatttacgtagagttgcggttgtatgctgctgacaacgcaggcttttgtaaaaaaaacaatgtgatcttgactgatgcactcacaacaagtacccagtgtatttcagctattttagtagtatttgttcaataaacatgcaagctgtaaggtaaaaaaaaaaaaaaaaaaaaaaaaaaaaaaaa

SEQ ID NO: 6499 - DNA, 640 bp, Canis familiaris
  misc_feature (1)..(1): n comprises a, c, g, or t, or includes no nucleotide
nggctgtcagacgacaaactctcttccagcaagatggaagtgcataaacctcagagatgttcgaaggcctttcttcttttcttgctgggaaaagctctcctctcaccaggaaggttgtggatggtgccaatcgggagtgatgatcatcacagatgggcaggccttgaacctccacatctggaggtcaaactggaccaaaggtcgaggagccaggaggcacacaggctcccaaatgagcttggacatgagcaccaggccctagaaatttctagacaatcactagaaggtaggggccagaagagtcatacaaatggattatcagagggatccctgggtggcgcagcggtttggcgcctgcctttggcccagggcgcgatcctggagacccgggatcaaatcccacatcaggggatccctgggtggcgcagcggtttggcgcctgcctttggcccagggcgcgatcctggagacccgggatcgaatcccacatggggctcccggtgcatggagcctgcttctccctctgcctatgtctctgcctctctctctctctgtgactatcataaataaataaataaaaatttaaaaaaattaaaaaaaaacaaatggattatcagaaagaatacaaaaaaaaaaaaaa

SEQ ID NO: 6500 - DNA, 501 bp, Canis familiaris
taaaataaattgctggatttgataaatacctgacgtgaaatatgtgtgttcagtcatacatagtctggtcatagaactatattttacaagatttccagtcattgtcgttccggaacactgtgaactgcatgctgacatttcatgaagtgcatgtttctcttctgggaaatgtgtattgttcatgtgaacctttggatttactgaatactatgaatactattagatattcatggtgtgaattccgtttaaagatagtattgttcttggacctgtatccattgtaccttgtatatgcttgactccagttcagcatccagtagttgttgaaaggatgagcaaaatacattatctatgtaacaaaacagtaagtatacagaaagtaaaatatgttaacttgttctttgttttatgtaattaaattgtcattaatagtctaatggttgtagctgtatagtgacctttttaaaaaaaatatatatatattcatatatacccaaaaaa

SEQ ID NO: 6501 - DNA, 675 bp, Canis familiaris
atgagaagccagaaatggaacgaggggaaataaggtcagggaaagtacatcaggtagaaaatgaaaagctaggacaaccgctgaatataggcacataagatagacgtcaaaaaaaagagaagtttaaagccaaaaaattggaaaaagtaaaaacaggaaaactaagaatttttaagtagttatggaatctttccaaaagcccatgaatttaatttctggtgcagaagctagatttgagggtgataaaattactgtagaccgagacccagcttagcccaggagctagaagggaaagataaaaatcagattaacagcgtttgctacccaaaaagacttaagttacttaagtagaatatttctggagttaaaaatgtgagggtcttttaaatatggtagcttttagtgttcttggagagatttaaaggactttcataactgaagtaaatgccaagaattccaggattactacccactttacattctcccattggactttgagctaagatggttttttaaatcctgaggactagcgttaattggcagcagacccaggtactacgcagaagtggattcagtgaatctaggaagacaggagcggcagacaggattccaggagccagtgtcggtgaagctaggactgaggagcgagctgcagttcgtggtgaaaaaaaaaaa

SEQ ID NO: 6502 - DNA, 592 bp, Canis familiaris
tatcttcttccttcgggctctgtcaagtcctggtggtctttcagcgccctcaaacaactgtatctaactgcatgtgctgttgtgccgatgctctctaaagcatgttaaacagagatggtgactaccttacagacgcgtccacgtgcctgacttaacgtttccagctatcctctccattgggcctgttccctctcaggcctcggcctcttcttcgtctccttccgtcttcactgagggattcctaagtgggcccggatctgcctgccctctatccttgagcctgtctcagccctagccctgctccttacttccgggcccctttgccaacccatagagggaggactgccacccactaagcctcctcctggaagcagctttgattcagccgccggcctcagcctggctcagcagctgcaccagagttaaagtacagatagcgtgagaggcagaggactcgagggggaggggagccaggaagaatctcggatccaagattctgtgagtacctcacagggactgtgtgattaatcatttaaactggtacacaaaaaaataaataaataaataaataaactgggaaaaaaaaaaaaaa

SEQ ID NO: 6503 - DNA, 661 bp, Canis familiaris
  misc_feature (439)..(439): n comprises a, c, g, or t, or includes no nucleotide
gctttttgaagacgacagagaagacagacggccagggagagtcagatataatgtccacacttcccgggagcagccagccgggctcagcagcccccaggcccagaggacgaagaccccagcctggatgagtatgacctctatagcctggctcattcctgcctgggagtgggaggccggaaaggtcgcaccaagagagaagctgctgccaacaccaaccgccccagccctggtggccatgagaggaagctggtgactaagctccagaacacggagcggaaaaagcggggggcacggtcctgagacggagctggaaaactgtccctctcttcccttgccccagatgaggccagagcacggacaccacacagcgacgaagacaggaccacggatcggcacctggaggcaggatccagacctgcttgccccccaccccaccccnaggacttaccctacctgaccgaggctccgaggggccaccaaggaagtgactccagccccagaaaaaggacaagataggaagcaagaggcagggaatgaatggagaggcagagtcgcaaaaggtaccccctaaaaagaaaaacactgaagaaattggctctcctggagtgtgggaaggaaggacaataaacaaagtacatctgcaaaaaaaaaaaaaaaaaaa

SEQ ID NO: 6504 - DNA, 711 bp, Canis familiaris
gctggccgtttacgcatcacacgttgtgaacgtgccgtagttgttcaaagtgacttttttgtgagggaggaaagtccccgcttgctaagtgatacttatacttgctgtttaggctcttataattaggtcctgatattttataaaaatttagtctgtagctttttaggttcttcactagaattggttgtacataaaagtaaagaagtataaagtgaccctgaaatgtcggtgttaaatgtctgggttttcccactaatatgtacttttggaaagtattttgttcatgcatactttcaccattagaattgaaaagtctttagcttctcttggtaaatgtgaaccgtttgtttttttattgtgctgtgggggaggggatattttaatataattgttcaccgtaaatcaagcagccccctctgagtgttaatttttaaatatcgaaattttggtgaccacatatcttggaagcaagattgcaatatgcttaaatttaagtggtgtttaaaaggagaaaattctgggatttgttactattgaagctccagtaagacaaattgataggactttatatttttgatcaggtaaatagatatcaatgccaatgtatagaaatcttttcttaaaacttgttcatgtattattttgatccatttttctgtggcatttggtgcaataaaccttttgaatttaaaaaaaaaaaaaaaaaaaaaa

SEQ ID NO: 6505 - DNA, 653 bp, Canis familiaris
gcggtgccggagcaacctcggtcagtgagaaggaagggccaggccagtcactggagcagctggaggctctagtgcaaaccaaggaccaggagatccagacactgaagagccaaactggtggaacccgtgaggccctggatgccacggagcgtgaggaggcacagcagaaagtgcaggacctggagactcgcaatgctgagctagagcatcagctgcgggcaacggagcgcagcctggaggaggcccgggccgagcgggaacgggcacgggctgaggtgggccgagctgcacagctgctggacgtcaggctgtttgagctgagcgagctgcgagagggcctcgcccgcctggcagagggcacaccctgagcctggctgcagggtctgcgtgggagccggggcctgtggcagctggttttatacgcaggattcccgcctggggcacgagccgggctgcgggcagcacaatgggccattcaccctggcagggactgggggcccaacccagcctggggagggcctggccgtagtgccccagctggccctggccgctcacagctcaagggggtgttctggggcttttcattgtgtagatttctagaatccccagggcgcgtgctggtgcccagattacatttctaagagtgaaaaaaa

SEQ ID NO: 6506 - DNA, 610 bp, Canis familiaris
accagttttggggtgccccccctcgccagccgacttcaatcgaagcaggaaagcagccgctttcgtccatagtgtccggcaatcatcgtgggccaggatggccgggtccgcatggtggtggtgcctccggggggcacacaaatcaccacggccactgcgctggccatcatccataacctatggtttggctacgatgtgaaacgggcagtagaggaacccagacttcataaccagcttctgcccaacaccacgacgctggagaaagacattgacgaggcagtgactgaggccctgaagatgcggcaccacaacactgagctcacgtccaacttcatcgctgtggtgcaggccattgtccacacggctggtggctgggcagctgcctcagactccaggaaaggcggggagcctgctggctactgagtgctcagggcaggcaaacctagggatgagatgcctgctgggggcagagtggaactttgagggatttgcttcctctgtgagtgacatagcagtgcaataaatgggggtcgcagcgtgaggctctgggcagcctcgctggcccggctcccagatccttggaaaaaaaaaaaaaaaaaaaaaaaaaaaa

SEQ ID NO: 6507 - DNA, 626 bp, Canis familiaris
  misc_feature (35)..(36): n comprises a, c, g, or t, or includes no nucleotide
ccactttgggtatagagagcacttaaatatacatnnaatatatacaaccctagagcagcaaatctcagagcattttctggggcaagatattctgtgtcagtgtataagatggtggcgggaggtgcatagacaggttcctgcagaagaatctatctgccttttggaatctctatctgccctatgaccccatttatatgaaattttcagaattggcaattccatgcagacagaaaataaatctgtggtcgccgggggctgaggctagggggatatagggcttgactagtagcaagtatgggtttctgttgggcacagtgaaaacgttctggaattagacagtggcgacggttgtacaactttgggagtataccaaaagccagtgaattgtgtgctttaaaaggatgaatttttaatttatttattcatgagagacacagaggcagagacacaggcagagggagaagcaggctccatccagggagcccgatgtgggactcgatcccgggaccctggggtcacaccctgagccgaaggcagacgctcagcccctgagccacccagccgtccctaaaaggatgaattttattatatgtgaatggtatctcaataaagaaaagaagcccaga

SEQ ID NO: 6508 - DNA, 598 bp, Canis familiaris
ttgaacccagagacaccctcctgaagcagcaatcggggctgagattccaagtgggtgtgaggcccagaatctttggtaaggcgtatgctgaaactggcctgagagccaggcccggagcctggcagactcggttccctctggcctggttcagcacccagtctaggtgaggcccaggacagcctggagctcctgagctttgtcaccaggcaacgagcccagtgccaagtggaagctgtcagtgtgctgtctggccaggaacgtcaggagcagcagcaatgcggccttggtgtctgcgggaatcttgtcgtcagccagaatgaggctgcagatgcgcaggagttcaggagccacatctacaacctggtcagggctgctctgatacaggaagctgaagaggtgccctatagtgacccactcctccaagtcctccttcagtggcagggcgtgcagcagggcagccagcacctgaggctctggtttcctggtgggaccggccatcagcaggcgggccagcgccccacagatgttgtcacggacccgatcatggcgctcccgtgccaggaggggcaacagaagccccagcagcttggggaagtat

SEQ ID NO: 6509 - DNA, 559 bp, Canis familiaris
gtcaccgatgtgaaagtgattcgcgacttcgacaccctacaagtgcaaaggctttggctttgtgaccatgacatactatgaagaagccgccatggccatagcaaagtctgaacggctaccgcctgggggacctaatcttacaggtttccttcaaaacctacaagtcccaccaataactcgctcatgctttttttttttgtacggaatagataattaagagtgaagaagttgaaacttttttgttagtgtacaactcattttgcgccaattttcacaagtgtttgtcttagtctaaatgagaagtgaaaaggtttttatactcggggatgcaaccgacatgttcaaatgtttgaaatcccacaatgttagaccaatttaagtttcttaagttatttcctttaaaatatatattaaacagaaatctaagtagactgcattgactaaccagtccctcgggacggtggtgaacctgaagcatgctttaacttctaagactgtctaacactcgtttcattcggtgtctccacaaactggataaaaaacataaaaaacaaaaaaa

SEQ ID NO: 6510 - DNA, 649 bp, Canis familiaris
gtgtacgagagcccaagcgcaagtccccacgccgccgtcgggcgaggacaacggggaggccccggggctgcaggagccagagggggagctgtcccctgaccccctgagaggcagcgacagcctggagaccctgtgcagccgcagcgtaggagggcctggacttcaagccctctccacccctgtccaagatctccgtcatcccccacgacctgttctactacccgcactacgaggtgcccctggctgcggttttagaggcctatgcggagggcgtggaggacttgaaaaatgaagacctggagctcgaggagccggagggctatccgtgtgccgtgggggccagggacgaggcccaggaggccgcggaggctgaggcctctcggagtagctgcagcttctcagggccggaggaggatgtccccgaggccagcatccccgcagcgccttgtcccgacgggggtgtggaggacgccacactggccgcagaacccgccaccctgtccccgccagacgaccgccagcgaggggaggccgacgactgtgccccagtggagagccatcaggcccaggaattcggaaactctggaaccttagcaaactctttagaagagaaggtaatgggagaatcaatcagcagtaaaaaaaaaaa

SEQ ID NO: 6511 - DNA, 591 bp, Canis familiaris
gatgttctgaatcctgaatgggaggaatcttggagttcagcagagtcagggatgggtccattatatgatccatgaaccagaacctcacatcttgttgttccgacggccaactgcccaagaagccgaagaaattgaagctggcagccactttccagcctcaagctttacacagctgtcgtcgcttgctgacatcttcctgattacatcattatgttgccttcttgttttctcactttgatatttaaaggatgttcagtacactgtttgtgctgctgactgttttgcttgagcagagccaacagcaccatggcccggccagttgagtgctctttgggctgcagcctcagctgagctgtgtacccagcagagcacacttggtacatagaggaagcatctgacgataggccatggctgtcacggggattgtgtaaacttgcagtttttttttcctgccaggtgttgtatgtatggtggtttatgtttcaatatattggagacttttcattttattcaaggaatctgttccatgtttaaaagccttgattaaagaggaagttttttataatctaaaaaaaaaaaaaaaaaaaaaaa

SEQ ID NO: 6512 - DNA, 587 bp, Canis familiaris
gacacgggatgttacttcccgtccaggagtccactgacaggttctctgctggacacttcagtgccccctggtccgtcccccagtaaagtgcggcttgtcagaagccaagaccacttcctgttccccttaaagcccccgtcccaagaggaggactgaaggcttccgttctcctccctcaccgtccatctgctgttatcttcccttctcttgctttttagagttgccgctaattgttttaaggggtgtgagggagggagcctggggaccaccaaactttttttttttttttttttttgtttataatacaaagctttgcttctccgtcctccttttcttggttcccttctctcttctgaatggttggagatgcttcagctgagggaggatggggattgtgggacaaggtcccttggtgctgatgggctgaaggggcctgagttgtgggcaggtacagtttcctgtgggctctggggagcctgtcatgttgctgtgtcctggtgagcagcccgacccaataaacctgcttttctaaaagaaaaaaaaaaaaaaaaaaaaaaaaaaaaaaaaaaaaaaaaaaaaaaaaaaaa

SEQ ID NO: 6513 - DNA, 569 bp, Canis familiaris
acataaaagtatgaaagtcattcctcatgtacactaacccagtgctcatttgccataaatggctcgtggctgctatacggacacacagatggagacccatgtccacctgttgagcctcagtgctagagaatcttaactggctttaacaggtcccagccccaaccttgctggggtgacctttgtctcccagggtgaagggggcatgagggagggctgatgggggctctggctctggagcttgttatctgtgaccctccctgtccacaaagtagaggcctggggcttagcctgggaagtctgcatcttctcctgaccccactggctggggtacaggggagtcacccttgccctttgcacctttcaccaccacaacccagggtcccagctggctgggtcctctgcaccgccccacctcccccacccatgtcctttccttctggttatgttgggagtgagcacctcttcttgtagccacttcacactgttgtctgttacttaattttttttttttaataagaagataataaaacctggtactttctaaaaaaaaaaaaaaaaaaaaaaaaaaa

SEQ ID NO: 6514 - DNA, 573 bp, Canis familiaris
cgtacacgtctgattttgtgcagcttttcctccccatcttggaaatgacagcatcgctggcaccatttaacagaaggagtacatgaccctgtgacggaatttatagctcactgcaagtcccacttcatcctggtgaactgagagcatccgtcagagctgacacaggacattccagagaccagctgtgggtaagccctcccagaagctcctgcttgaagaggccccgtcagcgtcctgggacttgggctctggtgggaggaggaggggctgtgggtagcgccgctagtgcagctaccatgtgtccatctcctcggagtccgggctgccctgcacccctgtggccatgtcctccccccctcctccatcccccagcacaggatctgggttctcccccacccacacacacacacaggcggggagctcagaacctgagacttgtaggtgaaccaccttccaaggtgacttttcttacaagagcccggttggtgatattttattgtcattgttttaattttccaagaataaatttaaaaacctttctgctggaaaaaaaaaaaaaaaaaaaaaaaaaaa

SEQ ID NO: 6515 - DNA, 467 bp, Canis familiaris
gccgcccagaacttgagttcagaacactatcattgacaacggccaaaagagcagtgatggacccatacagcgctttgacaagtgtctggaggagttctacgcactctgtgaccagctggagctctgcctgcgcctggcacatgagtgcctgtctcagagttgcgacagtgccaagcattcgccaactctggtgcccacggccaccaaaccagatgcagtacagcctgacagcctgccctacccgcagtacctggcagtcatcaaagcccagattgcctgtgccaaggacattcacaccgctctgctggactgtgccaacaaggtcacgggcaagacgccggcaccacctacaggccctgggggcaccctgtgagctggcagggctgggagtggggcaggccccgggggaaggggacagggagggaatgaagagtgacctcaaagccaaaaaaaaaaaaaaaaaaaaa

SEQ ID NO: 6516 - DNA, 650 bp, Canis familiaris
aaatggcagaatgtttcttcaaatctgactgtactgttttcctgggcatgaacatgtgaccctgttattgctgggcatggtcaagccccaggagagtggatatttatgaatattccctaaaatgaaggtgcttaagttgttaatatggctttcttcagaatgatgatgtaaactgggaatgtagaaggactatgatagctggaagagttagttggtataactcagtccaagtctaagggcctgagaatcaagagcccatagtgtaaatcacagcctagggaccggaaaagataatatgatgtgtcccagatcagttaggtaggaaataaaaccggtggattcctctttctctctgcctttgttccattcagaccctcaaccgattgggtgatgctcacacactggagagggcaatctactttactaaatccactgattcaaatgctaatcttatccagaagtaccctaacagacacatccagatataatacgtaatcagggcatcccatggccactcaagttgattacctattctaggtacctattacctaaagttatcacagaacccttgtacattgctggtgggaacgtacaatgctgctgctgctgctgctgctgctggggaaaatgtatgattcctcaaaaaaaaa

SEQ ID NO: 6517 - DNA, 505 bp, Canis familiaris
tggagcaccttacttcgcagcaatctcagctctcaaagtgggcgcagacttatcccacgtgttctgcacccgggaggccgcacctgtgatcaagtcgtacagcccggagctgatcgttcaccccgttctcgacagccccagtgctgttcacgatgtggaggagtggctgccccggctgcatgccctggtcgtgggacctggcctcggtcgagaccatattcttcttgaaaacgttaagacacacagagagaggcggagacgtgggcggagggaggggcgggctccactgcggggagcccgatgtgggacccgatcccaggattccgggatcgcgcccagagctggaggcagacgctcagctgctgagccacccaggtgtcccaagcatcgtctaatcttgaaaattcttgactgcttgctgaaaagtagaaataaatcatagctgagaaatgctaaaaaaaaaaaaaaaaaaaaaaaaaaaaaaaaaaaaaaaaaaaaaaaaaaa

SEQ ID NO: 6518 - DNA, 623 bp, Canis familiaris
cagctaatggggaggtccacgtgtgagtctcccactttcaccgtgggcttggcaccccaagaggcctctgctggcgtttgcctgtgatgacaaagatggcaaatatgacagcagtcgggaagcaggaactgtgaagctgtttgggcttcctaatgactcctgataggaggacctcagggagagggggcctggcagaggccttcctttgtgtattagtttggtctgttctcttggagttggtgggcacctaaggtatttgtaaattggtataaattatacaagtctttgttagtttgcctattctagttcccttcttgttatgtgagcttttcccattctttcccctgcaggagggctctgcacgataacatcagcatatcttaactctggggacctcctgtcttctctgctttttgggtatatggtagactttgttgggtttgcttctgcttggacaatacctaccttgagtgagtgagtgaggaagggtgagatggggatggagatttttttatagtaaaaagaaatgtatataatttttcgagttgagcatttaataaagctgactttatgggacttctgagactttaaaaaaaaaaaaaaaaaaaaaaaaaaaaaaaaaa

SEQ ID NO: 6519 - DNA, 571 bp, Canis familiaris
aggaggccccttccctcgggaagtcccaacagtgaccttcaggaagatggtatggcttggaaagtcgcccagagaccccagcctctaatgtcaccgtctacagagaccagcagacagggaccgaagaggaaaccttaagaccttcatggggcgcgcgcccccatcatctccgatgagatgcagaggtggtggccacctctgtcaaaggaatccaggtcgctggccaaaggaggggcaaaggagccaagccaccagaagggcccccacggctgggtctcgatgggcctcgtcaagcccggaacgtgtagccgtgtcaaaaagtaaagaaatgtacaatgactgatgtgggcgtgtcaagcacaccagagagccagcttgaaaggcttcccaccggccaaggcaagataagacaatgataacaatggatataacataggtgcggagccttgttaaactggcgatgcgatgacacaccagtatcagtgaacattaagcaccagatcttggtcttcaaacaaaataaaaagcaaaagggaccagggctccttggagaaccaaaaaaaaaaaaaaa

SEQ ID NO: 6520 - DNA, 559 bp, Canis familiaris
agactagatccacaatgaaattctcttcattcaggctatttatagagccagtgtgggttcataactatttattgagtgcctgttccatgccagtcattaggctgaatgctttaaaatatttacgcttcaccttacacctactttatccattttgcctacaaggaaatggaggctcagagtgattgtgcactatgtataagatcacacagttggcagagtcaaggctcaagtctagatctaggtctaaagccccttcattctaacacattgctttgcctatgactactgcagggataattagcccatcatatcatcactggtattcctctcataactagagacagggatgggggtatatgtaggaagtgtctgagagggagggtcagggaggctttagaggcactgaataattgcagaattgttttctaagaaaaataacataacgtgcttttagatgaaaggttgataaactatggcctgtgagtcaaatccagcccccaacctattttttgtaaataaagttttatgggaacacaaaaaaaaaaaaaaaaaaaaaaaa

SEQ ID NO: 6521 - DNA, 606 bp, Canis familiaris
taattgcagagatggcattatagcatcataatctgacaatgattaagaccctcttgttttgagccttaacatctagctcacccattgtaattttaagcttttccctataacctgttttcaaggggttcagttggcttcgtcctggggcaacatgatggcccccagaagctccacactgacattccaccagcttcctgatcctgctggaatgagagcttcttacataatagctccagcgaagtccaggagctcactgtcattggtctgcttgtgattacgcatttgtgaaccaggacagaaaagttctactctgattactagctgtgtaccacgtggacccatagtaggagagcagacagttcaccacaggaaacccgggtgccattataatagcgggtgtttggcagctcaaaacaatagatccttactagactctacatctgccttttttatatcaaaggtccatatgcagtctttaattttacccatgatctggggtgataagaacataggtaactgaatggttgacttagatttcagatttaaaaggattaaataaataaacattgtgttatgacaacagttaaaaaaaaaaaaaaaaaaaaa

SEQ ID NO: 6522 - DNA, 609 bp, Canis familiaris
gatctggagagccagagatcacccatgtgtcaaaacaaggggactcctctaagagacctctaaggtccctttggctctgtagggttctctggagaatccccacctggaatttaccaccacctggaaatcatagggtatgtaatatgatgaccagcaggtggcactgtgttccacccgtggtgatggtttgaaagggaatgttggtgccttctgtgtcacaagttaatgttaagatgctaatgttttaatcaaaataagcactgatcttaaaataggaagataggagctttcctctcgggagattttgtcataagaccggtgtcaggacccgctgaagagccaacagtactggtctcgccaagtcaagattttatcctgcttggaaatagagcccctctccatttgagagagcagagtggttgaaagcttaacttatctcctgtcagctttcagggcaatttgattgtgaaagcattgagttttctggatagaaaagcggaaggtattaaattggttttaaaggaaagtaagtttaatgtctgttgtatcacaaatcagtgttaaaacactaactgtaacccaaaataaatgtcttacattaccaaaaaa

SEQ ID NO: 6523 - DNA, 571 bp, Canis familiaris
aactacgaacctttcccaatggccaataaagaatgcttaaatacaggaccctcagcagaatctggaaaagccccaggaggatcccaagagccctccgaggcaaccacgcaagaagattcatcgtagagtccggaagaagaatccactgaagaacctaagaatcatgttgaagctaaacccgtatgcaaagaccatgcgccggaacaccattcttcgccaggccaagaatcacaaattccggatggataaggcagcagcagctttagaagccaaatcggaggagaagggagttccaggcaagaagcccacggtagggaagaaaggaaagaaaactgttggtgtgaaaaagccgaagaaacctgtggtaggaaaaaaggctgcagctaccaagaaaccagcagctgacaagaaacctgcagaaaagaaacctaccacggaagagaagaagcccgctgcctaaaaacttatatttgtttattccataaaactcaaatcattttggacagctaattttaaataaagacctgatcaaagacagtgagaaaaaaaaaaaaaaaaaaaaaaaaaaaaa

SEQ ID NO: 6524 - DNA, 586 bp, Canis familiaris
tttcccatggtggtacgccttgtgcacaaaacaatacctggtgcatggtaggcatcggaggcttgttgaatggatgaatcaacagtaagggagagattaattaaatgatggcacacctttatgatggaattaaaaactctactgaataataatagttcatgaagtttcctgaaaataaggtagataattctaattctctcacccctcaccccctaaggaactaaactactagttaaaggtagaccagaaaaaaacccgaaacctacagcactacaggaagatggtaaaggacttctttgtcatagcctgggcaaatttgaaatctgtgaatttgaaatcacaagactgttcccatagtttggggtttaaatttgtaccatctgtgttatggtccccaaaccccaacccaggaaaataatgtaagtagtagttgtagacttataagacccttgggcactatgcagaagcaaatgtaaaactcctctgaagagatatacccataaccagggctttgtacatgaaaagctctgccaaacatgagtgcctagtccaaaatttaaaggcacataagcaaaaaaaaaaaaaa

SEQ ID NO: 6525 - DNA, 568 bp, Canis familiaris
ttctttggaaccctggagctgccgtattgggccacaagacatggtgaaagcttttgccaaagatggttttcaaaatccggagtggggctccatccctgccatgtaatccgtatcaacaagatgttgtcctgtgctggagctgacaggctgcagacaggtatgcgaggtgcctttgggaagccccagggcacagtagccagggtccacattggccaagtcatcatgtccatccgtgaccaagctgcagaacaaggagcatgtgattgaggccctacgcagggccaagttcaagttccctggccgccagaagatccacatctccaagaagtggggctttactaagtttaatgcggacgaatttgaagatatggtggccgaaaagcgtctcatcccagatggctgtggggtcaaatacatccctaatcgtggccccttggacaaatggagggctctccactcatgagaaccttgcaccacccgaaccctattcatgcccaccaataaatcctgcttcctgtcaaaaaaaaaaaaaaaaaaaaaaaaaaaaaaaaaaaaaaaaaaaaaaaag

SEQ ID NO: 6526 - DNA, 624 bp, Canis familiaris
atcactgtatttttaaacaggatggatttctccttaattgcttaaggccgggagcctagcgtcttgacttctgtcttgactttgcctgcgttgagttcattagcacctggccatcagctcgaggtcctagcatcgtcggaaacccctgaagtttgaaactttctcgctccccacgaccctagaatggaacagctttaaaaatagccttaagcaaaaggatgttatttcattaaatttggtttaatggaaagaataaaggcaaattaaatacacacccaactcacgagactccaaacactggtaatcggtactgcatagcaaacttttttgggaaagaaaacgaaaacgttattgcacatgtaaaatatgaaatcttaactctgctgtgtgttaggcaattctgtaatcttttttgactcttaaaagaaattcatttctgaaatgcttggttggaagactgtgacaatagcgtcatgaaattgagtgttatttttttctttcttttttaaaaaaatatgtaaagtgcagtcttctgtattcatgcatattgtatatacctgtatatgttttcctgagcagctaaataacaataaatatgacgttaatggtgaaaaaaaaaaaaaa

SEQ ID NO: 6527 - DNA, 620 bp, Canis familiaris
ttactgatgtgtgtaatgcccagagtaaaaaacaaatgttcaaacagccccaaattcctgtcaggtcacgtgtaggagatggcgcagaagcccaagggccgtgcttcacggccagctgggtgaaagcgtgtgaacttgagcgagatcacacacgttagtcgttagggccacaaaaaacctgtatctatgtgatctcgcctgcgtgacgacacaagtttggaagtgtgaaacactgaacaagacaccggcgagtgtgcgggcttctctgatgcacgctcacccacatgtactcggctttggcatgactgtggccccggtgggtctacatggccgtgacatctgtatgtggctctagctttggtacctcaacacgccaatcctccccagaggcagggggtgagtcggggacccaggcccaggtatttggtcctccgagtgtatgagggggccctacctgctgctgcttttctatttccccatccactgccagcttccctccacacccccatccccatgccaccctttctcccctgggggggtggtcatcgatcctaagccataaaataaattttattccaaaataacaaaataaataatctactgtacacgaaaaaaaaaaa

SEQ ID NO: 6528 - DNA, 622 bp, Canis familiaris
gccaagacatcgacgagtgtgtgaccggcatccacaattgctccatcaacgagacctgcttcaacatccaggggggcttccgctgcctggccttcgagtgccccaagaactaccgccgctccgcagacacccgctgcgagcgcttgccttgccatgagactcaggagtgccccaagctgcctctgagaataacctactaccacctctctttccctaccaacatccaagtgcccgcggtagttttccgcatgggcccctccaatgccgtccccggggacagcatgcagctggctatcgtcggcggcaacgaggagggctttttcaccacccggaaggtgagccaccacagcggggtggtggccctcaccaagcccgtccctgagcccagggacttgctcctgaccgtcaagatggacctctaccgccacggcaccgtcagctcctttgtggccaagctttacatctttgtgtccgcagagctctgagcacttgctttgggccgccgggggctccctcctgtcgctttcctaaccctcccctctgggattttaataaagttgtagcgggtgatccctacccagcaaaaaaaaaaaaaaaaaaaaaaaaaaaaaaaaaaaaaaaa

SEQ ID NO: 6529 - DNA, 610 bp, Canis familiaris
aatgtgtttggtaaacaaactcatattaagaattcctagaagtgttttagtatttatccaataactgaccatgtcctacaggaaagtaagaaaacttaggctttgctttattacaacttatacaaagttgtgtgacagggcatcttctttgcttccagggattgggttggggtcactgggggttcagagcctggcagagttgtcagctttattctgacataagtctgagggtaagaggcaaggatcacatctaatgacatgtgttcctatgctctattatatagtgttattaatgattaaactgatcttaacagaattcctagcagtggaaccttgaagtgcatgtattaggtttatggtaaatgatttggttagcattttagtaacacttcattcagagtgtttttgtttgttttttagactaaatgtagggttggtatgaagtaaaaaacatctagtggttaatttcccattcgtgttttattttcttgaatcctttttttttttcagttatttgtttaaggagatttaaaaatcattgcactttggtcagaaaaataataaatatatcttataaaaaaaaaaaaaaaaaaaaaaaaaaaaaaaaaaa

SEQ ID NO: 6530 - DNA, 679 bp, Canis familiaris
ggcgcctggtccgtcttagcataccatgcgtgtggtgcctgttcctgtgacggccccagagtccttcctccagcccctgtcccaaccacatgtcccccgacccatccattagtccatcaatgtcttgtagtgctcacttcggggtgtttcatgtggcactggtgggctggtgatgtctcaggggaagatggaatgccctctgttaaacatggactttcttaggaccctgttcagttcaggtggcccagagcttgggctgcacatcaggtgacctcacctgcagcaacggacgagggaagggtgcaggactggaagccccagagctttaacacggagggcaacagctcctgcttctcctcctctgtgtactccattcggttcctatagaaaatggatacgcagagaactcccaacgctggcctggctgggtctagagatccaccgcaagaatcgcagcccagggcagtggttccagttacactggctcaggcccttactcgcttctccacccccctgtctcccccacatcccacctgcccttctgttcctaggctcagctgcaggcaaacactccaccctccatttcccccactcctgcagctgcctccaggcctgttgctatagagcctacctgtgtgtcaataaacaacaattgaagcaaaaaaaaaaaaaaaaaaaa

SEQ ID NO: 6531 - DNA, 640 bp, Canis familiaris
gctccagggagatcaaggacttcaaggacttctacctttccatcgcagatcatctatgtagaagtcctggaatgcaaaatacagtgtgaaaaggacctcaccccagttataggaggctatccagtggagaaattcgtggctaccatgtatcattatttgcagtttgcttattataaattgagacgacctgaagaacgcagccccctgtgcggtcagctacctgctctttggaccacaatgacaaggtcatgcagcagaacctggtgtattaccagtaccacagggacaagtggagcctctcggacgagcatttccagcccagaccagaagcagttcagttctttaacgtgactacactccagaaagagttgtatgactttgctaaggaaaatataatggatgatgttgagggagaggttctggaatatgtggatgatctcttggagctggaggagactggctagtccacagcaaagatgtgtcccttgatgttcaggagacccagattgttcgtcttcctttccccagcaccccacgtggttgatacctcaaagcattctatttactctgtgaagtgaaagagaagcctcatctcttactacatccaaaaaaaaaaaaaaaaaaaaaaaaaaaaaaaaaa

SEQ ID NO: 6532 - DNA, 723 bp, Canis familiaris
  misc_feature (1)..(1): n comprises a, c, g, or t, or includes no nucleotide
ncacaggctcacagctctgtcattagaccagactgtcttatagattttaatgtgatgtggaaatgtgctttatcttccctgtccaataaatagctgcatagccacatgtggcaatggagcacctgaaatgtggcttagtgggacaaagagatgagtttcaggttttgtgtcatttttaattagtttaaatttgaatagccacttgtggcttgtggtcactagacactacagatctagacagaagattagccgacaaaactctttcctcctgaagtacgtgtttattttgataagggtaactaagacctccacatttcattgttctctgttatatttatggctaataaagggggcatgcaaatttttaaaaacacaacacaatcagttagaccagctgtctaattgcacacatcttttgagctgttagccttgattactggcaagtactaactattcccaataacctaggaactataaaacaagctaagtcatcttctataactgaataccagtggggggatccctgggtggtgcagcggtttagcgtctgcctttggcccagggcaggatcctggagacccgggatcgaatcccacgtcgggctcccggtgcatggagcctgcttctccctctgcctgtgtctctgcctctctctctctctctctctctctctctctctcgctgtgtgcctatcataaataaataaaaattaaaaaaaaaaaa

SEQ ID NO: 6533 - DNA, 722 bp, Canis familiaris
  misc_feature (57)..(57): n comprises a, c, g, or t, or includes no nucleotide
ccccgcctgccgcgtgccttactgctcggtaacctgcttccggaacacaaaagagcnatgcaacccctgaaactcgtcctactgagaaaaagataaggtcagctgttacagcaaaaactataagcctacagaaacaaagatgatgatgaggagtctgtagctgattttctcaatagcgatgaggaagaggacagagtttctttacagaatttaaagaatttaggggagtctgcagcattaagaagcctgctgctcaacccacaccttagacagctgatggtcagcctcgatcagggcgacaacaaggcgaagctcatgcgagcctgcatgcaggagcccttgtttgtggagtttgcagactgttgtttacggattgtggaaccatcccaggatgaggattcctaagatggactattgtcttgctcactcgaacacgtgtgcgtgactctaagaacctgcctcctccccccagaagagctagcgtggggccctcagcaagggtgtgccgcacaaagggtgtgtgtttcaggcaagatgaggatactcgaggtggtaaaccctttattggagagagaacttaacattcagatagttgtctttaaatgttttaattttggtgcagtttagacatcacacataatttgtcaagtttcatactcatctgagttaaaacttgcttaatgtcgctaaataaaatcaagatacagtgaaaaaaaaaaaaa

SEQ ID NO: 6534 - DNA, 120 bp, Canis familiaris
gcgatccttcatttccggtctccaagagaaaaattcactcatttggagaataatgtaattcttgataataaataagagttttgatcaggaaaaaaaaaaaaaaaaaaaaaaaaaaaaaaa

SEQ ID NO: 6535 - DNA, 648 bp, Canis familiaris
gggaacagtcacgtcagcagatttggggatccctgatttggaagaggactgctgatgctggctctggggcgtgttaggagagtgcagggaatacagtgaagaggccccatacccggcatggctcacacgtgcttttgttgtgtgccagaactgcagtcgacagttctgggactgggacagaggggaggcttcatgctcatgaatattttattcggacctcattggcccttaggtccaacaggagtgtataagactaagtgtaaataaatagatgttgaatatttattttgatgggttacctataacttcaagctttttctgtggctattttatacttactttttaacctaaacatactgaggtatacttgatttttggctttctaagtttctttagtgttttcaggcacctgatcttccttgagtgtcctcatccctggacttgttatttctgaggaactgcacaaaacacttgcatggggtggctgatgctgccagggtgtttcttctttttgaagaatagtccccaccaccattttatgggggggttatctgaaaaaccaaggaagcaagtcatattctgggaaaaaaattatgctttgtgtcgaataaacagtttccttccaaaaaaaaaaaaaaaaaaaaaaaa

SEQ ID NO: 6536 - DNA, 575 bp, Canis familiaris
gcgctgggagctgccccgcggcgccgtcgcattgttcctgctgctgctgtcggctgccgcgactccggagccgcccggcgcggcttgctctcagaacacaaacagaacctgtgaggagtgcctgagaaacgtctcttgtctttggtgccacacaaataaggcgtgcttggactacccggtgagcaggatcctgccacccagctccctctgtaagctgagctccgcccgctggggcgtttgctgggtgaacttcgaggcgctgatcatcaccctgtcggtggtggggggagccgtgctcctggccgtggccgtgtgctgctgctgctgctgctgccggagtaagaagagccggaagcccgataaaagtgaggaaaaggcggcgcgggagcgcgaggagcgcaggatccggcaggaggagcggagagcagagatgaagtcgagacatgacgaaatcagaaagaaatacggtttgtttaaagaagaaaacccatatgccaggtttgagaacaactgagcacgccggcgcgggacgtgttgcgggtcagcggagccccggccggccctcccgtccccgc

SEQ ID NO: 6537 - DNA, 591 bp, Canis familiaris
gggtgggtgatgggatgggctggcccctgagagaatggagctaaacacttagatccactgaggctaggcgtgtttttgagagagtctcagcaagaggcagatggttaaaccataggcagagatgagccggggttatcaagtaggaagactgtgtgccaagagaatgaggatgccgggcaggacaccaaaacagccattcagccgctggagaataatcctagacatcgggtccggatgatgttgttattaacaggaccagcagggagatgggggctcctcaaggaccctgtgtcacagaacattgcggatagccaagcaccagtgttccacgctcctccactctgggagttaggaagacgtagagagagagatgatgaaagacgtgtgcaggctcacaggccgggaggctaagtcagggtgggtaacaggctaaccgggactctaagctgactcacagtttccaagacaatgcctattgtgagtattgcatcttgactgtgaatcatctttatataggaggatttctgacagtcacacagtgggggttgaggagaataccacggttttacagattgccagcaaaaaaaaaaa

SEQ ID NO: 6538 - DNA, 668 bp, Canis familiaris
cattgtggtggccacactggtgtccacagcagcccccagtcagggcatgactcagatcctactggcttccacccatggtcagggatcctcctcgttcccttgccctgctctccgctccaccagcagggaggagggtcatagggcaggtctctacagtagagaggaacccagtgagtggccacactggcccagacacccaagtccatggagatggacacctggcagccatttaactcagcagggagctcctggctacagctgtccctcccagttgtgtgagaacagccaaggacaccaacatgggaccaggctgggttgggtagtctgatcccctccaattctttgtgccctgcagaccttccatttggtcctcttccttgagcctgggctgagctctttgtggatgatgttgctccacacatgattgagtggtggtggtggtagaaggggtccttatttactcactgaacttgacgcctctttacaggggtggcagggtggttgaaaagcacctccgccccgatcctggcaatgcccctgaggaagaagccctgggagcagtatggtcaacattgtcagcactttgcttggattggaagctatgggactgggttactaatctttttattccaaaggaaaccaaaccaatctttaaaaaaaaaaaaaaa

SEQ ID NO: 6539 - DNA, 628 bp, Canis familiaris
ggctaccagcagggctttgtcatccacttcttgaggtgccccgcaagacacatgtccggagctgcctgagatccccaatggctggaagagcccatctcagcctgagctggtacatggcactgtcgtcacttaccagtgctacctggctaccaggtggtagggtccagtgtcctcatgtgccagtgggacctaacctggagcgaggacctgccctcctgccagaaagtgacttcttgccatgaccctggggacgtggagcacagccgacgtctcatatctagccccaaatttcctgtgggggccaccgtgcagtatatctgcgaccagggttttgtactgactggtagtgccatcctcacctgccatgaccgtcaagcaagcagccccaagtgtgagcgaccgggcccccaaatgtctcctagaacagctcaagccatgccacggcctcagcgcccctgagaatggtgcccacagtcctgagaagcggctacacccagctggggcgactgtccacttctcatgcgccctggctacgtgctgaagggccaggccagcatcaaatgtgtgcccgggcacccttcacattggagtgaccccccacccatctgtagggctgcctctctggatg

SEQ ID NO: 6540 - DNA, 619 bp, Canis familiaris
gtttttttttggggcagggaggggcctttgttccctttggacataatatagtcaatgcactacaattatgtacattcaaacttgattattttaaattcaattttcagctgtactgtaaatagagtactgcactgtagtctccatatatgtttattactttcctgtaatatttaagagttgcttaaaagtatacaaaatgtacagttactataaacagctaatttttccttttctctccctttgaaaggaaggggcttcagttgttcctacatggctagaaccataataaacaatgtaccagtaatttgtaacataactattgcagtatgttagtaacagtcttgcagccttgttttccagagttcattttattttgatcagttcagtatattgcactaattgttttaggtattttcattatatgaaatctaccatgtgtcagagatgatttaatctatttaagtgttgaactggctagcagaacttgtacatttaccgtaattcagaattagtaaggaaaacagttcaccagtgtttagttttatattgaggtgctcaggttggaataaagtggtataaaaagcaaaaaaaaaaaaaaaaaaaaaaaaaaaaaaaaaaa

SEQ ID NO: 6541 - DNA, 643 bp, Canis familiaris
gtgacaggtccccccccagcgcagctgcaagtgggaccctcacctgccacgccgtcactacatgctcagggccacagcgcaggccgtagcacctgacactacatgacaggtaacagccaaaaagtccctttggctggggctgtgggggctgagagtcatgcccccacccgcaggactccaggcaggcgccagtcagcagagagctgggctctggtcccagcctggagtaggaggagggggctggctgaaggctgcttcagggggcacctgcagccctcctgaagcctcagcatctgccccagcacatcctaagcatctgggcggcgtatgtgggagtgtgccacgccgtcagcccggcagtctgatggaccgcctcggggccctgggctgccagtgacttatggcagagctgagacgattgtgttatttattcctctgtcccaaacccagcccgtcatgctgcccgcaccccagcacaggggaagtttttgtctgagcagcattctcagtgacctcgatgttgcctttagaagggtgggtctcgcctcttgcatatgggctttattcagaatcatttatgagcagaaaaaaaaacattgaaataaaactttgctaatactaaaaaaaaaaaaaaaaaaaaaaa

SEQ ID NO: 6542 - DNA, 385 bp, Canis familiaris
tagaaggtaatcgcgaagcatatagcttcaagcctgtattcatgtaccgagtgctcctttaggcgtatatgtttacgctattaccaggcctcgcggatactatgagacatcttttacaatctccgatggggtatacggatctaccttttttatagccactggatttcacggattacacgtaattattggctctacattcctcatcgtgtgcttcctccgacagctatactaccacttcacatcaaaccaccacttcggatttgaagccgctgcatgatattgacactttgttgatgtagtctggctattcttgtatgtatctatttattgatgaggatcctaaaaaaaaaaaaaaaaaaaaaaaaaaaaaaaaaaaaaaacaaaa

SEQ ID NO: 6543 - DNA, 438 bp, Canis familiaris
catttggttctagaccctagctccactctgatgtgtgagagcatccatcacccctggcctcaccacctacggttcctttctagagaagcttattcgcccagacctcatagtccttcagaaccaggacagggtgtgccatccaggatggccacccttccataatcctcctttcctctgctccccagaccttgccatttgggaactacatcagatccttgccccaccccttgcttccagaaagggtcttgagcccataccccaagtctgacaccctcctcccctctccgccgacctgtcaggacactctagccaggacactggtgctttgccgcataccctactgtgctgcacttctttcccaatttttcataaatataaatgtatgtatgtatgtgtaatatttaaaaaaaaaaaaaaaaaaaaaaaaaaaaaaaaaaa

SEQ ID NO: 6544 - DNA, 669 bp, Canis familiaris
tcaactactggaggacgggacagcgaccaccttctgtgttgtcttgtctggatgtgaggctgaatagtggacggaatggggaacgatgtgccccgtgcaagagagccaggagaatccccagtacagaaagtgtgttcctccttttgtagcataagcccaaggttgcccttcgctgaactggggactagggagtgagccttggtggaagttacctctctgttgatacttaaagaagtgagggttgggggtgcttattcctagaagtgccatttcccttcgaaaccataataaaggtctccaggatggttgaaagggaaagtcacagtcccagtggttctagatcgagttggcaaacctttgccctcatgatcgtgtcctttgagtctttggacagcagaacaaagcataacaatttttctttttcaaacgacccattcttttgcagtccctcaggaggtgtgtggttgggtcggcttgtagccccgggatgtggtcgaaatggattactgcctagctgagccaaacgtttgcttgtacctgttggaccactacagcaaaccgctgcttacgatgcattgtgtatttctgtagtactgttttgcattttccattaacagacacaaaactttgcaagtcaatcactgttattctcatggtactgtttaaaaa

SEQ ID NO: 6545 - DNA, 610 bp, Canis familiaris
agttatgagaaactgcatgattgcttctccactagagcagtggtgctgtattatccctcccaaatagtctttgccaactcactgcatctactaccactaccaatgggccaaaggtaagaagtacttttgccatttcatcttcttggtcactgaagtcatatgcagaataacctctgattgaaaatccagaatatgaatcagaaaagtaatgacacaggccattctgtgctttaaatgggtactctgaatctctcaccagttttacttgtgtcttattcaaccagttcaaagcattgagagtagagcctccactgcagccgtaattattatatgaacaatcaatgacctgctgtacacttatgtctgccaaaggcttcccttttattgcatatgcagattccacagcacccaccacactgaaggcccagcatcctccacactgcttctcatttcaccggagattcttccttcattgtcatttctggatgactggagtgtgattttacccagagaaatgatggctttcattgcaagtttgattgtactggtcctcaaaggtgacttcccatgcatgctaagatgattcaaaaagaaaaaaaaaaaaaaaaaa

SEQ ID NO: 6546 - DNA, 560 bp, Canis familiaris
gtagatggccatactctcactggtgccctcacatggcaggaagggggggtgtcacttttataaagtcacaatcccatccatgagggctccatcctgaagagactaaacaccttccaaaggctgccacctcctaattatcgtcgcactgggggttaagaatttcaacatagaagtttgggggagacacaatattcagtctatggtagcatagtatgtttatttgctagcataacatggcctggttcaagtcctatgccctgttttgcttctgtattttgtatttttgtattttgtactttctccctagaaacaaaccatagactgtacagtagtcccccattatctgtgaaggatatgttccaagaccctcagtggatgcctgaaaccacagatagtactaaaccttatatagattatgctccccccccaaatatacatacctatgataaagtttaatttataacttaggcacagttaagaggttaacaacagcaataataaatagacaattataacaatatactgtaataaaagttgtatgaacgtgaaaaaaaaaaaaa

SEQ ID NO: 6547 - DNA, 663 bp, Canis familiaris
gtggctgatctggcactaactcgccctttgcaaaagggcctgctccttgcaagatgcccagcaggggcctctgaaagcattccgcaccgtctgccgcaggaactgctctgagcttcagaaagcggcgtccaagtggccctggttgccgggtcttgtgggccaggtgggcaatgcagggctgaggcaggctctgggagccaggtggaagagtgtttgagcaggaaagtcggaggaactgttctcatggaggtggggggttcggcttttctgtctgttgacagctgtctgggctcaggggctgtcagcacagttcccaggggactcgggttttctccgtggtggtttctgaagtgccttgtctgcagacaacctcttactttcttttctccttcagagactgtacatgacagaaggagttctgagtgaactggaagcctagggttgcctgtattactggtttatgagaaataattttatctgagcacacctctaaatttgcttttatcaacataccttacctctgaattgaaagatctatttttcgaagggtcaagacaatgaactgaaaaaactgttggccttttttgtgggaccagattccgaagatgataaaataaatatttttacttctgtcaatgtaaaaaaaaaaaaaaaaaaaaaaaa

SEQ ID NO: 6548 - DNA, 628 bp, Canis familiaris
aatgtaatatctcggggaaaagtctgggccaaatattcataaagcacatgttagctgaagagtgttaatgtgtagtcctgctctgcagcttccttaagcttgggggaaaatgttgggccaatgacagaagtttcaggaaaatgtcacagttgacatttaataattttctgtagtctatacaaattatagcaatttaaccatctaaagtgaatgaatacttgaaaagccgattataacattttcactcattaacttttcactctggcgagtcgccttgtgaaatgcctcttatttctcaacttgctttcgttttgaactgcgcttggtatcgcctgaaatcgctaggtctctatgctgtggccgctgctgtgattccgttttttgaataggtgccatatttatttgtattcccttcgctctgtttgcacgcccattttgagccaacttgtgtgcgtctcagatgtcggttggtacgtcctctgctgttctccaggatggcctcacctattgaaacaagccctgagagcaaatgcagaaaaatccgagtgtaaacaaccgctccagaatatagctagctcctcaataaagaaatgaatctttttctaaaaaaaaaaaaaaaaaaaaaaaa

SEQ ID NO: 6549 - DNA, 294 bp, Canis familiaris
atttaaaagcattgagtttgtattaacactaatgggaagaatagactaccattgtcattaattgacttttcttgtttaattagaatccctagtctctacctttcactaacttctaagatttgtaattcctcttttgggagctgagctgttcttttagggagagcagatgaacacggtcacagccagcaccacagggctgcaacttctatttgtgttgttctgttcttgagaaatggagccatgttaaaaataaaatgaatgaaactgaaaaaaaaaaaaaaaaaaaaaaaaaaa

SEQ ID NO: 6550 - DNA, 642 bp, Canis familiaris
tgggcgagagcaggtgcttcccgcttctgaagcagcagcttgagttattcccactgatgccacccgggcccaggcacagcagcaggaagcacctgctccagctaagactaatgtggcagtgggcgagagcaaggccaaagaaattcttgagcggcctgaagcgccagaagcgacagctgtgggaccggactcggccagaggtccagcagtggtatcagcagttcctctatatgggtttcgacgaagcgaaatttgaagatgacatcacttactggctgaacagagatcgaaatgggcacgactatgattactaccagcgtcactatgacgaggacgccgccatcggtccccagagcccctacagcttcaggcatggagccagcgtcaactacgatgactactgaccaaccacccctcggccctcggcgccccggccgcggaggtgacccactgggctgaccttgcaccacgtggcttccgctgggctttactccagcagatcttgcctaccccctttctgcagccaggaaggaagagttaaacaatataaatgcctttgatatttcatgcaagtgcctaacatcgcatttcatttaaaaaatagaaataaaagcagtttgttaaaaacaaaaaaaaaaaaaa

SEQ ID NO: 6551 - DNA, 506 bp, Canis familiaris
tttacgatccccccacgactatccctcctcccacgtactaccatccaccaccaccaccaccaccaccatcatccttaccatcatcacagacacggccgcgacgacagagccagcagttcacgattctcgagcaggtgaagaaggcgccatcagagcggtggatcatgccgtgatcggcggtgtcgtggccgtggtcgtgttcgccatgctgtgcttgctcatcattctggggcgctattttgccagacataaaggtacatacttcactcatgaagcccaaggagccgatgacgcagcagacgcagacacagctataatcaatgcagaaggaggacagaacaactccgaagaaaagaaagagtacttcatctagatcagcctttttgtttcaatgaggtgtccacactggccctatttagatgataaagagacagtgatgttggaacttgcgaaaaaaaaaaaaaaaaaaaaaaaaaaaaaaaaaaaaaaaaaaaaaaaaaaaaaaa

SEQ ID NO: 6552 - DNA, 620 bp, Canis familiaris
ccatctttctctgactgtagttggctacgtcggattcatctggatcagcttaaaaaatatttatgagtccgtgtcatttaacaaatgtctcttcgtgaccttgtcccattgttcctctcctttgtaacattttttcgctcttcctttcgtggtcatttgctctcttgtgccgtgtttataggaggtaacatcacgggcctgttgcctttggtggtgtactggtaaacccagctctcagggaggcagggggaccctggtttgtagcaattggccacttccacggagtgaatatgcccgcctcggccagtctcaggctgccactgtgtcatcactgaaccccaacatggaaagtattgagcgcaggtggcccctaagaataggccagctccagcacaccattgggtaaatgacaccgattaatgcacccaagtggtggcttcattatttgttccttctctttgccaaacggaataagaccacccatgtgaataaataccctggccatcgtgccagcaagtattatcttctgtattaacttaacttgcaggatctttcaggttcttcattctcccccagaatttttttttagaaagataatttaaaaaaaaaaaaaaaaaaaa

SEQ ID NO: 6553 - DNA, 544 bp, Canis familiaris
gatggcaagatgtcggagttggatcctgtagaatgaagcgcacgttccgcaagttcacctaccgcggcgtggacctggaccagctgctcgacatgtcctacgagcagctcatgcagctgtacagcgctcggcaacggcgccggctgaaccggggtctgcggcggaagcaacactcgctgctcaagccgcctgcgcaaggccaagaaggaggcgcccccgatggagaagcccgaggtggtgaagacgcacctgcgggacatgatcatcctgcccgagatggtgggcagcatggtgggcgtctacaacggcaagaccttcaaccaggtggagatcaagcccgcagatgatcggccactacctgggcgagttctccatcacctacaagcccgtgaagcatcggcaggcccggcatcggggccacgcacatcctcccgcttcatccccctcaagtagccggtcggccaataaaggcaccgactcccggaaacaaaaaaaaaaaaaaaaaaaaaaaaaaaaaaaaaaaaaaaaaaaaaaaaaaaaaaaa

SEQ ID NO: 6554 - DNA, 624 bp, Canis familiaris
gtcacgggctgttgctgcgccctccccggtcgggagagtgtctggtgtctcaccgactgtgtgcccctgtgtccacagccacctggccctgtccgtcatgctggaggtcgccctcaaccaggtggatgtgtggggcgcgcaggccggtctgatagtggctgggtactaccatgccaatgcagctctggacgaccagagtgctgggcccctggccttgaaaattgctgggcggattgcagaattcttccctgatgcagtccttgttatgttggacaatcagaaactggtgcctcagcctcatgtgccccctgtcattgtcctggaaaaccatggtctccgctgggtccccaaggacaagaacttagtgatgtggagggactgggaagagtcacggcagatggtgggagcactcctggagggccgggcccaccagcaccttgtggactttgactgccaccttgatgacatccggcaggactggaccaaccagcagctgaacacccaaatcacccaatgggttggtcccaccaatggaaatacctgagccagggctggggggtgggatggggagggtcaggatctaataaagaggttgggctgaaaaaaaaaaaaaaaaaaaaaaaa

SEQ ID NO: 6555 - DNA, 616 bp, Canis familiaris
tactaaggaatgtacacactacagccagatgttaaggaacctgtgaagacctaccactacatgaaggaaacagaacctttatctgagaaaaaaatatatctcatagtataacttttttcagaatacagttaaatttaaaaggtacctgcttatcataccccaaatggtttaggaacatatcacttctattgaacaagaaggagcagccaggaacagttttaaaaagctgagaggaagcagatgtaagaaaatagacctgccatatgatctggcaatcccacttctgaatatatatcccaaagaattgaaatcaaaatctcaaagagatatctgcatttctatgttccttgaagcattattcacaataaccagaatatggaaacaacctaaatgtccactgatagatgaatgggtaaagaaaatgtggtatataaaaagggaggtggggagtggttaaataagtgatggggattaaggaatacatttgtcatgatgagcactgggtggtggaggggagtgtcaaattactatattgtcaacctgaaactaatattatactgtatgttaattggaaataaaataaaacctttaaaaaaaaaaaaaaaaaaaaaaaaaa

SEQ ID NO: 6556 - DNA, 651 bp, Canis familiaris
attagaacataaagactcaaagaaaggtaaagcctgagtgtttttgtagtggtttgatgaagagtggaaagtcatggaataacgtgataggacagagagggtatgaactaagggtagttaaactggagggaaattagcaggctccatgcaccgggagcccgacgtgggattccatcccgggtctccaggatcgcgcccctgggccaaaggcaggcgccaaaccgctgcgccacccagggatccctgtttgccattattgatagcactgttttatagtttcagcaacagtagtgtcaagggttccagtttctctacatctttgccaacacatactgttttctatttttttgataatggctatactaacgagtataagatagtaccatgtgtaatttgcatttccttgatgatgatgtggagcaacttttcatatgcttgttagctctttgttagcctgtcttctttagagaaatgtctattcatgtcttttgcccaattttcttgttactgttaacgttgtaggagttcttcatatattctggatattaatcccttatccagtatgtgttttgcaaatattttctctgcctgtgtatctgcgcttctctgtgtgtctctcatgaaataaaaaaaaaaaaaaaaaaaaaaaaa

SEQ ID NO: 6557 - DNA, 624 bp, Canis familiaris
gctgtcgacctgcacgcccgatatgctgagtccggtttacgcatctggccttcccgggcaaccacgttcggggaggcaggagccagggagcaaatgcggagatcaacagaggttctgctccccggcttataaatgtcaagtgtgaaaatgtacagcaagatctgcgtgtccggagacgatgctcaccccgctgtggaagtggatgaaatccagccccaaggggaggggcatcctgggaaatgccatcaagtgggacttcaccagttcctcattgacaagaatggctgtgtggtgaaacggtatggtcccatggaagagcccctggtaatagagaaggacttgccctgctacctctagctccacaagtatgcgcctccccacggcccctgcccctcggagccttccacccggcacccatgacagtctgtctaaaaaccagcccgctggtggggcagacccgagaacccggcgtgcaccccctgccggaggaaggttcctttgcccggctcgaggcttggcgccccccccacccctggttatcttgtgggaataaaacgtacaaattggaaaaaaaaaaaaaaaaaaaaaaaaaaaaaaaaaaaaaaaaaaaaaaaaaaaaaaaaa

SEQ ID NO: 6558 - DNA, 528 bp, Canis familiaris
gaacggggaaatcaagggtttcgaatttccggaagaagggaagcctgaaggaatccgggtacccacaattcccaaggaaaggccaaccaggcggcgccaaataaccccacttccccggaccccggggaaggttaagttgccggaaaaataccaatacaggacttctgttcgagggccctgtaaattggaatgagtccactttaaatcctttaacgaggatccattggagggcaagtctggtgccagcagccgcggtaattccagctccaatagcgtatattaaagttgctgcagttaaaaagctcgtagttggatcttgggagcgggcgggcggtccgccgcgaggcgagccaccgcccgtccccgccccttgcctctcggcgccccctcgatgctcttagctgagtgtcccgcggggcccgaagcgtttactttgaaaaaattagagtgttcaaagcaggcccgagccgcctggataccgcagctaggaataatggaataggaccgcggttctattttgttggtttt

SEQ ID NO: 6559 - DNA, 357 bp, Canis familiaris
  misc_feature (1)..(1): n comprises a, c, g, or t, or includes no nucleotide
  misc_feature (189)..(189): n comprises a, c, g, or t, or includes no nucleotide
nacttgagcatgggtctcacattgtttgcttaaatggcagactttggatctctgtctcgcggggtctcttctagaacgactggagggcgcgtggggcgactgagcccggatgggcccgggcagcaccccttcccccccaagctgggctccccggtgctctgactcccagggtagcctgaggcctgcccnaggcagaaccagaaccctccatttccaggctgggaaacggccgagggtgcttgagccgaaccacgtgcaggccgttcttcagccatttctaccacgatagcagaattgaacacattggccaaataaagttgaaattttactaaaaaaaaaaaaaaaaaaaaaaaaaaa

SEQ ID NO: 6560 - DNA, 575 bp, Canis familiaris
  misc_feature (8)..(8): n comprises a, c, g, or t, or includes no nucleotide
aggcccgngtgcatcctggtggccaaaggccagacagctggatagtccgagggggcgttggccaccgtgtgccgccggacgctgccacacttctccaggtaggcctcgccttcctgctccgtcagcggcgtcagcgccgtctcggggggcggccggctggtgggctgcagtcggggaggcgtagctcaggacggcgaccttgggccgcaccctcgagtggcgtcgggctgcaagagaaaaacccgcacagcctgtcactgggagggagggcatctcccctttcccagctgcgcccgagcttcactgcatttgccctaaattccctttcaaccagtctcctccagggcctgggcactggctgagcagctcagaaagaagccttggggacacctggggggctcagcagctgagcagctgccttctgcccaggccgtgaccccggggtcctgggattgagtcccacattgggctccctgcatggagtctgcttctccctctgcctgtgtctctgtctctctccccatgtctcccatgaataagtaaataagatcttaaaaaaaaaaaaaaaaaaaaaa

SEQ ID NO: 6561 - DNA, 579 bp, Canis familiaris
taacagaatctataacagtataagcataactgtttattacacgagaattggggcagtccctggtggcgcaacggtttggcgccgcttgcagcccagggcgtgatcctggagacctggggatcgagtgcccgcatcgggctccctgcgtggtgcctgcttctccctcctgcctgtaatctctgccatctctctctctctagctgtgtctctacgaataaagttgaacttaaatctttgacaaataaaagaatatgaagaataaaaccgagaacttgtcaggaaatacaatagatatttacaataactacagttgaatttaaaggtgctagaagtaagagttggtgtttaagcccttagtagtcacctgtattgagaagactgggtggctcagcggttgagtgtctgccttccaactcggggcatgatcccaggtccccagatagagtctgcatagggctccctctggggagcctgcttctccctctgtctgtgtctctgcctctctttgtctctcatgaatgaataaaaaataaaataaaaagtcaaaaaaaaaaaaaaaaaaaaaaaaaaaaaaaaaaa

SEQ ID NO: 6562 - DNA, 523 bp, Canis familiaris
taccttccctcgcgaatccgtgtaaagtaatggacgaaattgataacccctgctgtgtgaaccgtggaaacaataggccaccaatgatactgaagctatgaaaatactgactatgaagacttaaactgttgactcctacataatcccgagcacaagaattaaagccaggagaactccgactattagaagtagacaaccgagttgtcctcccaatagaaataaccatccgaatacttatctcttcagaagacgttttgcattcatgagccgttccatcactaggtctaaaaactgacgctatttcaggacgactaaaccaaaccacccttatagccatacgaccaggactgtactatggccagtgctctgaaatctgcggatctaaccacagctttatacccattgttcttgaaatagtccccctatcttactttgagacctgatctgccttaatagtataacctagactagatctactaaaaaaaaaaaaaaaaaaaaaaaaaaaaaaaaaaaaaaaaaaaaa

SEQ ID NO: 6563 - DNA, 558 bp, Canis familiaris
gacgcccttcagtgaagaggccaacaggaagtttgagcgctacactggccagaccagcaaccagatcatctgaggcactgccacccgtgttctgcaaaccagccactggcccactgagggcaggggtctgaggcttgccattacctcaggagcttacgcaagggacccctgacatcggtgggctggctactcatccagtgcacactatggatgtggaactgtcaggccgaggtgtatcgccctccttctcaggccagctgccaagcatggggaatttttgctcccagggcccagcaccgagccaagcacactgcaaagagcagcacccaatgaactgccaaggacagacagcagcagctggttttcttgaatagggaggtcagaatggtcagctccagtatctcccctcagttcaggggggatacagctttacctctagcctttttgtgggggaaaagattggtaccccctccccccttatttttgattataacatgatgctaggtataattttattttatataaaaagcatttttatgaaaaaaaaaaaaaaaaaaa

SEQ ID NO: 6564 - DNA, 650 bp, Canis familiaris
ccccaagtggcttcaggtactgtgctcttggcttagtaacagcccaaattatgaggagatcaccaagtgggtacctgggtttggaagtccatgttctcagaccaagtgctggcacaacccatctgtcaaggacaaatttaacgaagcacttgatatcatgaacagggcagtgtcctccaatgttggtgcctacatgcagcccggagcacgggagaacatagcctacctcacccacacagagaggaggaaagacttccagtatgaggccatgcaagagcgacgggaggctgagaacatggcccagaggggcattggtgtggccgccagctctgtgcccatgaactttaaggatctcattgagaccaaggccgaggagcacaacatcgttttcatgccggtcatcgggaagcgacatgaagggaagcagctttacacctttggccgcatcgtcatctacatcgaccggggagtcgtgtttgtccagggcgagaagacctgggtgcccacctccctgcaaagcctgattgacatggccaagtagagagggcaggctgcagcaggctggacacttggactgcagaggggatgtagttgtaaataaatggtattttaaaccgccaaaaaaaaaaaaaaaaaaaaaaaaaaaaaag

SEQ ID NO: 6565 - DNA, 604 bp, Canis familiaris
ggtccggaattcccgggatctcgatgtgatttctgcccagtgctctgaatgtcaaagtggaagatattcaatggaagcgcgggtatacggcgggagtaactatgactctcttaaggtagccagatgcctcgtcatctaattagtgacgcgcatgaatggatgaacgagattcccactgtccctacctactatccagcgaaaccacagccaagggaacgggcttggcggaatcagcggggaaagaagaccctgttgagcttgactctagtctggcacggtgaagagacatgagaggtgtagaataagtgggaggcccccggcgcccctccgtccccgcgagggggcggggcggggtccgccggccttgcgggccgccggtgaaataccactactcttatcgttttttcactgacccggtgaggcgggggggcgagccccgaggggctctcgcttctggcgccaagcgcccggccgcgccggccgggcgcgacccgctccggggacagtgccaggtggggagtttgactggggcggtacacctgtcaaacggtaacgcaggtgtcctaaggcgagctcagggaggacagaaacctcccgtggagca

SEQ ID NO: 6566 - DNA, 565 bp, Canis familiaris
tgctgtgtcttcaacatgatggttcctctgttcacaagtgtgtgttctaatttcctctttgataggaaaccagttcacagtgaattagggcctggggtgaattctttggctgcccaagccacctgtttccaccgaagacatcacgcccacatgttgtgggcccccatctgattggactaacccctcgtttagacaccacagttaggacttaagcatatgaattttgggaggatgcaattaagcccataagaatcgtcatccttcattttatgagatgagcaaagttgacgataaagcacatttcaatgaaggtgagtcttattatttcccaacgtcttccagttaggacagcctcccatcctgccaccactgataaagcatatcaatagggggagtaagagtgtaaactacaaagcaggaacaaatttttaaagattttttttaagttttatttttaggtaatctctataccctatactctagggctcaaactcacaatcctgagatcaagagcccgatgcaggatttgatccctggactccaggatcacgccgctgggccaaag

SEQ ID NO: 6567 - DNA, 546 bp, Canis familiaris
catcgagggacaggcaggcttaccagcagatcagtgaccaatgggcctagggactcccgggtactgagtccccgttcctagctggctcctgacccttggaaggactaactctggccaaactgtttatagatgatgatgtgttttcgtccctttacagcagaatgtgaccacgtccgacataacctagaagatgccatcctggcttcaggcccccagggaagttgcttattgagggaaaggtctatttttctactggaaatgtcttagagactgaccagggccagcccttccctccagctgtagtctgtgcctggtggggggtgagagtgcctctctgcatgccggccagccagcatactggtcaccatgcctgcattccccagtgggtactgggccatggctcgcccatccctcacctccctccttgagtctgctggggcctcactgaccagtcccaaggaaaacctggctgtagttattcaataaaaccggccgtgtctgttggctatggctcttaaaaaaaaaaaaaaaaaaaaaaaaaaaaaa

SEQ ID NO: 6568 - DNA, 638 bp, Canis familiaris
  misc_feature (90)..(90): n comprises a, c, g, or t, or includes no nucleotide
atgcgccgtcttcccaccatgggcacttcctgctgtcctggtgtccagcatcagcttgtcccgcctgcacctgggtgtttggagccaagnccctggcggaagtgggctttctcatcagggcctcctgccaccacctggaccgaggaaggcccccgggctgggacagctcagcccgaggcctaggcagacactgcttctcttcgtggcccgtgggtgccggatctgagcccctttggtgcttccctcacgtgcaccccgcacgccatggccccatgccttccccacctgcaacgaactggggcccattgagacacaaggtggggcttggggctgcattctcaggggccagctgagagtcctggatcacaggggctggggggctcagctgctcacagaactgcgactcgtgccattgcctgccgggcaggtgcacagatttctgcctcacctcgggcaccccaagcgtgctggcactgttctctcccacgacatgctccaaagggtcctgacagccacacggggaagtggaggtcatccttaggacccgatgatggtggcactaaggacagagatgtgcccagctccggactaacaggaatgagatctctataaaaaaaaaaaaaaaaaaaaaaaaaaaa

SEQ ID NO: 6569 - DNA, 706 bp, Canis familiaris
  misc_feature (78)..(78): n comprises a, c, g, or t, or includes no nucleotide
gtagtaatgaaacataaggatttgaccaagggtacaatccaatgaataatagtttaagaggatttataaaatggtganagtgtttggatagcttttggagtatgtgtgattttagatatctacaatgcaaatgtattaatttatataataaagcaaaattggaagaatggatttggaatggcacattatataatctaccaactttatcttccttaataaaatttatatattattttgaaaagtagccatttgatgtaaagtacttattctaaacttgttaagttcaagtcgttaaatacacttgttaaaatatcttgtcatagtaaaaaggatgaaatgttatttctactgtttaattatataagtggaatcaactttgcatatgcaaaaatctataaaaatgacttaagcatttattattaagagaatctagataatgctgtatttcttagcactgtcttttatattaaaggaaatcaggcagccctggtggctcagcggtttagcgccactttcaatccagggcatgatcctggagaccccggatcgagtcccacatggggtccctgcagggagcctgtttctccctctgcccgtgtctctgcctttctctttctctctctctctctctctctctatctctatctatctctatctatctctatctctatctctgtgtctctcatgaataaataataaaatctta

SEQ ID NO: 6570 - DNA, 592 bp, Canis familiaris
tctcattgaagctttttctggcattgttgctgtcatttgaaatgacttcctcatacctactttgtcagccaagcggcatctgctgtagtacacggccaacgtcgacatacgctggaccaaaacgttttgaggtgcatatcccagcataggttatacagccccacacccacgcgtgcatagagcatttccacgtgagactccgtcttggcgctcccagcccttcctcccgcagagctgcccccaagagcagagcaataggcttctcccctgagcagaggctgcagcacagaaatgcaaggccgaaagttgcttttggcctaaggatcagtgatgatttggcctacttcctcagttgcttctattctgatatcagggatgctttttgtagtggtatcatttgcgctcttctcattttgactacccgtcgtcattcagggataattcatcactattcacatggggatttaaaaaatactatttggctcatttgaacatccaaattttcttgattccagattttttttttcttttgaggggaaaaaggaggagaaaaacaggagtgatgtcatttctttttcacatattctaatta

SEQ ID NO: 6571 - DNA, 663 bp, Canis familiaris
ctatctttaagcgtggtaaattttttctaaacagaatttgttataagccaggaggaccaaagatgatatgagatattgttgctctgacaaaagatacatgtatttcgttctcatacggtgctagagcttagagtaatctgcattttaaaatagctgaagtgggaaatcagtaggatttggtaagtcgcgaagactttttgaaaataagtgatatctttcccccctgttattggagatgcaaataaaaagcaacatgggaacgtaggcattcagatccggccgtgactaaaccctagcccttcttttggggagtgtgagcctagctcagaagaaaaaagcaccttgtgaaaagactggacagcttcctgacaaagcgcgctctgctgtcctgtaggaacacatcctatttattgtgatgttctggtttcttatctttaaactctgttccatacccttgtataaatacatggatatttttatgtacagaagtatatcctttaaccaattcacttattgtactccttggcaattgaaatgaaaatcagtaaaatactttgcttgtacaatgcttaatattgtgcctaggttatgtggtgactatttgaattaaaaatgtattgaatcaccaaataaaaaaaaatgtggcgtaaaaaaaaaaaaaaa

SEQ ID NO: 6572 - DNA, 614 bp, Canis familiaris
tatccttaggaatactattgaaggacaaggtgttgagatttgctttgaactttataatcctcgaatccaggagatccaagtgatcaagttagagaaacgactggatgatagtttgctatacttacgagatgcccttcccgaatatagcacttttgatatgaatatgaagccagtagcacatgaacctagccacgaagttcctgttaatcagctgaaagtaaaaatgaagcctaagccctggtccaaacgctgggaacgtccaaaatttaatattaaaggcatcagatttgatctctgtttaactgaagaaaaaatgaaagaagctcagaaatggagtcagccatggcttgagtttgatatgatgaggacatatgatacttcaaaaattgaagctgcaatatgggatgaaattgaagcatcgaaaaagtcctgattctgagaatcagtttggttatttgcagaggatatactgactcccggagaatttatttaaagaccaatttaatttcatatatgaggacatagtcattaaataactaaacattgatttgtttatgagtactgttgtaaaaaaataaaattagcataccagcttaaaaaaaaaaaaaaaaaaa

SEQ ID NO: 6573 - DNA, 454 bp, Canis familiaris
atctcgatccccgtgggtagtcgagtcggctcttgctagggtccgtggcatcttccgaggggccggggccgggccgtggattctccagaggaggaggggaccgaggctatggggggagccggtttgagtccaggagtgggggctatggaggctccagagactactacagcagccggagtcaaggcggtggctatggtgaccggagctcgggcgggtcctacagagacagctacgacagttacggtaagtcacgctccaagggcaccgtgctgccggggcttgcggtgggagctcagtaagccttggcgccctccgcgagcgacgctcagactttgtcattgtgctggcccgtaagggacaagactgccctctcggtctctgtgccagcagcggtttctaccaccaaacgtaaaggcaaaagcagactgacaaagaaggaaagggagagtgaggg

SEQ ID NO: 6574 - DNA, 502 bp, Canis familiaris
atctggactggagtcatgagtgggcctgtgctgagtttggtgatccgggctcctggcaagttcttgtccagctgagtttacaggtcccaggtttgaactctggcagattcagggctgagacctttccagtttgctctttctcgtgctctcgggagcagccaccccagtcagcacatctgctgttcctctttcaccactactgtccaaaagcagcacctgcccaatgccacgatgctgaggggagaggtgggtttgggacagagctgccatcttgggctgttgagtaattctggatgagagccccagggagatgattagataaggttgaaaggctgacctgactattgttgtgtaaaaactgtgcataattttcaacgtatatttataaatttatattttttataactttgggagacttctcagagggaaaaagtagtaaacagagccagatttaagaatgcgatttatgagctctcaataaaagatcataataaaaactttg

SEQ ID NO: 6575 - DNA, 560 bp, Canis familiaris
ccccctggacggccaacgtgctctgccgggaagtgcccacacgcggccaagaggcccaggacctgagtgggggatcgggagagtccactcgcccacccgcgggaccacccacagagaccggcctgccccccacgtgccctgcccccccttcagttattttctgatgtcagcctctccttccacgccagcccccacacaggtatcccagacaccttgtcccgggccccaacgtggcctaggactgcagagtcccagctctgggtttccagcccacctccatcctgcagggaccacccaccgtcctccaggtgtaccccacctgagggggcaccaggttgagcgctgctgctttcactgctgcaccgatgccctcagctggccccggagcagccacgtactctgcttgctgagggccaggagacgcccagactctgggaggctgggccaggccgggccgaccggcctggacgtcctcccacccccaccccccatgctgccaggttgtggctacagctacaaatcaataaaaaaagacctgttttccaaaaaaaaaaaaaaag

SEQ ID NO: 6576 - DNA, 631 bp, Canis familiaris
  misc_feature (1)..(1): n comprises a, c, g, or t, or includes no nucleotide
ngtggctcacggtttagtgccgctttcagccaggccggatcctggagacctgggatcgagtcccacgccgggctccctacatggagcctgcttctccctctgcctgtgtctctgcctctctctctccctctctgtgtgtctgtcatgaataaataaataaaatctttaaaaaaaaagaaaagggatccctgggtggcgcagcggtttggcgcctgcctttggcccagggcacaatcctggagacctgggatcaaatcccacgtcgggctcccggtgcatggagcctgcttctccctctgcctgtgtctctgcctctctctctctctctctgtgactatcataaataaataaaaattaaaaaaaataagatctttaaaaaaaataaaaaaataaaagaaaagaatatagcaatagaataaatgaatatcattatttaaaataaatgtttacttccttttcttatggaggattttacttgagattattttgaactaaacatctattgctaagctaaagaaataatagatgtgtatcagctttgggaccagaaatccatatttattggttatagaaaggagaaattggagaatctttagttaatagaactgttggttatttgaaaacaaatatt

SEQ ID NO: 6577 - DNA, 689 bp, Canis familiaris
gacagtgatagatatatatgcttccatctatcaaactgcattccacatattatttttgccaaaagatgagttttattgttgaaatctgagacactatgttcaaatggtctatctttgttcaaatttcttcccacctaatgtggaaatccttccttggacatcacactacatgtaaggctggtaaggatgactcacacaagctttatggttttcattaccgaaaatttttagattctgaatgtagatggagtctcgtttaagagtcaccaaaggtgcctgcccccctttcctgctaagaagagtccctttgagactgtcccaagagtgtcagagaactcagtgggcaggggttctggtctgcttgccatctaggtgtgggatgtgagggacattaatgattatgttgaatctaggctctactcctctgaggaatggaacacaaggtagtcacctatcacttaaatttacaattccaaaagattactacaaccatgtccatgctcagattcaaatggtttttcatatcactttcgggtagtaaaatgatttacatttttttcttaattggcagcaccaattgccattcctacactctttgatttgtttttgttttgttttgtttttactgagctcttgcatgatttatcttgtgttaccatcctaaataaacattttattaaaaaaaaaaa

SEQ ID NO: 6578 - DNA, 517 bp, Canis familiaris
agatggctgcattttatctcccccatctttgtccaagctcttacattaacgttcttagcagaatggggtgatcgctcacaactaactacgattgttttggcagctagagaggacccatatggcgtagcagtgggtggcacggtgggccactgcttatgtactggattggcagtgatcggaggaagaatgatcgcaccaaaaatctctgtcaggactgtgacaatcataggaggcatcgtatttttggcatttgcattttctgcactgtttataagtcccgattctggtttttaacaagccgtttgttcatttgtatttcgtttaagataggtaactcttatgtttatgtacatagtgtacattataactaaaagtgacagaaaagactgtattttgtagcattgatttgtgagtttgacctatttaaatgaaagtattatgtcaaaaaaaaaatcattgattctatttgcaacatggatttttaaaagaaaaaaaaaaaaaaaaaaaaaaaaaaaaa

SEQ ID NO: 6579 - DNA, 639 bp, Canis familiaris
gatgagacttttctgatctacctagttttatgtgtgtggctttactggagtatgataggaaatgaagactctttatcagctctggtactgcttaccaagagggtaataactaaacttggaaaaatagttaagtaggctttatcaagcaatcttggtttgtgtttgttttttgttaatatagtttgtaatggaaatgtgaaaacgcaactttaaaggttttttaatggtgcaggtgaaagtgccagttgctgtttggtatcacagttctacgaaagcttcattactttatgttgatgctggttgctaagcagccattgcccagagcataagtctactgggtgcctttacaagccagagaggctgatgctgcactgttgatgtcatgtgaggaaataatgcacatgccctaactgctacacagggaaacctagacaccaaaaataaacaaataaataaataaaaaataaaacaacgaaaaggttggttgaaataaaatttgatcaaccataactgtattttgaaacattccaggaaggttacttcttgtcaaacttgcctgggggtgtttgttcaaagcttgtatttaataaatgaacacctgacttacaaaaaaaaaaaaaaaaaaaaaaaaaaaaaaaa

SEQ ID NO: 6580 - DNA, 602 bp, Canis familiaris
tcctggctggctactagaaaagaatgtacaattattaaaagaatgtacatatgaagaacataagtgtatgaaaaaaaaaaaaagaaatgattaccaaaagacaaggtagttgttaactgtagaaggaactaaggtgctaactttttagatggtggttctatagatgtttacttttataattctgttaagccatgcgtacatgttttatgagcttgaggaaaaagaaaatatatttctttaagattttgtttatttgttcatgagacacagagaggcagagacctaggaagaggaagaagtgagcccaatgtgggactcgatctccagacccaggatcacgccctgagcttaagacagatgctcaaccgctgagccacccaggtgtcccaagaaaattcttaattttagctacctgtataattctacttttatttttttttaagatttatttatttatttgagaaagagaatgtgtgaggggaggggcagagggagagaacctttcaagcagattcatgagatcatgacctaagccaaaaccaaaagtcagatgcataacctactgagccacctaggcacccctatatacttctataaaaaaa

SEQ ID NO: 6581 - DNA, 543 bp, Canis familiaris
agaagtatgtccggcaaagcctggcagaaggctggatatccataccatatggggcagctacacagatggcccagaagattgaagcccgagtaagggaagcccagatgacagactttgatcgttaccaagtcatgaaggccaagaaaatgaggaccagagataatcacagcttgaagttaggaagctaccaaaagcagctctcctgaaagcttctcctataaaagcacctgctgctaagggtgtcggcggcagcacctgctgcacaaggttccagcccaaaaggtggctgctgcgggcaagaaggctccagcccagaaggttcctgccccgaaagctgcaggccagaaagcagcacctccacaaggctcagaagagtcagaaagctccagcccagaaagcacctgctccgaaggcatctggcaagaaggcataaaaaacataagaggctgttataaataagtaataaaggttctttttgacaccaaaaaaaaaaaaaaaaaaaaaaaaaaaaaaaaaaaaaaaaaaaaaaaaaaaaaaaaaaaa

SEQ ID NO: 6582 - DNA, 637 bp, Canis familiaris
agctgaggcccactcaaggcggccccaacccgccgcggttaaaagattttaataagagaggggtatgtataatacaaagtggggttgaggggacaatagggaagaagccagactgcgcccaccgagcagggagcctgttgcagggctccatcccaggactccaggacctgagcctaaggcagacgcttaaccaccctgagccacccaggcactccttgctcactgctttaaatccagtgccaggctcagaacttgattgggctccagagtactgacagtgtgaccttggcaacatccccagctagctgagcaccagtctcccccagcccaacgggcactgttcacttccctgcctggttgctgtggggatttggtgctctcaggttgtgagtgttgcttcacaggctggcaggagctggccaggtgtgtttgaggagcagagtggaggccagtagggctgaagcagggtaagcgaaggggagagggcgagagatgaggtcaggaagggcggccggccagatcgcgtgggacattgtgaaagtgagaacttggactttgactctgagcgggcctggagtccctagactagctctctctgcgccaggggcaaagtgagctgacttaggtgttgacttgg

SEQ ID NO: 6583 - DNA, 576 bp, Canis familiaris
aagatctggatagaggtttggagctcatcagcaaggctattgaaattgataataaatgtgatttttgcatatgaaaccatgggaactattgaagtgcaaagaggaaatatggagaaagccattgacatgttcaacaaagctattaacctggcccaatcggaaatggagatggctcatctatactcactctgcgatgctgcccatgcgcagacagaagttgcaaagaaatatggattaaagccaccaacgttataaaatagggagaaagaagaatgaccctctttttagaagtttactcccttttcaactgaaccctaaagacactgtcatgaactgtgttgaatggtggaacttagtgtttctgtttgtgctgttgtcattcgttacatgtttcatgtttaggtgttgtgggagtggctgttgaaggaagtttgcagtgttgcagcttttattccctgtgcaacaaaagcttagaacctgttaagggatattaaagttgcagagtacagatgataattggccatgcaaataaaaactttgatttgttgaaaaaaaaaaaaaaaaaaaaaaaaaaaa

SEQ ID NO: 6584 - DNA, 613 bp, Canis familiaris
  misc_feature (1)..(1): n comprises a, c, g, or t, or includes no nucleotide
ngtacaactccgccccatggacgcaaatggccggtaggcgtgtacggtgggaggtctatataagcagagctcgtttagtgaaccgtcagatcgcctggagacgccatccacgctgttttgacctgccatagaagacaccgggaccgatccagcctccggactctagcctaggccgcggacggataacaatttcacacaggaacagctatgaccattaggcctatttaggtgacactatagaacaagtttgtacaaaaaagcaggctggtaccggtccggaattcccgggattaattattttggtcatgatctcagggctgtgatatcaaagccctgagttgggttctatgctggagcctgcttaagattctctccctcaaaaaaaaaaaaaaaaaaaaaaaaaaaaaagattctctccctctgggacacctgggtgactcagtggttgagtatctgtctgcctttggctcaggtagtgatcccagggtcctaggatgagttccacatcaggctccctgcaagaagcctgcttctccctctacctatgtctctctctctctctgtgtgactaccataaataaataaaaattaaaaaaaaaaaaaaaaaaaaaaa

SEQ ID NO: 6585 - DNA, 617 bp, Canis familiaris
attgcggagaagttcaaccaagctctacgacgagctgctgcagtcctaccaggagaagatgttcaaacacgtcctccctgctgaaaggcagctggtacgagcaagtttagctgggtgtcccaaactgggcctaacctcaacttcaaaagtgaagaccccattctatcttcccagggtcacgacggtgggttctcagacttctgactccaatgttcccgtgggcttcactaaggtggtttgtgaagctctttgatttctgaccccatcacggtgatgatcccagaagcagtctccaggaacaatcctaaatttatggagactgtggcagagaaggctcttcaggagtatcgccaaaagcaccgagaggaatgagatgtgaacattgcttctccaaatatgggagggctgagttcctttgaccccaagatgagtgctaggcccctagagagagctctgcatgtcaccaagtgaccaggccttgcctcgaggcgctcctgtctcctaacccagctttccttcctctggactccgcactgtaacgcctacgtttgctgatcatgggaagaactcctgtgtgccactaactcaataaaaccgccaaggaatctgaaaaaaaa

SEQ ID NO: 6586 - DNA, 675 bp, Canis familiaris
gctaccggcaagagtgaagcaagtgagggtttagagctatcctggtttgggggcatcccttagagttcagtctggatgagagtgtcagtgcaggaatgggctcccaggaggtgaccgtgtctccggacaggacctgcccaccaacaatctgggccgtgatggtgtttgaggtggcgggcagggtgtctgccttctggtgtactggggtgagtagctgagccagccaagaagaggttggatgattaagcaagaaacaagggattcttggttaaactgaagacttcatttgggaacccaaaatcttatctcttggaccttgagccacatatttcccctgaaaagtataccttttttttttctccagcaaaattttgttgggggttgtgttactgaggaatgaactgagatgagtatgtggaacatttatttaatggcatactatactagaaacctgaagacctgcaggagatttgaaattccaactcttgttacaactttttaaaagattgtgaaattataaaaatgcacatgaatcaagttttaatatactgtatgatgggtgggtgaggctgtccattgtaccatttctttctttgaattctcaggcatggtttggcagtgtaagaactctgtaacattaacaaattcaataaaataaatatatggaaaaaaaaa

SEQ ID NO: 6587 - DNA, 584 bp, Canis familiaris
aggggagggtcgggtccgtacgccccgtgctagggggacaaccatgccgctgctaggactccgaagcgcgtgagctactggacgccttcccctttcagagagaccttcccgccgccgagggagcttcggccgcttgggaaacaggagttggtgatttcccgcgcccccgaccccgcctccgcccgccctggtggccgtcctcagctgggcccatggggctgcacctgtgccgccgccaggcgggcttagggtgtgctaggttcaatgtcacgtcattcgtgccgccttatttcctgcttgagaatgtattcacgtggaaatccactggaccgagttctgcagaggccttgccgacggctccgtaactgtagagcgaatgctgttcgttacagaaactagtagttcagtccaagtaaccaccgatgacttttcaaatccaatgaaccattgtagtttacacaaaaccataccgtagaggtttgtatttagcgcttatttttgcatgttgatgttgattagctaataaactgtaaatgtaaaacctgttaataaaagggttttctatttcttaaaaaaaaaaaaaa

SEQ ID NO: 6588 - DNA, 608 bp, Canis familiaris
cacggttccgggcaaacacaacaaatgcatgctagacaggcagagacgtgcctctcacacacacaggtgcttctggccagtgggtctttgccttgatcaagagagaaggatatagacttttggttaaaagtggttctccttctcctgggcatagtccacttctggacaactagacttgctcttggagaggagaggcctcatttggaatgagaaatgagaacaacccaaggaaacccactgtcataacagaagcataggctggttggtggtcctttgtgctctgggggggtgtcttaaatgtgcatggagtggtcccatagggggagggggtggtcctgcatgatgcaccaggggtcctgtgtatgctggggcaccttggtaggctgtcaggcacctacctgcccattgtggggtcatgggtcttgggtaggccctctcagcgaggggacacagccaacccttgctatttccctttttcttggggagtcagacttcgtagaaatctgtacttgaatgtgagaccttgataataaaactctaaggctgtggtgaaaaaaaaaaaaaaaaaaaaaaaaaaaaaaaaaaaaaaaaaaaaaaaaaaaaaaaaa

SEQ ID NO: 6589 - DNA, 635 bp, Canis familiaris
acccaagggctccaggccaggtgtgccaccccctaactgggcgccagtttggaagaagtgcaaagtgggtacgttggcctcatattcccggaggattcgatcacaggaacaatagaacctcaggtctgttcagcctccgattgaaaatcttgcctgctttgcttgcctgctccttcactctgccgacagggaaactgaggcacgggccatgaactggcttgcggaaggtcacatagtttagaccgagggggacctgttcactaggcttcacctgccttggagtccagagggttacctcccaccccatagtcgcttcctaatgttttataactagtgcctagacaggcttgaattcattgtgattgcctcaccccccgccgggtgtcctggcccacgtgtttaagggcagactaaggtgtcctgctggcaactattttttactttgttttcacttacacaaaactgcaaaatcccagagcctggtaagatcaccttgcattgaggtattagcagtgatggcatttagtgtgaagaaacagaaggaagactggtatgtgggggatgtagaggctgtgttgccaggactcttgtccttacacagcagaactctgttgttcctttgaaaaaaaaaaaaa

SEQ ID NO: 6590 - DNA, 477 bp, Canis familiaris
tttgaattcgtgtttggagcactgagtttattgttcacatcttgcatacctggctaagttctaaatgctggggcaatttggtccatagtcacacatcgttatgtaaccacagcatttgatagatcaggtctcctcagtattcagatgtttcctatcagctgtttaccgttggtttgtttgaatcaagatccagacatgttctgtatcttttttttttcttttaagtcctccctgcccagtgtggggctgaaactcacaaccctgagattgagagtcgagcactcccgcaaccccaccagcgggcgtcccagcatgttttgtatcttatgttttgttgatgcctcttgtccctttttaatgtataagcttctcttccctgtttgtttttcttatttaatttttgaagaaactgttgttttccctacagattttactaaatacacccaaatgaaaaaaaaaaaaaaaaaaaaaaaaaaa

SEQ ID NO: 6591 - DNA, 495 bp, Canis familiaris
cacatagatcaatgggacagaattcagaacccagaaatgggccctcaactcgtagtcaactaatattcacaaagcaggaaagactatccactggaaaaggacagtctcttcaacaaatggtgctggaaaaagtggacagccacatgcagaagaatgaaagtagaccattctcttacaccatacacaaagataaactcaatggatgaaagatctaaatatgagacaagaatccatcaaaatcctagaggagaacacaggcaacaccctttttgaagttggccacagcaacttcttgcaagatacatctaagaaggaaagggaaacaaaagcaaaaataaattattgggactaagataaaatcttcagcacatcaaaagaaacagtcaacaaaactaaaagacagcctacagaatgggagaagatatttgcaatgacatatcaggtaaagggctagtatccaagatctataaagaacatattgaactaaaaaaaaaa

SEQ ID NO: 6592 - DNA, 477 bp, Canis familiaris
  misc_feature (1)..(1): n comprises a, c, g, or t, or includes no nucleotide
nggacacagacatcctaccgctggttccatgcagcatcggcccacacagtgggctacatcagagttcggttctacgagggtcctgagactggtggccgacagcaacgtggtctctggacacaaccaatgcggggtggccgccatgggggtcttttgcttcttcccaagaggacatcatttgggcccatttgcgctaccggtgcaatgacaccataccagaggactacgagactcagaggcttctgcaggcctagggatgggggtggggacccattgctggaagatggcaccatcgtggctacccgtttgttgctcactgcaacaaacagggagcttggcacccggctccaagaggtagctgccctagagggggctcagaaaggacaaaataaagtgtgtgtggtgggaaaaaaaaaaaaaaaaaaaaaaaaaaaaaaaaaaaaaaaaaaaaaaaaaaaaaaaaaaaaaaaaaaaaaa

SEQ ID NO: 6593 - DNA, 563 bp, Canis familiaris
aaagtgaccatgttcaaactgcttgagctttgttttggcaaccccctgcccacaagttgcttacagactgttcctcacccctgtttccaaggctgtggaacagaaagtagcctctgttttgaggaggtggaagtttaagtatacattgtattttttactgtgacttgttcaggaccacatgtttaccaaatgccttgtttcctgttattattgtttctggaaaggaaagttctattaaaattgttttagtttgaatatagaatagttttattaattagggcttattttgaaaaattctgagtttaattcaaatgtatgccagtaccttccacaagtaaggtaatattcagagacagttctgatcagatggcttagagaaattttggaatattcatattcgaagattccttattaatgaatgtctttgacttaaatctaacccaaaactgcaacattattctttgtacattttcattatatagtgttaacaagcttagttgcaaacaaataaaatacttaagctaaaaaaaaaaaaaaaaaaaaaaaaaaaaaaaaaaaaaaaa

SEQ ID NO: 6594 - DNA, 461 bp, Canis familiaris
gacaccccctccggctcgtcggccccgcccaggcccggcccccgcccagcgcccgggagcgccgaggatgtgagtcctgctcgccggcgccggagcagcagccactcgcgcgccgagccggagcgcagcgcagcgcagcgccgggcgctcgccgggtcgctcgggcgggcggcgcgctctcgccccagcggtgccccccgggccctcgccggcgccaccgccgccgcagcccgcgggccgtccccggccaggccagcaccaccaggcacccagcgccgctgaccctgtccgccgcgggcggggacagcgggcggaggaggcgccgccgcggagcccccggacgcgaccatgtcggaggtgctgccctacggcgacgagaagctgagcccctacggcgacggcggcgacgtgggccagatcttctcctgccgcctgcaggacaccaacaacttcttcggcgc

SEQ ID NO: 6595 - DNA, 569 bp, Canis familiaris
ttaagctgacagacccatctctgctctacctagaagtctccactctggtcagcaaatacccagacatcagggatgagcacattggtgcactgctggccatgcgaggggataccaaccgggacatgaagcagaccatcattgagacgctggagcagggcccgacgcaggcaaaccccaactacgtgcccatcttcaaggagattgtggttcccagcctgaacgtggcaaagctcctcaagtaagctgtcaggccccagcctcgcccagtactgtgcctgtcaccccacccactggaatccagcagcagccagagtaacgagacgcccacttctgcgtgcctgcctcctgctgccatgctcacggcctcgtgaagaacaggcagtctgacggccgtactcttctggctttctcattttcctgctgtcctatgtgaggcagctgtggtgtccccagagccccaggtctcccccatgtctgcccagtgtccatacctccagaactgctgctcaataaaagagtctgaattcctgaagggaaaaaaaaaaaaaaaaaaaaaaaaaaaaaaaaaa

SEQ ID NO: 6596 - DNA, 638 bp, Canis familiaris
acgctggccgggaagagcatctccgcgcactggaagcgctcggggcccacggccaggcgccaggccgtcgggcagctcgtagtccacgcgcaggccgagctcgcggccgggcgccggcgccgcggagcagcactgcttcttgatgtgctccacgatgtgcaggtggtcgtcggtgaacgcgtggcccgactcgttgagcagccgcagcaggtagcgggtgaggtcgccgcccgcgtagtcggcccggacccggcaggcccgggcagcacgttgccctcggagatgggcaccgcgtgcgagacgccgtggccgctctaccagcaccaggcccgacgtcctgcacgtacgagctagatggacagcagcggctggggcgccacgtgcagggcggggacgcccaaggcctcgaacaggagctcggcgtacttctacccgctggccggcggggccgagcggggggtcggagagcagcacggcgtgctcctcggggcggatctctcatggccgtgcggaacacgtactcccagatgctctgcacgcagtcccagtccaccacacacgccgtgctgcagcgggttcgtcagcttcaggggcgccccggtgcggagcagctcgtggcccacgtaggtctccttgcg

SEQ ID NO: 6597 - DNA, 618 bp, Canis familiaris
tgcaggaagggatctggccacacccacagagggagacatcggagcggtgtttgggcttggctttcccccatgtcttggagggcccttccgctttgtggatctgtatggtgctcagaagatagtggaccggctcaggaagtttgaggctgcctatggaaaacagttcaccccatgtcagctgctcattgaccacgcgaacagtgctaacaagttctaccagtgagcaggccctcaccctgctcgctagactagcacactaacccagctgcccgtggtgctggttctccagcagagtggcatgtggcgtctagatttatcagagtaaccaggaggaaacaaactctggcattgggtatgcaccctgattaaagtgccttcagctatgacagttgctcccttctgctgaagtctggctgtgaattagtttgcacttcattagaaggaggaaccactgtgctcatgaacccataagtcctgacacccaaattagcagtatctccagaaccatcttgctgcctgctcctctagggccagtggtgacagggcagttctgcacccagccaaatacataccaataaaaaccaaacaattgtcaaaaaaaaaaaaaaaaaaaaaaaa

SEQ ID NO: 6598 - DNA, 586 bp, Canis familiaris
aatggcaagtactattggaccatgaatcaaggtatggtttttcttctcccagcataaaaggtcttttggcttaattgtcctattgtgggagtaagccatatatatccatcctatacctcatataatctttcctgggtgccttgataggaagaactacatacttggggaatttgttgtcatgagcctatctattttgatagattgaggggtagctgggtggctcagttaagcatctgccttcggctcaggtcatgatcttggggtcctggaattgagccctgtattggactctgctcactggggagtctccctcttgctctcacactctcaaataaataaataatctttaaaaaattattttgaggggatccctgggtggcgcagcggtttggtgcctgcctttggcccaaggcgcgatcctggagacccgggatcgagtcccacgtcaggctcccggtgcatggagcctgcttctccctctgcctgtgtctctgcctctctctctctctctctgtctgtgtgactatcataaataataaataaaaacatttaaaaaaattaaaaaaaaaaaaaaaaaaaaaaaaaa

SEQ ID NO: 6599 - DNA, 564 bp, Canis familiaris
gggctccttcaagggacttcctcgcccgaagagcgcgggacagcgacgcagatgcgacaaagccccagctggacgcgcgtcatcccagtcctggtgggatcggaacttggggagaggaggctccgccccgtcccagtgacccgtcccgcgtcccgaaactctccccttctctcggcgccgccggcggccatcttgggtgtgggcggaagtctttcccgcaggctcgatgtaagaaagaggttcagttctttccttctcgaaggaggcgatctgacccaaagccgatccccttccggtgtgcaccaggagcacggaggggtttggccccgtcggaagttttgaagtttacgcgcccttggcggccggaagtggccccgtgcccccgccccggcccccgcccgggctgccccgagcgtctgcgccaagttgcggggcaggaaaaccctaacttctccagagccctttcctccgcggcgtcgctgcgggctgtcactcgcaacgaaatgtgctaataaagcccgcgtttgtgccaaaaaaaaaaaaaaaaaaaaaaaaaaaaaaaaa

SEQ ID NO: 6600 - DNA, 603 bp, Canis familiaris
  misc_feature (371)..(371): n comprises a, c, g, or t, or includes no nucleotide
cttgttttggggagggggctgctccgtgttagagggaccttaaagctgggtggtgagttgaaaagttggatcctgatattgggacctcacagtggtgtctgaaaggacagatcactccagagcatcagggactggggacaggaatgagacaaccccgaggtacagcactggtttctcagtctctaacaggcaccccgccccccaacttggttctggatgttttggagggccttagatatgtcggtttgtccctctgtttttcagcaatcccctccccctttcccaacctgcctctccttaccacccccaccaccaccctgtgatcaaatattgaaggttaaccctttgtgcaggagcagagccaggtgggnccctggaaatatttttttttaatataacaagagatatttataagtgggtattagggtcgtgactttctctcagcagggcaagcagtggggtgaggcttttaaatctcaccctctcctcaataagacgtgggctataatactgtgttgcctcccctcacccgcaaagtgtgttggtttgtgttttgacagaggataaaactattttacccaaaaaaaaaaaaaaaaaaaaaaa

SEQ ID NO: 6601 - DNA, 622 bp, Canis familiaris
gtctgcctcaacatcttccgagaaggactgggaaccagtccttacgattactccatgattatggcctgcagtatctcgtgcttggagcccataccccgtagacccacgtgaacaaggagccgccgaggtcctgcagtacaagtccggcggctgtttgagcagaattgtgcagcgctccatgcggggtggcttaatatcggctccacctacttcgagcgctgcctgaaatagggtttgcgcacacccacccctgccagggccaccagccccggcgtcccctgcaaatatttattgggggccacaggtggggggcatgggtggccggtgggggaatcccatgccctgaccttgcctcccctccctgccacccgctcctagttattattttttttttaaaccaccatgtgattaaggtcggcgctgcctccgacccactcagcaatgggaaatgaattggcttgtctagcccccagctgggtgctgtccagccccccactctgggctctggggtgggtggccaaggggactgggtggttggggctcgggcaccctacccctccaccactggaggtcccaccaggctattaaaggggaatgttactgcaaaaaaaaaaaaaaaaaa

SEQ ID NO: 6602 - DNA, 636 bp, Canis familiaris
cctggctgggtcctcaggaaggattggttgacatccctgcctctgcaaatggccctttgtcagtctgctaatgacacttgacgcacatcttgactctggagttggaacctgagcctgtgagggtgagggaggtctgaaatcagaagctttgtttgtgtgtcgatgtgactgcatgttcctggacataagtgtgtacccctgtgcttggtgagtgcacataagtgcacatgtatgtgtggagagcaggggactctggcctgaagatgctgaaggaagagacctgtccagtgcactcaagggatatgctggccctgttctgtgtccatgcagcttggattggggaggagcaggaaggagacaccttctatgctcaagcctcaggactgacctatggcttaagcacagccttcactgggtccaagctttgtgggccattctgctggtgtgtctgcaaatgtgcaaccctttccaggacagccttccttgcacaccctccttctgctcctagtacttaatcctatcaatgtgttttctctttttctttttatgtttaagcaaaacttctgtttagattttaacaatcagggaagtataaaataaaacatagattatattataaaaaaaaaaaaaaaaaaa

SEQ ID NO: 6603 - DNA, 610 bp, Canis familiaris
cattggggccacaacaccagaatcagcaaagaggaagccatgcgctggttccagcagaaggtaaagctgattatctcaggtgaactggtggaatgtggtgtcggtgaatggagttgggatttgggggtgcaaaatccagcaccatttggtgggtagtttctttaaagatggagtatttggttgggcaccttggcaaaatgggcctccagggttggtggcttgaacagccagtatcaggctttctccccacccccatacatgcaggtaactggaaggggaggaataaggctttaacagctcccttttctcaaggtatagtgtagttcagcacggtgtagcagttgttaaaactggccagtttcctgtttagtccagaagggatgtggggttcagagctgaattcacgtatcagatgtgaattctcaaatgttagcaattgctgccatctttgctgttgcctcctgttgtgaaaaaataaaatctcttctctttcagtatgatgggatcatccttcctggcaaataaattcccgtttctatccaaaggccaataaaaacttttcagtgaaatgtaaaaataaaaaaaaaaaaaaaaaaaaaaaaaaaaaaaa

SEQ ID NO: 6604 - DNA, 623 bp, Canis familiaris
atagatgctatgaatgtgtcgaaaagggacattatgcttatgatgtcatcgttacagccggcggcggcgaagcaggtcacgatctagatcacattcaagatccagaggtaggcgatactcccgctcacgcagcaggagcaggggaaggaggtcaagatcagcatctccacgacgatcaagatctgtgtctcttcgtagatcaagatcagcttcgctcagacgatctaggtctggttctataaaaggatcgaggtatttcccatcccggtcgaggtcaagatcaagatccagatcactttcacgacccagaagcagtcgttccccatcaggaagtccgcgaagaagtgcaagtcctgagagagtggactgaagttctcaagttcaccttttagggaaaagttattttgtttacattattataagggatttgtgatgtctgtaaagtgtaacctaggaagggtatttcaaccatctaatcaaaatggatctggattattactctgtaaattcacagcagtaagataatataaatttttgttgaatgtattaacatcctatggtctgaaaatgtgggtttttatttggcacatttaaataaaatgtttctaactagaaaaaaaaaa

SEQ ID NO: 6605 - DNA, 619 bp, Canis familiaris
gaccactgtagtgtcttccccgaaaggtaggggggaggactgatgactctcacctcaggctgtagtcacttttaagcagttctgcagtgacgacacctacttgtaaattctccctgttgcatgttttgtaaataggcctctagttggttttttcattgcctcatcagcccacaccattaattctctgaatgggagggagagtgcttagccaatggatttagaaaagtatctgtagaagaaaataatactttattttgtcctgtttctcaagcactgttagatcgaacacgttttgttaatagacaacttttgcatccacgtttcaacattaacacttctgaagtcactggtctggtgtcagatttgataaagtcgaggcacttcatgttttaccatcaccttcattaaaataattcctaagatttccagcagtttatctaatatgtgtgtaaaatgtgcgttcttatttttattttagttttgcagatggttttctataaagtacgtttttactaagtccctgtgtgaatgatttaaaaaaactacagaataaggtaccaatgtagtgtatttaataaactgtcaactaaagccaaaaaaaaaaaaaaaaaaaaaaaaa

SEQ ID NO: 6606 - DNA, 604 bp, Canis familiaris
cgactcaaactggtgacacggtagctgggacctaggctctcgtaccctgaaggttgcttttgcttacttgtatatttgctgctactgtagtgtaactatttttgtcaccatagaggacttgtaactactagttataggttgtcaccagcattgagaatcttagatgtttccattggctgtctgaagaggctgtggctttgtcttgttctatagagattcttaccgtaactatctactttcttctctttcacaaagtttatacataatattatataccgacaccgaaagaataaccccacacctataagaaattttaagaatttggcaccatcggtcacctttgtgtaatccgaaatcttctagttgctgaatatctcgaagtaaattcctgttcgctgaagtcttttgattgagctgattgaatactttgaaaaatgacccgttctagctaatgaaatgaatttcgaagtaggggtttctgcatattacctgtatagtagttctatgcatacgtttctgtgcatgttctctacacagttgtaaggtgtcactgtatttaactgttgcacttgtcaactttcaataaagcatataaatgttgata

SEQ ID NO: 6607 - DNA, 625 bp, Canis familiaris
aatttgtagtccccgaattacattactatttctgacttgaataggtaacccttaagccaactgtatgggaaataaagtaggaacaaaaatatgtttacttttcccctgctttagtatccttatcctcctagatgaaactttgagggttgatattatatatgtccatttcctttacatactttatgtacttatatatcgtgtaaacacagcatatattgaagtctattagggcccatctacctttggaggttgaaccttggatttaaatcatattattttggagtcatacatctatgccatattttattctgtccaatgctatttcccttaaatagtttaactagattgtatcaaataactttacttgcctaacatgcaattaccaagcttaggcactaggggaaatgggctttttagaagccaggaattctaagtatattctgttcttcaaataaatgtcattttcttctttaaatattgaataagttttatgaaccatatctttctttgccaactcgaattacatgtgcttggaattaagttttagtttttttccctgccaccatcaataaagcctgagttctgatcgaacgtggaaaaaaaaaaaaaaaaaaaaaaaaaaaaa

SEQ ID NO: 6608 - DNA, 674 bp, Canis familiaris
agtaatcagtgaaacagaatcttccgcatctgtaattgaagatggtggaggaacatttttacatttggatcttacagattaggagtacataccaaaggtgccgatattgatgccttgtgtgttgcacccagacatgttgatcgaagtgactgttttcacctcattctatgataagttgaaatttacacggaagaagtaaaagatttaagagctgttgaagaggcattttgtaccagttatccaactgtgttttgatgggatagagattgatattttgtttgcacagattagccctgcagacgattcccgaagacttggacttacgagacgatagtctgcttaagaatttagatataagatgcataagaagtcttaacggttgcagggtaaccgatgaaattttacatctagtacccaacattgacaacttcaggttaactctgagagctatcaaactgtgggcccaacgccacaacatctattcccatatattaggtttcctcggtggtgtttcctgggctatgctagtagcaagaacttgccagctttatcccaaatgccatagcatcaactcttgtacataaatttttcttggtattttctaaatggtatgtgtttagattatattaaaataaaattgattgtagaccctgaaaaaaaaaaaaaaaaaaaaa

SEQ ID NO: 6609 - DNA, 546 bp, Canis familiaris
catctggacgtctacccggcacagcatggggactccaatgagctaccatagtgccacgtgtcttttccgcccgtgatcgcggaccccttctacctgctcatctcctgctgcggtgtcataccgcggggcctggtggtacaggaactgccactacgccaacctcaacgggctctacggaagtacagtggaccaccagggggtgatgctggtactactggaagggcttcgagttctctgtgcccttcacggaaatgaagctcagacccagaagctaccggcccccagcagcccagggaggctgaccacagctcacatctccggcgccccagtatgactgccgagcactgaggggtcgcgctgagagaagagccaggggccaccctcactatccagccaccggaggagggagccttctccatctgcgatctcacagcaccatgtttacaggggggagggacggggtttgtacgggagaaataaaaggagaaactgaagcaccaccaaaaaaaaaaaaaaaaaaaaaaaaaaaaaaaaaaaaaaaaaaaa

SEQ ID NO: 6610 - DNA, 564 bp, Canis familiaris
gggccccctcccatgatgtctggccactgctgcagaggacgatgaggcgatgccatcgacctgttttgtcatcgatgatggatggaggaccaggtagtcggctcggcttcgggatggactggctgccgcccgtattgctgagaagaaggcccagaagcccgcgctggtggcccagtcctccatcctcctggacgtcaagccttgggacgatgtagaccaacatggccccgctggaggcctgcgtgcgctccactcccgttatgacgggctgacctgggggggctcccagctggttccggtgggctatggcatccgccagctgcagatcccgtgcgtggtggaggacgacccaggtggggaccgacctgctggaggaggagatcccccagttcgaggagcacgtgccgagtgtggaccttgctgctttcaaccagatctgagcccccagccccgggcctggttgtgtgaggcccccccagcccattaaagactgagattgtaaaaaaaaaaaaaaaaaaaaaaaaaaaaaaaaaaaaaaaaaaaaaaaaaaaaaaaaaaaaaaaa

SEQ ID NO: 6611 - DNA, 594 bp, Canis familiaris
atcaagcacactcttaagtagctcataacaccttgctaaccacacccccacgggatacagcagtgataaaaattaagccataaacgaaagtttgactaagccatactaaatagggttggtaaatttcgtgccagccaccgcggtcatacgattaaccccaactaataggcctacggcgtaaagcgtgttcaagatacttttacactaaagttaaaacttaactaagccgtaaaaagctacagttatcataaaataaaccacgaaagtgactttataataatctgactacacgatagctaagacccaaactgggattagataccccactatgcttagccctaaacatagataattttacaacaaataattcgccagaggactactagcatagcttaaaactcaaaggacttggcggtgctttatatccctctagaggagcctgttctataatcgataaaccccgataaacctcaccacctttcgctaattcagtctatataccgccatcttcagcaaccctcaaaaggtagaacagtaagcacaatcattttacataaaaaagttaggtcaggtgtaaaaaaaaaaaaaaaaaaa

SEQ ID NO: 6612 - DNA, 644 bp, Canis familiaris
  misc_feature (565)..(565): n comprises a, c, g, or t, or includes no nucleotide
cattgggatgccggagggctacacctaccaccgtaccccgagacatctctgcactggtgttttcatatcgtggcccctctgctgtacgtggtccatgcagtgttttctttaatcagatggaagtcttcataaagcagccagaacttttgctgaaaaccccgacggtgttaactgatccagcctgccttcccagcataaccattttagaatgccaccaatactctcgatggtggaaaaataggaacaccaaaaagcgatgctctgtttcttgtgggtgttatgtttactctcccatataccttcatgtcagggctgggggcctgtatgtttaaactcccaacccctgagctgtctttctagagctgtttcctatttgtggaagggggctgtggggctgggcaaatagggactgtgcccacgaaaccaagatcccctggtgacccctggaccggatcttgagaactgtctgcttggacttcccaccagctcttttgagtacccatcctggggcacgtttcccagtcttcatggatagtctccctgtcctggggagtaaaggtcaccnccaccagtattctgcagatgtccccccgtggaatgatgataaaccctttgaaatacctttaaaaaaaaaaaaaaaaaaa

SEQ ID NO: 6613 - DNA, 610 bp, Canis familiaris
gaagctctcctatatccgcattgctgatacccatatgacgtaccatccctcaggtgatagaaattcccaagcagtttgaacacctaaatctaaccctttagcatcccaaaaatttgttttggaaatttaaatggtgactgaagtagccccgtgttatttctggtaaattctctacccttggaagtatttctgttgctcctggatgacccctgggccatcaaggcctactgtagaggtagctagacactttttttttttaaatgaaagtttttgcgtgtttcttaaagatttatttatttattcatgagagacagagacacacggcagagggagaagcaggctactccatgcaggttgcctgacgtgagacccgggtctccaggatcatgccctgggccgaaggcagcaccagaccgctgagccacccaggctgccctagctagacccttttacctataaagtttcttctaagatataacttagcacacaatgatttcatattaaataattgtaataaaaaaaaagaaattgtgatagccccaaggaaaaaatacagtaattaaggaaaaaaaaaaaaaaaagcccagaatactttcatgacattaaaaaa

SEQ ID NO: 6614 - DNA, 645 bp, Canis familiaris
  misc_feature (170)..(170): n comprises a, c, g, or t, or includes no nucleotide
gacgtcagcgatctttaagcggttcccaccctggcatgccagagaagcagagagagggcctccaggaagagctgatcgacatcatcctcctcatcttggagcgcaaccctcagctgcactactaccaggggtaccatgacattgtggtcacatttctgctggtggtaggncgagaggctgacaacatccttggtagaaaaattgtctacccaccacctcagggatttcatggatccaacaatggacaacaccaagcatatattaaactatctgatgcccatcattgaccaggtgaatccagagctccatgacttcatgcagagcgctgaggtgggaaccatctttgccctcagctggctcatcacctggtttgggcacgtcctgtctgacttcaggcacgttgtgcggttatatgatttcttcctggcctgccacccgctgatgcccatttactttgcagctgtggacggccgcctctaccttcaaagactttgagctggcatcagcccagcagaggcctgacatggtgctgcgacagcggtttcgggggctcatgcgctctgaggagcgaacgaaagatgtcctgaccaaccaaggaccaaccgctttgtgaaactggcggtgatggggctgacagtggcactg

SEQ ID NO: 6615 - DNA, 586 bp, Canis familiaris
tactgatgaaacttgcagaacccacgaggtgctcgaatcttccttcaggatattaagacacccggccctgacgattgggagaatgggctgaatgccatggagtgtcccttacccttggaaaagagcgtgaatccgtcactactggaactgccccaactggcccctgattaaaatgacccccccttgtgtgacttcacttgagactcattaccctgatacgagcccggtgaagatccctccaagaatttgggtgaccactgtaacccacctgcgccagatgggggctcccgaatctggcactggcccgagtatctctttgaccagcacacccctgggaaacccgtgatagtgagagctaagccctctaggctgtcttcccactagccgccacgggtgacttccccctggtcacccgaggcacgtgcactgcactgttggggttaccctttaccttttctataagttgtaccgaaacatctacttctttcgtttgtatcattcccttccaaataaagtaatttggtacccccaaaaaaaaaaaaaaaaaaaaaaaaaaaaaaaaaaaaaaaaaaaaaaaaaaaaaaaa

SEQ ID NO: 6616 - DNA, 642 bp, Canis familiaris
ccaatagcaggctggtaccggtccggaattcccgggatcgccgtcttcccggccgccgcagccatgaaggtcgagctgtgccgtttccgtgggtaccagatttaccccggacctggccggcgctacgccaggaccgacgggaaggtcttcccgtttcttaacgccaaatgcgagtcggccttcctttcccagaggaaccctcggcagatcaactggactgtcctctacagaagaaagccccaaaagggacagtcggaagaaattcagaagtaaagaacccgccgtgccagtccaattcccgagggccatcactggggcatctcttgctgatataatggctaagaggaatccagaaacctgaagttaggaaggctccaacgagaaccaggccatcagggctgcccaggaagccaaaaaggctaagccagcatctaaaaagacagccatggctgctgctaaggctcccaccaaggcagcacctaagccaaagattgtgaagcctgtgaaggtttccgcaccccgagttggtggaaaacgctaagttttagtggatccagatttttaaataaacatctgactctaactagaaaaaaaaaaaaaaaaaaaaaaaaaaaaaaaaaaaaaaaaaaaaaaaaaaaaaaa

SEQ ID NO: 6617 - DNA, 598 bp, Canis familiaris
ccactcttgaaattcttgagtgatgtgcactgattttagaccggagacaaagtgggatgccatgcgaatcccacactgctcaaacatgctgaacattctccccccttctcctttgggctgatcatccagcaggtgtttgataatgccacgcatctacaaccctgaagtgcttggacatcacagaggaaactctgcattctcgcttcctggagggtgtccgcaacgttgccagcgtatgtctgcagataggttacccgactgttgcatcagtgccccattctatcatccatggatacacagcgggtcctggctttgtctgtggaaactgattacacctttccacttgctgaaaaggtcaggccttcttggctgatccatctgcactttgtggctgctgctcctgtggctgctgccacccactgctgcacctgctgctgccgcagccccagcccaggttgaagccaaggaagagtcggaggaatcggacgaggatatgggatttggtctctttgactaatcacccaaaagcaacccattcagcccagtttatttgtgaaacccaggaaataaaggcttacttctcttaaaaaaaaaaaaa

SEQ ID NO: 6618 - DNA, 620 bp, Canis familiaris
cacaagtcatagaccaaaagagaagcacctcaatcctgagagagtcctggaagccaagtgcagtatttggtgacctcagtcccaaggtggcagagacgtaccggctgttgggtgggaccgacctggctcaggggaaccacagtggggctcacaagaaactgaagaagtgtcttcagattcagactctcttatacggaccacaggacaagaggactctggccacccagcagaccatggacgtcctggccaaggccccggaggtggccgtgaaacccaggcagacccccagagccaaagcggcgttctgcggctgcgcggcccagcacggtgcgccggggaaggccaggcccagcgcagccgactgaggcccccgccccgccccgccccgccccgccccagagaaagcttcagtcgtgcctgggagccgacggccagggagcctgtaaacctctcccacagggcgatgggattcaataccgtcaaggctgtttgctccaacaggcaacagagctgcgccgccaactcccggtgggccacactgggacctcggagacccttcgggcgatctggtgcttctataaagcctttgttcttttttaccgcccaaaaaaaaaaaaaaa

SEQ ID NO: 6619 - DNA, 641 bp, Canis familiaris
gtccatgtcttattaccttggatcgcgatgatgtggcttttgaagaactgtgccaaataattttctgccaccaatctcatgagggaggaggggaacattgcttgaggaacctgatggaaagctgcggaacccaccgaggtggtcgaatcttccttccaggatattaagaaacccgaccttgacgattggggagaaatgggcctgaattgccatgggagtgttgccttacacttgggaaaaagagcgtgaatcagtcactactggaactgcacaaactggcccctgatagaaaatgacccccacttgtgtgacttcattgagactcattacctgaacgagcaggtgaaatccatcaagaattgggtgaccatgtaaccaacctgcgccagatgggggctcccgaatctggcatggcagagtatctctcttgacaagcacaccctgggaaacagtgatagtgagagctaagccttaggctgtcttcccatagccgcagggtgactttccctggtcaccgaggcagtgcatgcatgttggggttacctttaccttttctataagttgtaccgaaacatctacttctttcgtttgtatcattccttcaaataaagtaatttggtaccccaaaaaaaaaaaaaaaa

SEQ ID NO: 6620 - DNA, 596 bp, Canis familiaris
  misc_feature (1)..(1): n comprises a, c, g, or t, or includes no nucleotide
ncggagaccaagtgggagcccgcgaagccacactgctcaacatgctgacatctccccctctcctttggctgatcatccaacaggtgtttgataatggcagcatctacaaccctgaagtgcttgacatcaccagaggaaactctgcattctcgcttcctggagggtgtccgcaacgttgcccgcgtatgtctgcagataggttacccgactgttgcatcagtgcccccttctatcatccatggataccagcgggtcctggctttgtctgtggaaactgattacacccttccccttgctgaaaaggtccaggccttcttggctgatccatctgcatttgtggctgctgctcctgtggctgctgccaccactgctgcacctgctgctgccgcagcccccgcccaggttgaagccaaggaagagtcggaggaatcggacgaggatattgggatttggtctctttgactaatccacccaaaagccacccattcagcccagtttatttgtgaaaccaggaaataaaggcttacttcttcttaaaaaaaaaaaaaaaaaaaaaaaaaaaaaaaaaaaaaaaaaaaaaaaaaaaaaaaaaaaaa

SEQ ID NO: 6621 - DNA, 591 bp, Canis familiaris
gtttatagcaaaatttagccacggggaacgatgctggccggtgtctccgcagctaaggacaccaaggtccctgcggggaatatttaaagcaacgtcaggtttaaaaatgcagccctgaccttgaccccccaacggtccgtgtcccggaggaaaggggaacccggatgcgtggctgaggggcctggtcggggcggcacctcgggcgaccgaccggttacccccgtgtgtcttaaccccacccctgagccctccacggttctcaggagcatcccgggtactgaaggggttcggctcttgctcagcgacctgcagcccccccaagtggtgtccgagcccatgaccgtctaagacaccccgtttgccccccggacaccaccacccctgccactgcttatgtgaggagctgggagggactgtcgtggaagcttgttccttggcttcacccctggggaaacgctggccgcatgatgaaaatacccccttgttgccttatctttttcccaatgtgctgttaaataaagagtcgccccggccaaaaaaaaaaaaaaaaaaaaaaaaaaaaaaaaaaaaaaaaaaaaaaaaaaaaaaaaa

SEQ ID NO: 6622 - DNA, 634 bp, Canis familiaris
agaccccatccaccgctgttttgacctcccatagaagacaccgggccgatccagcctccgactctagcctagccgcgggacggataacaatttcacacaggaaacagctatgaccattaggcctatttaggtgacactatagaacaagtttgtacccaaaaagcaggctggtaccggtccggaattcccgggatggcgttcagaatggttcagcgtttgacataccgtcgtaggctgtcctaccatacagcctctaaccaaactaggctgtcccgaactcctggccatagaatcgtttacctttatacccagaaggttgggaaagcgcccaagtctgcatgtggcgtgtgtcctggccgacttcgaggtgttcgtgcggtgagacgctaaagtccttatgagattgtctaaaacgaaaaaacatgtcagccgggcctatggtggttccatgtgtgctaagtgtgttcgtgacaggatccagcgtgctttccttattgaggagcagaaaatcgttgtgaaagtgttgaaggcaccagcaccagagtcagaaagctaaataaaaaaatgaggatttttttgagtaataaaaatccaaaagcttaaaaaaaaaaaaaaaaaaaaaaaaaaaaaaaaa

SEQ ID NO: 6623 - DNA, 605 bp, Canis familiaris
cttcctcttagacactagacctattttccttataaagtagggaaaatgtgatagggaataaatatacactgatggactatacattatttttattgtctttaagccagagttaaatggtaaagaaaaaaaatagtgactatttttgtgatgttggtctcccactcttactctatcttttgataaaggggataaatgatttcaggttaactctttgtatgttgttttctgctttctcatgaaaactgatggctttatttgtggaaacaactaatgagcagagaatctgttattgtggttgtgttacttatttctgttatttattcttctgagagacgctaagtgacacagtattttaagtatcatgaaagccactggatgtgttagaatattgttcttcatagaacttgttaaatgcaattatcttttaggctgttttctaaaggctattttctaaatatttgactattttcaagaacagaaatataaaacattagtgctataagagattagatatcaactaagtttcattaacatttatttaaaatgttaacagcttttttattgaaaatataaaaataaaatttattttcataaaaaaaaaaaaa

SEQ ID NO: 6624 - DNA, 527 bp, Canis familiaris
cttgttgaccacgggtgtacggtggaatcggtgttcgacttccggatgagggagcctgatgttgcggttaccacatccaaggtagtcatgcatggcgctgcttattacccatctcccgatcccggggaggtagtgatcgtatatcactatagcaggatctctttcgaggcccctgtaattggaatgagtccactttaaaactcctttcaacgatggatccattggagggcaagtctggtgccagcagccgcggtaattccagctccaatagcgtatattaaagttgctgcagttaaaagctcgtagttggatcttgggagcgggcgggcggtccgccgcgaggtcgagccaccgcccgtccccgccccttgcctctcggcgccccctcgatgctcttagctgagtgtcccgcggggcccgaagcgtttactttgaaaaaattagagtgttcaaagcaggcccgagccgcctggataccgcagctaggaataatggaataggaccgcggttctattttgttgttttcg

SEQ ID NO: 6625 - DNA, 616 bp, Canis familiaris
ttctgtatgccagacaccgtgctaggcgttggcgctgcaagtcctgacacacatacacctgatttctgccttcacagaacttacagtctgaagagggaaagcgagaaaacaaacaggtcccagccagagaacctaggagagaagaaggaaaacattttttcttctactttagaatcagccattttccagggagacatcaagttgagagacatcatttttggagtcaccatcgtgtgcatgggacttaaagccgtgaggatgagatcacctaagaaagccctgctgaaaacctaagatgaataaagttttgcctcgtctaccaaaagaagcagatcacttgatgaatgtttttcttcacttccgctcttcatatactgaaactctaatcacactgtgatcatatctggagttggggcctttgggaggtaattaagtcatgaaggtggaaccttcagccagagagctgactctcttcttctaccatgtaaggacacaaaaagtcagcaatctacagcttagaagaggacctttgccagaatccaaatctgccagccccctgatctcatacttccagcctccagaactgtaagaaataaatttctattattgataccaa

SEQ ID NO: 6626 - DNA, 709 bp, Canis familiaris
ctttaattctggttcgcatcagttcactcggttagattataaagcattggtttttcaaatagacctttgctgttgattaagaagcccatgctaataaatgatgtggtgatcatgaggttttatcttaaagaatgtaaagacttagtttttggaaagttattttggagaaaatgggactcagttggcatagctaccatgtatttggtcgacgtttttctccatgatttctttaatttgtatgtttgcaagagtgttcagagtgcccctctgaccgtccttccttctactccagccgactcctcctgctaaactgtattccatttccaaggttgctaattgactagggcctccttaaacgatacttcacgggaaccaaatgccaaacggaggaaataagtaagtcctcccagtttctccaagataaagcttttttattattgctattaatattaaatataggtctcattcatacagtgtatgagtaggatcatcatttggacatgtccacaaggacccatttttaaaacatgttcttgtgttatggctaaatagtctagtaatgttttgtcctttattttcaatatttgataaacatttgatgttgaaaacttagatgatagatgcttgtatatgaacgtgttgtaataaagtgaggttttcttgatatatatttattaaacgatcaaattccaaaaaaaaaaaaaaaaaa

SEQ ID NO: 6627 - DNA, 576 bp, Canis familiaris
  misc_feature (1)..(1): n comprises a, c, g, or t, or includes no nucleotide
natatgaagtaacgctagcaattattctcctatcagtcctcctaataaacgggtcatttacactatccacgctaattattaccccagaacatatatgattaatctttccggcctgacccctagccatgatatgattcatctctaccctagccagaaactaatcgagcccccttcgacttaactgaaggagaatccgaactagtctctggatttaacgtagagtatgcagcaggtcctttcgccctattctttctagcagagtaccgccaatattattataataaacatcctcacccaccattctgttcttcggcgcattccacaacccacttcatacccgaactctactctattaacttcactataaaaaccctcttattaaccatctgcttcctatgaattcgagcatcataccctcgattccgctacgatcagttaatacacttattatgaaaaaattttctacccttaactttagccctatgcatatgacatgttcgccttacccattatccccgcaagtatcccacccccaaacataaaaaaaaaaaaaaaaaaaaaaaaaaaaaaaaaaaa

SEQ ID NO: 6628 - DNA, 638 bp, Canis familiaris
  misc_feature (112)..(112): n comprises a, c, g, or t, or includes no nucleotide
  misc_feature (229)..(229): n comprises a, c, g, or t, or includes no nucleotide
gtagatgagggaggatggaatggaagaaggacacatacacctagatgtggaaatagatatctttgtattatattttttcttccctggagagtaattgcagatgttaggcccnctatgtcatcatgatgagactcaggtcatgcatttgcacttggccctgagatatacactctgatccagcctggagcctagagtctgggagagcctctgcccttctagccatgtgacnctgggcaagctgcccaccctcccggagcctcgtgctctcatgggcaatgtggaaataatgcctgcctgctgcgctgtagtgaggggcaagtgaagggtgtaggggagccactggcatgcagctggcgtggcataaatgtcagcggcgaagagtgctagggaagggaaaggcagagaggctgagggaaagagcttgctctggcgccacccaggcaggagccagagagaggaagcgagcagagctatccagggcggagtcctgactccctttgccacctataccctcagtttttccccaacggagaggccatctgcacaggctcggacgacgcctcctgccgcctgtttgacctgcgggctgaccaggagctgactgcctactccgacgagagcatcatctgtggcatcac

SEQ ID NO: 6629 - DNA, 657 bp, Canis familiaris
agaagcctaagttttattatactcgcaggtcctagagagggggtcacctgaatgccaggaaagggtaacagggaagcaccagattttggtcaagtggcagaaaatagcagtgaagagaaagctgaggccagaacttttattggggggggctctttaggaaaggcaagccacggggcatatgacagacagctttaagattgggtggttgaataatttggtgggctcttaagagatagggatagtttctcattgtctggtagctgtggccctaggataatgaaggcagaggaatgttgcctcctggatgtgtgggtgtactggagaagtatggctctggattagttagttgctacatgacagccacgttcccagttgaattctttgctgtgtctccaggagacacagtctctctctagctaaaaaggtttttataaacatgaaacatgggacgcctgggtggctcacccggcttcgagtgtctacctttggctcagagatgtgatcttagattccagggattgagtcccacatcgggcttccctgcctggagcctgcttctccttctgcctgtgtctctgcctctctctctctctctctctctctctctttctctgtgtgtgtgtgtctcatgaataaataagtaaaaacaaaaaaaaa

SEQ ID NO: 6630 - DNA, 612 bp, Canis familiaris
tccagtttgatgatttttctctctctctctctctcaacaggctggtccattcaggtccaggcaaaggatcgccccaggctggtgcagatctgtcttttgctacccggacgggcaccaggcaggggatcgaaacacacctctttagggctgagaccagcagggacctgtctcactggacaaggagcatagtgcagggctgccacaactcggcagagctggtcactgaagtcaccacaggtaggcgcccctggctctcatgggacccacgtgccctctcttccacctcagcccaaggtcgtttctgttattggccttctgggctgtgtagaattctagaagtgaacttcagttcctccaaattagggcactgtaggccctactccagtgaaagcctgtttccatctccattcaagaaaagttggtaatttggagagtcagatgtcattttcttacctgcagcccctggatagcttcctgggagcatgagttttgaggtacacactagtagggttcttgttataaacaaacagcagagactgactctgggaaatttatcacagaataaagttcttggtcagagagttggtcagaaaactggggaacccgtttgtg

SEQ ID NO: 6631 - DNA, 504 bp, Canis familiaris
tatgatgttgttttatgtgtggggtatgatggggaagtttcgcttgttattgttaccgtacagctgacatgtattttttgtcaattccttagttatcttagtagtttcatgctatgtatgtatcatatcccgaccttgttgcctatgagaacatgtaagataatgtatttacagccattgttacaagtttataatgtatttttctatcttgttttatatgtatgttatataacattctaaagaatttttttcttgattgagtaaggatacaaatgcagaatccacaattttgataactgaaaattgccaattgttttgcagtactttattatattgggtgtcttgtctttcttgggcttttagttagctaatgaatgaatacattagacacttttgggttttagttgggattttacatagcttgcattttaattctttggttctttgctgtttctattaacccatagcattattttaataaatgttataataccaaaaaaaaaa

SEQ ID NO: 6632 - DNA, 598 bp, Canis familiaris
tccctcggagacttggaggagtctgggagggaaaaaaggaatctgggcactgaggtttggggggcgtgaccggcctttttcgaatacccatttatttgcccatttattagacgatctatacagagaggggaaacgggaaaagcgggaggcgatctcggtctcgagaaagacactgggactctcggacgagggaccgagaccatgatcgtaaccggggaaaagagatggcaggagagagagccaaagcaggggtgtggcctagaaagtgactgggagagagagagggacttcagagatgaccgagccaaggggagggagaagagggaccgaagtaaatagaggctcaccagcatcgccagaacccagacccagcataaacagaagcacagagatctgtgttgcttttatatagtatgtatgtccagtgcttgagtaaagcttgctaatggtggtggggtctggagtaagttttctttccgatctggaacccaggttccagctgaacatgatattatgaactttatctctcattatttaataaacttgagaaacaaaaaaaaaaaaaaaaaaaaaaaaaaaaaaaaaaaaaaaaaaaaaa

SEQ ID NO: 6633 - DNA, 561 bp, Canis familiaris
agcccctttggataaccgtcttggcgaagttccccagtggacccgtgtctggagattgcaggagtaccagactcctgtcccagccctggcagtgccactgtgtaccaggctgagaggcttctcggcacaacggtgttaccttcattgaccctgctggcccaggttgcccaagcgctctgggagggcccaaggtgtcctgaaaacaggccatctctctctccttctcatccttggtatcctctttctcctccttttgatgactggagccttcggctttcaactttggagaagacagtggcggccaagaagattctctgccttggagcttgggactcacccacctcaggctcagagcaagataggtgagctggagcaagagccagagctggagctggagccggagccggagctggagccggagcccgagcctgaggagctctgacctggagctgaggcagccggcagatctgcataactctgtccaaataaactccccatcagcagcaaaaaaaaaaaaaaaaaaaaaaaaaaaaaaaaaaaaaaaaaaaaaaaaaaaaaaaa

SEQ ID NO: 6634 - DNA, 475 bp, Canis familiaris
ctcgatccctggggtccttcaggatcaggctctgggctgcaggcgtcactaagaccgctgagccacttgggctgccctaggtcctgattttaaccaccgggattgtgttttgttcatgagaagcatcatgtgaaatcaatgcctttcaactcctggctgcctgtaatttaaaacctagtagcagatatagggcttgaagggtcaggactctcaccatctccagagtgatatggacgatgtctgtcataagaaatagagatgcaggatgacacagagaacctgccaggacttagagtggtcaactgagttttgctcatttgattcagggcaaatcaagaaaaagtgagaagatgaatgagtgagttctgaagaaattgtatacagcaatgtgaccctagttgacagtattgtattgtgcacttgaaattcgctgaaaggatagatttttggtggagtcactacaaaaggaaaaaaa

SEQ ID NO: 6635 - DNA, 519 bp, Canis familiaris
aatgcaactctggcacacagggtgacacagcattcacaggttgcggctttctgtgggaaggaccccccgccaactgggttggaaggaacaagacatcttaccgcttggttcctgcagcatcgggccccaagtgggctacatcagagttccggttctaccgaggtcctgagctggttggccgacagcaacgtggtcctggacacaaccatgcggggtggccgcctgggggtcttttgcttctcccaagagaacatcatctgggccaatctgcgctaccggtgcaatgacaccataccagaggactacgagactcagaggcttttgcagggcctagggatggggtggggacccattgctggaagatggcaccatcgtggctaccctcactgcaacaaacagggagcttggcacccggctccaagaggtagctgccctagaggggctcagaaaggacaaaataaagtgtgtgtggtggaaaaaaaaaaaaaaaaaaaaaaaaaaaaaaaaaaaaaaaaaaaa

SEQ ID NO: 6636 - DNA, 558 bp, Canis familiaris
  misc_feature (135)..(135): n comprises a, c, g, or t, or includes no nucleotide
cccatgttcaggagcctctgggccttcctcctgcccgaagagagactggtcctctgtctggaggacaaggagctggtgccggcgccccccgccgatgtcgggccctgggcccggaggccacggccccagggtcgngtcaccctgacggttgcgcaggagcccgcgggctcgtcggaggcgcctgacggggacacctcacccgcgccccagccccccgcggcgtccgcggggaggtgaggcgggactcgcggggcacgggacagccccgaggggaggctgacaacgaatgagagggggaacctctgggtcccgcctacacgtggctgattatacagtaagaaaccgaattctgctcagcggtttagcgctgccttcggcccagggtgtgatcctggagacccaggatcgagtcccacgtcgggctccctgcatggagcctgcttctccctctgcttgtgtctctgcctctctccatctgtcgtgaataaataaataaaatcgttaaaaaaaaaaaaaaaaaaaaaaaaaaaaaaaaaaaaaaaaaaaaaaaaaaaaaaa

SEQ ID NO: 6637 - DNA, 660 bp, Canis familiaris
taactggctctttagagaacagtctagttactgctggatagttaaaacattgtctttaagcccaaaccttgctgtcctataatgtttgctgtttacagttcctcccactttgtgcagtgagaaataagcctattctgtctggcgtatggtagcccttcattgttttctcttggccattctctctcctccccccaagttcttttgttccatcttctctacatgaggtcacagggttaaacagtcccagcacgttcatttggcctagtataacatgacctctagactttctcaccagatggtctcactaccccttgtgttatagttgttgctctcaaatgaaaacagtattacagacatggtctcttacagagattattgtttcctttgatctgcatataataaagaaatacgctacctgctcagaacttgtgtgtccttcagttacagctctctgtggtatgggcaggaaggaggataaaagcagagaaactgagaaatgtgtagcaaaccccacaagcctgctgggtcgttttataatttgcacacagtttgtacttgctcagttatctggttttcctggagctgacagtagattagaagcagtaaattggaagtgggacaaaacaaactgataacctaagaagtgacagctgacagaag

SEQ ID NO: 6638 - DNA, 565 bp, Canis familiaris
  misc_feature (1)..(1): n comprises a, c, g, or t, or includes no nucleotide
ncaaggctgtgaagtcctccacaggccccgggagcagcttcggaatgcactctggcacacaggggactcagcatcacaggtgctggctgctttggtaggacccccgcaacgtgggttggaaggaccagacatcctgaccgctggttcctgcagcatcggccccatagtgggctacatcagagtgtcggttctacgagggtcctgagctcggtgccgacatgcacgtggtcctggacgacgaaccatgcggggtgtccgcctgggggtcttttgcttctcccaagagaacatcatctgggccaatctgcgctaccggtgcaatgacaccataccagaggactacgagactcagaggcttctgcaggcctagggatgggggtggggacccattgctggaagatggcaccatcgtggctaccccgtttgttgctcactgcaaccaacagggagcttggcacccggctccaagaggtagctgccctagaggggctcagaaaggacaaaataaagtgtgtatggtggaaagagaattaaacataaaaaaaaaaaaaaaaaaaaaaaaaaa

SEQ ID NO: 6639 - DNA, 417 bp, Canis familiaris
gtgtgtctattgacgatttcaactcggcccctggtgaaaatggacccccgttcccgccttgcctactgcctgggactctctgcgaatgtgacataactattttatgcactggcagcggcggcagcctttcccccccaaggacttctacacagaaggtaatcgagatgcttcccgcagccgcggacgattctccaggactcttttttaccttgagcacttgcctcctgagacttcatagaacagtggtttactgtcccctcttctcccacctccttgctctctctggctctttctgtcttcctcccacccccacccccccacccctccttagccatcacttctgggaagtaaagaacttgacttagtgccgaaaaaaaaaaaaaaaaaaaaaaaaaaaaaaaaaaaaaaaaaaaaaaa

SEQ ID NO: 6640 - DNA, 246 bp, Canis familiaris
  misc_feature (1)..(1): n comprises a, c, g, or t, or includes no nucleotide
nctctgccggccaaaggccaaggccaaggctcgactcaggcccagtctgcagctgctgaccccggctccggctccggctccggctccggctccggctcctgctcctgctcctgctcctgcttctactcctgcagcgcaggctcccaaaggtgcccaggcccccacaaaggccccagtgtagaggcttctgcctgccagtgtgaggacggaaggactggtatgaccccctgggcttctgtctgcatg

SEQ ID NO: 6641 - DNA, 616 bp, Canis familiaris
aaaactgggttctccacccctccccctcttattcccatctaagcatgtggtctctgtgaaggactgatcccagatcagcctcgcacacttgacttctgctcatcaagtgccccattccaaagggagcaggatggagggggaatactatacattctagggggaaagacttaagcctttgagctctccagcctgggaccacacattgcccttttctcagggaaggaaatggaaaccaaaagccaacaggtgcaggggttttgtaagtggaactctggattgactggtcagttgctacaatcagaatatgctttctcggaccatgtttgagactcagaagaataggcttttgtgccataattcttcactagttaagaatgccagcagtttctttgtataaagagacctgcctttaaaatcatacattctgaacattttagtcaagctacaacaggtttggaaaacctctttgggggaggggcgaatataaagtttcctcttttttatctgttccctttgcccttcaaactgcagattttttttttaaagtggggatctgtccctacttgattaaagattgagtggaattctaaaaaaaaaaaaaaaaaaaaaaaaaaaa

SEQ ID NO: 6642 - DNA, 618 bp, Canis familiaris
accattgaaatccttgagtgatggccagctgattagttccggagacaaagtgggaggccagcgaagccacactgctcaacatgctgacatcctccccccgtctcctttgggctgatcatccagcaggttgtttgataaatggcagcattttacaaccctgaaggtgcttgacatgcacagaggaaactctgcattctcgcttcctggagggtgtccgcaacgttgccagcgtatgtctgcagataggttacccgactgttgcatcagtgccccattctatcatcaatggatacaagcgggtcctggctttgtctgtggaaactgattacacctttccacttgctgaaaaggtcaaggccttcttggctgatccatctgcatttgtggctgctgctcctgtggctgctgccaccactgctgcacctgctgctgccgcagccccagccaaggttgaagcaaaggaagagtcggaggaatcggacgaggatatgggatttggtctctttgactaatcaccaaaaagcaaccaattcagccaagtttatttgtgaaacaaggaaataaaggcttacttctcttaaaaaaaaaaaaaaaaaaaaaaaaaaaaaaaaaaaaaaa

SEQ ID NO: 6643 - DNA, 515 bp, Canis familiaris
cctaagtaattctttgactggcctgaagcgcccaagaatcgacagctgtggggacccggactcggccagaggtccagcagtggtatcagcagttccttttataatgggtttcgacgaagcgaaatttgaagatgacatcacttactggctgaaccagagatcgaaatgggcacgtactatgattactaccagcgtcactatgacgaggacgccgtccatcggtccccagagcccctacagcttcaggcacggagccagcgtcaactacgatgactactgaccaaccacccctcggccctcggcgccccggccgcggaggtgacccactgggctgccttgcaccacgtggcttccgctgggctttactccagcagatcttgcctaccccctttctgcagccaggaaggaagagttaaacaatataaatgcctttgatatttcatgcaagtgcctaacatcgcatttcatttaaaaaatagaaataaaagcagtttgttaaaaaaaaaaaaaaaaaa

SEQ ID NO: 6644 - DNA, 635 bp, Canis familiaris
gacttttggacaactggagatcttctttggcaagatcaggaatggagtgttgaggtggagacccggggactactactgcaagggggtttgttctgggtttcactaaggacacagtggcgcagcacctgtgccaggtttggccagttcacagtgccactgggcaggcaaagtgttccctttgagagtctctccctacctaagtggggagattcagaaggcagagatcatgttccggccggtgccccaatcagtgctagtgctcaacattcctgatgtcctggatggcccagagctgcaggacatcctggagatccacttccagaagccctctcgtggaggtggagaggtggagtcccctgagagttgtgcccccgggacagcggggcctggcagtctttactgccacatcgggctaagagcctacccttctcattgcccccacccttcagccaagcctctctaaccaggctggagtcaggtgcattgggtgcaagagattgtgctagtcaacagcggcagggattatgggttgtacaatgctgcccaagaacaataaaagtggcgtgaccttcaaaaaaaaaaaaaaaaaaaaaaaaaaaaaaaaaaaaaaaaaaaaaaaaaaaaaaaaaaaaaaa

SEQ ID NO: 6645 - DNA, 598 bp, Canis familiaris
ggaggagctgaatctggttcaacatagcacaaactgttagggaaaatgaaagtgaacatcaatgatatgtagtccagtaaaatctccctctttagggtgtgttgtgcgtcgtgcgtttgtgttgtgtgttgttgttaatggtgtggttgtgttgtgcgcgcgcccatttatatgtgtgtgtctatgtgcaactcactacccacagcctcactgtgcacttggtcttcacagtgctcgctgagaactctcaccaggttggcgcctgaatgccttactctcagcatcagaggctggcttgctctgtgcagatttttaattttctttgttggccctgggctggttaggacctctacagcttcgttctttcaccattaaatagtggcctttttcagtatttcccccctgtccctttataaaatgctgaagccaccaagcacatttttggggatcatagaaggttggggttccagaaaggcctcttgtgtgatggttcaattcaccatgggatttcccttactcgctgtattctcaacttctaataaaaagaacccaatggaaaaaaaaaaaaaaaaaaaaaaaaaaaaaaaaaaaaaaaaaa

SEQ ID NO: 6646 - DNA, 615 bp, Canis familiaris
ggagagggtgccgcctgaagagaaccagcggcatcaccagcggcggtcgggaccgcggccaccgagcctttgagcgctcctggccgctacaacagacgtggacacaggcttggggacaagactctgtagcatgaccacccagtctggggacctggccatctaaggagcgagaccaagagcggggccgggcccaaggaccgggaagcaaccggcagcaccaccaccaccctccgacaaggagcgctacgcacaggagcggcctgaccatggccagggcccgggcccgggaccagcgctggtcccgctcgcccagcgagggccgagaacacatggcacaccggcagggcagtagttccgtaagtggaagcccagccccctcaacatctggtaccagcactccgcggcggggacgccgccagctcccccagaccccctccaccccccggccacacgtgtcactattcccccgtgatccgtaaggccggcggctcggggcccccgcagcagcagcagcagcagcagcagcagcagcagccggcgcggccgggccgggcggcccccagcggcccgcggaggtacccgggccccgcgaccgcgaccgagcctctggccggg

SEQ ID NO: 6647 - DNA, 603 bp, Canis familiaris
gaaagatgacaaagagaaggagcaggagaaggaaaagggtgacagcaagaaaagaagagataaggagtatattaacctgtagctttttaatttgtgagagttaagatcttataaacgaactcagtgtgccacttgagggttctttgttatttttaagtgcttgttgaaaagctgtaccgctgagaactctggcgcagggtccctcttgctgtggcagagaagcaagtggacagggcctgagaccataccttcagggccactgaggctgctggggtgggggatatgagagctcaggctgcaggccctgcgagaagagtgaagggaatgtaaacattattggtcctcttcactcttctacctatataactggaagttgaattttcccaatctcacaagactcttggggttggttattggcaatctgcaaaaccgcaaaagggaatgcatgaattccataagccttagaacgccctgagttctgagtcattgaactctgtacccatagcctggcaccctcagggctcaggatccagctccatttattgtttacctttcaagacacgaattaaatgacttggtttttaaaaaaaaaaaaaaaaaaaa

SEQ ID NO: 6648 - DNA, 525 bp, Canis familiaris
acggagatatctgtgttggcttcctcttcccctgtgtctcataggtctgtaatttgtcaaatgggatactctgtgtaacttatgcccttatcctaattgttgaccatagagaagtttcacttcatataatcaggaaagttcctttttagcttatttaaaagtagcaccactttcatcggcttgtgtagtgtgaaggtgagggtatcagatggtggtcaacacggggcttcaccaagtctccgctcttcctccagtcttccagttcttgagcctagaggggatgtgtacggtgatctctgacatgaagtctttgctcttaggcttaaagtgcatgggggccgtgcattcctcccagcagtagtcgcttcaccactaacctgtttgggcctagaagtgttcctcatctgtaaatgtgatttaaaacctaagccatgaatatgtcttatttattaaaaccaaaggtttaaaaaaaaaaaaaaaaaaaaaaaaaaaaaaaaaaaaaaaaaaaaaaaaaaaaaaaaaaaa

SEQ ID NO: 6649 - DNA, 614 bp, Canis familiaris
tcttaaagcaacttctctttctgaacactgtagaccaggctctcacgcctggtgggggaggtcatatttattatctttatctgtaatgttcctgtatcagccaaaaagctaactagagactatatttgagaacattcctaggatggccttgttgtaataagtttcttttttttggaaactttttgaaagataatttgaggcacagattcaaagtccagtcagagcaccccctggggggtggtggtggcttttaaggtccaaatccgccagagcaccagctggtgctggtaagagcctccagtgaccaaaggcatatgtttgggtacctgaagctggaaccagagtaggataaagactgttgagccgcaggcccgacacgatttcctctgaactggagaggcggcggtaaggcctggcggaaagagtcatcgcttcagactacgggtgggaagtgagctcagttataacggtgtgggggtggggaagtccaaatcaaagaatgctggaaaacaaatctctactattctttccagccagtggctttttttcttatttattcataaaataaattaatgagttatgcctgcaaaaaaaaaaaaaaaaaaaaaaaaaaa

SEQ ID NO: 6650 - DNA, 614 bp, Canis familiaris
agacttccagcaccgtgcttggcttttttgtatctggttgggtcagagaagaatgagcttgagctattgaaagatatgttccccaagagatggcccttgtttgactagggatcttaggtaggatttggggggatgtgcagggaccagaaaagcaacacgagctctctgtactcactcatttattctttcccatgggaaaagtgggcttgtgctcatttattctttcccgtgactatcttgtgcttgtgctcatttattctttcccgtggctatctcttaggctgtcgccttgcattcacagtctgtataaacacatttgttacatgtgttagtatcaggtatgcaaaacagagtatctattaattgggatttctggatattttggtggtagcttcttttcccagaatctgtgtttttgaaatactaaatgacattgtttattcaatcatctagtggccatttaattgtactaattaacttttgatgagtattttgaatattctaggagaaaacctagaatttcatagtttatgtgtttttccatgttaactatgacctaaatgtattccttctgatataactatatattaaatgtcactgcaaattaaaaaaaa

SEQ ID NO: 6651 - DNA, 673 bp, Canis familiaris
ctggggtcccatgccagggttctagagtctgggccaggtgctgggactatggtaccaatctagtagatgggccatatgtaactctcctaggtaacaccggggcacttggaggagctttctggaggagccaagctgagcctggaccgaggtctgaacaggagacaggcaactgaggcaaacaaggaggcatggatgcccctgatctatttagggaatgattctacagtgagatcgcaaaaacccagtcaacagagtttaggctttttgcttagtttttctgttctttgatgtttttcttttctccccctgttttctttatctattctagtgatgccttaatttgaagctgggtttaaaaaactggaaggaggaggaaattagatctaggaaccttttcagttttgaactaacttggctttttcccccgtttgtattaagattttattagataatcaagattggaatcatcaagtgttaatacaaaaatgaaaagtagaatgggggtctcctgggtagcttagtcaagtgtctgccttcggctcaggtcatgatctcagggtcctgggatcaattcccctgtcaggctccctgctcaaggggaagccagcttctccctctgcccctccccctgcttgtgctcgctctttgaaataaaatcttaaaaaaaaaaaaa

SEQ ID NO: 6652 - DNA, 573 bp, Canis familiaris
cacaaggtctttgaaatctgggggattcttccacttgttgattattggttcctggcaaaacctaatgtgtgtttgaagaagctttctcttgagctatcgctcctctggggcccttttgcttgttcggtgacatgagacagacggttctgtgggttgtccatcaaagcagtggacaagaaggcatctggagctggcaaagtcaccagtcttgcccagtaagctcagaaggctaatgatattatccctatacctgccaccccagtgcttaatcagtggtggaagaacggtctcagaactgtttgtgtcaattggccatttaagtttaatagtaaaagactggttaatgataacaatgcatcgtaaaaccttcagaaggaaaggagaatgttttgtggaccatttgttttttttttttttttttttttgtgcgtgtgtggcagttttaagttattagtttttaaaatcagtactttttaatggaaacaacttgacccaaaatctgtcacagaattttgagacccattaaaacaaaagtttaatgagaaaaaaaaaaaaaaaaaaaaaaaaaaaaaa

SEQ ID NO: 6653 - DNA, 557 bp, Canis familiaris
tcagtgaagccattttcacctttgtagccccactgcttcagggcaagggggatactcagcccagggatgtgccaataagagagcagaagactgtggccttccgccatgtgtgctgtgtgatcccccggtcctgcgctacacctgtcctgcctcctgaagtcctgtcttcctccttgctttgatggactggggaggatggtacggggtggggccaacaggagggtgtgaatgttctggcaacagggagaagcaaggaggacagccgcactgccactctgctgccacactacagtatttctgcctggagccctttgccctgtccctcctcctccgggaggtgctgtagagccgagggaaagaatttgctccaggccaggagcatgaattactactgttcaatttctctcctacttgaccttggtaaactgaaatgttgggggtgaagagaaacaatcactattttttcttttttatctggtaaataattaaaagaaaaaacccgaaaaaaaaaaaaaaaaaaaaaaaaaaaaaaaaaaaaaaaaaaaaaaaaaaaaaaa

SEQ ID NO: 6654 - DNA, 582 bp, Canis familiaris
aacacgaagaagatgggatggggaaggcatctgccagcgacgggtcttccttcgtggtggcccgatacttccccagccgggaatgtcgtcaaccagggcttctttgaagaaaatgtcctgcctccaaagaagtaattcattaaatgtaatgggaaagtggtgacttgacatggatacgaagtgcctagaacaacaaaactcagctgtgtgtctgtccctgtgggtgtatgtgtttgtgtgtgtgatgcatgtgagtgtctcttgatgcacacacacttggatatacaactctgtatgaacttacgcctctcaaaggaattagcatatgaagcctttaccctgttggttacctaaaccataattatttggacttaggggggaaagaatcagttttaaaactttttttttttttaaagcaaacttcttttgtacatttcttataatattcatccgtggtctttttctattccaaatgtttgtgatgcttagaggtgaagttcattttatgtgatcttcatggactgtaatctacttttggtagatatttaagaatattaaactctcatctaaatgtaaaaaaaa

SEQ ID NO: 6655 - DNA, 631 bp, Canis familiaris
gtcctgagccagtcctgaggccagcccgtgccagggtgtctgaggaacatccagaggccacgtggctggaaggggggggggaggggagagagcagttggaaacaaggctaaggttgtgctgagcccagggcctccaaccttgttgatcctgttaagtggggttttccctggagtaagatgagatgggaagccagtagagactgagcagaggacacgtgagctgactttaacggggccaccgtgactcggttgagaagtgattgatagggccaggagtgaaaccagaaggcgagccagcaggctgctgtagtgatccaggtgaccacctgctcccagcggagcaccaagggtgcttgatgtattttgaaaatagaactgacatgatcaggttgttttctgttgcttctatgacaaatcactgcaaagttagtggttatttattctcttccagtctgataggttagaagtccatcgaatgatcaaggggtcgacagggctgtgttcctttctggagactagaagagaatccatttccttgtctactcagcttttagaggccaccctctctctctctctctctctctgtgtgtgtctctcatgaataaataaataaaatcttaaaaaaaaaaaa

SEQ ID NO: 6656 - DNA, 600 bp, Canis familiaris
gtattcagaagtatttttcttgcaggcttctttctgagcctttaccactccagcctagcccctactcctgaactttgggggtttctggcctcttacccggcagtaattcctctgtaacccctttagaagtgccttttacttccaacaccctcagtctcttcctagccctccgggagtattttattacttggagccccatccaatagtttaatagaaggtaaatcgccaacaatatacttccaagccttattcagtgacaatctccttaggcgtatattttacgctattacaggcctccgaatactatgagacatcttttacaatctccgatggggtgtacggatctaccttttttatagccactggattccacggattacacgtaattattggctctacattcctcatcgtgtgcttcctccgacagctatactaccacttcacatcaaaccaccacttcggatttgaagccgctgcatgatattgacactttgttgatgtagtctggctattcttgtatgtatctatttattgatgaggatcctaaaaaaaaaaaaaaaaaaaaaaaaaaaaaaaaaaaaaaaaaaaaaaaaaaaaaaa

SEQ ID NO: 6657 - DNA, 657 bp, Canis familiaris
gtcaccttcggggagatccaggacctgctgaatgttaagatggctctcgacattgagattgccacctaacaggaagtgtctggtaaggtcgaggagaaccaggatttgctcttgcttcctttccaaactttttttgcctgaacctgagggggaaccccacctggatttcaactcccttctggtttgacactcactcaaaaagtacgcttctgattaagaacggtttgaaactaggggatggacaggtttatcaaacgaacttccccagcatcatggatggaccttgagtgaagccttgccccagattcggtgcagcacattacttaccagcaaagtattaaaaaaaaagaaattcgtatcttaaagaaacagctttcaagtgcctttctgcagtttttcaggagcgcaagatagatttggaattaggagtaacctctagttcttaagaaccaacactcttaaaagatttaggagaaagtttacaacataatctagtttacgaagaaaacttgtgctagaatactttttaaaaagtatttttgaataccattaaaactgcttttttccaacaagtatctgaccaacttgtttctgcttcaataaatctttggaaactcaaaaaaaaaaaaaaaaaaaaaaaaaaaaaaaaaaaaaaaa

SEQ ID NO: 6658 - DNA, 596 bp, Canis familiaris
  misc_feature (18)..(18): n comprises a, c, g, or t, or includes no nucleotide
tccgattctggctcgccntccgacattcatgttctgtcaggaggtggtggactccttctggcagtgctaatatcgcctccctgccttcgaagaactcaatcgatttgataaactccgggtttacagcttcttgagcagccccttgctagggcgcaacacatacatggagaagtacgtgtacatctaccggtcccacaagacacaggtattggattcctacgtgtacgaggacaaggatgatctctttgcccgggagccgttcgtggcccagttcacttttcccagcaaggtccttcccagcctggtgctggtcccactgcacaccactccgaaggccgtggagaaggagctgaatgccctgtacgacgtgtttctggacgtctcccagcgctggcagagcaaggacatgatcctgcttggggacttcaacgctgactgcgcctcactgaacaaaaagcgcctggctgagctggcgctgcggaccgaggcgggcttccgctgggtgatcgccgacggggaggacaccacggtgcgggccagcacccactgcgcctacgaccgcatagtgctgcacggggagcgctgccagagtctgc

SEQ ID NO: 6659 - DNA, 572 bp, Canis familiaris
  misc_feature (179)..(179): n comprises a, c, g, or t, or includes no nucleotide
acatgtgtctgatgttggacatgtcgaacacgtggttcatgacagtgtagtagaagcagaaatcgtcaccgatcctctcacaacagatgtcgtttcagaagaagtattggtagcagattgtgcctctgaagcagtcatagatgccaatggaatccctgtggaccagcaagatgatgacnaaagcaactgtgaggactaccttatgatttccttggatgatgctggcaaaatagaacacgatggttcctctggaatgaccatggatgcagagtcggaaattgacccttgtaaggtggatggcacttgcccagaagtcatcaaggtgtacatttttaaagctgaccctggagaggatgacttaggtggcaccgtagacattgtggaaagtgagcctgagaatgatcatggagttgaattacttgatcagagtagcagtattcgtgtgccaagggaaaagatggtttatatgactgtcaacgactctcagcaagaagatgaagatttaaatgttgcggaaatcgccgacgaagtttatatggaggtgatcgtaggggaggaggatgctgcggcag

SEQ ID NO: 6660 - DNA, 646 bp, Canis familiaris
tcaaaataaactgtgaggcaatccaggcaacaccaacactttcaatgctaactttatgaaatggccacaaaaaaaaaaaaaaggtttactcttgagaaacagttactgggatcagttggaaaggtctgctcttgaaatattttaagtactcactgggccaagttacctaacacatctaagtttttgcatttctaagaatctccaccacatcattctttccataggaatgaaacctgaaggtatttagtccctgtcctctggtcctcaagctgggatgcctgccatgctttccacagactctcccgtttattaaaacacaagggatgtttcttttcccagctgcagggatggggtgggtagaggtagggtacttcttttacatccttgttctctggtgtggtgggtggaggtataactttataaaaagtcccctttccttgaagctttcttcttgcgattgaaaatattcacagataacctttcaagtctgctctgctggtagtttaatttgtggcttttctctaaggagtaattatattttctaattcttccatacttgtttttgagtaggctgcttgtaatttaaagtttactgtatactattaaaaaaaagttgccttataaaaaaaaaaaaaaaaaaaaaaaa

SEQ ID NO: 6661 - DNA, 494 bp, Canis familiaris
atccatcaaggcagctaaggcattactgctagctttggaatgacctatacgtcctatcctgtttagtgaggtagcaccatccttattttaaactttttaaatttatagtataagttgttgaacatactccatagcctctatgtgggtacctattattcttatctagttagcatacttgataagtactttcttaaaatttacttaaatctcagtcttaaagggggaaattttgtcttttggcctgacacaatgtggtaaatatggagattaatactttaatgatgatattatgccctgacagttcagatacctgtcaagtataacttccctgtcatctatctgctgctggtgccttccccagagttgctgtaactctggtcttgttcctgcttttctgaggggagaggggagagaatggcggggctgcggggctcaggaaatctgaatgtgtctgagagggaagggaaaaggaaaagtctgtctctgtgatgaga

SEQ ID NO: 6662 - DNA, 502 bp, Canis familiaris
tcagtgaggatagatcgctttatgccagaccgcctgggttccaagcctggctctgccatgtacaagggagctgtgagaccttggtaaagtcaagttaacttatactatagaggtatgtatgttacgccgttattacttttccaggaccgtgtgaatcctgcagatatcacttttcctcttgacgttgtatgctagaatggtcaggtcctcacaagcatgcctttttcaggtgctccttttcccttggcttcatcttatattgtggccttcatgtcccttctgtcccatatttaaatcttgctttatgtgtatgtgtgtgtgtgtgtgtgtgtgtgtgtgtgtgtgtgtaccggagcctcggattccttcttgaaaaaggccgggtaaaattaacataaaaaactgtattaaactgtattaaaagtcttactgtaaccaggaaataaattttgatctaagcttccaaaaaaaaaaaaaaaaaaaaaaaaaaaaaaaaaaaaaa

SEQ ID NO: 6663 - DNA, 622 bp, Canis familiaris
tcagaccttgaaggaagaaatgctcgtcaccttcgggagtaccaggacctgctgaatgttaagatgtctctcggacacttgagattgcccaacctacaggaagcttgtctggaagtcgaggaggacaaggattgctctgcctccttccaacttttcttccctgaacctgagggaaaccaaccctggattcactccctctggttgacactcactcaaaagacgcttctgattaagacggttgaaactaggggatggacaggttatcaacgaaacttctcagcatcatgatgaccttgagtgaagcttgcccagattcggtgcaccattactaccagcaagaataaataaagaaattcgtatcttaaagaaacagctttcaagtgcctttctgcagtttttcaggagcgcaagatagatttggaattaggagtaacctctagttcttaagaaccgacactcttaaaagatttaggagaaagtttacaacataatctagtttacgaagaaaacttgtgctagaatactttttaaaaagtatttttgaataccacttaaaactgcttttttccaacaagtatctgacccacttgtttctgcttcaataaatctttggaaaactcca

SEQ ID NO: 6664 - DNA, 437 bp, Canis familiaris
caagaggaaatcgtcccccagcatcgatatctccgatctcaggttgagtccaggtgcatccaggttgaagaatatatgcgtatcatagcctgtatgctgaccccctgtctgctgttctctctccctcctacctgtcccttcccaggggatggggttgggttctgggccctagcaggagtcaaggggccaggggctactggggttttggaagagtaatttgttcctcaggacggagtccatgggaacagaagggagggcagaggcggggcacagcctgtttctctgtaacattctaggctcagggcagagcacatctggatggggtgggaaggaggctccccatcttttgggagactggtctgtgaaatccactcggggataggcagtgctgtctgcagtgatacccctaataaattgaaccttttaacccaaaaaaa

SEQ ID NO: 6665 - DNA, 609 bp, Canis familiaris
  misc_feature (484)..(485): n comprises a, c, g, or t, or includes no nucleotide
gttcaaccagccgcgcggaatccgcatacgtcaagcccccagtccaaggcccccgcatcgcccccgcgcctgcgtcagggcccatccggccgatcgtccgctgccccacggtgaggtaccacacgaatggtgtcgggccggcaggggcttcagcctggaggagctccgggtggccggcattcacaagaaggtggcgcggaccattggcatctcggtggacccgcggcggcggaacaagtccacggagtccctgcaggccaacgtgcagcggctcaaggaataccgctccaagctcatcctcttccccaggaagccttcagcccccaagaagggcgacagctcagctgaagaactcatactggcaacacagctgacaggaccagtcatgcccatacggaatgtctacagaaggagaaggccagagtcatcacagaagaggagaagaacttcaaggcatttgccagcctccgcatggcccgtgccnnatgcccggctttttggcatcagggccaaaaagggccaaggaagctgcagaacaggatgttgaaaagaaaaaataaagtgctattggcaaccaaaaaaaaaaaaaaaaaaaaaaaaaaaaaaaaa

SEQ ID NO: 6666 - DNA, 631 bp, Canis familiaris
  misc_feature (245)..(245): n comprises a, c, g, or t, or includes no nucleotide
  misc_feature (254)..(255): n comprises a, c, g, or t, or includes no nucleotide
  misc_feature (263)..(264): n comprises a, c, g, or t, or includes no nucleotide
  misc_feature (298)..(299): n comprises a, c, g, or t, or includes no nucleotide
gccattgtggccgaacaggtgcttctgggccggaaggttgtagtcgtgcgctgtgaaggcatcaacatttctggcaagtttctacatgaaacacagttgaagtactctggccttcctccgcaagcgcgatgaaacacctaccccatcccggtggccccgtatcacttccggggcaccgcagccgtatctgtttggcgggacagttaagaggcactgcgtgcccgcacaaggaccacagcgaggcncaggctgcnnctggaccnngcctcaaggtgtttgaatgggatcccaccacccnntatgacaagataaaagcgcaatgtgtggttcccagctgccctcataggtggtacgcctgaagcctaaccaccgaaagtttgcttacctggggcgcctggctcacgaagttggctggaagtaccaggcagtaacagccaccctggaggagaagaggaaggaaaaggcctagatccattatcggaagaagaaacagcttatgaggctacggaaacaggccgaaaagaatgtggagaagaaaattgacaaatacacagaggtcctcaagacccatggactcctggtctgagccccaataaaattgacttattcatccaaaaaaaaaaaaaaaaaa

SEQ ID NO: 6667 - DNA, 568 bp, Canis familiaris
cattatccagcggagcattgactggtctgtgtctgctgcccgcatgtggcccatttggccatggtgggctcatgccatgatggggggcatcctcttggctctcatagagggtgttggcatcctccttactcgctatactgcccagcagttccgcatgcacccccgttcttggaggaccccagccagctaccccctaaggagggtaccccagccccaggctatcccagctatcagcagtaccactaaggaagtgactgtctgtcatcaccaccgtgggagctcctcctccgttccctccccgatgatctacctcgaagggagggctggctccccgttggccctgggaccctccagagagggcctctactctgttcccttgtcccagggcacgggggtggggcaccccagctgctctgacggatgggtccccttctctctcagggcaccccaacccccaaattcacatgtaacagttctcatccccagtcccctttcctggcgcccctgatgagtatttaaagcccatttgaaatgcccaaaaaaaaaaaaaaaaaaaaaaaaataaaaa

SEQ ID NO: 6668 - DNA, 619 bp, Canis familiaris
cataggaacccttccacaagactgaagtatgagctggacgcccccggcccaacactaagattgcccccgccgcatacacacagtacgagtcccggggaggccataagaatgtacccgaccttgaggctagacgtggggaacttctcctggggctcggagtgttgtacacgccaaaccaggattatcgatgttgtctataatgcatccaacaatgaactggtccgcaccagaccctggtgaagaactgtatcgtgctcattgacagcacaccgtaccgacagtggtacgagtcccactacgcactgcccctgggacgcaagaagggggccaagctgacgcctgaggaggaagagattttaaataaaaacgatcaagaaaatccagaagaagtatgatgaaaggaaaaagaatgcccaaatcagcagtcttctggaggagcagttccacacgggcaagcttcttgcatgcatcgcttcgagaccaggccagtgcggccgggcagatggctatgtgctagagggcaaggagctggagttctatctgaggaaaatcaagcccggaaaggcaaataaatcttctgtcttcggtcatgtaataaaaaaaaaaaaaaaaaaaaaaa

SEQ ID NO: 6669 - DNA, 626 bp, Canis familiaris
cctgcaggctatacgcctgagtactcgcgatcccgttggagcttattgcgatcaggccaccaagtctggcttcactggtggctgtgttgtggacttcccccatagcgcccagtgcttagtagttctacctctgctgttttctgggccttcgacctttatgcccaagcccctgtatgacatgtatacgagagtggatgaggaagaggaggtccaggagtccgtgttcacaagagaggaggatcccatacaggtatcgcatgccgtcggggtagtaaggaagagccgtgagtgggtggctggagaagaaggaacgccggagtgcggcagggcacaggaagtcagacctgacacccagtacaccggccgcaagcgcaagccccgcttctaggtggtttgcttaggctgcacgcggttattatcaggccagaagttttctctgttgaagtgcctacatccgtcagctgaccaaaatattgttttagaaaagttttcatgttctaacagtttctcttcacttaaccaaagttttaatagcatcttattttgttctaaaagccataaaccccttcctgtggaattgcgaaaaaaaaaaaaaaaaaaaaaaaaaaaaaaaaaaaaaaaaaaaa

SEQ ID NO: 6670 - DNA, 562 bp, Canis familiaris
tccggggagccataagaagtacccgatccttgaggctagacgtggggacttctcctggggctcgtgagtgtttgtacacgctaacccaggattatcgatgttgtgctataatgcatccaacaatgaactgtcccgcaccagacccctgtgaagaaactgtatcgtgctcattgacagcacaccgtaccgacagtggtacgagtccccctacgccctgcccctgggacgcaagaagggggcccagctgacgcctgaggaggaagagattttaaattaaaacgatcaagaaaatcccgaagaaggtatgatgaaaggaaaaagaatgcccaaatcagcagtcttctggaggagcacgttcccacacgggcatgcttcttgcatgcatcgcttcgagatccacggccacgtgcggccgggcacgatggctatgtgctagagggcacaggagctggagttctatctgaggaaaatccaagcccggaaaggccaaataaatcttctgtcttcggtcatgtaataaaggtgtttattgttctgtcctgtgaaaaaaaaaaaaaaaaaa

SEQ ID NO: 6671 - DNA, 665 bp, Canis familiaris
caagtccagattcctctccacggcatcacccacgtcatcgatatatggcacagatatcgtcatcagaaaccccggtcactaagatacgaatctcttaagggggtagaccccaagttcctgaggacaatgcgcttttgcccagaatgcacaacaaagaagggcctggaagaatgaaatgcaggccctaccaattgcccaaggtccatggctgcgcgtgctgaggctatcaaggctcttgtcaagcccaaggaggttaagcccaagatcccatagggcggcagcctgcaagctcaatcgacttgcctacatcgctcaccccaagctcgggaaacgtgctcgtgcccgcattgccaaaggtctcaggctctgccggccaaaggccaaggccaaggctcaaaccaaggcccaggctgcagctgcgaccccggctccggctccggctccggctccggctcctgctcctgctcctgctcctgctcctgcttctactcctgcagcgcaggctcccataggtgcccaggcccccatcaaggccccagtgtagaggcttctgcctgccagtgtgaggacggaaggactggtatgacccctgggcttctgtctgcatgggcccggtgtcctcctgtgctatttgtacaaataaacctgcggcaggatctgtcaaa

SEQ ID NO: 6672 - DNA, 621 bp, Canis familiaris
tctgatgagttccccttatgtggccacatgtgtcagatgagtatggatcagcttctcctctgaagctctggaggctgcccgtattttgttccaccagtaccttggtgaaatctgtggccaagatggttttcacatccgagtggcggctccatcccttccatgttatccgtatcaacaagatgttgtcctgtgctggaggctgacaggctgcagacaggtatgtcgaggtgcctttgggaagccccatgggcacatgtagccagggtccacattggccaagtcatcatgtccatccgtacccagctgcagaacaaggagcatgtgattgaggccctacgcagggccaagttcaagttccctggccgccagaagatccacatctcctagaagtggggctttactaagtttaatgcggacgaatttgaagatatggtggccgaaaagcggctcatcccagatggctgtggggtcaaatacatccctaatcgtggccccttggacacaatggagggctctccactcatgagaaccttgcaccacccgaaccctattcatgcccacccataaatcctgcttcctgtccaaaaaaaaaaaaaaaaaaaaaaaaaaaaaaaaaaaaaa

SEQ ID NO: 6673 - DNA, 603 bp, Canis familiaris
aggtattatcctacttgtagatgtgcctcgcatagctgttgagccatggcccaaatacctgtgtcagtcacgcatgtgagaaagttgcgagctagcatccagctcctgggaccacttttgatctatcctcatctgggcgccacagagggccaagagggtagttgttcctgaagccactggagcagtggcttgctacttgtggactgggacctctggccctcaaccgagttcctctgcgtagtacacaccagaaatttgtcattgccacttcctaccctgaattgatataagcagtgtgaaaatcccccgacatctcactgatgcttatttcaagaagaagaagctgcgtaaacccagacaccaggaaggggagatttttgacacagagaaggagaaatacgagattacagagcagcgcaaggttgatcagaaagctgtggactcgcaaattctgcccaaaatccaagctgttcctcagcttcagggctacctccgctctgtgttttctctcaccaatggagtttaccctcaccaattggtgttctaaatttcttaccaagaacctaattaaaccactgatccatttaaaaaaaaaaaaaaaaa

SEQ ID NO: 6674 - DNA, 519 bp, Canis familiaris
gtggtacctagtcaagatctgtcgtccaattttgcacctactggcatcgatggagccatgaccatttgggatttcgagaccttagagtcttccatccagggccttcggataatgtgaagctgagtgagcctcccagatccagcatgaccaactgacatgactgaccaactgaccaatgtgctgacacagccccaccgtgtgcatggtggtgaggagagccagccgcataggaaaccctgaagacacactttggcgcccatatcgtttgtgtgtttttttgtttgaatataagtggtgatcacgtgttggttttttaaaagcagcaacgtgatttgggggtttttttgtttgtttgtttttttgtttttgctatttcattccattcttgacccaagcttctctttaagtagtttattatggaaaattgtcacactaacttaaaggaaagggtgggaaatatgtaaattgtctgctaaaccattaaataaaaatactgaatgtggaaaaaaaaaaaaaaaa

SEQ ID NO: 6675 - DNA, 640 bp, Canis familiaris
agggtggtaccggtccggtattcccgggatcagagaagacatccgcaagggagagtcagatataatgtccaccttcccggagcaccaccgggctcacagcccccaggcccagaggacgaagaccccagcctggatgagtatgacctctatagcctggctcattcctgcctgggagtgggaggccggaaaggtcgcaccaagagagaagctgctgccaacaccaaccgccccagccctggtggccatgagaggaagctggtgactaagctccagaacacggagcggaaaaagtcggggggcacggtcctgagacggagctggaaatgaggccagagcacggacaccacacagcgacgaagacaggaccacggatcggcacctggaggcaggatccagacctgcttgccccccaccccacccccaggacttaccctacctgaccgaggctccgaggggccaccaaggaagtgactccagccccagaaaaaggacaagataggaagcaagaggcagggaatgaatggagaggcagagtcgcaaaggtaccccctaaaaagaaaaacacctgaagaaattggctctcctggagtgtgggaaggaaggacaataaacacagtacatctgccaaaaaaaaaaaaaa

SEQ ID NO: 6676 - DNA, 569 bp, Canis familiaris
cttgtacatagtgatgggcattgagccacacctcttctgagactgaatattgaagcttttgttttgagttatgtttataacatgttatttcagaccataaatgattcagatttgtgaccaaggccttaaagtgaagatgtcccttcagtgtcagagtggtatttatttttgtagattttaatccttgaattttagaggatgtttctcaccctgaatttggaattttaaagattttaaaccatcttaatatttggccatgcagtccacctgatagtatggctcattataatcatctgtgcaccattaggaagaacacttggccttggcttctgggataatgattttctgatacaggtaataaaccatatttctagatattgagagttttctggctctcagcttttggttttctgtgaaatctcccactggtcttacacacatacttaatctgagaagttgagaatttgaaccattatgtcctggtattttgtttcctaacccattaaatggtattgtccataagcgttaaaaaaaaaaaaaaaaaaaaaaaaaaaaaaaaaaaaaaaaaa

SEQ ID NO: 6677 - DNA, 629 bp, Canis familiaris
ctttaggttataatatgtattttttctacacgtatacacgtctgtaaattggtgtatattatactttgtatatggttaggaccaagagctttacacggaggctaaagtcttttagcccagagatagtacgtattggccgaggtcatgaaattggcgcttctgctgacggttcctgttactgaagggtaccccgtgacaccccttctgtcacattgaatgaagatcaagtccctacttttgatgaacagccaacctgagaacaccattagcactggcacatcggactcccttacgctgacttacccagcgaagtaactggtattaccggctttcattgtaagggattgaaaatactacttggtcgacactgaaaaacactatgaagtagtaattatacaagtaacgttctataactccaacatgttgaaaatattattggacaccagaaccctgatatttaatttatattccctgctgcagacgttagcctactttaacgctttagccattacatacatgttttggctacaccctgaacacccaactaaagtcccccaggaggaataaaaactgagccaattcctgaaaaaaaaaaaaaaaaaaaaaaaaaaaaaaaaaaaaaaaaaagg

SEQ ID NO: 6678 - DNA, 633 bp, Canis familiaris
ggacctgcgtgaatgttaagatggctctcgaccttgagattgcccacctaccggaagctgtctggaaggcgaggagagcacggattgctctgcctcttcccaacttttcttccctgaacctgagggaaacccacctggattcactccctctggttgacactcactccaaaagacgcttctgattaagacggttgaaactagggatggaccggttatccacgagaacttctcagcatcatgatgacccctgagtgaagcttgccccgattcggtgcagccattactacccgccagagatataaaaaaaaaagagaattcgtattctttaagagaaccgctttccagtgcccttctgccgtttttccaggagcgccagatagattttgggaataaggagtaaccctctagttcttaagaacccacactcttaaaagatttaggagaaagtttaccacataatctagtttacgaagaaaacttgtgctagaatactttttaaaaagtatttttgaatacccttaaaactgcttttttcccaccagtatctgacccacttgtttctgcttccataaatctttggaaaactccaaaaaaaaaaaaaaaaaaaaaaaaaaaaaaaaaaaaaaaaaaaaa

SEQ ID NO: 6679 - DNA, 560 bp, Canis familiaris
ccaaggtcggagagctgaaaagcctgtcagcctgggacaccccggttccctgaagaagggcaagaccccaccagtggctgtcacgtcccccatcactcacacagcccagagcgccctcaaagtcgcaggcaaacctgagggcaaagccacggacaagggtaaacttgccgtgaagaccactgggctccagcgctcgtcctccgacgccggccgggaccgcctgagcgacgctaagaagcccccgtcgggcatcgctcgcccctccacctcgggctctttcggctacaagaagcctcctccggccacaggtacggccaccgtcatgcagaccgggggatcggccacgctcagcaagatccagaagtcctcgggcatccccgtcaagcccgtgaacggccgcaagacgagcctcgatgtgtccaacggcgccgagcccgggttcctggcgcccggcgcccgttccaacatccagtaccgcggcctgtcagcagcagcatcgaccccagcctcctcagcaccaagcaggggggcctcgcgccctccagactcaaggagccttc

SEQ ID NO: 6680 - DNA, 463 bp, Canis familiaris
agagagtggataaggaggaggggatcagcccttccgagagacctgaattcttaattctttctgtggctggagagtttgacggatttgctttttacaaacaagcccgccaactttttttttgtttactttatcactaacagatatattaaccacgttttaagaagtccgtacgaatacaaattcttaaacccctcttataatatggcatctttcaatttctgtataaaaccagatctttaaaaaaatatttctgtaacttaagaaacctggcatttaaatcatattttgtccttaggtaaggtttggtttgtgtttgtgttttgtttgttttgcttgttccccccccccccaaaccttttgttctctctgtgaactcatctttccttttttctttcttttttttttgtatattattgtttacccataaatataccttgcattaaaaagaaaaaaaaaaaaaaaa

SEQ ID NO: 6681 - DNA, 570 bp, Canis familiaris
ccggattcccgggataaaaacctttcagtccagcatgtgagaaagttgtcgagctagcatcactcctgggaccacttttgatcatcctcactgggcgccaacagaggcaaagagggtagttttcctgaagccacttgagcacgtggcttgctacttgtgactggacctctggccctcaaccgagttcctctgcgtagaacacaccagaaatttgtcattgccacttccacccaaattgatataagcagtgtgaaaatcccccaacatctcactgatgcttatttcaagaagaagaagctgcgtaaacccagacaccaggaaggggagatttttgacacagagaaggagaaatacgagattacagagcagcgcaaggttgatcagaaagctgtggactcgcaaattctgcccaaaatccaagctgttcctcagcttcagggctacctccgctctgtgttttctctcaccaatggagtttaccctcaccaattggtgttctaaatttcttaccaagaacctaattaaaccactgatccctttcaaaaaaaaaaaaaaaaaaaaaaaaaacaa

SEQ ID NO: 6682 - DNA, 655 bp, Canis familiaris
cgtgctccattgcaaccacacgtcatctcatcttaactattaccgtaattccccgtgccctgattgtctccaaaaatggcctttattccaatgttaatccaaacttggaatccgcatttcaggacccaatggtttgcatcctgtctccttatggtccccagaaacctctttttaatctatccctgtgaccatgacaccacatttgttgaagagatcggccccactttgtcctcgcattcttgaactttatttattccttttaataaataaagacttttataaaagaatactttattgtttcccttttacttttggaaaagattccaccttggcagcgcacataatttgattttcctttctgaagtatgtgagtaagctgctgacgtgattgatgccccatcacacctgctattgtttgctatttattcataccggtgtggactcataggttcctattttattcacatgggtaataatgagctaccatctttattttcacgctgtaccgttccatgtgtggctagtgggaggcccttcaagcggcttcaaggcccttcaagtgtcctttggatgtgacctgtctccctattctttgatcacttttgtagcttttggtaccaaaaaaaaaaacaaaaaaaaaaaaaaaaaaaaaaaa

SEQ ID NO: 6683 - DNA, 529 bp, Canis familiaris
gatctgcatttccagaacattctttggtaataatgctgtattagataataatcataggattagataaacatcaaacaaagtgtagctggagtcttacccagattgaactctggaccccagacccagaaatgaaggccatcaatagcttctttcttgaggaagcctgactggccttgtttaaaaggggaggagctggagtggattctggcattctctggaggtttctgccctgacgtaagtctggagtaataggtcgggccttgccgaccaaaggcctggagacctgaccttaaatttttgtttctttagtcctttctttgtcccacttccttgaaaccacagccaggaggcctcaaatctttcattctcctttcccatctttgtttactgcattttactggaattagcatcatcactcctttcatctcatgtcctcattttacacagaaggaaacatccagtgagaagttttttgggttagtgcccaagatcacatgggtgtttgtcagtgagtgactgccacaaacag

SEQ ID NO: 6684 - DNA, 486 bp, Canis familiaris
  misc_feature (1)..(1): n comprises a, c, g, or t, or includes no nucleotide
ncagtggccgttacatggcaagaagctcatgactgtgcgcacttgtcaagcatgccttcgagatcatccatctgctcactggtgagaaccccctgcaggtcctggtgaatgcccttattacccgtggtccccgggaagactcaacccgcattgggcgagctggaaccgtgaggcgtcaggctgtcgatgtgtcccccctacgccgtgtgaatcaggccactttggctgctgtgcacccggtgcccgtgaggccgccttccggacatcagactattgctgagtgcctagcagatgagctcatcaatgcatgcccagggctcttcccattcctatgctatccagaagaaggatgagctggaacgtgtggcccagtctaaccgttgatcacctggctgtggcttccaataaacctgtctgcccttggggcagcctccaaaaaaaaaaaaaaaaaaaaaaaaaaaaaaaataaaaaaaaaaaaaaaaaaa

SEQ ID NO: 6685 - DNA, 471 bp, Canis familiaris
  misc_feature (1)..(1): n comprises a, c, g, or t, or includes no nucleotide
natcctaccagatgttgtcctgtgctggagctgacccggctgcatgaccggtatgcgaggtgcctttgggaagcccccgggccccgtagccagggtccaccattggcccagtcatcatggtccatccgttacccagctgcagacccaggagcatgtgattgaggccctacgcagggcccagttcaagttccctggccgcccagaagatcccacatctcccagaagtggggctttactaagtttaatgcggacgaatttgaagatatggtggccgaaaagcggctcatccccgatggctgtggggtccaatacatccctaatcgtggccccttggaccaatggagggctctccactcatgagaaccttgcaccacccgaaccctattcatgcccccccataaatcctgcttcctgtccaaaaaaaaaaaaaaaaaaaaaaaaaaaaaaaaaaaaaaaaaaaaaaaaaaaaaa

SEQ ID NO: 6686 - DNA, 556 bp, Canis familiaris
gatgagtatgacctctttagcctgctcattcctgcctgggatgtgggaggccggaaagtcgcacccagagatgaagctttctgcctacaccgaccgccccatgccctggtggccctgagaggaagctggtgactaagctccagaacacggatcggaaaaagcggggggcacggtcctgagacggagctggaaatgaggccacgagcacggacaccacacagcgatcgaagtacaggaccaccggatcggcacctggaggcaggatccagacctgcttgcccccaccccacccccaggacttaccctacctgaccgaggctccgaggggccaccaaggaagtgactccagccccagaaaaaggacaagataggaagcaagaggcagggaatgaatggagaggcagagtcgccaaaggtaccccctaaaaagaaagacactgtaagaaattggctctcctggagtgtgggaaggaaggaccataaaccaagtacatctgccaaaaaaaaaaaaaaaaaaaaaaaaaaaaaaaaaaaaaaaaaaaaaaaaaaaaaaaaa

SEQ ID NO: 6687 - DNA, 602 bp, Canis familiaris
aagtggatgtgcccaaggcgccagggcttgcctggtcctggagcgcgtgcactttgagaagtataaccacgcgcttcggcaacgatgggctgcacgagccactggactggacacgggaggagtcgggggtcacagcattcaaggagcagcacatctaccccaccatcatcagcactgagcgccacgaaaggtccatggcccagtggctgagcaccctgcccgtgcatgacttcaatgccactgcccacatggcagtgggcgcaggcaccaaggtgcccagccctccagaagacagtgactgaggtggaggctgccttaagagtgccttggggtagcccacaggtgcaaggagccgccacggcgggccgtccttgccaccataggagagccacactgcggcactgccacctcagggtcgtgagacctgcatcatgttgggtttcatcacaggaggacctgttgcgagtgtgttcttagctgtcattaactgtatacacctcagagtgtaaagacactatttttttaaagaagccattttcttattaaataagaccaactttgtttaaatcaccaaaaaaaaaaaaaaaaaaaaaaaaaaaaaa

SEQ ID NO: 6688 - DNA, 506 bp, Canis familiaris
taggggctgccttgctgggctgtcgggctctttcacagccggcctacccagagtagccggcctacactcctctgaagcaaccaccattttatgtatctcttgcactacacctctcagtgaggcactgcattctgagaaggttctctgctagtatctcttcactctttgcagaggttttgggatctcaacaggattgtccttgagaggtggggttataaatgcatcattttcaggggtataaatagaagaatcttttgaggggggagggccaaggaatctgtcttctcgcagtgcatcattttcaggaatataaacagaagtatcttttggaggaaagggcgcaagaatgttttctcccaaggcacttctgaggatagagttgattacctgaatgttgaggactacatttttttgtccctaaaacactatataaaatggattttaataaatttctgctttaaccaaaaaaaaaaaaaaaaaaaaaaaaaaaaaaaaaaaaaaaaaaa

SEQ ID NO: 6689 - DNA, 561 bp, Canis familiaris
ccagctgttgaagtcctccacaggccccggggagcagttgcggaatgcactctggcacacaggggacaacagcatgcaacaggtgtcggtcttgctgtggaaggaccccccgcaactgtgggttggaagtgacaagacatcctaccgtctgggttcctgcagcatcggccccaagtgggctacatcagagttcggttctacgagggtcctgagctggtggccgacagcaacgtggtcctggacacaaccatgcggggtgctcgcctgggggtcttttgcttctcccaagagaacatcatctgggccaatctgcgctaccggtgcaatgacaccataccagaggactacgagactcagaggcttctgcaggcctagggatgggggtggggacccattgctggaagatggcaccatcgtggctacccgtttgttgctcactgcaacaaacagggagcttggcacccggctccaagaggtagctgccctagaggggctcagaaaggacaaaataaagtgtgtgtggtggaaaaaaaaaaaaaaaaaaaaaaaaaaaaaaaaaaa

SEQ ID NO: 6690 - DNA, 680 bp, Canis familiaris
catgggccgtcctcccattctacaccaccctcgtcaccctcatcagcatctctctgcttctacaggtggtcatttggaatcctgctcgtggtcattgcacagctgaaccctccatgaggtagaaaagcaatggcagctcaaccaactcaacaacactgccaccacccctggtcttcatcactgtcgttgtcaacgtcttcatcacggcctttggggcacacaagacaggcttcctggctgccaggacctcaaggaatctgctctgagacacagcctgggacccaggtcctaggtcctggaatggcttctgcctctttactctccacactgctaggacgatgggcactttccacagcccctaggagagctcccagaagggcggtggagatgcccttgctccctacccacagcttctgaattaagatgtgttattttactggtctaagtgaatcccatcttggtctggagtcctgagctcagactgcggtactgccaacctttctctctggtggcgtctcctgcatctaaggagtgtctgcctaaagccaagcctgcccaggttcaggcctctagttcatactccgcttcattcctcccctctgccctatccattttctcctttttgtaaaatggaatgatctctataaagttttctgcaaaaaaaaaaaaaaaaaaaaaaa

SEQ ID NO: 6691 - DNA, 484 bp, Canis familiaris
gacaggtaccgttttggggcatgggggcatcacatgggatgcttgtataattgaccacctcgccttctctcccctaccccacccccagagtcacttcctaggacacccgagctgcttgcccagggtcctgtttccctgcgatctccagagaagcaccccagggctttgtgacagtctctaactccctccccctctcgttaagaatcatattgtatagtagctttcagaccatacagtattcattgggttactcctattattatcaagtagctggaattgtgaaggtcggagtagttagatctttagcttttattccttatttttttgtattactatccactgtgtataaattattgatcatgttgctggcttttataaactctaagcgaaggaggagcactgcctctgcctttgcaaatggtaatgaagcactgtttttaaataaaagagagaaacacccaaaaaaaaaaaaaaaaaaaaaaaa

SEQ ID NO: 6692 - DNA, 495 bp, Canis familiaris
cgctatctccgaagcccttcccacactgtgagcccccaactgtccctgttgggccacaaacagcattaagggatgccgctagagccgggccaggcctcctggcctgcccatccgcccgccgtgggggcccagagaacatccgaaggcagagaagagcccccagggtgatgtggccatgaggaaggcagccttgggcctcctgcctccacagttctttgcctctcgaacttgctagcagtttgaactacctgcggaggagatagggcaggaagggcgagggcctgcctccgacttgccctgtccttggaggctctgggggaagagcggggctctccctgggaagagggtgggctcctttctcagcttgttctattccccactcacacccccaggcagggttggaaatgaaggacttttttaaccttttgtttttgttttttaaaaataaatctgtaaaatctgaaaaaaaaaaaaaaaaaaaaaaaaaaaaaaaaa

SEQ ID NO: 6693 - DNA, 553 bp, Canis familiaris
cttgaaatttcattgaataaagcttaacaggctgattaaatgccacagtaataagtagctgttcatcacgatcagattccaagaaggtcatatcttttcgtaaacagttgtcaaatccatgctcatcactttcattaaggcattcacagccagctttgttaataaaaggcattaaatccatatagcctttgggaatatctgtgtcctcattgcttccagggtcattttctaagtgctgcttgattttttcttctaatccaacagcatctgctccttgatattgatcaattctcactttgtttcgaaaaaacagaaatgtaggtgttgctgatatattgttggtggcagctgttccctgacactgatgtacatctacttccaagaaaactgcctgtggatacttattactcatagaactgaatgctggggcaatccttaaacatggtccacacccgcgcatggtgaacttgaccacggcgagtctggagcccgcgccgctcagctccggctggaagtccgggtcgctcccgaccggcttcacgcccaccattct

SEQ ID NO: 6694 - DNA, 641 bp, Canis familiaris
tgctacctgatgcccaccaaggatgtggacaaagcaccgctgtgacaagaagcgccacctgggccatgactttgtgtccatcgtctacaacgactctggtgaggacttcaagctgggcaccatccgaggccagttcaacttcgtccacgtgatcatcacccccctggactatgagtgcaacctggtgtccctgcagtgcaggaaagacatggaaggtcttgtggatactagcgtggccaagatcgtgtctgaccgcaacctgccttttgtggcacgtcagatggctttgcatgcaaatatggcctcacaagtgcatcatagccgctccaaccccaccgacatctatccctccaagtggattgccaggcttcgccacatcaagcgactccgccaccggatccgcgaggaagcccactacaccaaccccagcctgccactgatgcagatgcaccccccgggccaccccaaagcctctgctcaggcgccggcagagcctgtgcccacgtatgagacaggccagcggaagcgtctcatctcctctgtggatgacttcacggagtttgtgtgaggggtccccctgcctgtatgtgcgcccctgaaataaagcaggtatagccctcgaggctcacagacaaaaaaaa

SEQ ID NO: 6695 - DNA, 406 bp, Canis familiaris
tagcgtctgcctttggctcaggtcacgatcccccaggtcctgggattgagtcctgcatcaggctccctgctcagcggggcgtctgcttctccctctgcctcctccccctgtctgacctgtgctccagtgctctctctctctttctttctctctctctctctttttttttttttttttaaatcttatttatttattcatgagagacagagagaggcagagacacgggcagagggagaaacaggctccacacaggaagcccgacatgggactcgatcctgggtcgccaggatggcgccctgggccgcaggaggcgctaaaccactgagccacccgggctgcccctctctctctctcttgaagaaataaaatcttttttaaaaaataaaaaaaaaaaaaaaaaaaaaaa

SEQ ID NO: 6696 - DNA, 629 bp, Canis familiaris
agccccttctctcggaggccgggatccctcttgtcccaagccggctcaggtgtcccgtgggggcagaggaattcaaagggaggcctgccaggctcacggagaggatttactgagatttatatgagatttaatgcttgagacccctccccccctccccccccagggacaggggtctgagtcactggccgtgcctgcccacaaactgatttctcacggggtgtcaccccaccggggcgccaagcctcactattacttgaactttcccaaacctagagaggaaaagtgcaatgcgtgttgtatatacagaggtaactatcaatatttaagttcgttgctgtcagaagattttttttgtaacttcaaatatagagatatttttgtacgttatatattgtattaagggcatttaaaaacccttgcattgtccccctccccacttattttaatacgtgaatgtctcagcgaggtgtaacgttgtttttgctgcagagtgtgtgagtgtgcgtgagagacttattacctcttgtggaagaaggaacaccgtgtctctgcattatctatttacataaaatgggtgatatgcgaaaatagcaaatcaataataaaaaaaaaaaaaaaaaaaaaaaaaa

SEQ ID NO: 6697 - DNA, 624 bp, Canis familiaris
ctcttagcaactttcaagtataccatacggtattattaaatgtagtcaccaggctgtaaccctggataaatatgacagagaatagtgtggggaagtgggagcaagagtctactttagataggaccttagggaaagcatctcaaaacaggcgtttcagcctggacacctgaaagctggggaggagccagtcaagcaaagagccacgtccggggtcgggcctgtcaggtacagtagcctgattgggagactggcatgttctaaaagtgggtagaagtctggtgtggctaaatactgatggaggagaataagcaggaacagtgtgaatgaggttggcagatcagggtggatctcaccatgtgtggagcctgatgcagggcctgatctcacaaccctgagattatgacctgagccaaaatcaagtgtcagacgctcaactgactgagccacccaggtgccccagtattgttttgaattttaaaagggtaggaaagaatgagattgaaagggaaatatcatatatggaatttaaaatgcatatttacaaaattagactgcatgttcttccacaatccatcccatatataaggacatttactcaaaaaaaaaaaaaaaaaaaaaaaaggg

SEQ ID NO: 6698 - DNA, 610 bp, Canis familiaris
gactgggacgcaggctttaaggagggcacgcagttatgcccgtgggcgatctgggggccaggtacgagatgagtatcggcaggactatgacgctgggagaggcggctatggaaaactggcccaaaaccagtgagtggtgagagccccatcagtgaaaactcacttctttggcctgttgaatttgccatgcattacccaaggtctgcgagcctgcccatttctgccatgctttgatcaaggtctctattgagctggaagccttttcatggttttcctttgaaaactattaaaggacagaattcaaaagaatgcctttattctgtagtcttagaatcttggctgtaggtcagattactagaatgattttatgttaccaggtcagaatttgtgcatcatggcacagattcgatctattggccccaaaccctatgcttcttttaggaagataggaaatttttaaaatttatagttggttcatggtcttaattgggaccttaaaatttgtgtttgcaggagataaaatataagtgaggttttgctatgttgtatagctttgctctaaattagatgtttgacaactaaaaaaaaaaaaaaaaaaaaaaaaaaaaaa

SEQ ID NO: 6699 - DNA, 636 bp, Canis familiaris
  misc_feature (187)..(187): n comprises a, c, g, or t, or includes no nucleotide
  misc_feature (320)..(320): n comprises a, c, g, or t, or includes no nucleotide
ggtatcaatctgcacccctcttaagtggatattgtgccaagcaaacatgctcttcgggtttttttaaatgcctccgggtgaacttgctgagtaccccaggtatagtaatttctgacatctgcccaggacctgtgcaatcaaatattgtgaagtactccctaactgaagaagtaacaaagtctgtagngcattgatacagtccagtcccacaagatggcgaccagtcgttgtgtgcggctgatgttaatcagcatggccaatgatttgaaagaagtttggattgcggatcacccttttttgttggtggtatatttgtggcnatatatgccaacctgggcttggtggctaaccaacatattagggaagaaaagaattgagaactttaagaatggtttggatgcagatatctcttactttaaaacctggaagacaaaacatgattgaaggagtgcttgcatttttttagaccgctggagggagaaatgaaaactgcaatcttcttatacactgaaaattaacttcggattttatttttcagtagataaagcttttctttcaacatgtaataattaataaataaaagcttgccacgaatcttgcaataaagatattaacacatgctgcaaaaaaaaaaaa

SEQ ID NO: 6700 - DNA, 553 bp, Canis familiaris
tatctacattgtgtatgttattatgtacacaattgcctaaagtcaagagtaggtgttggctctctgggatcttactgggaccaaaattgtctgatagtggtaactaggcctggagaggattcttttctggaagagccccgtttgtccctggacttacagctcctgcctccagctctgctctttttggtcctctaccagctttgaggagaattagaataacactgccatggtgctataaagtcctcgccagagagtcaagcactccctctaaggcagtggttctcaaagtttggttccagaccagcagcatctccatcacttgggcacttgtgagaactgcaaattctcagacaccacctaagcatcctgaagcagatattcagggcctggaactaacgcccagtgttttaaccagtccactacaggattgtgatttgagccaacgtctgagaagtactgcaggaagtgataatgtgaccatatgaatgtttaattgaatgctttaatgaatttaaaatattttccccgcaaaataaaaaaaaaaaaaaaaaaa

SEQ ID NO: 6701 - DNA, 596 bp, Canis familiaris
ccctcttgactcttgattttcttgtctcgctccttgtgtcctccgttcctgtcgttccttcgctttccttccgttccttccgtccttccgtccttgcgtgtccttccttcttttccgttccgttcctgtccttaactttttggtgatgttgctcttcatgtttctttggtccctccaagatatttttgaggtccccctctattttgtattttactaatattaccagaatagtttactctgtctcttgcttcctgcttgtccacgcacaccggatcacacacacatacacacacatacacccatgctcatgaacccaggttgggagaaggcctaggctgggtctgctgcccacgccctcccccttccccctccgggacagggacaggggacatgtggtagaccagccggactcctcccttgcccggctcgcccgcctacccccctcacagcatactctggtcataaccttgtgtattatgcagtcatttcggtttttgcagatgcgcctaccatttacagaaaagtgactctggctgttattattttgtttgtttgtttccctatgcaaaaaaaaaaaaaaagaaaaaagaaaaaat

SEQ ID NO: 6702 - DNA, 619 bp, Canis familiaris
agggctcggaagaagtaggaccgcttgtcttccagttcccaagcatagcgcgagatcataccctctcgtggaagaagattaccctgactcataccaggacacttacaaccccataggaaccgaggatcgcctgggggatatagccatgactcccgacataggcttttgagtctgcagaagcaaaccaaaaattcatctgttgaccatttgccatagcactgctaggataaacccatcatcttaacttggcaagtacagcacggtatttactgtgcttgtgggctgttgtcatttgatgctaagcaaggggcaaaaaacaacaacaaaaaagtacgttatgcccttaagtctagatggttattagatgcccagtcatatagatatttttaagctcagcatttacataacagtaccttttgttttcttcattagatttagacacatcgatttgtaatttagggtacttatcaaggcacatataaaataatttcccatgctggaaattccaaatgaccagttccagttggaaccaatttataaaccaattcctgttggaatttgggtgaatcgactagaaagtctacttgagcatgttgcagtcaatttaaaaatctgaaaa

SEQ ID NO: 6703 - DNA, 597 bp, Canis familiaris
cattccgcaggtgcacatgtgttctgtttgcttttcactgagtccaactcatgaacctggcccctaaaataagagctaccatggttgcaagaaccatcttatgacaggggaattcagtgccctcaacattaacactatgtcagtaaacaactgctgttcataaaacagttttaactgttccagcaaggacacagcatattcagtattgatctgcctctcgtcttgagtggacatgactgtattccattaatatctcccggaacagattggaaaagtcagtcttactgatggaaggtcaagtgaatgcttcagaaaccaaaaaggagaaactctgcttgctgttatctgcagcattcagaatcaagactgacacagttgctaatgaagagtaagtatcttgttatatgcttagaatcactcctaggtcatcctgtgttaattaggttcttcagttcttcaacacagtctgcaaacgtcttgctcaaatttgcaattgctgtgcagctcatgggttaaagagaataacacacgaggtagattttgtggtggcatcctatgttccgtgggtcctccgtgtccgcaggtcccgaggacggg

SEQ ID NO: 6704 - DNA, 464 bp, Canis familiaris
gcgtctcccgtcagcggaggaagcacgtcctcggtttcccggggcagcgcctccccgtctgtccccgccccgcccccgcggctgccccgctgtgagcttcagccgggaacggcgctctccccgcacccctgcggctgaggaccttctccgccggctggacggagcccaacgcagcggcggcagggcgcggggctggcctcgggtccaggtgcccggcaggcgctggggtcccgccgtccctggcgcccgccggggaagaccgcggtcccgcggggcagagccagggcccgggcccggccgccgcttggcagccgcccgggctcagcgcttcgtcggcccgtgtggggcgtcagtccgccgatctgcacaacaggggcgagcgcactcaccaccacggcggtgaccggctggcccgggatgtaggacatctcgacccgcaaccggaggccaggcgcagctcagga

SEQ ID NO: 6705 - DNA, 593 bp, Canis familiaris
ccaataaatggtagggcacctatcaagtaagattcaaggtatatttcctgctttcaagaaggaatatagtcagagagataataaattgatagaggtaagacagcacccaccatgcaagatgatttcattattaaatgagtgtaccagaggctcaaaataccatagcactttcagtattccttctcctctttttagtcagtgagacagcattttggctttgataacagttgagattaacattgcaacttcattattttgttggaaatttgttctcattccaaagaagagatttcaaagtatggaaaggccttccaaagccagatggaaataacttctacattatcctttgttttgcattaaccatctatcttagcataaacaattaagaactggctttaccgggatccctgggtggcgcagcggcttagcgcctgcctttggctcagggcacgatcctggagacccgggatcgaatcccacatcgggctcctggtgcatggagcctgcttctccctctgcctatgtctccgcctctctcactctctctgtgtgactatcataaataaactttaaaaaaaaaaaaaaaaaaaaaa

SEQ ID NO: 6706 - DNA, 116 bp, Canis familiaris
cccctcctggagtttgtatatccagaagcttttgtacttcttgttcattaaatgtttatttttgtaaaaaaaaaaaaatcaattaataaatgacatttcatggcaaggaaaaaaaa

SEQ ID NO: 6707 - DNA, 521 bp, Canis familiaris
gcatttttggagaaacgtaaatctgaagcagctaaaataaatgttgatgatgaagataatgaaatagtttttaaacagcccgtacctggtgtaaaagaagaaacccaagagactctaacacctacacgttcaaggaataaaagaccaagcaaaagcaatcagtgattctaaatgtatatttcttctggaagatgtgattttattgtgagggctgattctttgtatttaactagcagtggaatgcaaccattgacaagattcttggaggaaaaactgtcagttcaagtccgtacggaaagcggtcagctggcttacctgccgttgctgaaatgcacagatgcatagtttacagtagctgggctcatgctgcctctttgtcctggtctctagatttctttgcagatttcagctatctttagttaacttgcctgaatagaaaagtcatcattttactgcagtttttgttgttaccatcaaataaaataaaatcttgtttaaaaaaaaaaaaaaaaaaaaaaaaa

SEQ ID NO: 6708 - DNA, 482 bp, Canis familiaris
cagaagcctcttttaatctatcccttttaacatgacacctatttgttgaagagatcgggccacgttgtcctgcattcttgaactttatttattctttaaataaataagacttttaataaagaaactttattgtttccttttactttggaaaagattccacattggcagcgcacataatttgattttcctttctgaagtatgtgagtaagctgctgacgtgattgatgccccatcacacctgctattgtttgctatttattcataacggtgtggactcataggttcctattttattcaatgggtaataatgagctacaatctttattttcacgctgtaccgttccatgtgtggctagtgggaggcccttcaagcggcttcaaggcccttcaagtgtcctttggatgtgacctgtctccctattctttgatcacttttgtagcttttggtacaaaaaaaaaaaaaaaaaaaaaaaaaaaaaaaa

SEQ ID NO: 6709 - DNA, 484 bp, Canis familiaris
agggccaggaggagagctaatgaccgggtgaggagccccctcccagcctcggatccgtcgacccagacctcgctcttcaggaagtggttgaagcacctgggcttcctcccagccggggacccaccccttggttccgaaacaggccctccaggtgcccagcccggcctcagctgggtgtgtctgccaatcgaaccgccagttcctctgtcccagggacccaaggtcaccttttggttcagtcagccaattagtcttacttataactcagatgaccttacaatttatcgtccaaactgaaactgtactcagaggtaattatgaaatcggctcttaaaaagttaaccaggaacaacagatacagagcaaatggatagtcaccgttcgtgaaacagaaagtgcccttagatatttctagaatctggaggaacccgcatgttttgcaaccaaggccaataaaactgacggttttctaaaaaaaaaaaaa

SEQ ID NO: 6710 - DNA, 534 bp, Canis familiaris
tttgttctctgactctaagtagcacagaagagggaggatgctgtttcctcagaagtgactcgtatactctctgaagcgtgataccagaaagatgtctcgaaaggtaaaagatgaaagaattttgttggaagaagaatgaagttgctgattatgaagctacgacattttccatcttctattactacaccctattcctggtcttggtcattgttgcctccttctttatattgaagaacttcaacccaactggtgaactatattttgtccataagtgcttcatcaggcctcatcgcccttctgtctactggctccaagtagactgtaccggctttggcccctggctttgtatctatgggtggcctgtggtatatggaaaagtaacagggtggtcagaatgagagacacatcaagatgtttttatagtctgcagttggagggtttgaaaaacccaacaaaatgtaattcagtatttgtttattggctctttttttgacagattgttgaaattaaatgaattgaaaggaaaaaaaaaaa

SEQ ID NO: 6711 - DNA, 532 bp, Canis familiaris
  misc_feature (1)..(1): n comprises a, c, g, or t, or includes no nucleotide
  misc_feature (75)..(75): n comprises a, c, g, or t, or includes no nucleotide
  misc_feature (246)..(246): n comprises a, c, g, or t, or includes no nucleotide
naaggcaaaagtggatgagttcccattatgtggccacatggtgtcagatgagtatgagcagctctcctctgaagnccctggaggctgcccgtatttgtgcccacaagtacatggtgaaaagctgtggcaaagatggttttcacatccgagtgcggctccatcccttccatgttatccgtatcaacaagatgttgtcctgtgctggagctgacaggctgcagacaggtatgcgaaggttgccccttnttggggaaaaggcccccagggcacagtagccagggtccacattggccaagtcatcatgtccatccgtaccaagctgcagaacaaggagcatgttgattggaggccctacgcagggccagttcaagttcctgccgccagaagatccacatctccagaagtggggctttactaagtttaatgcggacgaatttgaagatatggtggccgaaaagcggctcatcccagatggctgtggggtcaaatacatctaatcgtggccccttggacaaatggagctctactcatg

SEQ ID NO: 6712 - DNA, 385 bp, Canis familiaris
tatatagaatttttataaaattgtatgctttcagaataaattattttttataaagaattaaattgttaaatctgcaaccacgttgtgccgtttcctctctgaaatgtatagatgtccgtttgtcaccagggatccaacccacaatccattgtgaagtgttctctctctagaacagtccttaaatgtacagtgtattttatagatttgaagttaacattgttattttcaagagaatttatggacattgtagaaatatataagtgcatttccaaactgccttaaacattgtatttttatagacatcctttaaaaaaaaaaagtcctatgttttaagtaactatggctttgtgtattttttatttgttttattaaaatgtgtacatca

SEQ ID NO: 6713 - DNA, 454 bp, Canis familiaris
tatttgtttgggtgatgctccttcagactcagggggaaaaaaagggctcatattgaaattaattttgatcagttgttttacctcttgtcctgtccagggtgtgaaagttgttaagtgccaaggttgtgaatgttggacaagttggaatgtcagttcaggatccccagcagggtatggagtctttggaaaagcatatgctgtattatcatctaattatatatttaaatatttatatttggaaattttaagaaatttccctgttactttcacaatttaaattataggaagccaagctcagcaagtatttattttggggttctttgggatttgtagaagatctgtgattcttaggagaggtcacactcaccttaggaagaacatcagaatctggaaaggcagtgacccagagattttggtgcttattaaagaggaatttgagttaaaaaaaaaaaaa

SEQ ID NO: 6714 - DNA, 534 bp, Canis familiaris
acgttgtattgccaactacgttcatgtcaacaagggaacagaatcccatttcactgagccagagcacgtgacctgtggatgaagctttcgtggtatggcttgaatagaaaacattgtgggcctttgggtcaccccaagcatcagcaggcatgaggcctcccgatctcccaacctgcctgtcaacagtctagacaccaggtgacaatattttgtttcagcaaaatgtgtttcatggcgcagagctgtttaggatggcaaagttctggactggggtggtgggaatgtttgtacaacactgtgaatgtgctcggtggcactttaaaaatggttcaaaggggcccctggtggctcagtggttgagcatctcccttctgctcaggttgtgatcccggggtcctggaattgagtcccacatcaggctccccgcagggagcctgcttctcttgcctctctctccgtctctcatgaataaatgaaatctgtaaaacaacaaaaattaaaagttaaataaaaatggttcaaggataaaaaaaa

SEQ ID NO: 6715 - DNA, 552 bp, Canis familiaris
cagtttacatcattgtctgtccccgacctccagaattctctgagaaagtaatacggacagttcccagatgctagagaaaataggaggtaacttccctctcgactacatagaagacagcatctcagtagagaaaacaagcttggattttttgttaaagatttttatttagtcatatgagacagaaaaaggaggcagaaacataagcagagggagaatcacgtctcccttaggagcctgatacagtactcatcccgggatcatgacgctgaaccataggcagacactcagagtgatccaggtgtcccaaagctcagatattttttaataattcaggtgagccttttccttcacagaccttggctcttttttcttaggcttcggaaaagcctatagagactcctatccaaactgtatcttgaagaaaaatataaactggtctcagagtgggaagagtgataagtcacctactctctatcaaagcttatggaatgtcttctgttgcctatgtaagcttaagcaaaataaaaagaaacatgataactacataaaaaa

SEQ ID NO: 6716 - DNA, 579 bp, Canis familiaris
gcattttgaaagagttgctctctaagaagcatgctgcctatgcctggcctttctataaaccagtggacgcttctgctcttggcctgcatgactaccatgacatcattaagcaccccatggacctcagcactgtcaagcggaagatggagaatcgtgattaccgggatgcacaggagtttgctgctgatgtgcggcttatgttctccaactgctataagtacaatccaccagaccacgatgttgtggccatggcacgaaagctacaggatgtatttgagttccgttacgccaagatgccggatgaaccactggaaccagggcctttaccagtctctactgccttgccacctgggttagccaaatcctcttcagagtcctccagcgaggaaagtagcagtgagagctcttctgaagaagacgaggaagaagacgaagaggaggaggaggaagaagaggagagtgaaagctcggactccgaggaagaaagggctcatagactggctgaactacaggagcagcttagggcagtacatgaacaactggctgcccctgtcccaaggcccaatatccaagccaaag

SEQ ID NO: 6717 - DNA, 617 bp, Canis familiaris
ccaccactgcttgggtgagccgccaggggaccgcggggctggccgtgctgggagctggctcaacggaggctccgggtccccggcgcgactgcctccgtgtccaaactgttttcttcaagactgggccacggggcctatttatcctgccttaaaaagacggcaaataagtgaagatgacattttgtgaatgtagactctgggtagactcctaataggttagcgtagtcatgaggaggagctcgagtagatgtccgtcccgtttatgtaagcaataattcttttctgtgtcttattgagtatggctagcaattatttatttacaggctagactgtcctctgcatgcgggttccatgtaagtgcagaaatttcctcagccaccggaggtattttgaccattttgccatttggatgagctgtcgttagattgaaatttacacatcatttcattaaaaaaaaaaaaatcgtgccttagaaaatgcgaagctgttgcacatagtccgtgatgaattatggatgcagtaccttggagagagaggaagtcacttccaagtcaccaagacttcgcatggaagtgtttgctgttttacggggaggaaaaaaaaaaattcaaaaaaaa

SEQ ID NO: 6718 - DNA, 567 bp, Canis familiaris
gactccagtgtttacagccttgcgttgatgcccctgccccgaccctaggctgccccgggcctggagggctacccctctctatgcaaacacatcaaagccatgaatgctggaatccaaactgacaaagtttatttttttcagagccagtggctggtcttccatttacagtgtcactattccttgacggagcagttatgtgccactctagcgaaggccccagccggcgatgcttgacctaattgttcagcgtcaagatggcaactcacgcggtgccctaggtgtggtcgcgtggtctggtatacatgctgcaaaattcacccgattccccttcattttaatttttctaacctagagcttaatttcaataataacttttaagaaacttctaaatttttattttggcacaagcataaagacagataatatcctctcccatgtagtttcataagtaacccagtttccctgatttttaaaaactaaaagtatctctaaacctttcttatgtataaagcatccctataatatttagggagaggtgggcaataaacatcctgtaatgacaaaaaa

SEQ ID NO: 6719 - DNA, 577 bp, Canis familiaris
gctggtaacttcattagaaaataaaccattgtttcttcaattgggactgttaattttaaagccaaatatgtgttcaatcatgtatgagatcaaaaaaattttgtattactgaaaagtgaaataaatggaaatatcactgagcacgttgtttatactatatatagtaccatagtattctgactggactgtggatacgttgaaatgtttttcaatcacgatcatcctccaagtattcctgtgtcattcatgtctgcctcaaattgctggtaaatacataaaatagttacttgctaatcatttcaacccactatcctttcttgcctcccttcttgtgttagggtggatattatacattcatattctagccatattttgatatgtctatagtaaacatcccacctgagactaccttgggaatgtgtaagaattgactgttacgctctagtagagactgtgttttgtgttttgttcaaaagctgagtccaacatgaatgattctgaatcattccaacattatacagtgtattctcagccatgacatgtgatcagtgcaataaaaagtgaaccgaaaaaaaaa

SEQ ID NO: 6720 - DNA, 590 bp, Canis familiaris
ccgagccctcaaaccctgggcaaggagggaggcctgcctcctagtgctggaggggcgtctggcaccacactggacgcggcccacaagccctcccacatcgtttaatccacgggagcgactgtgggtttggtcccggtacctctgagttttagggccagggtttggcaaaatgtctgattcccctaagttgttcccacctgccccgtccctttctggcttttcaaaaaaggaagtgaagagttccacgggcttcatgctggccttctgacgtccaggcaggacccttgggcctgcatttggactgaagttgctttgtggctcctcccaccacctttggccctccttggcggtcagcatcccattattttaaaatttgttattaccttcggacagctctctttcctgtgaagcctaagcaaatccgtgtactttcccttcttcccacccgtccacccaaatttgttcctataatattgtcagagctctgcctgagggatctgccccaggaatgctatacctggccgagccactggattaaagctcctcaccccaaaaaaaaaaaaaaaaaaaaaaaaaaaaaaaaaataaaa

SEQ ID NO: 6721 - DNA, 569 bp, Canis familiaris
ttgaatatgacattagagaaactaagatcagagctagaagaaaaagagacagaaaggagcgacatgaaagaaaccatctttgaacttgaagatgaagtagaacaacaccgagctgtaaaactccacgacaaccttattatttctgatttagagaatacagttaaaaaactccaggaccaaatacatgacatggaaagggaaatcaagacactccacaggagacttcgggaagaatctgcagaatggcggcagtttcaagctgatctccagactgctgtggtcattgcaaatgacattaaatctgaagcccaagaggagattggtgatctgaagcgccggttacatgaggctcaagaaaaaaatgaaaaactcacaaaagaattggaggaaataaagtcacgcaagcaagaggaggagcgaggccgggtatacaactacatgaatgctgttgaaagagatttggcagccttaaggcaagggatgggactgagtagaaggtcctcaacttcctctgagccaacccctacggtgaaaaccctcatcaagtcatttgacagtgcatcacaagt

SEQ ID NO: 6722 - DNA, 584 bp, Canis familiaris
atttgacacatagcatgtgtgggcatacacatacatatacataactgctctttggtaaatctacatcaccttacttatgctgaattcactctcaggctctgctttctcatcaagcatttatcagcaaaatggaaacctctgaaaactgtcatggatttgcttatactactatatgttcagtgcaaaaagtgacttttatttcttggccacatactaggtgactaattataaaactgtattgtgcattgaagcacatctcccaaaagctttacaatctgacttttgacaaggatgccattgccatctgttgaatgatatgatagtgaaatttactttaggtgaccattttatgaattatgaattttttttgactttcagcatttccactcattttttttatttgttggcttcatgaatcagtcagtgtcatcaaatttgtcaactgccattctaaaagctttagaaattggtatgatgaaagtctttagagatattttaaacccaagaatgtgggatctgagacctgcctgcccagatatggcggaaaatgtaaacacaaatgatgttttggcaaaaaaaaaaaa

SEQ ID NO: 6723 - DNA, 596 bp, Canis familiaris
tggatatataggcacaggtgccgcgtgtggcccagctgtgcccccggaggaagcccgtgccccaggcaccaaggtttcacgagcatcgagtggaagacttccggacagggtcccacgccccagtccaagcaggtgacatcgaggatgcccccgagtacagcggggcaatgcaatgcccatctccgcggccccccgcccaagctcatcccgtctctggaaagctgggagaagtgatggaccagcccttcctttgggcctgggtggaatcaggacccccctgaagaagctggaatttggggccgattcagaggagagaatttgagctccagattcaccagaccaccagacctggcttttaatctgacctctgcctcattctagctgcatgacctcaaggaagtcacataacctttctgagccagagtttctgtgtctgtaatatggaggcaccagggcagctttcctatgatttcgtgcacattccatcacataatgtatatcagtgtttagcctagggcctgtcgtacaacatgtgctcaataaatgttagctgctcagaaaaaaaaaaaaaaaaaaaaaaaaaaaaaaaaaaaaaa

SEQ ID NO: 6724 - DNA, 632 bp, Canis familiaris
ctggagtgtttttggccatttctgtgtgttaaagtaacagtgtaaactgctcagtcagtgctatgcctgcgcatgggacttagtcactgggatgaacacccagattctaggccttcatgaatctttgattcaatgagtctttatctaaataaatgaaagaccttgtaacagatacacacaaggacatttgcacaaataatctttgctttcttccagtttctttgtcttgctcacagtatcatttctgctgctacaacttgtttctccccagacttctcaaatatagtgcttaaaatgcagagggaaggaaaaaaatgagccactgaaagaggaaggaaggatcatttcttgtactcacctcctgaatcacagtggactttttcaagtgataatgtgtgtctacgtttacaaaattgttttccctcaaagaaggtgaactgtatttggtctccctggcattgcacagccaagttatcacttctcttggctgagcatttcactaaagtttaaagcaaaagtggccttaaactcacatttcatttgatttgccatatatttggaaaccttcataatagaaacaacagctctggagtgaggatgtattataaataaattctttcaaatgagtaaaa

SEQ ID NO: 6725 - DNA, 626 bp, Canis familiaris
gtttgcccacgtcttcgtccgtttgttgaaagggcacataagaagtaaaatatttgtcatacctgtcatatctgagatatcctcagtttatacaacacatggtagacagtttggcaaagtgtagactttcaggtcataaataattgtctttcagaattttagaagcattcctcgttgacctttagctctgaagattgcttttgggaaactcaaagccattcagattcctggcctgttttttgttgtggtttggtttggtttggtttatttttttatggaagaaattttgtgatagtccttgatttaggtgtattttcatacattatgctgggcgttgagtcctttcaatctacaaactcatgtccttgagcattaagatttttagaattatttgttttctcctgttttctgtgttctcttattctagaaatccttttagaattgaacctcttggggcacctgaatggctcagtcagttaagcatccgactcttgattttggctcaagtcatgatctcagagtcacaagatcgagctctgcttgggttctgcactcaatggggagtctgcttgagattttctccctctccctttacccttcccttctctctctcaaaaaaaaaaaaa

SEQ ID NO: 6726 - DNA, 647 bp, Canis familiaris
  misc_feature (105)..(105): n comprises a, c, g, or t, or includes no nucleotide
cttcagggggaccactttcagattgggcaaagagtctgtgtggatctcatacgaagggagtagttggcagatgcccctccattctgaacatgctctagttccctnacatagagcattcctgttgcgttctctcttcctgagtaagccatgtagccatctgcttgtcacacgcctctcatttggagtcatttttgggccaactgttaagaattgcctgacattctgtacaaagcaccaggcgcatttatgcttttgactgttttgcatgtggagatggaggtggtggtgatctgtttggaagggatggagtttggaagggatgacaatcagagcctcctctagcccacagtatgtacttatccaaaactgactagagcatcaagcattactgaagatcaaggtccttgctttgcgtcagaggtgacggagcccaactcctcagcctcatgggacatactgcttaaacccactgagcccacaggctgcgaagctgacctctgatgaagaagacatttgtcattttacatctctctctctctctctctctctctctctctcggcacctgacaagtattaataaatgttccactaaaaggtgaaaaaaaaaaaaaaaaaaaaaaaaaaaaaaaaaaaaaaaaaaaaaaaaa

SEQ ID NO: 6727 - DNA, 547 bp, Canis familiaris
cgtcctccgggggcgcgttaggcgtaggttcggaagacgccagggcgcgcggtgtgaaggtcgcaccctctgtgggcggctcagggcagcattgggacggatgcctgcttttgcagacgctcttccgagtgtaaatcccaaagaaccgaaggccacgtgcccgacgtgtcgctgtctaaggtggcgtcccatagactgaagactggtttccgcctggaagctgtgccccgggtctctggagcttacccgaaggccccgtaggtgggatgaggccgcgggcacatacggggggcctcgcggcccgggatgggaattgctgggaagcaggggcgcccgagcggagaggcaaggctgagggtgccctgcctgggcgtttccttccaacaacatttccttgtctgttgtagccataaattttgttttcctgtgcgagccgccaaaggaggaagaggaccgcaaaaaacagcaaccctttcgatgcataatgtactttcaataaagtgtgaatacttcatttagagaacgttctctggaattgccacataac

SEQ ID NO: 6728 - DNA, 675 bp, Canis familiaris
cgggccccagccgggacgatccttgccaacgttcattgagacattcgagcctttcaaccatgggcccgcgaagtgcgcaataatcagacagggcctgggcttaaaattcgctgagcttgttgtacacaggtttctggcacagccccgagtgtgaattttgtccgccactgcatcgccaagtcccaggagcgtgtggaagggaaagtgcaagtgtccgtcttcaagggccaggtgtacatcctcagccgggagtccccactgtccctctacaatgaggagctggtgagcatgaacgtgcaaggtgattatgagcctatcgatgccactggtttcatcaatatcaactccctcaggctgaaggaatatcaccgcctccagagcaaggtcactgccaaatagacccgctgacaatgaggagctgggcctcctcctttgcccatcttccgagcacaggcgctaattgttgtgataatttgtaattgtgacttgttctccccgggctggcagcctggtgggggtgccaggccccagctttgttccctgctccccagtagcctgcccaagtggtcatcagtagcctgcccaagtggtcatcagaggagagggtggggttggcgtcggtggggagatgcaaaatgacaattaaaaaaaaaagatacattaaaaaaaaaaaaa

SEQ ID NO: 6729 - DNA, 586 bp, Canis familiaris
tatgcaaaatgagacaaactcagggaactctgactccatcaagagtagtaacattcacattatagggatcccagaagaaaatagagagaaaacagggcagatcatttatttgaagaaataacagctgaaaatttcctaaatctgaggaaggtaacaaattcagatccaggaggtacggagaacccccccaacaaaatcaacccggggaggtccataccaagacacatagtaattaaaatggcaaaaagtagtgataaagaactttaaaagtagcaagaaaaaaagaagacagttacatacaagggaaaccccataaagctatcagtggatttttcagcagaactttgcaggccggaagggattggcatgatacattcaaagtgctgacaggaaagatatctgcagctaggaatactgtatccagtagggctatcgttcagtttaggagagagtttcccaaacaaaagttagaagagttcatgaccactaaaccagccctataagaaatgttaaaggggactctgaatagaaagaccataagcaagaaaagcaggaagcacaaaagtagtaaaaaaaaaaaaaaaaa

SEQ ID NO: 6730 - DNA, 603 bp, Canis familiaris
tcttactcagtctgcttcttattcagttttcgtgtggagaaagaggctagtttcataggctttcaggagttccaggaacagaaaagcaatagtcaccaagccaggtgacctgaaagctttaattttcatgacgtagatacttgacctgtttcatatcctttctgaaatggtttgtatgcacttaggttcaatcagtcagcaaatactgtgtccaatggagtaggtgttgggagataaattaagaagtataattcatggtttcagccttcaagaatctgaacaacctagttggaaacacaggacacataccacattaactaactggtacaagtgagtggtacagacatggtagggaggttctgggggaggaaggtgaaggaaggcttcacatcagaaatgggacctaaacttagatttgtttaaagaacaagcatgaccatgctggcaacagtggcaacaatggtggttctttagatgataggactatggttgatatttttttcttcttgctatcttcctgcctttttcaaattttctataataaacccattattcgtcttacattggaaaaaaataaattgtttttaaaaagaaaaaaaaaaa

SEQ ID NO: 6731 - DNA, 409 bp, Canis familiaris
acttggggaaagagcgtgaagtcagtgcactactggagagttgcacgagacgtggcgcacggagtgggggaggaccggcgcagcttgtgtgacttcattgagagctgcagggagcctgagacgagcaggtgaaatcgcagtcgaaagaattgggtgaccatgtaaccaacctgcgcaagatgggggctcccgaatctggcatggcagagtatctctttgacaagcacaccctgggaaacagtgataatgagagctaagccttaggctgtcttcccatagccgcagggtgacttccctggtcaccgaggcagtgcatgcatgttggggttacctttaccttttctataagttgtaccgaaacatctacttctttcgtttgtatcattccttcaaataaagtaatttggta

SEQ ID NO: 6732 - DNA, 681 bp, Canis familiaris
tttttgaaggaggcataaatgggaaacacatttgtctcggagacggttgaaaggtgattagacccggaatgtttataaggaccacccttctggaccccagggaaagttaaaagaagttgtggaaagggggaatttgttccccaggttcccccaacttggaaggaaacttaattaaagtttccccccggaagaaaggaagggcaaaattgaagaaagaatttttaacccaaggattttttaagcttttgtaatttaaatttcttctcaccttttggagtaccactggattaataatttacaaacttgacccttatatgagtattaggtgccatttgtttttctaaggtatttttagctcttgatctctcttgccgtgagaggtaggggaatggtttgcttagagccattttgtaatctgtggtaccagcacatcattcttgatgttcatttcattaatgtaatttctttgccgttgaggactttgcccaacaacaacactaataccattttgaagagcaaagcttatgaaaaatgccttgaattgcaagctaatcattcactctgttataaccatgcaaaatgaaaattcaggactactgtatcggatgagtaacttctgaccaggataataaacacaatttcagaaaaaaaaaaaaaaaaaaaaaaaaaaaaaaaaaaaaa

SEQ ID NO: 6733 - DNA, 333 bp, Canis familiaris
ggtgtcgacttaccgccgccagtcaaccccatctctctgagtcaaggcttccttggctgcaaagttggaccagtattacccacaacctccccaccgggggattgaatggaggctcaaatcttatcagcaatgccacagaatcagcgttggcataattacatcagcgactgtgggcatgggaaccttcgagattattttatccgagtgccccgttttggagataccaaggccctaaggcccaggaggaacgcggcttcgggactcaaccaagtctcttgtccccctagcgcggcgcgcctcccggctgggtggccctgacctccgcgcccctcc

SEQ ID NO: 6734 - DNA, 669 bp, Canis familiaris
cacgtggtcggagacaagccagctgtctccttccaaccccggggccacctggaaatcgcagagaaactcgacatcctgcggcagaagcgcctgtcccatgtgtccggccaccgctcctattacctgcgtggggctggtgccctcctgcagcacggcctggtcaacttcacactcaacaagctcatccaccggggcttcacccccatgacggtgccagacctcctccgaggagctgtgtttgaaggctgtgggatgacgccaaatgccaacccatcccagatttacaacatcgacccctcccgcttcgaagacctcaacctggctgggacagcagaggtggggcttgcaggctacttcatggaccactccgtggccttcagggacctgccgatcaggatggtttgttctagtacctgctaccgggccgagacagacacagggaaagagccacggggactgtatcgagtacaccacttcaccaaggtggagatgtttggggtgacaggccctggtctggagcagagctcacagctgctggatgagttcctgtccctgcagatggagatcttgacagagctgggcctgcacttccgcgtcctggacatgcccacccaggaactgggcctccccgcctaccgcaagtttgatatcgaggcctgatgccaggcc

SEQ ID NO: 6735 - DNA, 577 bp, Canis familiaris
  misc_feature (88)..(88): n comprises a, c, g, or t, or includes no nucleotide
gcgccccggaacccgcctgagttgctgtgggaccaagggcggcccgagccgcggggagaagcgggccgggcggggctctggggctgcnggtgcttcagctcggagccggcgcccggggccgcacattaccagcttgtctacacttgtaaggtgtgtgggagccggtcctccaagcgcatctccaaactggcctatcaccggggcgtggtcatcgtgacctgccccggctgccagaagcaccacgtcatcgccgacaacctgggctggttctcggacctggatggcaagaggaatattgaagaaatcctggcagccagaggggagaaggtgtgccgagtggctggcgacggggccttagagctggttttagcagctgcagggaaccccaaatcccctcctgctccagaagggggtgaggaccaggatcccactcatcctggcaagaccgagcccagctgaccccatctcctgccttccagaagatgcttcggactgggaccctcccaggctggcctgttttctatcaataaacacatcacctggaaaaaaaaaaaaaaaaaaaaaaaaaaaaaaaaaa

SEQ ID NO: 6736 - DNA, 597 bp, Canis familiaris
  misc_feature (132)..(132): n comprises a, c, g, or t, or includes no nucleotide
  misc_feature (218)..(218): n comprises a, c, g, or t, or includes no nucleotide
aacagaagttcattgcccatgtcccagggccatcccagcaagagatcgaggaggcacttgtgcgaaggaagaagatggaactcctccagaagtatgctagtgagaccctgcaggcccagagcgaagaggccnaaagacttctggggtattagggctgagctgggacctgctcagggtcttgcaaatttgctgggagaccctcatccccccagtggccnctggtgagtccacagggctctgctgtcctgggattgcatatggactggctggtactacaaggcgtcctgctacttctcttaccttttcttaccccatctcctgatctgaagggacgggctgcgtgtgcctccctggcaggctgtctgccttctgaacccgttagcagtcacttttgtacaaacattttgctattataggaacccacttatttttaccttgagtatgtaaaacaggctgctaacaggctgcctgtgttttacttatctctctgctgtcatttgctggggagggaggtcacttgatgactaccattaaaaagatgcagtttttcctaaaaagaaaaaaaaaaaaaaaaaaaaaaaaaaaaaaaaaaaaaaa

SEQ ID NO: 6737 - DNA, 381 bp, Canis familiaris
  misc_feature (1)..(1): n comprises a, c, g, or t, or includes no nucleotide
ntcctgcccgccccacccccgaggtcccttctgaccctgacacccgctctcggtattccaggagtcctgaaatcccactttgccctaaggattcggttcctgccaccccgtagattccttcgaggggtcctgagacccctcgtgaggttacctagccccccgtgcccccgacagacccaccactctcatacacggtgccagcacccgctgcctgcagtcaggcgcaccctgccccggtgtcctcagttgcccctcgcccgcggccccccccacagagctgctccttggggggggggtgctgtttgagagtctttgtgttgcacattaaaactcaacaatttagacctgcaaaaaaaaaaaaaaaaataataaaaaaaaata

SEQ ID NO: 6738 - DNA, 644 bp, Canis familiaris
ctcgctcttgccttgggcgctgttccggccctttcctgtcgccggccctttcttgcgtcggtccgcagcttcggcgatctcccggccccatgtgtgtcatggcggtcgctcctgtttctttgggcccaagctggccgcctgcggcatcgtcctcagcgcctggggagtgatcatataatgctcggaatattttgttcaacgtcgcattccgctgtgctgatcgaggacgttcctttcaccgagaaagattttgaggaagaccctcagtaaatatatgacctttacgagcgagtcagctacaactgtttcatcgccgcgggcctttacctcctcctcggaggcttctctgttctgccaagttcggctcaacaagcgcaaggaatacatggtgcgctaggcacggtcgcgtctcgcctgtccagctcccgactctatttaaggactctacccacccgcccccatgccggcgccctccgtgggatcccctttccctgcggcgagactgaaccccttgtcctccggttctccaggcccccgcggagagaggccggggctggccgtcaccccgtccgtccacaataaagcgaagctgccctctttgaaaaaaaaaaaaaaaaaaaaaaaaaaaaaaaaaaaaattaaaa

SEQ ID NO: 6739 - DNA, 673 bp, Canis familiaris
  misc_feature (428)..(428): n comprises a, c, g, or t, or includes no nucleotide
atatttagtccatgtgtgaaaaggagttgaaatgtaagcgtttttatttattgatttttagaatggtgacaacaagtgcgcaggccacacttggggggaggtggaaggttatggtgagccgtataccgacgtgctcccaggttgccgttataactatggcaccaaagcttaatgtgacccaaacgttctttgttttggaattgtgagaaataatataaaggtgccaattgtgtttctttgtcccctctccctttgagatgagaaccggttaaccccttgtgaattgggccctgtcttgaatggtggaaccgaatggtttttctaagggccaaaaattcttaagggacttaatttttaaactttccaaaccatttcccacctttggttaatttttgtttttaaaattggtttaatggaataagtaagcnacaactgtaatctagttttaagagaaaccggtgctttcttttagttcaattgtatttcccttgttactgtaaaagactgtttatcgattatgtttacagtttgttgcaacagccattttcttgggagaaagcttgagtgtaaagccatttgtaaaaggctttgccatactcattttaatatgtgcctgttgctgttaacttttgatgaataaaaacctatcttttcacatgattaaaaaaaaaaa

SEQ ID NO: 6740 - DNA, 616 bp, Canis familiaris
tcctgaggtcaccgtggttcttgccgatcctgagtctgcaacaactttcaaggtcttggctgcgaaggttctcaaccgtgtccttccagacatgttcctgggcccaatcgactccagcgtgctctctcggaataagacggaggtggacctctataattcggaccccctcatctgccgggcaggcctgaaggtgtgctttggcatccagctgctcaacgctgtcactagagtggagcgggccctccccaagctgaccttgcccttcctgctgctccagggctccgccgaccgcctttgtgacagcaaaggggcctacttgctcatggagtccgccaagagccaggacaagacactcaagatttatgaaggtgcctaccacgtcctccacaaagagcgttcctgaagtgaccaactccgttttccgcgaaataaacatgtgggtctcccaaaggataggggcggcggcgggaacggggtccccaccctgagcacagcggctgcgtggccggcccacggtcggggaagtgggcagaggaggcagaggtgggcttctcacctgtggctcgccagggggaggggggaggacatcacaaattggaggaatccctagcacaat

SEQ ID NO: 6741 - DNA, 630 bp, Canis familiaris
tggatgggtgaaatctttggatgatgatgacttttatcaccagcttcttcgagaactcatagaacggaagaccagctccttggatcccaatgatcaggtggcccatgggaaggcagtggcttgcgatccagaagttacgaagcaaaatccacaagaaagtagataggaaagccagcaaaggaaggaaacttcggtttcatgtccttagcaagctactgagcttcatggcacctattgaccatactacaatgaatgatgatgccaggacagagttgtatcgatctctttttgggcagctccaccctcctgatcaaggcccaagggactgaccgcgcctgctgctctggctacaggcttgaggcggggcctccggacacacggatacacgtagacacatggacacgccacatggccccttgcccagccccaaatgtaggaaggtgtcagcccacagcgttggactagttgggaagtcctagaaaggtgtggggttcagagtatgtgcctaatacatcccaggaagcctggaaacaagtgtgcatgtccaccatgctgcagcctgccagggacccgcaccccatgttcattcactgtcccaaataaagggtgttgttggtacagaaaaaaaaa

SEQ ID NO: 6742 - DNA, 637 bp, Canis familiaris
  misc_feature (1)..(1): n comprises a, c, g, or t, or includes no nucleotide
  misc_feature (367)..(367): n comprises a, c, g, or t, or includes no nucleotide
nctctgatcaggatgagctcaaactccaatacgccctaatcggagcccttcgagcagtagctcaaacaatctcatatgaagtaacgctagcaattattcttctatcagtcctcctaataaacgggtcatttacactatccacgctaattatgtacccaaggacatatatgattaatctttccggcctgacccctagccatgatatgattcatctctaccctagcagaaactaatcgagcccccttcgacttaactgaagggagaaatccggaactagttcttctgggaatttaaacgtaggaagtaattgccaaccaagggtcccttttcggccccttaatttctttttcttaagccagaagtaacngcagaatatttattataataaacatcctcacaacaattctgttcttcggcggcattccacaacccattcataccacgaactctacatctatatgaacatctctaccatatataaaacccttctaataacccatctggcttccaatggaattcggagcatcataccctcgattccgctacgatcagttaatacacttattatgaaaaaattttctacccttaactttagccctatgcatatgacatgttgccttacccattatcaccgcaa

SEQ ID NO: 6743 - DNA, 586 bp, Canis familiaris
agctcgtttcatgccctctgcacatcctgggagcagaatcacaggtgttggaaaagaagtcttttgagagcacaaagcaacaagtgatcctgagtccagtgacctcagatgggtaaatggaggcccaggaagtcccttgcctgaaattctgaagccagacaatgaggaaggctgctgggttggaagatgggtcagatgagctcatcagcccggctgtgactactgcctcctttcgttcttcttcgctcggagctgcgacagcctctccccagactcactcagcttcccacctcagaccctttacacacactgttcactctgccaggaactctgttctctcccctctttcctgcctccttcctcctcctccaggctctcagccagaccaccactgtgaccctctgttttttggcctcatttacactatatttttccttcttaggattgttcaaaaactgtaattaaataattatttatggggccatttattaaaagtcagcctccccactagagaaccagcctcagcagggagggccttggtcctgatcgttgcctccccttcggttttggcacacagtaggcacac

SEQ ID NO: 6744 - DNA, 585 bp, Canis familiaris
ccagggagacccacccacaggcccggagagaccatgaagagcctggctccttctctccaatctggctgccttggccgtggcagctttgtggctacgatcccgtcattaacagggagaaatgccaaaacagtgaaatctccgcaacagagatggagagctaaagcccaggagaggatcagagaaccaccaagcccgccttatgagctcaaccgggaagcctgtgatgacttcaagctttgcgaacgctacgccatggtttatggatacaatgctgcctacaatcgctatttccggcatcgccgaggaggcaaatgagattgaaaaaagtctctttccttccagagcctggtgcctggttttgtattcctttacagtagcatcatcgaactacataaacacatacaaattgcttatttcttaaatgttcttgtctggctgttgccctccttcctgccccccagatcaataagcagtgaaaatgcaatgtggtgaaaggtcaaaagagaattaagatgtgtgattattattacataataaactcttggatggatactttccaaaaaaaaaaaaaaaaaaaaaaaaaaa

SEQ ID NO: 6745 - DNA, 617 bp, Canis familiaris
ggcagccaccagtgtggtttgggcaatgctttgggggtgtgagaatgaccgaaacaggcgacgttataacaagagcctgctgttcacatgggcccctggcagtgtcgggggagtgacggggagcatgattcctgcattcctttcaggaagagaggcattctcaaacatcatgtaatggacttggaataaagcaggaggctcacaggtaggtggtttctgaaaggatagaatcttggtgctccatcgttcaccacagccatctgtggggcagacataccattccccaccactgcctccactttggccccttgtttttctgcttgcccctcagatggagcccagagtgggtgctgcttatcaaactcctgcacttgctgtttagtcaggaaagccttacagagttctgtactgggggtgggagagggagctgcctcttcatgaggccctccaccacctctgaaggctgggcctggccagcaccactcagttcccgcctgccctcagtggtctcggatcttggtgtgaatgtgctgtgaggacagcaccatctctttaatgttcattgagggcttaataaatgtttcctaaatgaaaaaaaaaaaaaaaaaaaaaataat

SEQ ID NO: 6746 - DNA, 632 bp, Canis familiaris
agaggctgtgaaggaaatccataggtgcctggagttgaggggactcgactggccaatggggggaggggggcatccctgggaagcccagaggacctttattattaaaatgattcttttgaacccagctgtggccctgccctgctctcttccagccctccttgggcgtgggtcttgaaagaagacttcaatcagtgctcgcaccaagggcccggaggagccacgaggcctgccttgtctcgctctcgccttgagaaggctgaacagcccacatccgcctcctctatgggactggactcccttcctgtgcctgcagagaggggctgggccttccccttggtgctggctctcagttcacaatgcctcaaaagacacggaacccaggccgacaacaggccccaactgctaatttttccctttccttttgctttctaaaagcagttgttatactgttcataacattgtatagtttaatttcatgtcattttggatcttatataaaaatgtgaaaattttgatttttaaaaagaatgactccattttagatagccccttttgatgttaatatatagtgagtccaatgtatgctttagaagtaaagacattgaccatcacagaccaaaaaaaaaaaaaaa

SEQ ID NO: 6747 - DNA, 598 bp, Canis familiaris
ggttcttgtaactagcagaccacgtactcccacgtactacatactcccacgtactcccacgtactaccatgtactcttggtacaccaaccccacaaaccatgtcagagtcaactaaagtagggactccaaatgtccctcacagggcagaagtttatagtacagatgcccacatcacagttcccaactgtaaaagcctcaattcctgcaacatccgcagttcagaatgttctgattaatccattataaattgggtctaaaaacattcttattaccactaacatggtgtcatcacaaaatacttcccaatgaatcatcaaatgcattgaaaagaaaatgagaagatgacaatgatgactatgataatttgtaatccagccttaatgcttgtaacatgtatacttggtcttaaatccattgtactgagattaaacatgcatgctgggtattttcaggttgtgttgtagaaaccttaaatggtatttaatgaataaatatagttatcctttcctattgagacgttgggttttctttaataggattaggaatggttattcattagcctttaagtgtgaaaaataaaattgttgttcatcaaaa

SEQ ID NO: 6748 - DNA, 519 bp, Canis familiaris
ggcctctggtcaagtctgaaatctatttttaggcctaacttcccctgtttaatccgaacctaatgattatctgaagcatagactttgcctctgtaatttaaataattcaatagagctgtgtaaaccttattatattatttttgtaataaaaagtggacatataatatagtctgtgtgcacaaattataagtataatatgtatatatgaagtaggggaggtcctgattggtcctgatttgcctcccagccttcacagtgcttttctctgagatgctggacttgactgctgctggtaaaccatacagatcaggcctgagtactgagcactgtatcaagtagaaaatggatctttcaaggacaggatttgtctgctttccagtgaggaagttaaagccaagaaacgttttttaaagagaggttggactttaaaaagtcattgtaaatctaataaaaagaaaagtcttgccttaaaaaaaaaaaaaaaaaaaaaaaaaaaaaaaaaaaaaaaaaaaaaaaaaa

SEQ ID NO: 6749 - DNA, 631 bp, Canis familiaris
acagtacatgcgcgctgccacggcttcctgctggtgtttgctattaatgaccggcagagtttcaacgaggtgggcaagcttttcacgcagatcctccgagtcaagggaccgagacgatttccccatcgtgttggttgggaacaaggctgatctggagacacagcgccaggtcccccgatctgaagcctctgcctttggcgcctcccaccacgtggcctacttcgaggcctcagccaaactgcgcctcaatgtggacgaggcctttgagcagctggtgcgggctgtccggaagtaccaggagcaggagctcccgcccagcccacccagtgcccccaggaagaaagacggaggctgtccctgcgtcctcctctagcccgggtgcaaaaggagcagccagcatgagctctcgggaccagctgccttcactgagctctttccccttctgggtttcccaggatacactacacccccatcccaaattcctggccttctccaggacatcgccactgtgtgccttctgccgaagccttccttccccacccaagcccctgggtgaggggctcccgggcttctgggtcactgctgtatataactcccctctctacccccagggaaataaacgtcactgcca

SEQ ID NO: 6750 - DNA, 651 bp, Canis familiaris
tgctctctctcccttcatctcccttcctctgctcttttaatgagacaagggtttgtaaactggattttgtcccacactttttcaagtttcacctgcatcatccggacatcggttgagcggatgaggttacttggcccccgttgtttgctctcggggtcaggagattctgctgagcctgcgagggaaagtgtctcattgatcagtctgtcagatatgggttcactccttccttctcgagtgcccccctcccctttgtaaaccagaggcagtcactgggttctctagggagatgacaattaagggtccttgggtcctgctttccggccctaaaatgactcagaatccacttgggtcctcaggtttctgtggccacccaaaagtcaccgacgtccttctaaatgctctttgttgtattttttgcgtatgattgtgtatgacaagtgcaactgcacctcaaggaagtgagagcctacacccgcagtagagagcctggcattttaagtttgatctagtaacttgaagctctggccgtgctgttgcagaacagcttttaccctgtaggagaccgcgtgtctatttatttcttccacaaaaaaaatataacacccttcgagttcccatcctatttgcaaaagaaaaaaaaaaaaaaaa

SEQ ID NO: 6751 - DNA, 594 bp, Canis familiaris
caagcttttccagaccctgccgctgttacctgagaggaaatgcttgctactattttggctggaaagagatcgatctccatcacctgtagagctattctgactcgaggtgccagagcttcgagtggcattcccactttctggcttcacagatgaccccgtacatgttgagctgttttcctgctgagctgatgcacgttctgttttggcagaaagttttgcatgctcttgctcaactgcagaattgtttcttccttctaggagtcgtttcttcgctggctcttctaccccttcttggcaaccagttcgtctcttgttgtatggattggagcatctgtcactttgatgccttcagccatactaagtattttatccataactttttgtgggtaccggcacccgagaaagacgtggttcgcccaggccatggagaaggagacgagctgctgcagctgccgatggcggctcccgctctcggcgtcggcagctgcctccgcgtcaggcccggtcggggccaggcccccggcgttgcggagcaggaactcccggcggtggcgccagtgtttgtcagtctcgccgtcgcagcgcagcgcctcc

SEQ ID NO: 6752 - DNA, 597 bp, Canis familiaris
cgaggctgagctgcctcatggatcggtaaccgccattatctgggagcaccagtaggccgtgcctatccagctcgtaccccattgccagcatctttgcctggacacgtcggcctggagcaccgggggaagtctggatgggaaccaggacctcatcaggtttgcgcagactctggaaaaagtgtgtgtccagactgtggagagtggagccatgaccaaggacctggcaggctgtatccatggcctcagcaacgtgaagctgaatgagcacttcctgtacacctccgacttcctggacaccatcaagacaacctggacaaggctctgggccagtagtggggccgggccgcgggtggcgggtggggctgagctagcagtgggcctcgagtgagccccctctcaggcctttgtagggaacttttttttataagcaagatgtttttaaaagtatctgtgtgtttcccctcatggtgatgtgaggcgggaacagtgtgttttacctcagccactcagtgtgttttgcatactgtaatttatattgcccttggaacacatggtgccatatttagctactaaaaagctcttcacaaaaaaaaaaaa

SEQ ID NO: 6753 - DNA, 597 bp, Canis familiaris
aagaagctggaagatggtccccaagttcttggaatctggggattctcccattgttgataatgggttctctggcacaacctatgtgtttgagagcttctctggactatcctcctttgggccttttgctgttcgtgacatgagacacgacggttgctgtgggtgtcatcacaagccagtggaccagaaggcagctggagctggccaaagtcaccacagtctgccccagaaagctcagaaggctaaatgatattatccctgatacctgcccacccccagtgcttaatccagtggtggaagaacggtctcagaactgtttgtgtccattggccactttaagtttaatagtaaaagactggttaatgatataccatgcatcgtaaaacctctcagaagggaaggagaatgttttgtggaccactttgttttttttttttttttttttgtgcgtgtgtggcacgttttaagttattagtttttaaaatcagtactttttaatggaaaccacttgacccaaaatctgtcacagaattttgagaccccttaaaaccaaagtttaatgagaaaaaaaaaaaaaaaaaaaaaaaaaaaaaaaaaaaa

SEQ ID NO: 6754 - DNA, 616 bp, Canis familiaris
tgagtgataattacttattagagcacctattacctgattgtggtagtacatacctgcacattattaattttaatagctttgaatttattatttggttgacttcagtctatggcaaatgatactagttttccattcgcactgtaacataaaatttattctcagggtaaatttatttaagagttgatttgaagactaatactaagtaatactgtaagtggtgcataatgtaggaaaaaataataaaaatggactttggttaagagagatgactggaaatctaaaacactgaaatggcattgtgtgcatcttgctttaacttggaaagtaggccctgacgtgggagatgctcccaaactctggatattattcattggattccagctgttcagagtccttagaaggagaacaaaaggcagggggagctgggtggcatctgaggaccacagaagtgacccaggtggggtgaaaggagggtgatctaaaaaaagaggtgggtaaaaaaaaaaaaaatcctctgaacctgtctttttttcataggttcaggaggaaaaaaaaaatgtgacctagagaaattctgagaggaaagccttattgtgtgttctttatatttaaaaaa

SEQ ID NO: 6755 - DNA, 571 bp, Canis familiaris
ctttctgagccgtgtttagccaccttccagccgttgcccctctagctccttggaactttggtggtttgcctgtctctcctaccccggcattgtagtccctcttgtaccccacttagaagtgcctctaccttcaaccaccctccagtcctcctagccctccggagtatctattagctgtgagccccatcaatagtttaatagacaggtaatcgcgaaccatatacttcaaagccgtaattcattacaatctccttaggcgtatattttacgctattacaggcctccgtatactatgagacatcttttacaatctccgatggggtgtacggatctaccttttttatagccactggattccacggattacacgtaattattggctctacattcctcatcgtgtgcttcctccgacagctatactaccacttcacatcaaaccaccacttcggatttgaagccgctgcatgatattgacactttgttgatgtagtctggctattcttgtatgtatctatttattgatgaggatcctaaaaaaaaaaaaaaaaaaaaaaaaaaaaaaaaaaaaaaa

SEQ ID NO: 6756 - DNA, 675 bp, Canis familiaris
aagttaccctgctgatctggcagaagtgatgaaagtcgcatttaggaaattcaagctaatccctggggatgtgcagggcctaaaactgcctgactaaattttcactggcaattggatctttacccgtgaccaaatgtgctccatgggtcaaaaatggcagaccatgattgaagctcatgttgatgtaaagactaccgatggttatttgcttcgtctattttgtgttggttttactaaaaaacgccataatcagattcggaagacctcttacgctcagcacccacaggtccgccaaattcggaaaaagatgatggaaatcatgacccgagaggtgcaaacaaatgacttgaaagaagtggtcaataaactgattccagacagcatcggaaaagatatagaaaaagcttgtcagtctatttatccactccatgatgtttttgttagaaaagtaaaaatgctgaagaagcccaagtttgaattgggaaaactcatggagcttcatggtgaaggtagtagttctggaaaagctacgggggatgagaccggtgctaaagttgaacgagctgatggatatgaaccaccagtccagaatctgtttaaaattcagacatttaatggtgacccaataaaaacatatttgtgatgttaaaaaaaaaaaaaaaaaaaaaaaaaaaa

SEQ ID NO: 6757 - DNA, 656 bp, Canis familiaris
ttcatgagaacttctcacaagccatggcctcccctactgcccgggacccgtttttacgtcagatggaacacgattgtagaaggaattaagcagagcagaatgaagatggaaaagaagaagcacagagaccaaatgagaagagatcatgttgaacgaccagtacttggaactgttagaaaaacacgaggctgtacttttaagactgtgaaggagttcaaggaggagggccgcaagaatgaggtgctgctgtccaaggtgaaagccacaggcctcctgaaaattcctagacatcagcgtatgtcattgattttttttttttaacaccatatagcaaccccaagatggagagagatggttctgaacactacactactagtaaagacgcaagtgtcataatctcaacacctggatattttctttctcccatctgcttccatttcatctctctgttgttgacggaatcaggtggtgtaaacatgatggcttggataacacctgttctcctgtgaagaaacgcaagcagtttttattctgtatcagttcaacttttatttctccagtaacatcacacatatgaaggtacctgtatttgtatggactctctgaataaaaaggaattcatttgtttagcagaaaaaaaaaaaaaaaaaaaaaaa

SEQ ID NO: 6758 - DNA, 625 bp, Canis familiaris
aagagaaaggggggcttgggaggcaagatgactctggccgcctcgtttgggcggcaagaggaaaggaggcaacaccaaggagggaaaagaagaaagtaatgtttcaccctcggacccgtctgtaaacgaagaactgtgactaaatgttaagttctagttactgggttgggaggccaggaatgttgaaaaagatgtgctgccttcactgagcttgaggttgaagggataggctgccctcctcacgccccccaggatagtatgtaaatgctggactctacaaggtaatgtttttcccacaacccagaattggctggagattaaaggatgtatttgaggacctaagaatcaaggaaagaattcagtggaaactgggaatgagttctatttttaaagacgtatttttttttctttttgactttggaaactgagggaaagttggtcgtttttcagacttacactttgatttctgcattatttttataaccaaggagtgtatccaagcagggggaggggacagaaagattacaatttaaaatgacttacaaagtaactcttatgaaagttatttaattaataaaagtgtgtatctaaaaaaaaaaaaaaaaaaaaaaaaaaaaaaaaaaaa

SEQ ID NO: 6759 - DNA, 616 bp, Canis familiaris
actgtttcctagatgtatcgtgtcatacctatggcatctttcccgggcccagaagttcgcaggaagtcgtgtgtagaccattcattgatatgagagttaccctgatagttctttgcacaaccatttgacacccatgcctgttctaggtttgggttgccatagtcacatttacaatggggattgctcagtttgctttttaaggaaggaaccttgtcagattcttgtctctcatgctgctgacactcggctgggtccccaccgtgcccatgacagacccgaggccgcctgccttgccctgaacacgcccgagcctgtggcatcccgcagagcatgtccgtgggaactgcagcatgctgctcgtgctcccacctgtcctcggcttgctggcttgactgggagcgcttgttatcaactgaagtgctggctcactggtttcctcctccttatttacaactctggtgtagcgttggtcggcatggatgtgatccaaatgcagcagcctgctcaaattggaaggctgcctccacaccacctgggtcttgagcatttgcttttggtctcatagtaaagacatttaccagttgaaaaaaaaaaaaaaaaaaaaaaaaaaaaaaaa

SEQ ID NO: 6760 - DNA, 675 bp, Canis familiaris
aggcccattccaggacgtcatacccctgttgtacgcaaaggctttctattcggtaatagtttctttttatcgtatcacgaagtattgtttctcttccaggcttcttttgagcctttgaccacctccagcctgcccctactcctgaacttggtgtttctgacctcctccggcattattcctcttgacccctagaagtgcctctactcgacacctcagtcctcctagcctccggagtatctattacttgagcccatcatagtttaatagaaggttatcgccaacatatacttcaagccttagttcattacgatctccttaggcgtatattttacgctattacaggcctccgaatactatgagacatcttttaccaatctccgatggggtatacggatctaccttttttatagccacctggagtttcacggagttacacgtaattattggctctacattcctcatcgtgtgcttcctccgacagctatactaccaccttcacatcaaaccacccaccttcggatttgaagccgctgcatgatattgacactttgttgatgtagtctggctattcttgtatgtatctatttattgatgaggatccctaaaaaaaaaaaaaaaaaaaaaaaaaaaaaaaaaaaaaaaaaaaaaaaaaaaaaaaaaaaaaaaaaaaaaaag

SEQ ID NO: 6761 - DNA, 619 bp, Canis familiaris
cagccctgccaccgcttctgcgccacctgtgctgggccaggcgctgatgggtgtattaactgcacggaaggctacttcatggaggatgggagatgcgtgcagagctgtagtctcagctactactttgaccaactcttcagagaacggatacaaatcctgccaaaaatgtgatgctagctgtttgacatgcaatggtccaggcttcaagaactgtacgagctgcctcagtgggtatctcctagacttagggacatgtcagatgggagccatctgcaaggacgcaacggaagagtcctgggccgaaggaggcttctgtatgctagtgaaaaagaacaatctgtgccagcggaaggttcttcaacaactttgctgcaaaacatgtacattccaaggccgagcggccatcctagatttctttgttcctgtagacttatagattactccatattattattaaaaagaaaaaaaacaagcaaaaaaaaaaaaaagcaagccacctctctcttttttgctctctttttctctctctctcaaatttgtacagggagatggtgaactgttttgtcagaacttaaatggaaaaaaaaataaacctacaacaagcctaccttttataaaa

SEQ ID NO: 6762 - DNA, 608 bp, Canis familiaris
cgcccgcccgttctgtctgtctgtcgattggggggtggggggggtttttgtgggcagcagccagtaggctgatccagagcatggagccccttcactaacttggaagccccagcctggcttggcagccgatcagttgtgtgtcccaggacccctcacccaagtagttcctcctcctgccccccccaccccctggtctgtgcttcgggcccggctgcccaggcaggacctctgggctgagcccccaccccgggccaggctgttttctgggttcctgcccctggcctggggtcgggagctgggtgctgctggccccacttgccttcctgtgtaggcccatcgaggaaggggccggccaacgcctaggacaagcaggaaggagcagaagcaggaagggtcgggccaggggacagaagccagccttgtgatgccgttggggtcattctggagctcgaccccagctaggagggcattgactggtccagggtcagggaaggaggggagggggtggtgccgtctactctgcagctccccgctcttgagcggcccggagccaaagttgacttgaaaatacagttgtttgggcctcttttaaaaaaaaaaaaaaaaaa

SEQ ID NO: 6763 - DNA, 637 bp, Canis familiaris
agtgggctacactcagactctgagctctggtgtcaagcttacactgtctgccctggtagatggggaagagcattaatgctggaggccacaaacttggggcttgcctggagttggaggcttaatccacgctgaaagaaacctctgggaatggttatcagaagatttggccttaatatatttccagtgtgaccagcagcttcccctcctccctcccccaagaaggtgatcaaaaccaaggatgatctgaacacagagctgtattttaaatatttagacagttacttgttagctggtttctagttaaattggttatctatctagttacccatactgcagtcgtgcagtcacctatacattatttaaatgtatttaactgttaaatgcgctacccacccataatgaaatagacctttatgaaaactgtgcaattgtgtgcatgtttgtttttatgttcctattaacattgaagattgccattgaaccagaaggatcagtggaagttttaagatgaggttaaaaaatttctgttaaattcggccatcactagaattacttttggtatccccagacattacagattatgaataaaaacaagtatacataaaaaaaaaaaaaaaaaaaaaaaaaaaaaaaaaaa

SEQ ID NO: 6764 - DNA, 616 bp, Canis familiaris
  misc_feature (1)..(1): n comprises a, c, g, or t, or includes no nucleotide
ntgggtggaaaatggcaggcccctcctccactgtggtcgtttctcattcgactgaagacaggttcttgtccccacctccacttcctctgctctagaccttccctgcccaagacctatgctcaccacaacaagaggcgcaggggtcttgtctggaggatggtgttaagagctgcaggtgtttccggagagggctttgataaagcctgaacctgaagacggtttaggaacactatttttccagagctaaaggaagaataattacccagccaactaaccgggtggggagtaagtcgtcgttcttaaaaggaaaaaaaaaaaaaaaaaaaagcctttggtgtgatggtagttgcctttacaggtgacctggaagaaaaactgaaaatattggtataattagagaaagtcgggatccctgggtggcgcagcggtttggcgcctgcctttggcccggggcgtgatcctggagacccgggatcgaatcccacgtcgggctcccggtgcatggagcctgcttctccctctgcctgtgtctctgcctctctgtctctctctgtgtgactatcatgaataaataaataaaatctttaaaaaaaaaaaaaaaaaaaaaaaaaaaaaa

SEQ ID NO: 6765 - DNA, 560 bp, Canis familiaris
gagtggccccctgaacagaaaagtgtgaagaagttgcccactgctcttaaggacctgggggaaaaaggaaagtatctcaaagtctttccttttggctccaaaaattgtttcctttcatggatctgcaagaaagctttttcctacgttgctgccccagcctcctccctacacctctggcatctaagcagcaagcccagctgtgctggagttaccgacatcttcctctctcccccagctcactgggctggatggcatggactgtttgctgacctctgttctcctagggtatgggaggtgggcggtatcaagttctctggcctcttcctcctgctctccaaaggagattcccctttctcctcagcccttgtccctggctgttgttgcaatggaccacagatagatggactgagggttaagtgaaggggaagtttggcagggaggcatgcaggtactgtgaaaatccttccctctgctcacctccattgggagagggggttgggtttggaatgtaagaacagcacaataaatttgatgtttcaggccaaaaaaaaaaaaaaaaa

SEQ ID NO: 6766 - DNA, 563 bp, Canis familiaris
ggagacaaaagtgggacccatcgaagccaacactgctcaacatgcgtgaacaatctccccccttctctttggctgattcatccaccaggttttgataatggcaagcatctacaccctgagtggctgacatcacaagaaggaaactctgcattctcgcttctttggagggtgtccgccaacgttgccagcgtatgtctgcagataggttacccgactgttgcatcagtgccccattctatcatcaatggatacaagcgggtcctggctttgtctgtggaaactgattacacctttccacttgctgaaaaggtcaaggccttcttggctgatccatctgcatttgtggctgctgctcctgtggctgctgccaccactgctgcacctgctgctgccgcagccccagccaaggttgaagcaaaggaagagtcggaggaatcggacgaggatatgggatttggtctctttgactaatcaccaaaaagcaaccattcagccaagtttatttgtgaaacaaggaaataaaggcttacttctcttaaaaaaaaaaaaaaaaaaaaaaaaaa

SEQ ID NO: 6767 - DNA, 535 bp, Canis familiaris
  misc_feature (1)..(1): n comprises a, c, g, or t, or includes no nucleotide
  misc_feature (247)..(247): n comprises a, c, g, or t, or includes no nucleotide
ntctaaatctagaaaattagggtggtggataaaatatgacctctagcatatataaatatgtgtgtgtgtgtgtgtatgcatacacattatacacacacagcatttagcccagggcctggcaccttattaagacccagcagtaattcaaagacccagcagataagcattgttatcaccacacaggctcaagtgtccccatctcttctccaaactccagccccccagcctagttgctgttctagaaccnaggcagaaaatctctttagaacgtatgactccccccaaaaggaaaggaactcctttataagaactctctcttgggatccctgggtggcgcagcagtttagcgcctgcctttggcccagggtgcgatcctggagacccgggatcgaatcccacatcgggctcccggtgcatggagcctgcttcatccctctgcctatgtctctttctttgtctctcatgaataaaataaataaaatctttaaaaaaaaataaaaactattaataaaactacaaaaaaaaaaaaaaaaaa

SEQ ID NO: 6768 - DNA, 603 bp, Canis familiaris
tatgatgagattattcaccgaagttgcttttccactgaaatgaatgttttctgattgtgcacgatgcgattttaacacagtttttaaaagcatctgttactttgcctttcagccatcatcccactccttcccgtaacagtcagatttgttgctgtctgcgctcggggtcctgtttgctcccttctctcttcatcctcctcctcctcctcggtttctactgccaacagctgcctcccaaggctgacctccacgttgctgaaaccagtgggttctttcatggttttattggactgaactctctgcgccattaagagcggtggaatgcttccccctagcagcgctctccttagcgtccggaccgtaactctaggttttctaccaacctcttaggcctttattgttccatctcctttgccaggccctgttcctctaccgatttctcttacactccctttaccgtttatcctgatttttcactagtaaaagatgaacaaattctttaaaaggtacaaaaataacagggaagtatctcctcatcctttttttttaattgtgataaaatgtatgtatcataaaatacagcgttttcaccctcaaaaaaaa

SEQ ID NO: 6769 - DNA, 534 bp, Canis familiaris
gagagagagactcctaagcggactgcacaaccagcgtggagccccacataaggcttcattttaatgaccctgagatcatgactgagcgaaatcaagagtcagatgtcctaacccattgatccccctaaggattctctgttgtctcctggagtaggtagtcctccttttatccagccactttccctattcttgaaatgtggatctctcttctctacacatttttacctccatgatttggatcagaaaaggctgcttttctttttgttccacttctcagattcaaccttgagaagctcttctaggatgccattgtcttgctcagttctcccagaagaaagaagcaactgacctgcttgttctgcttttttgcctaattataaagaaattattttggaagctgaagctgatgttaaatttgaaaccggtgcttttagatgttggtgtttgtgaattctttaccttttgttcccaaccagaagactaaataaatagcaagtatggatgacatcaaaaaaaaaaaaaaaaaaaaaaaaa

SEQ ID NO: 6770 - DNA, 603 bp, Canis familiaris
ctgagagtattaaagttttagaatggtaatggggtaagaaatataaagatttctcagttaagaaatataaaattaggggcacctgagtagtagagttggttgggcatccaattcttggttttgtttcagatcctgatctcaggattttgagatctggccccacgttaggctctgtgctcagtgtggagtccgcttaagattctgtttccatttcaataccccctcacttgtgctctttgtctctcaaataattttatttttttaagatttatttatcataagaaactagtcttatgaaacattctcagtaatgctgtcactgtgtctttgaacttcttagtgacactggtctttactgaagaaacccacttatattctctttgaagatgtctatttaaagttaatccttgttagtgggtgaaggggggtggcacatctgggtgacacagttggttaagaatctgactcttgatttcagctcaggtcatgatctcagggttgtgatatcaatccctgcattgagctccatcctgggcatgaagcctgcttgggattctgtctctccttctactccacttctcttgtctcttaaaaaaaaaaaaa

SEQ ID NO: 6771 - DNA, 602 bp, Canis familiaris
tctacagaatgtctgaattcttgcattcttacccgtccatcactgtatgattttttttttccttctttaaacccaactcttgcctcacttcgtctctacagagtgttcacagcaaaacacgtttggtctgtttttagattcttgaagaattaagtagtctttcatcgagacgtttaatgtgtttaaagctgggaacccgttggaagttcacaaatgctgcatatgctgagtagcaaaagaaaatggaaaaaaaaacataaaaccccaccaaacaaacgtttttaaaaaaatttgccaaggtttagctgctcatttacattagtgtgtgtgcattcgatcagccccatggtggtgaattttgtttcctttcccttcttaaggctgggatacagtgggcgtcagggactttgtgctataagcctgataaaatgtgttccctaagggcacagagccccttcagcctccaggaaatcatcctaacacagggggcctcagctactctgaggagaaaagatcagattttgttttttgaaatcgattgggatctaaagcctgaaataaatattcatactttacatagaaaaaaaaaaaaaaaaaaaaaa

SEQ ID NO: 6772 - DNA, 558 bp, Canis familiaris
agaaccagggtgacggcggctgggggtgtttgttcagctgatgcccatcctgcatcccgatcctcgtgtcggctctcagccaagctcatggtctccagccccccgtacagcctgagcccaaggccgtcagtgggccatgtccacaggcggatcactgaccacctgaatgtcgtcttactacgtggcagacagcttctctaaggagtacacaggctccagcctcaaaacagttgaacggaacgtggaagacgattatatcgccaacctcctgaaacaactgctggaaggagaagcagcaaaaggaaggcttgctgtaccgggcccgctacttcggtgacacagatatgtaccacaaagcacagcggatgggcaccccgagctgtagccgactgtcagaggtgcaggcctccctgcatggatagtcctgggccggccacgccaccgaggtccaaaccatgaaatccctggagaatttttggtgacatgcactgagccaaggtgatggactgtatatttaaggaaagacataaaaagaaaaaaaaaattaaaatggaattg

SEQ ID NO: 6773 - DNA, 632 bp, Canis familiaris
catgtagtaatgagatataaattttatcaaagtgcctattataaaatgattctaaggtaaaaggggaagtggagtaaagcagtcttagcctggatgcttaccatagatctacagagtctgcatgtggtttgcttggaatttttttaaatacacagtacactggtgaccatttggggctgggaagtaaagcaagtctaaggttcgaacagcacaatgtcactaatgaacctttatatgagccagtggctgagtcatatggagaggaattatttcaggtgactgaaccacagtgatttgacagtcggccccaatgaaatatctttaggaccaacaatgacaaatcagaaactttctaatagtcattttgttgaacataaattcatcactcatgttatttgaaataactgcatatgtgtagaaggatgatacatattcatgttattagaaccatgcttttcagggcagccccagtggcacagcggtttagcgccgcctgcagcctagggcatgatcctggaaaccctggatcgagtcccacgtcaggctctctgcatggtgcctgcttctccctctgcctgtgtttctgcccccaccccccatctctatgaataaataaaaattaaaaaaaaaaa

SEQ ID NO: 6774 - DNA, 633 bp, Canis familiaris
ctcatcgcgcagacgggctcgccgttggagtgggtgacacccctgggcatccccatcatccagccctgatcaccgggactccaaagtgatgatcggtggtggcatccagagcctcacgttcagcaatagtggggacacgacccagaagcctaacacgctgaagcagaagaacggcttccccccgaacttcatccactcgctggactcctcgcacatgatgctcacagccctgcactgctacaggaagggcctgactttcgtgtccgtgcacgactgcttctggacccacgcggctgacgtggcggtcatgaaccaggtgtgccgcgagcagtttgtccacctgcacagccagcccatcctgcacaacctgtccaggttcctggtggagcgattctgttgcagctccaggtccctgaagcaccctaaggactcgtggattagcaagctgcaggacacgctgaaggcagtgccggagacaggggccttcgacctggagcaggtgaagcactccacttacttcttcagctgacgcagcccacggcggtccccaggcaggcgccgcgcgggagcccgcccgtgtaccatagtgtaaataaagctctgttgccacccgtgaaaaaaaaaaaaaaaaaa

SEQ ID NO: 6775 - DNA, 651 bp, Canis familiaris
aaagtataaaggtttgtgcatgtccctgtagatgtgctgacctgattgctaaactatttaggagaagccacagtgtttatagtgcatacactaaatagtcttaaactctgatcacatcacgatcattcaagaaaggatctttcagagcaccagaagggggagaagtgaggcttttttccccaggggacagaaggaaataaagttaaacttaattgatgaattattttctaggccagagctgaactagaccaccattgtgcagaaagccaataggtttctctatggattcttttcagcccattcttaaaagtatttaaaacatttgttagacttttcatcttataaaaaattgcttttaaatgggtagcagagtgttactttatactagacagactttaaagtcaagaactactttgctttattgactttctctagcttatacattcttaaatatccatgaacatgtgtccatacatgttgcctgaggacctggggaagaataaagattatgtatacagttctgcctatggtggccttttccaggttattaaccagcaagaaaactgtcttaattacttccttttgattttatggagaaaagaaataaatcattgaaagcctaaaaaaaaaaaaaaaaaaaaaaaaaaaaaa

SEQ ID NO: 6776 - DNA, 364 bp, Canis familiaris
ctttgtttaaatgaaaggtgcgctatccctgtttgattctattttaaaattctctagttaaagaactccaaatttgttccaataacagtgaaatttaagtgtgaaattgaacaagctggtctcataaaggacggggtgtggctttgatccttagcctgcctcacaccggttcagagagctgcagacccagggctgaaagcagacaaaccacaccagaaccatcctttgtcattaatttgtctcaaagtgggaaggtttgggggccgggggggagggtgatgtggggatggtccatgttttcaagagtgggggaatgatgtttaaacacaaaaataaatttttttcatttccaaaaaaaaaaaaa

SEQ ID NO: 6777 - DNA, 606 bp, Canis familiaris
aaaaaagtgtctgaaaataggcaaagtaatttagagccattaatataaagtgattcccaaccctctgtctctgacaacaatgtaaaatgatgaaaaaatccattcctaatgtacaatacttgctcacctttctcctaaagaaacgaaagcctctgcatcctaaacatgctctcaagaggccagtgccaaaaaataaaaataattttaaaaaaattttaaagaagccagtacaaggagcagtttctttgatatttcattttattttatgaaatcaggtagattttgcattttgttccatgataaatccttgttggtttcaatatgaaaagctgaggaaaattgatgcttcagaaagatacaccatattttgctttctcttatctcctgtcatggccccagatatcctaggaatagcatgccgatttaaaagcagagcatggggcagcctcgctagctcagcggtttagtgcctgccttcagccctgggtgtgatcctggagacctgggatcgagtccctcgttgggctccctgcatggagcctgcttctccctctgtctctgcctctctctgtgtctctcttgaataaataaataaaatcttaaaaa

SEQ ID NO: 6778 - DNA, 362 bp, Canis familiaris
ggattcccgccacctcagggcccgcgtggacccgtgcaccatcccgtgtccattgcacacacacggagtccgcgtttcgggattgtgcgcacattcccgctcctgtccaagccatcctgggggccggggcgggaggtgggggcgtggggagcggcctgaggatgctgtatcttttcccgtgaaaccatataatttcggtatttctggacccatcggggacgacgactgcgatccgcgcctcttcattctgttagttttcgctccacgtgctgtaggtcattgtgctgtgggcaccgccatccttagttgatactttaaatatagaaaaccttttctaagtttaaaaaaaaaaaaaaaaaaaa

SEQ ID NO: 6779 - DNA, 665 bp, Canis familiaris
cctgaatcccacggcgtaacatctcatcagcttcgtccagtacaaacatcttgatatattttgggagataggtatctccggttcagcatgtcaaacacacgacccggggtgcccacgatgatatgaggagcctccatctggagcttctgcacctcagcacgtacattggtccccccaatgcaggcatggcaggaagcacccatgtaatctcctaatgccatgactaccttctgtatctgctgagccaactccctagtgggtgccaggaccaggcctgtgtagcctttagatcccattcaatttgttgcagaatcgatatggcaaaagtggctgttttcccagtcccagattgggcttgagcgatcacatcataacccttgatacaaggaagaatggctcgctgctggatggcagaaggcttctcgaaaccataagcatagatgccacggagaagggactcggagaggttcatgtcatcaaagctgtcaacaatctcattccagttactctcgatgacgccttcgggctccatcccatcggggccattgtctctggatctcaggccgctcacccctgaaggaaagtggacctgcccatccgcagtttgccaattgcccggcttgtgcggcaaatggacccgcccgcccggcgccgggtgggctccc

SEQ ID NO: 6780 - DNA, 635 bp, Canis familiaris
atgtcatttctactctacagtacctgcaatctcatcaactactacaagggccagtatatcctcacactgtcttgaggacatcgtggatgggcatgaaagagctatgctcaagcggctccttcgaattgactccaagtgtttgcacttcactcccaaggactggagcaagaggggaaaaatggtgaccaggcactgtctatagcagtggcaacaaagcagaaactggggctgacagcacatcccacccccaccagggcccccaagaggcacaccaagggaggtggggctgaggacagcttcataaggagaggacaggcctggtaggggctagctgcccagcaccaaggcgagctcagggctcaggtcaactccaaggtcaactggctgcaggtctgggcctgctatgaagcagggactggacggagccaagcagctatgtacagtgagatggggggtgggtgcactctgtacagagggctagtggctgtaaaaatttcttttgtaagtaggagttgggaggaggggtgggtactggcagcaaaattctggcctcttgccctcactgctcccttggcaataaatcatttctatagaccaaaaaaaaaaaaaaaaaaaaaaaaaaaaaaaaaaaaaaa

SEQ ID NO: 6781 - DNA, 618 bp, Canis familiaris
tgaacaattcccttggtatcagaccccaagcgtacccattgctcaggactatggagtcttaaaggctgatgaagcatctcgttcagggcctcttagtcattgatgataaaggtatccttcggcagatcactgtaaacgaccttccttgttggtcgctctgtggatgagacactgcgactggttcaggccttccagtttactgacaagcatggggaagtgtgcccagctggctggaagcctggcagtgataccatcaagcctgatgtccagaagagcaaagaatatttctctaagcagaagtgagcgcctcgccattttaggtccgggctgtagtgggggatccatgaaaacagaatctttttttgtactattgtcactagctctatatacacagagctcttagagcttcgccaaaaatggaatttgttaatgggaccaagacccgcccctttcctgcaggggttggggaggccagcctttcttcctctggagagaatggtctgaggtgtgctatggggcaggccaactgatatgtacagtagtagcaaggcatcacttttgatcttttgttgtttctattaaacttgaactgagaaaaaaaaaaaaaaaaaaaaaaaa

SEQ ID NO: 6782 - DNA, 635 bp, Canis familiaris
gttgcggcggcgggatgaaagatgcagtccgggcgcaaaaggagctgacaatcatgtacaaggggaccgtcgactgcctggcggaagatcttcaaagatgaagggggcaagccttcttcaagggcgcgtggtccaacgtcctaaggggcatggggggcgccttcgtgctggttctgtacgacgagctgaagaaagtcatctagacattcctcctccagacacgggggccaagggaatcacgtagaatccttttaactgttacggaccattgatcttcgagaaattccagtgtccttgtcccggccagatcacgtagacagggctggggaaggttccaaagggggctcattgtgatcgatcatcggcaccaggttccatgttttgattccggggggagggcaatcatgacgtcttcgtgggtccacgggctggcagttccgccgctcagaccatagagtccaggtgcttgtgggacccgggttgtgtttaagtatttatttaaaaaaaagaatcatgtctccatttgtacttaagcactgttctcttttgcacagccgaatatttgcaattatgttccacgtcgggcattctgctgcaaaaccataaaaactgggacacagaaaaaaaaaaaaaaa

SEQ ID NO: 6783 - DNA, 417 bp, Canis familiaris
tttttttttttttttttttttttttttttttcttttttttttttttttttctttttttttttttcttttttttctctttttttctttttccccgggggggctgcagcacgagacgcaggagctggcctccaagcgggtggacatccagaacaagcgcttctacctggacgtgaagcagaacgccaagggccgcttcctgaagatcgctgaggtgggcgcgggcggcaacaagagccgcctcactctctccatgtcagtggccgtggagttccgcgactacctgggcgacttcatcgagcactacgcgcagctgggccccagccagcctcccgacctggcccaggcgcaggacgagccgcgccgggcgctcaagagcgagttcctggtgcgcgagaaccgcaagtactacatggatct

SEQ ID NO: 6784 - DNA, 639 bp, Canis familiaris
cacacacattttatggggtgagtgtctcgtggtgctttgtactggaaggacctgccgtcctgccccaaaaattggtttcttgccctccacgtttagtcacttgccatctcatttacagttcataacaaggaaattggaaagagtgattggtgactgtcgctttgtttctgcaacatttcgcctcttcaactccctaagacagggccagccgagagatgccaagtgatttacaatggaggaatcacaggacatgagaaagaactaatatttgatgcaaatttcacatttaaggaaggtgaaatcattgaagtggataaagaaacagcagctatcttgaaaaattcacgatttgccaaagattttctgatcagaccaattggagagacgctgccaacatgtagtggctgttctgctttagaatcaaagggtatcatcacagatccattcatgcttgcaggacagtctgacagtatgaagtccagatgttcccctgatgttgctggaggctgctgtggcataacttacagctgactggaagaaaggggcaggaggctaaggacttacatatgtcttttaaatctactctctcccacagcacagaccataataaagaatacatagtgaaaagtcaaaaaaaaa

SEQ ID NO: 6785 - DNA, 661 bp, Canis familiaris
aacatgggagcagatggagggacccagacccccgaccccccggaagcgtccgagcttctagcacggatcgggagatggtgacgatgacaacgggcaagagcagccctgagagcaactccttctcctgaacccaccaaaggcaccacgccctccaagagacagtctccaggcagagacatcaggcgggaccccccactcgggccaactggttccagcgaggacgaccccttctcctacgacgaggacactctccggaagcgggggctgctggtcgcagctgtgctgttcatcacaggcattgtcatcctcacgagtggcaaatgtaggcggttaccccagttatgtcggaattataacaggtgaggccgtcagaagtaggggccggaaaccccatcgatgggcaccccaggactgagtcctcaccagctcaccgtgcccagcttcctccctcccctctcctacagaatagtcagtaaagcccagcctgggagggaagacccggatggagccagagccggggctgatggcccgaggcccctctgctccccaccctgcgccaccctgagggctgcccggctccttgggcactgcccccccaattacccattctgttcagacgaaaagtaaagcactgtggtccttgaaaaaaaaaaaaaaaaaa

SEQ ID NO: 6786 - DNA, 605 bp, Canis familiaris
gggagtttgttttggcaccaaatcaacgggactttccaaaatgtcgtaacaactccgccccattgacgcaaatgggcggtaggcgtgtacggtgggaggtctatataagcagagctcgtttagtgaaccgtcagatcgcctggagacgccatccacgctgttttgacctccatagaagacaccgggaccgatccagcctccggactctagcctaggccgcgggacggataacaatttcacacaggaaacagctatgaccattaggcctatttaggtgacactatagaacaagtttgtacaaaaaagcaggctggtaccggtccggaattcccgggatgcagaccggagaccggcaggccacggcccaaaggtctggagggagagcgacctgcaagactgacacgaggggaagctgacagagacacctacagacgaagcgctgtgccccctggaactcagttgctgaccctgccccagcctcagctttcttgtcggcaactgagttccagtttagaggcggatttggtcgtggacgtggtcagccacctcagtaaaattggagattgttttgtgttgaataaatctatagccagaaaaaaaaaaaa

SEQ ID NO: 6787 - DNA, 554 bp, Canis familiaris
gttctggaggagaagcccggtgacacagggcaattggcccgagcctccgggaactacgtcgactgtcatctcccacatacccggagtcccagatagacccgagtgaactgccgtccgggttcaaagaaggtcatttcttccggcccacagagccctggtgggtgtggtccctggaggtggccgcacttgacagcccctttctgaaggctggccgtgcttaccaccagtacaaggccaagaggaattgctggccacgtgtgcggggtgtggccatgaatcctgtggagcatccttttggaggtggcaaccaccaacacatcggcaaaccctctactatccgcagagatgcccctgctggccgcacaagtgggtcttattgctgctcgccggactgggcgttctgcggggaaccacagactgtgcaggagaaggagaactaggcttgaggggctcaataaagtgtgtccttctgcccaaaaaaaaaaaaaaaaaaaaaaaaaaaaaaaaaaaaaaaaaaaaaaaaaaaaaaaaaaaaaaaaaaaaaaaaaaaaaaa

SEQ ID NO: 6788 - DNA, 649 bp, Canis familiaris
gactggattactgtggcttcctggtggcataaagctttttgcagtgttttatactcttggaatctctctgcattagccagtacgtgctttttaatgggacctatgaagcaactgaagaaaatgtttgaaacaacaagattgcttgcaaccattattatgcttttgtgtttgatatttaccttgtgtgctgctctttggtggcacaagaagggactggccttattattctgcatattgcagttcttgtccatgacctggtacagcctgtcatacatcccatatgcaagggatgcagtaattaaatgctgttcttctctcttaaattgaaaatcagaaactttgaaaagagcattggaacttcagcgttctgttttttgtgaaatacggttttcctgatgtaataatcactccccaaacaactggtgtgacaggttaagaccattttgtgtactggtggaaactacatgtttgattaaactgttaaatacttgtaacatgaaattcattatgtgtcattaacgtgttctttcccaaaataaggagtttttaatcattgccaactgtaaatgatttttagttttttaaccttttctaaacagcatttaaaatgtgaatatttaaaaaaaaaaaaaaaaaaaaaaaaaaaaaa

SEQ ID NO: 6789 - DNA, 622 bp, Canis familiaris
aagtaattgggttaactaacaaatatttggctttttttctcacctgcacttagaggaaatgtgcacacagttggaacaaaaattttctgctttgtgtcaattctaagaaacacttgcagctcttttagtattcactgagtcttcctgtttttcctggtaccaggtcatggtgattttggttattttaattgttttcttaaaacacatttgaaacctgaagatttctgcaggctgtgtaagcatgtttacctgttggcttgctttgtgtgtctgttaaagtgaatgtcatagtgtaaatgctagaaataaatggacagtgtctccgaactgaactaactacagtgacttgatgctctaaaacagtgtaggacttaataatagactggtttctaatccttggaattgtgattgtgacccatgagtggaggaactttcagtgctaaagctgataatgtgtgtagcccaggagagtacctttttttttttttttttgtttgtaaccactgtcttaatggcaaaataattatggtaaacaaacaaaagtctcgtgtttattattccttaagaactctgtgttatattaccatggacgcctaataaagcaaatgtggttgtttcaaaa

SEQ ID NO: 6790 - DNA, 626 bp, Canis familiaris
ctccccacgaatttaaagaaggataagccacgacgggaaacgtgaatatattttgtcctgaatgtggacatgtgtttgcaaacactgtctggaagattatgctgtttatgccataatttgtgaacatgtacagagttttatataaatttaaacccatttttaaaaccaaactgtggacaccaccaccgtaaaatgggatcaaagggaagttaatttatgaaatcaagaggtcagcagaatatactccagtgctggaagacacgtggggagagtcttttcaactggacacagaatgatcttaatttaagaatatatcctggttttacagcagtgccctgtttacaacagcttgtccctgtcgcctctgcagctgaggaatccagggttctgaggagagggggctgtctgcaagtgggcagtcttctgcacggagcttagaccatctgaggctgtttatgcttaaatccaagtgctttgatcaaatgcataatctgccatctcctacatctatgttggtagccgtttgtattaaaggaatcacaagtgcaaataaaggtcatttatcatttgttaaaaaaaaaaaaaaaaaaaaaaaaaaaaaaaaaaaaaaaaaaaaaaaaaaaaaa

SEQ ID NO: 6791 - DNA, 539 bp, Canis familiaris
  misc_feature (72)..(72): n comprises a, c, g, or t, or includes no nucleotide
gcccagtctgtcttgtgcaaggggccagagaatggtgaatggaggcccgcgtagaatgggaagaggctcgtnggggtcaggtcccaccgccctgctcatctcccctgtcaaccccagccctccccctgcagctgggctgggagtattgctctcctgctttgtaaatagggcacaatcccctttcacaaggccgccatcgcatccaggcctgtgctaggaagctcctgctgggttctgccttcatgtttctcaacactactttgctgatacaaaggcagcatcttctgagtgagaaatcacgtgactgctcagaatgtgtctccctcagcacaatgcgtctgtccgcgtttaaggggagatccctaacgtccaggattcttggttactgtgcagtggtcaacacccagaaattaggcaggccagtgtctcgtatcatgccgtttaaaagttcctgatcaaatttgacctttcctccctcaaataaatgtattggtggtgatttggaaaaaaaaaaaaaaaaaaaaaaaaaaaaaaaaaaa

SEQ ID NO: 6792 - DNA, 650 bp, Canis familiaris
  misc_feature (203)..(204): n comprises a, c, g, or t, or includes no nucleotide
  misc_feature (226)..(227): n comprises a, c, g, or t, or includes no nucleotide
  misc_feature (304)..(304): n comprises a, c, g, or t, or includes no nucleotide
gagtggctggacggcccgcgcgaccatccggccctggagctccttcgtggaccacggcgcttctcgcggccccgcaactctggggcgagctgtgccagcgcctcgtacgcaacgtggagtactaccagagcaactatgtgttcgtgttcctgggcctcatcctgtactgcgtggtgacgtcccctatgctgctgtgtggctcnntggctgtcttctttggcgcctnngtttacatccgtctatctccgccacattgccagtccacagtttgtgctcgtttggccgcagaaggtgagcccacgcnccatcagtatagcttctggccgcggggcgttctcctcttccctttctttctggctggctggttgcagggttctgcttgtttttctgggttttgggaacccacccttgtggttcattggctcccatgccgccttccaccagatggaagctgtggatggggaagagctgcagatggagcctgtgtgaggacctgcgggcctctggaatcggctgcctcatccctgttcccccctgccccgcttggccccgaggccctggccaaaggcctccttcccatctcgagcccagggcgggattccagctgtggaaataaagctgttacagttgtcattcaaaaaaaaaaaaaa

SEQ ID NO: 6793 - DNA, 540 bp, Canis familiaris
ggggccgtttttgcccactatgggaggatttgccccctggatccccgtaattctccgggtatacttcttacgaaaacttgagccaagattcacgttaccaattaagtttttggggagttaaatataacctttcttcccctgcgacaattttcctaggtttaatctgggatacctcgtcgatactctgactacccagatgcatatactacctgaaataccgtctcctctataggatcgtttatctcgcttacagcggtgatgcttataatttgtatgatttgggaagcctttgcatcccaacgagaagttgctatagtagaacttactacaactaacattgagtgactacatggatgtccccctccataccacacgttcgaagaacctacatatgtgatcccaaaataagaaaggaaggaatcgaaccccctaaaattggtttcaagcccatgtcataaccattatgtctttctcaatccagaaaaaaaaaaaaaaaaaaaaaaaaaaagaaaaaaaaaaaaaaaaaaaaaaaaaaaaaaa

SEQ ID NO: 6794 - DNA, 641 bp, Canis familiaris
tctcagccatgtgtcgtttctcttacttgtaaggtgaaatttaaatcaatcccgtgtctctgttaatacttgttttttttgaaatgattttttactacaccctaaagttagaacctatttctaattagacccaagtgaaatgcaagttgcataacttactttgaatatcatggatatgctctaaatttaaattttaagaagaaataccacttggaattatgttgattataactgattttaaggagtcacagtgaactgcataagatcactttgaacatcatgtttcttaaaaacatacttatattctcaccaaagttctataaaatatatttgttagtttaaaaattgttgtatcaagatatttggaaaattagaagcttctttttaacatgtgttgatatgacttgaattattattttctaaaattaagagccctgtatctacctgtacatcttttcacatatcatttaagcctttgtcttactattattgttgatttgcagcttagttattacttagtttttctttataagaatgccatcaatgtgcatgcttttacgttttccagaaaagggtgtgtttggatgaaagcgaaagaaaaaataaaatctttcactgtcaaaaaaaaaaaaaaaaaaaaa

SEQ ID NO: 6795 - DNA, 606 bp, Canis familiaris
tcttgcaaagcactattttgagcacgcagttggagtacaggaagcagctccctgcatctgcagtgagctctccacttggtagctgggagactgttcggagagtgaccttgcatcttggacataaaatcatggtgtgtcctcaggagaatgtgcaatacctttgttattataatgcagattagggctccactgtgatcacaacacttcgttaatgaagatgataaaatggcgtagtgaccagctggggcacctgcagcatctttgactgtgtctccttcagagtcatgtgcttctggcacaggaaagtgtggaagaaccttgagtctatgtctacgccggggcctgggagaacttgttcattccctagaacacggttgttgaatagtctcgtgggacacgggagacacaagggagttaacaatggggatagaccaccccaccagggaagccactaccctgatgaccacttggaagtgattgtctttaacatcacaggcatgacactttgaacgatatagagatgcacgcagttgaacttagaagtagcagtattggctttatgtaataaaggaagcatttttaaaaaaaaaaaaaaaaaaaaaaaaa

SEQ ID NO: 6796 - DNA, 672 bp, Canis familiaris
ggatctggtacagtgagggaaagcattcccccccgttatccaggtgagggctcaggaggtccacggtccctgtggcagcacacctgaggtgggctagagcgcctgcccaaccccatgcgcttccccctcggcctcagtatcccctttccttaacatggggcactgataacaaggagctagccttgcccactcccacccttctgctcctccccaccccccaaggttctggttccatgcgttttcctctgttcaccaactacctctggacagttgtgttgtttttgttcaaagtttccattcttagacatctgtcattgctgctgtgaccagcgcccaatgttcatcctcattgcctcctcctgtcctgcccacatcccctcctccgagactcttaggggaagggccccagggcagagcaggctgggttaccgattaccccagtcccagggaaggtggggctctgcccctaggatgctgcagcagagtgagggggggggcctgtatagaccgtcaagggtgtaggggccaccttctccccctgttctgctggggaggaggtagtcattatttgtcccagcctggggcccccccatctggtttcctatttgcagttacttgaaaaaaaaaaaaaaaaaaaaaaaaaaaaaaaaaaaaaaaaaaaaaaaaaaaaaa

SEQ ID NO: 6797 - DNA, 638 bp, Canis familiaris
ggcaaatccctgttgcactgttaaaaagtaatttaactccagtttggttgagaaacttcctaagggagaaaattcagtgtactggtttcctatagataagtggatgtcaaaactttaaaggacagaaaaggtggtacctacatttagatgatagtcttgaggttcatgtgaaactagtgtcaccccattttgatttttttgtttgttttctattttgattttcttgttcaggccaagcataaaacctttttttctgggaggtggaagaatttaaaatttttctatatgaaatcattgtcccctggaaagagctgcatacttttataaatatataagttactaaggaaaggaactaaggaatccactttttaatttctcctctcaccatgtatatggtcagttactgtcttaaacactggctcaaattcccactgtttttttgttctggataatatcgtgtctacatgggagccgagcggacctttcattggaaagccctggagtctaaaatgatcagaataattaatttatttgtgtcttctgttatgcttgtatctcttatttgttttgacaataaacttcttaaactgctttctcaaaaaaaaaaaaaaaaaaaaaaaaaaaaaaaaaaaaaaaaa

SEQ ID NO: 6798 - DNA, 618 bp, Canis familiaris
gtgcttaagcagaagcataacttctctgaaagggggagcagggaggactcaaactcttccactatcctaatgttcagctcccttctctttataaggaattctgggggcccccatccctaccctccagcttctaatactctcctagagagggccgggctggagctatggcctttgaggccacagagccttatcaccaagtgtcttcctcaaatcatggattcattctcaccttgtgccaaaataatgccccctaccagcccctctgtggtgctggcattgtccttaaactaacaccagcatttgagggcctgtccccctggcccagcagaggtctctaccagctcttcccttgctcaactgtggcccagggggactggtgggacaacactggccctttccaggatccagggaggttcagtccgagacttttctgttcccccttttctcaagtgccttaatagtagggctaggtgtttggagagtaggggggagggcaggctggcagctctccaatcaagaggctcggtttttactgaagaatgaaagcagttggactcttgctctttctactctgaactaataaattcattgccaagctggcaaaaaaaaaaaaaaaaa

SEQ ID NO: 6799 - DNA, 558 bp, Canis familiaris
  misc_feature (1)..(1): n comprises a, c, g, or t, or includes no nucleotide
  misc_feature (147)..(147): n comprises a, c, g, or t, or includes no nucleotide
naattccctgattggcatactccgtcagttagtcatatggcaactggttatcgtagcggttcttattcaaacaccatgaagttatataggtgcaacagctctaataattgcccatggtttaacatcctcaatactattctgcttagnccaactgccaattacgagacgaatccatagccgtactataattgctcgcacgaggacttcaaactctccttcccctaatagcagcctgatgactattagcaagcctcacaaatctggctctccctccgaacaattgaatcttatcgggagaactatttgtagtgatatcctcattctcatgatccaacattactattatcctaataggaattaacattatcatcaccgccctatactccactttatatattaatcaccacacaacgtggtaaatattcccaccatatcaaaatatcaaaccatcattcacacgagaaaatgccctatatgaccttgcacctactgcccctactcctcctatcccttaaccctaaaattattctcggtcccatctactaaaaaaaaaaaaaa

SEQ ID NO: 6800 - DNA, 663 bp, Canis familiaris
  misc_feature (132)..(133): n comprises a, c, g, or t, or includes no nucleotide
  misc_feature (238)..(238): n comprises a, c, g, or t, or includes no nucleotide
  misc_feature (278)..(278): n comprises a, c, g, or t, or includes no nucleotide
ctgtctgacatcgttgaccttcgtgggtgccgtctttcaacgcgtttgacgcgttctcatttctgggagtgactcggttgtatgtcactggtccgccttgctgtatcgcggcgaacacccaggcccagatgnngaccgcagtatgtcgggattggtggacccatccagtttgagcccacagtcaagagctaagagtgccgagctaagggatcgccagggtccggagccctgcgccatncgggcagccagctgcagttctctggatcccaaagccaaangccgaatgaaaggggtgtctctgccctcgggacgcctgcccccatcccctgcagccctctgcccaactccatctcccttccgtccccgcccgccctccgcctccgcccgagccatttcctgagcggccaggactacatctcccaagaggctctgctctaggagtcccggaaaggcgaggcacctttggccgtggcgcctgctgggacttgtagtcgcctagataggccacccgccctgcacttccgtgaccccgccgctggaggcgccgtgagagattggtgtctcctggacgccactagccccaaagccagggctttgcatggggcccaggggaggcctgagcttggatttacactgtaataaagactcctgtggaaaaaaaaa

SEQ ID NO: 6801 - DNA, 603 bp, Canis familiaris
  misc_feature (1)..(1): n comprises a, c, g, or t, or includes no nucleotide
ntacggtgggaggtctatataagcagagctcgtttagtgaaccgtcagatcgcctggagacgccatccacgctgttttgacctccatagaagacaccggaccgatccagcctccggactctagcctaggccgcgggacggataacaatttcacacaggaaacagctatgaccattaggcctatttaggtgacactatagaacaagtttgtacgaaaaagcaggctggtaccggtccggaattcccgggatgacaacactaggctcagagtatgatcggttggctaactcagcaaggcagtttagagtccagcttcaggaggaaacccaaccgatcatactctgagcctagtgtttgtccagcggagtcaaaggaaagaaccactgaattggagtcctcccactggagtaaatgcagcttccacgcagaataatacaaaaatcccagtaccagaaaaaggcagagggctagcagcagattgcgtacaaataccaagagtcccatcttcacatgatttacgatttcctacatgaccgcagcggagacggaggcagcggggaggcggcgcccgggccggcgcgggcggggaggcggaggccgaggc

SEQ ID NO: 6802 - DNA, 604 bp, Canis familiaris
  misc_feature (539)..(539): n comprises a, c, g, or t, or includes no nucleotide
tgaagatccaggatgttcggactcatggccgatggttggctgcgatgcccagtgctgcccctgccgcagcagcccccgaggcagtagaagaagagatccccggacagaaagggcggacacatttcacgtgtccgcctaacggaagcaaagcccgtggataaggtgaagctgatcaaggagatcaagaactacatcccgggcataaatctcgtccaggcaaagaagctggtggagtccctgccccaggaaattaaagccaacgtcgccaaggcagaggcggagaagatcaaggcagccctggagtcggtgggtggcaccgtggttctggagtaggccgctttgaggactggtggacacgggtccctgggacctgggtgaggccccacccgccacacccccaacatccgggatctgctcagaactgcggcactggcacaccttggccaactctggatggacctgctgggatgggggccgtggctcctgtgtgagcaccagggaggtggactctagaacataccacggtcaacatgcacccncctggtggccactgagaaaaatacattgttcgggtaaaaaaaaaaaaaaaaaaaaaaaaaaaaaa

SEQ ID NO: 6803 - DNA, 608 bp, Canis familiaris
  misc_feature (225)..(225): n comprises a, c, g, or t, or includes no nucleotide
tctccgtcaatcacttcatctcggagtctgctggggggccccggcctgacaccccctcagaggcacacagtgagagagagaaagagagaggcagagacacaggaagagggagaagcaggctccatgcaccaggagcccgacgtgggattcgatcccgggtctccaggatcgcgccctgggccaaagagtcctgatggcagcggagcccctgacggagctggagcncgccattgagacagtggtcaccaccttcttcacctttgcagggcaggagggccggaagggcagcctcagcatccatgagtttagggaactggtcactcagcagttgcctcacttgctcaaggacgtcggatccttagatgagaagatgaagagcttggatgtgaatcaggactctgagctcaagttccatgagtactggagactgattggggagctggccaaggagatccagaaggagagagccctggagatccggaagaagtaaagcccctgaccaggataggctgggctgggctggccagcagaaccccactcccctcaaataaagtcttttcctgaaaatacacgtttctcctaaaaaaaaaaaaaaaaaaaaaaaaaaa

SEQ ID NO: 6804 - DNA, 711 bp, Canis familiaris
gggcatgccatcctggagagggaatggaaggaatgcacacaacttaaagcaaacgtcacctgctccctcaggaggggcatggttttactccatagagggaggggcgagctatggtcagactctgagactcaccgaggtttggtcccgagtgggccagcctggcatttatggctagaggtggtcagtggtctcagatactggggtgaacccaggaagcgggccccgccctgcaggacaggcaacgtgcagagagggcccaagagcacaggccccgtggaagagcccacatctcacattgcacctgtcctctgctggtctcctgtagagtttgtcttcgtgagggaaccgggtagtctcagctgagtttggggaacatgagagaggccgtagcaccctcgggttggtggtttctttatgggagaatgggccgggaagaaagagaccccggatcatggcatctctcaaaggacagaatccaacccaggctgccacccctgcccagaggtgctcccccaacactcacctcttagaaatgtcaggttttgtttgaagaggaaagccttacctgtgtccccttgaggctgtcatcagccagaaaacagtgtggcaaagggtcaggggcactgagcggacatgaagcagggtccagggtgggtccagtgccctggtgaaggggcaagaagaggaaggtccttaaaaaaaaaaaaaaaa

SEQ ID NO: 6805 - DNA, 534 bp, Canis familiaris
tcctcttcccaccacagaagctgagaaaagattgtgtcctgccatagactggttcaaaagccatcaaggagtcagaggatcaagcaggcagaggaccaagcaggcagagcgatgcccaaaccttccagcaggtggtcccaccgcctctttggtgctggcaatatggctgaccctggatggctttgggtctctggtcacttgtgtcttcaggctgacctttctaaagcatctatttagccatcctgcgtccagcctgaagcttatgttattagaagcaaaaagatgaccaatctcacttatctgcacattttgtcactgtcctgtagccatttagagaaggaagtctacttgatgggagtatattctctttaactcagctggtagaatttgactaattgaccgttcttttattcgtgacttgagctgaagaggttgaccaccctcctgcgtggcacatgtgcacataccttccatggtgagatgattcttccttgtgctaatgagcagacagagctggtcatccttggcccctcg

SEQ ID NO: 6806 - DNA, 621 bp, Canis familiaris
gcgctggtcggtgcagcactccctgggcaggggcagcagcggccctggtgcgggtgctgcccttcagcctgaccctcatggccttggtggtctggtgcttcctgcggcaggagaccggcaccgaccggtggttgagacgggtgctgggcgaggaggcggcggagcccgcggacagcgcgcgggagcccggagctgcggccggggagcgggcgcgcagctagcggggtgctcgcggaggccgccccgcgcggaccgagcgccccggcgtggagcacccgagcgccgcccggcgcccgcggccgaaggacgggtccttttcagatccgcagtggaggttttacccgcctcgtgtgctgccgggtctgcggcgcgccccgctgcaacagcatcccgtttccagggccagccgggtgacactggggagccaggtggtgcgtcacccgccttccgagaccgtcgcgggccggcctcacagctcgcggcctaccggagtgcgtagattggatgtcactttcacggactaacaacctgacacttttgatttggtcacgtggcattaagccagtcctcttcccctccctcctttttgcatcttattaaaaaaaaaacatacacacacca

SEQ ID NO: 6807 - DNA, 604 bp, Canis familiaris
ggctcggagctgacccccgcagcccgctgacccgcctgcggaccgggagaacggtctctctctgcacaggaaacggtgtcccaggacgcggccccacggagaactgagtcggggcccgggaggctcgggccacacggatgcctgagcgctgacgccgcagaccccggcctgggccatcccggagcctcctgagtcctctgggggagttgatgggtttgacgccaccggttggcccttccgcccgctcacaagggcgcacggttcagtccctcgcatatgggaaatgggtttagcagctgggccttgttgatttgcacgttgattcaccctccttgccttgaacctcttttctggcaaatgaatgtaccgtttctacttggattgcaaagcgctagttggtaccagtagtagtagcagcgctgcccaagaggccgacgccacgctgctttcttggggtgggtcagccaacgccaggtaaagatgggaagatgtgcaacctctttgatatgtttgatgtcatcgtatctacattggttgtaagacgtatcgcataataattataattatatcaattaaagtcgttaaaagcttaaaaaaaaaaaaa

SEQ ID NO: 6808 - DNA, 472 bp, Canis familiaris
tcaggacccgtcatgaggcaggtagaagggaaaaacccagtcacgatattttctctagcgacaaatgagatgtggcggtcaggggagagtgaaacataccacaatgggtgatgtcagtcaaaagacaacgtggcacagaatatcagtattccgaccaggtctcagagatgtggcatatcagtatgtgaaaaaggggtcccgaatttatgtagaagggaaagtagactatggtgaatacacagaccaaaataatgtgaggcgacaagcaacaacaatcatagctgttgatggttgctaagggggtacaagcagaagtcatccggtggtgcttccagggaagctccttaaatgcctaactttgttgggaggctcatcctttgtgcttctccagaccctcacctggctttcccttgtccgaaatgtggacatgatggctgaatctccattagccatctcggaccatgagaagatc

SEQ ID NO: 6809 - DNA, 625 bp, Canis familiaris
gaagagacgagaaacagtcaagcgtatgccaagaaaaataactgccaatttcttacacatgtcactctgccaaggattggggcaacaaacattatcttgagtgcacttgtagcacgacaggaaaatggaagtccagcaggaggagatgctaaagaattagagagcaaatcaaaaggtctccagtggataatagatacaactatagcttatcccaaagctgaacccatagatattcaaacctggatccttgggtacaggaaaccaacagtcacacatgtacattacaggatctttccaattaaagatgtacccctggagaccgatgaccttgctgattggctctatcaacgttttattgaaaaagaggaactcttatcacatttttatgaaacaggggcttttccacctcccaaggggcgtaaggaagctgtttccagggagatgaccctcagcaatatgtggatatttctcatacagtcttttgcattcttgtcaggctatatgtggtataacatcatccagtatttttaccattgcctgttttaggaattgacttggacttatcaaggtcaccataggagttcagactttcataagtgtgcattattttacatgtgcaaatctc

SEQ ID NO: 6810 - DNA, 611 bp, Canis familiaris
cccattgacggcaaatggcgggtaggcgtgtacggtgggaggtctatataagcagagctcgtttagtgaaccgtcagatcgcctggagacgccatccacgctgttttgacctccatagaagacaccgggaccgatccagcctccggactctagcctaggccgcgggacggataacaatttcacacaggaaacagctatgaccattaggcctatttaggtgacactatagaacaagtttgtacaaaaaagcaggctggtaccggtccggaattcccgggatgccatcctgcctgaggcggcgcgggcccggtggcttcgccgccgcaccgatgtgcgcatcacgggctgagctgcgcagctgcgggcggcggggccccggcgttctctgagctggggccacgatcgggtccaggggcctgagccaggctctccgttgttgatgaaaaatgagtttttggcagctccagcgtctgatgtgccccttttcgttcgtcccttactaggtgtattttcccgagccttttcccttccaatctcctttttggctggtggcaaaacccgcgttgggacccatgagaataaagcctttgtttcctgttcaaaaaaaaaaa

SEQ ID NO: 6811 - DNA, 579 bp, Canis familiaris
gtgtgtaatgggttaaaaataagccactgcctgacatcccgacatttgacaccctagcaatgtgtgactcccccaacattccactatgccatcctgcagctgaaatgggaacactggctgcctttccagcccccaactcttggacagaggatctgggaggtagaggccatgccagagaacttggggaaaatgagagggaggaagggaagaaggagacgaagctgagctaaagctgacctcctactgagtaagatgaaaacaggctgaaaaaccaccccaggagaggacctctccccaagcaagccaatgagcagccctgccagactactaccagactgagaaatccagacgcttgtcagggctcggcttctctgccaaatgactgtgtggaaacccaaatgagccggcctgtgttcttcctagctcccaccctccccgtgccgctgtgctctgctcctccccacacttccctgctatagttcccagctgctgtaatggagccgcctccaactctaacaataaaatcaagttcattacaaaaaaaaaaaaaaaaaaaaaaaaaaaaaaaaaaaaaaaaaa

SEQ ID NO: 6812 - DNA, 685 bp, Canis familiaris
  misc_feature (1)..(1): n comprises a, c, g, or t, or includes no nucleotide
naatatccagaagttctaaataacttctatgatgttgcaaatgccttagactgtccttccaaattagaatagtttctattgcatatattaactgagaatatgtgaccaaatcatcataacccaattaatgaaatatgaatagacatgaaaccttgtccatggctttgagtagactattaaatcatactaccgtatactagattgggttgaggaccaccaaagtgaagcctgctaggtgtcccttaatgcttggtgggtcccaagtataaccgaagttccaggaccaatccaagaaaacccaagggggaaagaatttttttggaattggttgttaagggaaccaacaccagttcttggtgacaaggagattaacatttggaggagttcaatgatttggggaagaaatactttatagaaatgtatactaggggggatccctgggtggcgcagcggtttggcgcctgcctttggcccggggcgtgatcctggagacccgggatcgagtcccacatcgggctcccggtgcatggaccctgcttctccctctgcctatgtctctgcctctctctctctctctctctgtgtgactatcataaataaataaaaaaataataataaaaatagaaatgtatactaggtactgactgagaaaacaataaaattgtagtagtgaaaattataaaaa

SEQ ID NO: 6813 - DNA, 597 bp, Canis familiaris
  misc_feature (1)..(1): n comprises a, c, g, or t, or includes no nucleotide
nactggagaaggacccaactgggtctgtgaggaacatcgcacatcatgaatagccaacattattggcacacatatttaagccacatggagatcacatgttcctatcttatccatatgggaacatccttcctacctggcccatagacatgtcttatcacagagaatgattttctctggtactatgcctctatacccgtaggttggttcagtaataaatgtgagacccttcagctgagctgctgttgtgtcctgatttgtgaagtactgaattgcccctcctgtcagaatctcacatagcacccgttctgatagaactttctgcagtgatagaaatggcccttgacaacacaagtatttagagtgtggctaggggacgcctgtgtggctctgtctgctaagcgtctgcctttggctcaggtccttgacggggagtcagcgtgtctctctctgctcctccccctgctcatgtgctttttttcaaataaaatcttttttaaaaaaaataaagtgtggctagtttgaataaagaaaaaaaaaaaaaaaaaaaaaaaaaaaaaaaaaaaaaaaaaaaaaaaaaaaaaaaaaaaaaaaaaaaaa

SEQ ID NO: 6814 - DNA, 619 bp, Canis familiaris
aagcatggtgaaattctgcttttaaagatgaggaaactctgtgaaggtattggttcgttaagtaattgagccaaagtcacaggaaatgaggcaccattctggctccactgtgttttactgcctgcaactttctgtgccctacaaataccgtagcacctcaactctttgggactcaactttgagcctcctcatctgtttgtaacaaagcggaggacgtggaagcaagagaaaccatttctgtaattaaaatagaagccacgttctctgtaagagtacgcatccccttccagcacggcccgactgcgcactgtctcgggtctggggcatagagcctagtccctgagggttgtagtatacccctgtgcttccacgttattgataaagtgaaatgaattttaatttcattagatattgaaagcagaaatggaatgatttgggggcacctggatggcatctgctttcagctcagctcatgatcccagggtcctgggatggagccccatggtgggctctctgttcagcggggagtctgcttctccctcttcctctgtccctcccccatcttgttctctctctcaatgtctctctctctcaaataaataaaatcttaaaaaaaaaa

SEQ ID NO: 6815 - DNA, 406 bp, Canis familiaris
tcgttcctccttctctcctcgtcctctctcctccctccctccctccctccctccctccctccctccctccctccctcccttccttccttccttcctggttttatttatttagagagagggaaggggcagagggacaaagagaatctcaagcagactccaccctgagcacagagcccaatccgagtttcgatctcacaaccctgagaccatgacctgagccaaaatcaagagtcagatgtaggcagccccggtggcccaacggtatagtgctgccttcagctcgggatgtgattctggagttccgggatcgagtcccacgtcaggctccctgcacagagcctgcttctctctctgcctgactctctctctctctgtcatgaataaataaataaaatcttaaaaaaaa

SEQ ID NO: 6816 - DNA, 651 bp, Canis familiaris
  misc_feature (313)..(313): n comprises a, c, g, or t, or includes no nucleotide
  misc_feature (355)..(355): n comprises a, c, g, or t, or includes no nucleotide
gcagaaacacagacaaaaaatgggggaggagcttcatggaggcaagagggtaatggaatgcctaaagaaagctctgaaatagcacaatcagtgcatggacccctctttacaagtgcaactttttatagaaattctggacacgatatatctatttttatgagaaagggaaatgatgcggtcaccaatcaacagttttgagacccgcttatcccaaagattcgtgaagatttccccaattttgagttcccgtggagaaaccgagccagatccaccaaccaattttcaaaaaccaccaatttgggaagccaatttngccgttttgaaggcggggaatcacccagaatctgaggggtcncaatttatgaaggtctcgtcctttgaaaaggaaacaggctcaccctactcttttccatgtacatccagtaagggttttattatactaggtttcccttccatagattgtgcctttcagaaatgctgaggtaggtttcccgttcttacctgtgatgtgttttacccagcacctccggacactcaccttcaggaccttaataaagttattcacttcataagtgttcaatctgtcttatcaccccaggtggcatgattgatctgctatttaaaagtcatgtggtctgtaaaaaaaaaaaa

SEQ ID NO: 6817 - DNA, 571 bp, Canis familiaris
attcacccagtgggtaagaggattccaggccacgaggaaggtgaggctggtgggctctgcggtcctgtttcatcccctccaacaaccccaccgatccaatctgttatgtgaggtcaggcctcttggaaggcatctgatggaagaagctgcaggcttacaccggggcccagccagggacaaggaaggccaatttggagctgctgggggacagggtagactgtgcatggcggtctgtgcgtgtcatgccttcctcacctttctcttactggtctgttcaggaggatccagtcccatgtaccactctggcccttgccttctgcctccaaggctttagcaggctccggcaggaagctttagaacccccacccctgggggcgcctgggtggctaagtctggtaagccactgactcttggtttcggctcaggtcaagatctcagggtcctgggattgagccccatgccagctcctggctcagcggggaatctgcttcagggttctccctctctttctgcccctcacccagctcactcacacgcttgctctttctctctgtaaaataaataaatcttt

SEQ ID NO: 6818 - DNA, 541 bp, Canis familiaris
tttatgatagaggctgggggttcttgtatggagtaggatatgagatcctggccctctgtcttgccccacccccaatggctgcccaggcctgtaactctgattctcaatgttccctgggtccaggctccctaagccctgaatatcatgacaaaggaataagagggggaagaagcaatattgaccaccctgtaccccaccccaggggcttgccccatggaggtgacttgcctaaagggtctgtgctccccagccagcccagccagctactccttgcctgtggcccaccctcctggctgggaaaacaagatggtgccctgcatgaaggccagtagtctgttcctggttatgtaggggggcagagagggggaagggaccaggggaatgggccagtaagttggggagggcagggaggcatgttcaaagccaaggcctgttccttccttgtgctcaaaaggccaaagctgttcacatctgtgctcaaccatctgcttcaaattgaagtaaaagccccaacatataaaagaaaaccaaaaaaaaaaaa

SEQ ID NO: 6819 - DNA, 244 bp, Canis familiaris
caggggtgttctctgtctggtacccgctgtgggtgtctacgtgtgtgcgaacctccccttccccgtgccctgcatgacctgtgatgctgcagacaccaccatcctgtgtgcaggggtgtgtcgggggcactgaggggcatgttccgtgtcctgttgcaccctccaccctgtgacccatgtactcggttgtaggaagtaaagagaactgagcacaaaaaaaaaaaaaaaaaaaaaaaaaaaaaaa

SEQ ID NO: 6820 - DNA, 689 bp, Canis familiaris
agcatgagagtcagttctggctctgcctaactgttaacattgcaaatgtagcacaacaggtaatgagagcactatttctattgcggtagataccttttttgtgtgtgtgtgtgtgcacttaaagttggtaaaacgggtaacatgaaacacaatggaagttcttgatataaacggtatggaaaacacagaaggaaatgaaaatatttttatgcctacttaggaaaaattaaagggtagcactattcattccaagtacttttttttttttaatttttaagctcttaactcacattgttatgcttaaaatgataaacatatatcctctttttattgctttgtctatgtttcggatgaaacatttcagaaattattttgataagcgctgccggcccccgcagcactggtgtttttattgcgttctgtagccgtgtttgcactcagttttacagaattcccagttgctttgtatcgttttgttgtgtttgggttttgtttcttttttcccagtgccaggtctttgttccttaaagttggatggcaggtagagttcaagcagtttgtgactgtcgtagtgaatgaagttaaaatgtctttctgatgtgttgtcatttccattcttgcatttttgttttcatgtaaaaaaaaaacagaaaaaaaaaaaacaaaaaccaaaaaaaaacaaaaaaaaa

SEQ ID NO: 6821 - DNA, 534 bp, Canis familiaris
attaatttgtgcagttctgttttgagtgcttgtctccttcccacacaacagtcacagaagtcctacctattcagaatcattttcttggattgtctcttgaatctgataccatacaaagttggtttacataattacgctttgtctcttgagagttaatccattagaactgtttcgtggaaaataaataataccagaagataatatgtcttctattactcacatatgtgatttcttgtttacatgaattttcaaggtactttgcatttgttggagtatataccatcaatatagtcatatttttatgggtaatggatttttttaaaaggtatttttagaacacacaaatacgtaaagctttgaaaatgggaaaatctgtgtccacagcagacttgttagctactgccttatataaagatgtataaaagattaatagtttaaaacatgcgcaacaaagtgttttatatcatagatactgtacttatgaagagcaaataaaatgttaagattaaaaaaaaaaaaaataaaaaaaaaaaa

SEQ ID NO: 6822 - DNA, 653 bp, Canis familiaris
ccacttgtccattcccgtaggctattgagaaagtctcctacttggtgtcaatatgtcagtagtttccattcggatccttacatgtgttctccaacaagttaacttttctcatccttattcagaccccctcaaatacttgccattgcataaacttgccaacccaattgtgcccacctgaatgtaaagtaaacccaccaccattggtttcccatttctgttcttcccagttaagatgaaggttttctgttttcccagagtgaatttgaggaaacacaaggagaggaattgcccccagttctaagtttgctggcttaatccatctaattgctggtttccttgaagcagtttttatattttttttcaggagtcttaggcgtagttaaatgatttccagaaaacaggctcaaaaccttgagacctaaattcctttccactcaaaaagagatcctaaaccatatattttgtgtgtagagtttgttcaactaaaggaataaatgtttattaaactaaaatggacctattatttcttgtcatctagtactaataagcaaacccaaataccctaatgaaaaaattgtaatggcagaaacagctactttgagaggaaataaattacggtacttagtcttgaaaaaaaaaaaaaaaaaaaaaaa

SEQ ID NO: 6823 - DNA, 556 bp, Canis familiaris
gttctgccagctgttttctgaagtcttgctgggagggttgcctttgacactgccttgcttaaggaataatcccaggaagaggtttccaggttccatttaactgttcatccagagaaagactgaatctcacctcagctagtcccacgagtcacacgtgaatttccttaatatgtcccagttgcgaaactcctctgtaacagtgttgggtctgagctgtgtagtttcaagctgccagcaaagccagcttcctcacactctttgatgttcctttaattcagaagtttctcatgttaaatgattgttgaaattgtttcccttttttgtttacccaattagagtgccactgtttttgcagtgttttatattttcagctttaatttaactatataattacttaattttatttttttaaagcttatttggtctaatgataagtatttttcagtacataatgttttactgagctgctttgaatgccatttcaatgtagttttgtatcattgcacagaaacccaaaataaatttcaaatattaaaaaaaaaaaaaaaaaaaaaaa

SEQ ID NO: 6824 - DNA, 593 bp, Canis familiaris
taaagcattgagcaagcaatagtgccccaagctattggcagaagttaaatcccagataaaggaaaaatgggctcaggattgttcaaggacccagtcaagcacttctcctggtttttctcctcttaattcatggacccaaatggggggatatcagtgaagattttagaagcttttgggaagccctttggtctctgaattgtaattagcgataaaccaaataagaaaccccagatgtcagatgcttgccttgttacttggaggactaaatgtgggtgtcactagtatcctttgtatgttcttgatatctgcagagaattttgaatctatggaatttattttttcagtcttacttgacaaattcctgtcctataagtagcaggatactgtaggcagagaaacttaaggcacttttgccacttggtaatgaaagggagggtggaagaattagaaacagtacctgcacccctaaacccatgccaaaccaaaaccagaaactcctcctatctaatatgtccagtggtcatggtggaagactttgtactgccactaaaattgccaaattattttaataaaactggatttgaatacaaaaa

SEQ ID NO: 6825 - DNA, 728 bp, Canis familiaris
atgtgcacttctgttttgcagtgcttcacagacaacagattgacaattcagaccagggttctggactggcttggaactggaggaatattaggatatttgtttggcagcaatagagcagcaacacccttttcagactcatggtactacccatctcatcctccttcctactccagcacatggaatagccgtgcttactcaccacttcggggaacctcgggtagctattcggcatcatcaagctcagagacaagaaccagaacagcgtcaggatatggtggtaccagaagacgataagaaagtatacacttgaagtcacatagctggagagccaaatttcttgagatttttgtcaacaactttctttaaaaaccaaaaaccaaaaacctaaaaaaccaagtactacctgctaacaaccggggaaggggagtttgtttttggtccttattgctttctatgctctataacttgagacgtaagagctactagatgagaagatgcttctgtagagaatcgtatgttagtgtaatgtgcacttgtgtgtatagtttatgaaagcgatgactactttggaaagctttcaaaaaatgttaatttctaaaacctgatatcattaagaatgaaggctttatgactattacaccctgggtacagaaagtgtcagtcttacagggttttaatcgttactttataaaaacgataataatcaaaaaaaaaaaaaaaaaaaaagg

SEQ ID NO: 6826 - DNA, 569 bp, Canis familiaris
gaagaagccagaggacaaaaagcaactaggagacttttttggaatgtccaacagttatgccgaatgttacccagccacgatggatgacatggctgtggatagtgatgaggaggtggattacagcaaaatggaccagggtaataagaaaggccccttaggccgctgggactttgatacccaggaggaatacagcgaatatatgaacaacaaggaggctttgcccaaggctgcattccagtatggcatcaagatgtctgaagggcggaaaaccaggcgcttcaaggaaaccaatgataaggcagagcttgatcgccagtggaagaagattagtgcgatcattgagaagaggaagaagatggaggccgatggagttgaagtgaaaagaccaaaatactaatctccagttccaagtctaaaaatgattcccccaaaggaatgggctcacaagtgcttgctttctgcaattccgaaaaaagttgcaaggtctctttgaatgtatataaaatgttattgtataatcatttagttccattaaatctagttggggaaaaaaaaaaaaaaaaaaaaaa

SEQ ID NO: 6827 - DNA, 591 bp, Canis familiaris
ctgtgctgtttctaacagctgatagttcactgggtctggcctgtagtttgatcacagtatgctgcggcgcaacctacccgcctagaactaaagcttgatgacattgaggagtttgagagcattcgaaaggatctggagacccgtaagaagctaaaggcaagaagtggatgtcgtaggaatcagtgatggagaaggtgcccttgggctcagcagtgaccccaagagccgggaacaaatgattcatgatcgaattggttatcaaccccaacccaagcccaataatcgttcatctcaatttggaagtttcgaattttagaggcagattatcttgcatgccagaaccctgggatggagtaaaatgatggcagaagtacacaacaagatttagagaattgagtgcttcgcacgtgaagcagaatgcttttacctcctgcagagaaactactttcctgcactgacgattactgatgcttaacttttgctctgagtggacaatcccctcatttgtctctgaaaaatttgacatgtataaaacttgtctgatttttgtttttaaaaataaatatatttttggaaaaaaaaaaaaaaaaa

SEQ ID NO: 6828 - DNA, 682 bp, Canis familiaris
cgcgacgcggactcaagatggcggcgcccgtgttgctgcggggcgctcgggccccggatgttgtcctggagccgagagctgcggtgctcctggcgcgccctgcacctgtccgcggtctgcgccaagaaccggcggcccgagtccgagtaggcaaaggggacaagccggtgacctatgaggaggcgcacgcaccgcacttcatcgcccaccgcaagggctggctgtcgctgcacacaggtaacctggatggtgaggaacatgctgcagaacgaacagtggaggatgtcttccttcggaagttcatgctgggcaccttcccagggtgtctggccgaccagctgatcctaaagcgccgggctaatcagttgcaaatctgtgctctggtcctgaggcagctacctgcacacaagttctacttcctggtgggctacagtgagactctgctgtcccacttttacaaatgtcctgtccgtctgcacctccaaactgtgccctccaaggtcgtgtataagtacatctaagacaatcacctttttgcatcaggctctatcctgggaaggacagaaatgtctgggaaaggagtgaagtagaaatggggaaatgtatctcctcagtgtatagaggattcctttttaaagctgctgttgaataaatagaccttccatgtttaaaaaaaaaaaaa

SEQ ID NO: 6829 - DNA, 585 bp, Canis familiaris
tcgtgcctcctgcctgcccctcccctgccggactgttaggaaatggacactgtgccccacccagacccctggtggctcagttcggggcagagggtgcacctggccaccttccacggctttgctctggcctcctgctccaggcaggccaagtctccctctgccccgcctcccctcccaggacctgaggggcttaggtggcccctaagtataatcgccctctgctgcttgccttcgtctaccccagctatcccagtctctggtagttctggaatggaagggctctggctgcccggggaccgactgaagggtggtggggggatgggggacactgacccattgaaaccccaccccgttttccctgaaggaatattcctaaggctccagggctagtccccctgaggaacagggcccaggcctaaaccccctccctcaaagctgccacatctaacaccccctgctgcctctgtgtgtgggtgaacagaagtggagctgggggcacgaggacagcctggtgccctgcccacccctgtgcctgtatctaatatataaatatagagatgtgtatatgaaaaaaaaaaaaaaaaa

SEQ ID NO: 6830 - DNA, 624 bp, Canis familiaris
cctgcatgctgagtttgctgcttgaacgagactggggcccattccaccagcctcggaacctcctgctggccttgttgggggaagtgggggagctatcagagctctttcagtggaagcctgatgaggagcctggcccccaagcctggtcccccagggaacgggcagcccttcaagaggaacttagtgatgtcctcatctacctggtagcactagcagcccgctgccatgtggacctgccccaagcagtgctctccaagatggacctcaaccgccggcgctacccagcacatctgtcccgtggctctgccctcaagtatacagacttgccccatggggccacctgtgaagaccaagctgtggggcctgcaaaccttgaccgtgagtccacaggcgaggcctcaacctagaaatatgggcacaggacttgcaactcagcatggcatctgagaaacagaaagtggcctggctgtggaactttgttctagtccttttctaacagagcatgggtttaggggccttacttcctaaggtctgaggcccaagaacctccagaagacagcctcctggtatttttgctctcaataaaagttttggttagccaaaaaaaaaaaaaaaaaaaaaaaa

SEQ ID NO: 6831 - DNA, 643 bp, Canis familiaris
  misc_feature (147)..(147): n comprises a, c, g, or t, or includes no nucleotide
cgggattccggggatcccattccaagcaggtactcttgactgcagtgtaggaggaggaggccagccaccaaaggggtcatacttttcttcgtccataaatattctgaatagagtaaaactccaaaatagatagctaactcaaaccanaggaagaggaatttcccaggtctcaagaatgaagagagaaattagttaagaaagtgagaggaagttagtgtccaaaaaggcttgggacagtgtataccctaagggcagtggtcggggctctgaagcttctgcaaagccaagacatgtagccatgaacccatgagaagtgggaaaactggaaccgagcccagggactggcattagcatgaaaagaaatggaaatcatagaagaaaaagaaagacacaaaataaagtgtttaaatacaatgtttgggatgcctgggtggctcagtggttgagcgtctgccttcagctcagggtgtgatcctggagttctgggatcaagtcctacatcaggctccttgcatggaacctgcttctcctccatctgcctatggctctgcctctgtctctgtgtttctcatgaataaataaataaaatcttaaaaaaatgcaatgtttaaggaaactaacactcataaggacaggacagtac

SEQ ID NO: 6832 - DNA, 165 bp, Canis familiaris
tcctcatgaatttgtttgcctgggcccaggattggagggcttcacacctatacccttgtgtatacaagaatcagatttataatacttccctgttttttgttacgtatgaacgctataaacccaattattttgaaaaaaaaaaaaaaaaaaaaaaaaaaaaaaaaa

SEQ ID NO: 6833 - DNA, 491 bp, Canis familiaris
tagttaacttgcatacttttaattcctttggctaaaggtaacccatacttcgttatccacgagacactgagaagtatgattgcagtgctagttttcttgttttcgtttttttcccatttgtccctaatcactttgtagcaagctagaaaactgtggattctacacagctcagctctttgtgaaagtggttgaccactggagaaagaggggattgaaaagtcagttggcatccgtctatttcttgctccacagaaaacactgttcctataataagatcgcaaaagaagccgctgtgaggagcttgactcttaacagtaaggatcagagctttgtacaggaattcccataaattgagacttttcattctgttttatcagagtgcatatatgtcctatttcaggaaaagttaaaatggtcatttgcaaaagaaagtcagtctgtatctaagcattttaataaaaagttaaaaccaaaaataaaaaaaaaaaaaa

SEQ ID NO: 6834 - DNA, 627 bp, Canis familiaris
gtgagggctgggagctggaggtatctgggagaggccggccagggcggctgcaggaggacgggggatgtgcagagtttgggcctgaagggcccagcacatggactgatgggcttagccagcacagggcgctggacagagaaacgctatcggtgtagataaatggctggaggctggcacaagcggcacaggggtatgggaccttcccgggtgtggtactggccatccaagtatgactgctaatctttaaagtgcctcaattaacaggataatgagaaggatacgggatgaaggcacttatgagaagatgtgggggaagccggctggggggccttcaatcagggcaaatgactcatctgagaaggccccaagggcagcctatgaatgaccctcttgcaccctctcccagccaccgacagtaggaggttggaggactgtagggagactggagaactaagggctgatcctggctctgctgtcaactcagtgtgccattgggacattacctccccacccatgacgtgcagctgcccacctgcctgagaaccctaaggcgacaataaagcatttatgcttcaaaaaaaaaaaaaaaaaaaaaaaaaaaaaaaaaaaaaaaaaaaaaaaaaaaaa

SEQ ID NO: 6835 - DNA, 666 bp, Canis familiaris
gctcaatcctcccagctgctgcatgtctgagtccagagccgtcaccggaactctgccaggatcctactggattcccagggcttcagactgaagaggtgaagagtgggcttggaggattctcctggctacaaagtgccaacattgccggcaaatcctttcaggaatggggcagataacgttccacttgtatttattcatgtagcttctcctctgtccccctgcccactctcttacacccaagccccactcttttttcaactagaaatatgtaagtagttactgtagagagacaaccacatttctttgtagactacctggaaactttgttaatacctgtgccattcttagtaagaatttatgagatgccaatgacatggccccttgcactctttgtctcatctctcctcctttctcgttagccccttttgttttccttttgactcttgctcctgctaggagcaggaacagcagtaataaaagtctgcactttggtgattccttttcctcagaggaagcctgagtgctcacttaaacactaccccctcagactccctgtgtgaggcctgtagaggccctgaatgcacaaatggggaaaccaaggcacagagaggctctcctctcctctcctctccccctatgtcccctcaaaaaagaaaaaaaaaaaaa

SEQ ID NO: 6836 - DNA, 522 bp, Canis familiaris
gcgccagctatacaggggcgcacaggccaggatgtgaggatccgtgggctcgaaccgtcgctcccgtaccactgtcaaggacttgtactccacaggctccctccccgtccgggtctggacaccgacgactccaggacccgggagcctttactgtcaaattctatgggcgtgcagtggccccaggccggcagccccaggggcagaggtagacaggcacccccactgcagcactccggctggctggtgttagccttgggcgcgcccaccagcacgctgaccccgcgcgcccccggccggtagaagtccacggcgaagccgaagaaggagcgcggcggccccgagagcacggcgggggcctgggcgtccaggttgaagcccgcggcccggggcggcggcggcagcagcaggagcagcagcagcggcagcagcaggcagcggcggggccgggcgcccgcggggacctcgcgccccaggccgcagccctcggggagccccagcgccccgcatcgtcactgcgcgctc

SEQ ID NO: 6837 - DNA, 577 bp, Canis familiaris
ggaaagcaccacagggcgatgagctgagaatagaatatcgctaggaaccagaacatgctggcagccccacaggaactgataactacagagccagagagtctggaagaaccgagaagtgataatcactagaaccagaagatgtctggaagagctaaacactgatcagattcctttaaaaagggtggatttctgcagcaaactgtcacactttccagacactgactcttccacgtcagaccacattagaaaggtaactgcccgaggcctgagtgatctctgaacataacagagatcctccactgcctgaacataatgagcagtaggcgccgagagctgacccaggaccaagtcttcatctcaagttcacagactgactttgggtttgatttgttaatgtcttaaccttgttgtatcacattcgttgcatgactttgtattgtgctttgttttgtgtcatgtgtatgaggccaagttaaatgcatagtgaaatgtcattgactttggaatcctaaacctgctttataattacgttaatcttgctttatgattgaataaagctgacactgtggaaacataa

SEQ ID NO: 6838 - DNA, 595 bp, Canis familiaris
agagatccagaaactgagggcggagatcagcacccttcagagagcacaagtgcaggtggaggcccagctgtccagtgcgcgcagggacgagcaccggctgctccggcagaagcagaccctggagaagcagcacagcctgcttcagctacacagcgagcagctgcagaccctgtatgagcagaaaacccacgagcttgaggaggtggcccagaagctccaggagctggccgatgcctcggaaaacctcctcactgagaacacgtggctcaagatcttggtggcgaccatggaacggaagctggagggcaaggatggagccgaaaacctcactccccacaaagaggcaggctctggccacccaaacccttcgggtgtcccccggctacctggcggcagccccccgccttccaacagcagctccacgctggcgtctgaaaggagcaatgagaacaggacagactaacttttacaatgacatgaagaaatcagagatggaaactgtactttgggaatatatttatgcaaattttattgaaatttattgtaaataaagattttctcagtggtctagaaaaaaaaaaaaaaaaaaaaaaaa

SEQ ID NO: 6839 - DNA, 598 bp, Canis familiaris
tcaaatcttgaaaagtcagctcaggactggagcaacagggagctctaaagatgtgttcctccatggtaccctcttcttcacggccctagggcttaggcttgggtccatctggttctttctgatcttgaacaccagcagtacctttcaggctcatttcaagacccaggtaactccaagccatggtggactgtataataaggatttttaatgaagctttagaattctttgcgcagtgatggaaatgacccagaaatataccaaggccaaacctgatctctcccgattctttaagtatctaaatatttttttctcatgaccaaattctcaaaggcattttgttataagccattttcattttttaataaatgaaatttggtggtatttaaaatctagacataccatgttgctatttcacttttcattgctttagttgcttaatatttaagctttgcttcatgctacctttgtctgtgtttcaaatcttcacaagcctatttcattttgtagacttgaatgaaaaaagttgtttctcatctaaagtatgctaagacttaaatgttaaagaatgttgtgtaacatttatccactaaagtcttga

SEQ ID NO: 6840 - DNA, 660 bp, Canis familiaris
gatccgagaaggcacattccaaggacgatcataacccctattgtacccaaaaggagtacgatatcggatagttctttttatcgtatcagaagtattgttctttgcaggcttcttctgagcctttaccactcagcctagcccctactcctggacttgggggttgctgacctccgtaccggcattaatcctccttaaccccattaagaaggtgcctttaactccacaacctccgtcctttctaggccttccgggaagtattttataacctggagccccattcaataagttttaattaaggaaggttaattcgccaaaccattataccttccaacccttatttcattacaatcctccttaggcgtatattttacgctattacaggcctccgaatactatgagacatcttttacaatctccgatggggtatacggatctaccttttttatagccactggatttcacggattacacgtaattattggctctacattcctcatcgtgtgcttcctccgacagctatactaccacttcacatcaaaccaccacttcggatttgaagccgctgcatgatattgacactttgttgatgtagtctggctattcttgtatgtatctatttattgatgaggatcctaaaaaaaaaaaaaaaaaaaaaaaaaa

SEQ ID NO: 6841 - DNA, 551 bp, Canis familiaris
gaggggaaaatatatatatccgtatctatctacccgtatcagcgaccgagacccggtgggaaactcctctgttccacccccaccctctcacctccccacccacccaaactttataaaagttggaaaaaaaatatcatttgactttttatagaaaaagaaggaaaaaattaattgagaaagtgttcatctgaggactgcatcggtggacactggtatttatttatgttagctccaagcggacccgtggttcaaaagtgcattatttaggttgagctccgtaggttaaaaaaaaaagaaaaaagaaaaaaaaaaaaaaaggaggaggggtaaaaaaaaaaaatttaaatctcgagggtaaaagtgtggaaaacaaaccctcccgtcccttgtagattataaataaatacaaaaccgccacagaactagaggtcttctctttaatgttactttaaaattgctattattgtattgtacgttcttatttaatgtctgattgaaacacaaatttacatgcatgtttgttaccaaaaaaaaaaaaaaaaaaaaaaaaa

SEQ ID NO: 6842 - DNA, 403 bp, Canis familiaris
tatatttttggtttataggtttataaaattgggccacaaaccaccaagcctggccattcttaagttaattaattgccaccctaaaagggtaaatcctgttttttacccaaaaattctggagtttggaaactctgggaaaacctattgaaatatacacatgcttctctctctgtaatgtgccatatgctttgccactatagatgatattttatgtttaatctgtaaataagaagtgtatttaaattaagagggagctttttgtaaaaggacccaatgttcttttataaatgtactaagaaatatcttgttctttgaaatttattaggatttttatgagtaatttttattaaaagattcttttttttttgaaaaaaaaaaaaaaaaaaaaaaaaaaaaaaaaaaa

SEQ ID NO: 6843 - DNA, 615 bp, Canis familiaris
caaaacaaatttccacatcggcagtcaaaccctgtaaggccaacttctgttctgcacataagacatctgttcttctttggtttgggcaactcaggagctttttcttcactttgagaagtactaggctgagaaactgatggactgggctgagtgacaactggctctgacacctctgttttcggggtagttattttgtcctctcttgaaatgctcatttctgtcatttgctgagttacaggcaaggcagccacaggcacatttcttgacttttcagatgtgctgccagcagcaccttcacagttgtttaaactcgtgtctgctctctgtacagatgcagaatctgaggtaggactgttggaaccactagctgttcccattgggctcattctgccactattctgctgcctctgaagatgttctttgtagcaaacggaacacattccatttgtcctaggattcccataaaagccacatcctgtactacacagcatgggccctggggtctggttagtctcctgagccatatttttctgcctgcgggggcaggagcgcaggagccgggctcgcgcgacgccggcgcggtggggccgggcccaggcctccgggagggacgag

SEQ ID NO: 6844 - DNA, 671 bp, Canis familiaris
  misc_feature (472)..(472): n comprises a, c, g, or t, or includes no nucleotide
gcaaggacttacattgcagtgaaggagaagtatgccaagttacctgccccacagtgcaggccgctatgcagccaagcgcttccgtaaggcacaagtgcccccattgtggagcgcctgaccaactcaatgatgatgcatggccgtaacaaatggcaagaagctcatgactgtgccgcattgtcaagcatgcccttcgagatcatcccatcatgctgcatctggctgagaaccaccccgcaggtccttggttgaagtgaccactctatttaaccagctggtggcccccgcgcgagagaactccatacccccgccagcctgtgtggcgacgacgtggtggacaccctgagggcgtgcagcagctctgctgagtagtgtgctccccccctatagcccgctggtgtgatacacgagccacattgtggtctctcggtgtgacacacaggtgcccggagagccccccttcgggaaccanccaagacctatttgcctgagtgccctagcagatgagctcatcaatgcagccaagggctcttccattcctatgctatcaagaagaaggatgagctggaacgtgtggccaagtctaaccgttgatcacctggctgtggcttcaataaacctgtctgcccttggggcagcctccaaaaaaaaaaaaaaaaaaaaaaaaaaaa

SEQ ID NO: 6845 - DNA, 514 bp, Canis familiaris
gaatggataaagatgcattatatgacacacacacacacacacacacacacacagagtaaaatattattcagccataataaaagaatgaaatctggccatttgcaaccatacggatggagctggagagaatagtgctgaatgaaataagtctgtcagagaaagaccaggtaacatatgatttcactcatatgtggagtttaagaaaccataaccaatgaacaaagggaaaagagagacagactcttaactatagagaacaaactgaaggttaccagaggggaggtaggtggggggatggatgaaataggggttggggattaaggagtgcacttgtcataagtacacgggtgatgtatggcattgttggatcactatattgtaacacctgaaactagtataacactgtatgttaactacgctggaattaagctttaaaaaacttaataaaaataataaaaggactgtttcaaagcccaaaaaaaaaaaaaaaaaaaaaaaaaaaaaaaaaaaaaaa

SEQ ID NO: 6846 - DNA, 654 bp, Canis familiaris
gttccaaatgcttgagcctgacaaggaaagaaatgggaaaagccaagggcaggcagattcaagccaacagagcccatctaaggcgttggtgggaccccgatgtactgactctcatgaacctaaagtggcccctaaaactctgttactcaccccgcccctaaaactctgttactcacccctacattcagggtcacacagatccagacaaactagcccataataacagcacctttcaaaagggcccaaatttgggaacagcagtgctgccaagggtgacatgagcttgaagctccttgagagcacatgctgggggaggccggcctagaactgagcactgagcaggcacctaatccccgcagaaccttcccatggccctcgaccaaggtcaggtcctgaaggctgtgggctccagcctgactcacgaattggctggaccgacaggcacacctggtcacccatctgcttcagagcccacatgcttcccctggacctggatttctctcttgcccagcagggctgtgggcgggggccactgcgtggaccctggaaaggcaaccacctcagagtgaaagtcaacttaaccatgaaggctctcgatgttctaaaaaataaaaattaactactggctaaaaaaaaaaaaaaaaaaaaaaaaaa

SEQ ID NO: 6847 - DNA, 633 bp, Canis familiaris
  misc_feature (108)..(108): n comprises a, c, g, or t, or includes no nucleotide
acagtgtaaagattgaaggagggaatgggaatgtagcaacaacaacaaaatgctttggaacaactggaacctgactattttaaggacatgacaccaactataaggaanactcagaaaatcattattaagaagagagaaccattaaattttggcattccagatggtagcacaggtttctctagtagattagcagctacacaagatatgccttttattcatcaatctcctgaattaggtgacttagatacttggcaggaaaataccaatgcatgggaagaagaagaagatgcagcctggcaagcagaagaagttctgaggcagcagaagatagcagacagagaaaagagagcagcagaacaacagaggaagaaaatggagaaggaggcacagcggctaatgaaaaaggaacagaacaaattggcgtgaagctttcataacagatgttcttcacgtgtcatcgtgccagtaggagagatgtgagctccacaactcaagcagcatttatatggatataagagtattttcagaatacaaatacattgcttgatttttaatgcattcatcagaccatctaggacaccaggattctctcagagtaccttgagctcttagtgattgagactcaaaaaaaaa

SEQ ID NO: 6848 - DNA, 674 bp, Canis familiaris
tagcagctggtaccgtccggaattcccgggatgacagcaggtgccacgtcccagcagccgcctttgctgggcaagggtccgcagcccacccttggcattgcttgtagggactgagttaccggcctcccgggttgaagatttctcccctccctcacgtgattcgggccccgtttctctcttctccgatctgcgtcctcccggagtgggagcagtcaggcgacgggagcgatgcgcttcgcctggaccgcgcttctgctcgggccgctgcagctctgcgcgctcctgcgctgcgccccgccaggcagccgggccaacagcagccccctcagccagccgcccgcggctccaggccgcctggcgccagaggatccaatgggagaacaacgggcaggtgttcagcctgctgagcctgggctcgcagtaccagccgcagcgccgacgggacccgggcaccaccgccccgggcgctgccaacgccgcagccccgcagccgcgcacgccgatcctgctgctccgcaaccgcacggcggcagcgcgggagcgggccgcaggcacggcggggggcgccggccgacccagacccgccgcccgccactggttccaggctggctactcggcgtccggggcccgcgacgccaaccagaccgcgccgggagagcgcccggcgctcagta

SEQ ID NO: 6849 - DNA, 634 bp, Canis familiaris
ctcactcaatcgtcatcgttccccataattccagaaattatgttctaattgacttggaaatattcttgtgttctttgtcacttcagaaatgtttattggttccccgttgccttttacgttatgtgcaaccttcgttacctgatttcaaggaccttcacacagtttattgactctgagctacctttcaggtttccccctcataattccttttcatcatttccatgctacagccagacccgttcctgggatagaacacttgttttgcctctgaattcttttatgtatcaccactgcatgtgaacctagcctaattcatgcctacagtagacccttttaagtgctacctgaaaagcagcctttttctgcaaattctcccctgatttcttccaccagatatgtctcttcaaggaccgcatggtatagtgtaaagggcaccacacacgttacattctggaattctgccaagtgcatgaactgtctttgtcttttaacccctgtttacgcttgtgtgtcatgtccctgttctgtgcctcttaacacttgtatgtatattgcctattttacttaaataaactttgaagtctttataaaaaaaaaaaaaaaaaaaaaaaaaaaaaaaaataaaaaaaaaaaa

SEQ ID NO: 6850 - DNA, 507 bp, Canis familiaris
tacaggcagagtggcatgattcagactggatactttcattgccagcctaattacctgatattgaagaatattatgatggtaccacatcttctaactccaggcagaggagtggctggtcaagtggccgggcgggccgatcaggccggtcagttggtcgatctggtggccggtctggtagacagagtcgacagggaagtcggtcaggaagtcgacaagatggtagaagacgaagtgggaatagaaatcgatcaagaagcgggggccacaaacggagttttgactgagtatttgatagttaatctaccagtgtgagcttgcctatttctgcctaatcatgtacattatccaccaaaaattaggtcatcatagttgaggtatgtgtctgctctttgcaaagaagttggtcatatttttttaaaaagtatttcacaagaatggttgtaaacaaatctacttatccagttatacctttgaataaaaaaaaacgcctttaaaaaaaaaaaaaaa

SEQ ID NO: 6851 - DNA, 552 bp, Canis familiaris
gtacctccaacagccattcccgcctatccaggtgtggtttaccaggacggattttacggttctgacctctatggcggatacgcagcctacagatacgcacagcccgctactgcaaccgcggccacagccgccgccgctgccgctgccgcctacagcgacggttatggcagggtgtacacagccgacccctaccatgcccttgcccctgccgctagctatggagttggcgctgtggcgagtttataccgaggtggctacagccgatttgccccctactgaagtgacgtgagaccctgcaaatgggaccgccccccagttcatgaggcctggctattgcaatatttactagtagaggaactctatagcaagatgaagaggaaaaacaaacaaaaaaaaaaaacaaaaaaaacaaaaaaaaagagagaatacttttttatacctcactatgttctttgaatatgtatttttcctttacatttctgcctttaattcttttgttcccaagattgtgcattttttcttttttttttctttttttttaactgtggtaaa

SEQ ID NO: 6852 - DNA, 611 bp, Canis familiaris
cctccgacatcttctttccactggagtgatagggcagaggccccaaggagaagccatgaaggcagtgctgatcccaattcgagaggctctgaccccagaatcaaatgtctccatcgcacatatcctggctgcccgagaggacctgtctcgtcttatcccagccaccagcaaggctgtccgccgagggacctgctgtgccatcaacaaggtgcttatgggcaacgtgcctgaccgggggggccgtccaaatgagctggaggctcccatgcccacctggcagagcagaagagaggatggtggtgggcggaaggcaggccgccagagctggggtcgcaagaagaagaagaagtaaagagggactggtggttgggtggggggaggggtcccctgtgacatgctgatgccattggtaatccttggggaatcgctttgagtttcttttggcatctggctcccaggccccatgtcccctgttccctgttcctaaggtcccaaatgcctaccatcaccacccccccccccccagtctatcactcaacaacaaagaccatgttctctggaaaataaatttaatttatgacaaaaaaaaaaaaaaaaaaaaaaaaaaaaaa

SEQ ID NO: 6853 - DNA, 652 bp, Canis familiaris
gaaactcttcctcgaaaaggtgctactgcattgcctgcctcctgagcagcctttgagattgtgacctctggacaacatcacctttgtgaggctctttctataaatacctattgtttaaaaatcaacacgagaaaataaaggaaaacgaggaaaaggaaaaaatcccccacattgttttctagatttgtggctttaaagaggaaacaaaacaaaacagaattattttttctcagaaccaggatacgctgagggagataaaagcatctcgtttttcggggttccgttttgttttgtttcgtcatgttttaagaccttgcctgtctcggcgagtgagcggcagggaggtgcctgggaggccggcagggtggccctcctctcccccggcctcggcgaaggtctgggcggctggcaccgcctccttggccagcgtcctcgctctctgcacccacggggggccaccgctggccgccagcgcccccgagcccccctcgggtctgcgcacgccttcacaaaataaccgccctctctcctggtttgctccatctttcgcttcttcctctcttgagaaccacccccgcttggcggaggcccccagtgtttgcagaaggcctcggtggccgcagggcgtccccacgcccggcctcccgtggcc

SEQ ID NO: 6854 - DNA, 664 bp, Canis familiaris
  misc_feature (1)..(1): n comprises a, c, g, or t, or includes no nucleotide
nattttgtggagttgagagagcatataaatggaagcctgagaccttccagaactctcatgtttgctgtgttgagtctgttgaagttgggggctgaaaggtgtcaggagccgaggggggatggggcctgtgcccagtaggtgctcagtgcatcctgggtgtgcccctcagctgggtcatctctctgctccgtgtccttgctgtggaagcttgtctcataaggatttgtgatcaaggggacttggacatcacctgtcaccaggaccttctttagccacagcatcctaagactgggttagtctaaactcatgtctgcgttgcagcatagcccccattttcttttttaattactcctctagaggctcatgcctgctgttactcttgtgtccaagttcctgtcccattgtcccctggtgaccccatcggttacagtagcaggtgtcctttgggctcgcgtccccacaggcctaggttgtcccctgcacataggagtccctgaggtttggagagatgaacttccagatccatccactctccccctcccagatggagtcccacatcgggctcctttcatggagcctgcttctccctttgcctgtgtctctgcctctctctctctctctcttatctctcatgaataaatatataacatcttaaaaaaaaaaa

SEQ ID NO: 6855 - DNA, 641 bp, Canis familiaris
ggagctgaagagagagagctggaagagaggttgtccagatttgatgaacaagtctgttccagagcaggatgcctttgaaattgattcaccaaggataggagcaagagattacaagaggatgcataccaggattctatatttgaagaaaaatatgcatgtgggagcatgaaggaaactcttctggagaggttcctggaccatgcctttttcaagaaggaggttttggggaaataacttttatccacaaggaagcatctcctgaaacaattagccaagaatataattttgagagaagcttgcttttgacctctagctttgttacacatctcagggtttctacagaagagagcctacatcagtgggagacaagtagcataactaatgagatttcagaccaaagtaaatgtccaactctctctacacagaaaaagtcttgggaatgtaacgaatgtggaaaaacttttactcagagctcatctcttatccaacaccagaggactcatactggagagagaccctatgcatgtgaggaatgtgggaaagcctttagtcgtagttccttccttgttcagcatcaaagaattcacactggagtaaaaccatatggatgtgagcaaaaaaaaaaaaaaaaaaaaaaaaaa

SEQ ID NO: 6856 - DNA, 641 bp, Canis familiaris
atctgtgttgtatggattcagtgctttactttataggtagattgaaataggattattaggtgagaattttaaacagcctgtggatcaagctactcccggtccttttacagtgccgtcaactcacttgggtgagttgcattgatctaacccaacttacttatattgagtaattaaattatctttgattatgctaattttcttattctaattgttacccctaattctctgttactgttcttttttttttttttttagtagaatcttttacttagaaatgttcatgaggccattctttgttttaattttgcagacagaatggtttgcaatattacatgattattggagagctgttttaagatttttgacttgggctgaatgtatttacaacaatgttgaatacgtcttctaatatgcacaagattcagcggagagttacaggctgcataaaatggagttttcagatgtccatattcttacttggtattttctctacctaccctgcagatactatagttaatgcaaaggcttgagtaatgatttggtaatattaattttgtagtcattgctacccctcaataaatttattttcattaaaaacttaaaaaaaaaaaaaaaaaaaaaaaaaaaaaaaaaaaaaaaaa

SEQ ID NO: 6857 - DNA, 686 bp, Canis familiaris
actaagtcatttgcgaatgacagcttgcagtagcggtagtgtgtctgctatgtaagggaaatatgtttgtagatttccttgattagtttaacagtgcactgataaaagaacaggttagagcaacataatctacttgaaaataattgtatatattacctaacttctagtgtaggactggttcaacaagtaacaagcaagtttttcaattgtaatgtgttggctttctctaattcatcttaacttatagctttgtatgttactcttattttaactataacctctattgtacttgatttcttctgtattttcctttttggatgtgttgtaaaacagaagtttaagaccacaagttggaagaaaggtcacattctcttaaacaaaagtacatggggctctgaaagatttgtatctctgtgattgaacttgaatggccttaaacctgtttcagctttaacaatagaattttacttgggcaatatttgcccattctggtgtaacttaatgtgactctagtgcttaacagctgccattgaagctagtattcttatatcagttctataatgttagaatatcttttgattgaagatgtgaatgaagtgtgcatgtgcatcaactctttgaattcacttttgtgccatttttgtaaatacaatagttttgcacaacctctcaaaaaaaaaaaaaaa

SEQ ID NO: 6858 - DNA, 649 bp, Canis familiaris
  misc_feature (93)..(93): n comprises a, c, g, or t, or includes no nucleotide
gaatgactgagtgaatggataccctaatcttatgggggaaaaaattttgagacatccgctgccttatccctcatattgagaaaataccaaacntgagggacttcaaaagtgaatcttaaagtgaagaagactttttatttttttacttttaaaatcttttataaagatttaatttttaaataatctctacaccccaacatagggttcagatttacaacccccaggacaagagccgtacactctacgactaagctagcgaggaaccctgaagacgactttttaaacgaagacttaaaactcaaagccaaagactacagtgtttcttagcataaaaacctcaaaatggggatgcctgcatggttcagcagttgaccatctgccttcaattcacaatgtgatcctggggtcctgggttcgagtcctgcatcgggctccccacagggagcctgcttctccctctgcctgtgtctctgccccctctctgtgtttctcatgaataaaatctttttaaaaaaaaaaaaaaaaaccctatctatgaaagagaaaattaatttttactttatatttttgtattaaaattttaaaatatgttactttttccaataaaaatgacatatgggaaaaaaaaaaaaaaaaaaaaaaaaaaaaa

SEQ ID NO: 6859 - DNA, 641 bp, Canis familiaris
tgtcctcaccagaaagtttgattggacattgaccaaaataaatttttccagtatttagagctgctgtagctgttccttaacaccaaataggatgaatcagtagtgtgttagctgtctttcaggttggtggcagtcagttagaacatgtgtaaaattctctacctggtctgtagctgtaactgtgatgtacaggcaaagccaaaatttaaaacttatgaaaacaaataatgcaatgatattaggatatacacttttgtatttttattcttatataaggttatttgccggctgttgttggcctctagttcagtctgtgttatttaaaatctaatatatgaattatttggattgaattcatgtttggggccacgttgttgtatgtattgatgtacagccttgaatgtgaataattattgtaaactatattttacaactttttttctggctttattatataaattttctattcggtcaatgatttaatcctataatttaatgaatctgttttcttctctttttttcaaatatttgtgctttagatgtagttcctggatgatgaattttccacgtatgctcggtagtcttgtaataaagagcatgtagagtgtaaaaaaaaaaaaaaaaaaaaaaaaaaaaaaaaa

SEQ ID NO: 6860 - DNA, 640 bp, Canis familiaris
gcattgctttttgcagcatcaggactttgggaaagtgcatttgtaatcagagcccccccccctaagtaaatttagaagaaacttcaaaggtacaagtgttctctggatttactatctttttaggataggactagatttatgtgtacttctaggttactggtttgtttattctacggttgtttttcccctatcttgacaccgtctttgttttgtaagcacttttgtgttttgtaagtcaattttttctggagttataaaagagacacggtgaacacttttagagaaattgctgcactgtacacgagggacacccctggtaatacatccattcctattcttttttttcctatgtgaatttgtatgaatagcaggctgctgagtgaggcctacttaaaaatgtagttcttttaccagaaatatttaaagtagattgtgtcagaggtgatacccaatcatctttgaacagatttatgctttagtaaggtcatcgaaatgcctcttgggttatgattataataccaatattcttgtaattttttaatgtggataaagtaatccagaataccaaataaatgattaagaatccaaaaaaaaaaaaaaaaaaaaaaaaaaaaaaaaaaaaaaaaaaaaaaaaaaaaaa

SEQ ID NO: 6861 - DNA, 590 bp, Canis familiaris
tccaattgtcctggcccaaggcccggctgggcaagccgcgtcgctcccgtcgggcccgtggggagtcagcccgccaccccattcgacggtcgggtagaccggcgccctccgttgcaggtgccccgggggcgacccctcggtagtgcctcagcgctgcccgcagctctcccgtggggcgtcacggggcccccgtcctacagacgtgaacactgaggcactgggcggcgggtggactgacgcgtggctgggctgcctccgtgcctccctcggggaatttgcaggaagagcacagcggtccgagggcgggggtctcgcagccaccccgcctccccgccccctgctccctggcgccagcgctggctggtcctgtgtccctcccaggcctcccggtcctgggtgcgagtgcagggcccggcctggggctctgcatgtcctgccccagccccagccacacaggggctgctcctcccggggtctgcagggcctggcgcagcttcctactgacccgagtccccgtctcccccctcgactccaggggtgggcttgggggaggcaggccccgggggttgctggctgcgccgcaggggttc

SEQ ID NO: 6862 - DNA, 661 bp, Canis familiaris
  misc_feature (41)..(41): n comprises a, c, g, or t, or includes no nucleotide
catatgcagatggcctggactatattaccagcctggcgganagagaagcacggccccgctacaatgtcatcatgtttgatgtagacagtaaggatccaacactgggcatgagttgtccaccaccagcttttgtggaccagcctttcctgcagaaggtcaaaagcatcttgactccggaaggtgtttttatcctcaacctcgtgtgccgggacttggggctgaaggactcagtgctgaccgggctcaaagcagtcttccctctcctgtatgtccggcgaattgagggtgaagtaaacgagatcctgttctgtcagctgcacccagagcagacacttgccacatcagagctcttggagatggcccaggccttggagcagaccctgaggaagcctgcgaggggttgggatgacacttatatactgtcagatatgctcaagaccgtgaagattgtgtgactgcttggctgggaagtctgttccgcttcctgcccacactgaccttgggctcctagccttccagagattgaagaattataatgcacagtattttttaagcctcatatttttcttggtttcatactcagttgcatgcgacctccagcttagtgaggttgcctgaagatcacggggaaataaaaaatgtccttcccaaaaaaaaaaaa

SEQ ID NO: 6863 - DNA, 477 bp, Canis familiaris
  misc_feature (1)..(1): n comprises a, c, g, or t, or includes no nucleotide
ntcgagagtcacagggcacaagtactctggcagtttcccagatagtccacaagatccctgtctcgatgtgaccgagttgggcacagaagccgctgtccgccacgggaagtaaagttgtttttttatctggaaagatcggcccactggtcactgttcgtttcaacagaccctttctgttctgcatacaccacataagatacggagtacatcctcttctggggcaaggtcaccaaccccaatcaagcctaggcctccccccgcagaggtggggcccctttcagaggtctgtgcgtgcagcctggcctctctgcaccgaggagccacgtgccaggctctgccctgctcatcctttagaaggtgccagtgactacctgcgtggcttccagggagcctgtaggctttttgatctgaggccctgaggtctccagacagcaataaactatctttcttggactggaaaaaaaaaaataataatga

SEQ ID NO: 6864 - DNA, 687 bp, Canis familiaris
  misc_feature (1)..(1): n comprises a, c, g, or t, or includes no nucleotide
ngaatgggataagatatctgcagtaatctgattaggggtaatatataaataagaacttgcatatattcaacaccgcaacccctcgacgatcccattaaaatatgggcagaggacctgaataaatgttttcccaaaggacatacagttagccaagacacatgaaaagatgtacaacatcactaatcataggaaataccaatcaaaactacaatgagatgttaccttacatctggtcagaatgtctagaatttaaaagaaaaaaaaaatcatgaaataacaaatgtgagtgtggatatggagaaaaaggaacccttgtacactgtgggaatataaattggtacagccaaagtagaaaacagttatggagcttaatcagttaattcaaaataggaataccattatgattcagtaaatttactatggggtatttacttgtggaaaacaaaaacactactttgaaaagatacatgagggatccctgggtggcgcagcggtttggcgcctgcctttggcccagggcacgatcctggagacccgggatcgaatcccacgtcgggctcccggtgcatggagcctgcttctccctctgcctgtgtctctgcctctctctctctctctctctctgactatcataaataaataaaaattaaaaaaaaaaaaaaaaagaaaagatacatgaaaaaaaaa

SEQ ID NO: 6865 - DNA, 592 bp, Canis familiaris
tgtctggaaggcgagagagagcacggattgcttctgcctcttccacaaacttttcgttgccctgaaccctgaggggaaaccacaacctggagttcacctcccttctggttgacaactcacctccaaaagaaacgcttctgattaagaccggttgaaaactagggatggaccacggttatcaacgaaacttttcagcatcactgatgacccttgagtgaagcttgcccagattcggtgcacgcacattactaccagcacagaataaaaaaaaaaagaaattcgtatcttaaagaaacacgctttcaagtgcctttctgcacgtttttcaggaggcgcaagatagatttggaattaggagtaacctctagttcttaagaaccaacactcttaaaagatttaggagaaagtttacaacataatctagtttacgaagaaaacttgtgctagaatactttttaaaaagtatttttgaataccattaaaactgcttttttccaacaagtatctgaccaacttgtttctgcttcaataaatctttgggaaactaaaaaaaaaaaaaaaaaaaaaaaaaaaaaaaaaaaaaaaaaaaaaa

SEQ ID NO: 6866 - DNA, 617 bp, Canis familiaris
acagatggactacgggctcccatttacctcctcccgcaattcctcagcatctctcctattgtactctacctcctggccagcttctacaccaagtatgatgctgctcacttcatcatcaacacagcctcattgcttagcgtactgctgcctaagttaccccccattccatggggttcgtctctttggcatcaacaaatactgagggatagggctggggataacactggaccacaagggctagaacatcctttccttctccgtattgtcttctgtatcttgaaagcctgagaactatataacctttccccaactccaggaagagaacagattggaaaatggggctcccggggcccagccctaagagcaaatttttttgaatcaggaaaggtgggaaagataagggctcaatcactctccttcacagcaggaagccatgtttaaacagctcgtttggtaactgagcagcttgttttgtgatttttttctagatcttctacccacaccactttccagctctgttttgctgtgtattttccttataataaagatactttttttttttctttcccaaaaaaaaaaaaaaaaaaaaaaaaaaaaaaaaaaaaaaaaaaaaaaaa

SEQ ID NO: 6867 - DNA, 677 bp, Canis familiaris
caagagcaccggctctgccctgacggtgtggggcactggaaagccacggaggcagttcatctactcactggacctgcccggctcttcatctgggtcctacgggagtacaatgaagtggagcccatcatcctgtcaggcgaggaggatgaggtctctatccaggaggcggccgaagccgtggtggaggccatggacttccatggggaggtcacttttgataccaccaagtcagatggacagtttaagaaaacggccagtaacggcaagcttcggacctacctgcctgacttccggttcacacccttcaagcaggctgtgaaggagacctgtgcctggttcacccacaactacgaacaggcccggaagtgaggcaggcttcccgaagccccagaagcagcaccctcagactctgcgggagtggagggcactgcctggcaacttgggcccatgttctactccttggccagggcggctctgggcatctgtgcactgggcccaccgttcatgtctgtcctcagggaaaccaaggcctggccaggcccagcaccttgctccccaaaccagtcccggggtcctgagcgtggcccctcctgatcctgttctcccattccttgggatctaataaagtccactttcccaggaaaaaaaaaaaaaaaaaaaaaaaaaaaaaaaaaaaa

SEQ ID NO: 6868 - DNA, 314 bp, Canis familiaris
  misc_feature (1)..(1): n comprises a, c, g, or t, or includes no nucleotide
ncgagtgcgcgaggagcccggggctcggcccgccggggctcggcccgccccactccccggggacaccctccggcccggcccgacgcccccggaaccggccttcgcgctgtttctttcacttagtacgtggcaagtgcctgtgttccacggggtacaaattctttttttttttttttaaatccgcccaaatcatttttgctgcaccgaggggggcacttggtgggatgagcccctgggcgttgttctatatgttggcaaattgaacaccaataaaaaataaatttatttttaaaaactcaaaaaaaaaaaaaaaa

SEQ ID NO: 6869 - DNA, 619 bp, Canis familiaris
aacctagcttctccccagttatttccaacccagatactgacaggtctacagaattcttggggaaatcctccaaagactctgtcagctgtgttgggggccaaagccagcttagtggggcttcctgctcctcctctagttttataccctttcgatatcagcagaaacttcattaaccagccctttctcagagccaatgatgggactttaccatgtgaggcagggcagctgtcctgatccacagaccccaggaacacatccctgtccttttgttgagggtgattttgatgaggcagagatctctgctaagaatatagtattgtttttccttctttcctcctattctttcttttttggagcttctttagatcaaagacgtaagaagttgtttcagatatatctgatactgtgaatgtttaaacatatctgtggccttcgccttcctgccctccctccccttttacctcatcagaagcagtggctctgctaagtgctccccctacctcccatctcaggagaccaaaattcacagaaaaataggcacttttggccagaagctctaatggcacatttttagtggtgatttgggcaaggaaaattgatgaggtttaaaaaaaaaaaa

SEQ ID NO: 6870 - DNA, 624 bp, Canis familiaris
  misc_feature (16)..(16): n comprises a, c, g, or t, or includes no nucleotide
gggccatgacagaagngacttacaggcgccgtgggggtgtgatccgccagctgcccccaaaccgtgggtgaagccccctcattctggccacggaggccacgtccagtctacttggggggatgcgaaatcagattcttcctgatgcacacaaggaccacactctcaagtggcgttcggatgaaggccaggactgagcaccaggcgcccaggacccaaggcactgctgcccgcctcgcccagccagccccagtggcatcatggctcgtgcgcctccccagagctttggcctacagccgggtgggccctcaggggaaggacctggaaggcccccgcctggcctaccctgccaatcgctgtgagaatgaggcctccccgcctagggcctcggccccatctctgcacttttcttctggggagaaaggacactgcctccactgctacctgggcccacactgccgccttgtcccaggcggaggcttttggaccctcagaccccaaccccactcagccaagtgtctctgtgtctgggggaggtggggggcagacactgtggttcaatgtatttctaagctccttgagcgtgtgggtcagtgtctgcatggagtgtagaataaactgtgccca

SEQ ID NO: 6871 - DNA, 702 bp, Canis familiaris
  misc_feature (94)..(94): n comprises a, c, g, or t, or includes no nucleotide
atggattgttgcaggccggaccacggttaactcatgacagtcgggctgtgaagttcttgttgaagattctcagtagttctgataaatgagcagncagaggttgtttctccagtttgtgacaggtagcccaagattgcctgttggaggcttccggagtctgaatccacctctgacaattgtccggaagaccttcgagtccacggagaaccccgacgacttcttgccctctgtaatgacttgtgtgaactaccttaagttgccggactactcgagcattgacatcatgcgtgagaaactgttgattgcagcgagagaagggcagcagtcattccatctttcctgatcacaacgagaactacagtgtctgcctgttacagcaaaagaaaaaaatcatgatttcttttctaaatgtatcacctgagtcaaggaaacatgttacgccttcttgttgtaggaaaaacggcttgcagattatacaagagacacttggttgatattcattaatggccccatggacttaaaagtgatcaggccctaaaacgttgttgtgatgaggtttctttagcaagttcttgtttaaattatcatttatttgatgagtgaagtttttaacttgctttgctgtgtgaaatttaaaaaaaaaagggatgtttttccaggctgaaacaataaatgtcgctgtgcagtttaaaaaaaaaaaaa

SEQ ID NO: 6872 - DNA, 631 bp, Canis familiaris
aatgtcgtaacactccgccccattgacgcaaatgggcggtagcgtgtacggtgggaggtctatataagcagagctcgtttagtgaaccgtcagatcgcctggagacgccatccacgctgttttgacctccatagaagacaccgggaccgatccagcctccggactctagcctaggccgcgggacggataacaatttcacacaggaaacagctatgaccattaggcctatttaggtgacactatagaacaagtttgtacaaaaaagcaggctggtaccggtccggaattcccgggatgctgtgcagtttcagtgggtacaagatttaccccggacatggcaggcgctacgccaggaccgacgggaaggtcttccagtttcttaacgcaaaatgcgagtcggccttcctttccaagaggaaccctcggcagatcaactggactgtcctctacagaagaaagcacaaaaagggacagtcggaagaaattcagaagaaaagaactcgccgtgcagtcaaattccagagggccatcactggggcatctcttgctgatataatggctaagaggaatcagaaacctgaagttaggaaggctcaacgagaacaggccatcagggctgccaaggaagcca

SEQ ID NO: 6873 - DNA, 735 bp, Canis familiaris
cttgaagtgagatccctgggattcttatttactatgacgcagcggtgccccctcttctgcggcctttcccagtttgctcctgttcgttcacctgtcatctggccctcgggcccgcaggacggtcccccgccccgacgaggatgtggcgcagggacccttccactccccgatcttctcaggaagcgaagctgtgacccgtctcgtaagcggcctgacgtgctgcccacgatcggcagacatacccagagccacctttctgcaatcttgcctgcctgccagctgcgagccgcgtgccctgcaccccacaggctccttctgacagtcgctccttttagttgttgagtcccttttggttttggggttttgtgtgtgtgtgtttttgtacagaagcgtacttctgtgcgaaaccttgtgaagttcctctgcgtttttttttttgtttggttttttttttttttttagaccacaggatcagcttttagagctgggaaaaaataagagagaaagaaagttggatcttagaagtgttaatcactaaagagaatttatttaaggacaaatatgtagtgcggccccgcctgagcactgcacggccgcggctgctcccggcagtgttaccgctgacgtccgagagcccccggaacattcttagttgggaattgctgtgaatgctttggaaatattttccgatatgcaaatgcattaaatcatagaacaacactcaaaaaaaaaaaa

SEQ ID NO: 6874 - DNA, 655 bp, Canis familiaris
  misc_feature (34)..(34): n comprises a, c, g, or t, or includes no nucleotide
agtcccccgttcctgttacctcacagcctagggnctggcgcaaggtgtcccaggtcttctggttcattcctggcctccacacagcctgtatcaaacatgcgcatgggcaagctttccagcagttagggcaaccagctgtcctttaatcagtaggccaaggcaggtgctgggctggactggctgtctttctgggggtgtggtgaagagggggcacacagatattctgaaactcctgctccctttcctggagtgatgaaagaacatccccgaatatgtgcctatgccagagcctgtaggtcaggcttatgctgtagaaagccctccccatcactgggcaggcaattcagaggctgcattctttgtgaagaatctcgaggtgtagatctcacattgttttgaagagaagatgctacggaaaccaagcctcgtggagattaattggttaaaccccggcctggaatttaattaaggaatggaaccctttcctcaagcacctgccatgtgccaggcactgagctagacacctttatatataggttggtgctttgcgacatttaagaccagaggaaagtaggggagaattaaggataacccctggggactggggaacgtggctcaaaataaaccaacccaagtgtgaaaaaaaaaaaaaaaa

SEQ ID NO: 6875 - DNA, 632 bp, Canis familiaris
tacatctacgtattagtcatcgctattaccatggtgatcggttttgcagtacatcaatgggcgtggatagcggtttgactcacggggatttccaagtctccaccccattgacgtcaatgggagtttgttttggcaccaaaatcaacgggactttccaaaatgtcgtaacaactccgccccattgacgcaaatgggcggtaggcgtgtacggtgggaggtctatataagcagagctcgtttagtgaaccgtcagatcgcctggagacgccatccacgctgttttgacctccatagaagacaccgggaccgatccagcctccggactctagcctaggccgcgggacggataacaatttcacacaggaaacagctatgaccattaggcctatttaggtgacactatagaacaagtttgtacaaaaaagcaggctggtaccggtccggaattcccgggatggcaaacagacaaataaagaaatgatttcagtattgctgtacgatataaattaaggacaaaggatgtggagaataccaacaagggaaggtgtgactaccaggggagtcggagaggattttactcccagaatatgagaggtaggccttcgagggcaagcaagacctcagcaggcaga

SEQ ID NO: 6876 - DNA, 665 bp, Canis familiaris
  misc_feature (67)..(67): n comprises a, c, g, or t, or includes no nucleotide
tccagccagcccaacccatatgatgacctttttcaggtatgtcctagaagcctctgtgtgtctaccnctggagcatcgcactgatctttttcagagggatcctaaaaatgtcctgataacggacttttttggaagtgtacggaaagtggaaattacaacagacactattagtttgcagccggatttagaaatcacggaaagcagctataagaaagaccggatggatgaggaactaatggaacctctgaaatatgctgaacaacttcctgtagctcagataatacaccagaaacccaaactgaaagactggcatcctcctgggggttttattctgggattgtgggcactcattataatggttttcttccaaacgtacggaatcaagcatatgaagttcattttctagacatgatgtgtgaagaagactacatggaagactaccaccttggataaaatttaatgtcattatactttttaaaaaaatacattgttcttgttgaattgggcacaaagtataggaaaccaaatttgagtgaactattgattttataacttaaagaaaaataattgttaatgcaaatgctaagtggcactgattatacttgttttttgttgtgtgtgttattaaaaagatgggaccaaaaaaaaaaaaaaaaaaaaaaaaa

SEQ ID NO: 6877 - DNA, 646 bp, Canis familiaris
agtattagcaactcagaattcagaaatccacgctagaggcagtattctgtacagtagacacaagaattatgtacgccttttatcaaagacttaagagccaaaagcttttcatctctccagggggaaaactgcctagttcccttctgtgtctaaattttccaaaaggttgatttgcataatacagtggtgtgtgcaatggataaatggctgtcgtttcagaaattaaaattcttttttttctttctctcccccttccccccagctccacacttcaaaactcccctattaggtcagcatcctactgataagagggaaaggaaaatccaaatctgtcctagtgattttacctttgttctagaaggcgctcctttcagggttgtggtatccttaggttagcaaacctttttctccttttccccactgcctcccagtactgtccactcttgattaacctgtttctttggtatggaaccctgacagtcctgccccttccctaggatctgcccctgcattgtagcttgcttaacggagcacttcccctttttccaaaggtctacattctagggtgtgggccaagttcttctgtaaagagatgaacgtgatgccaataaaatgtaacaagaacaaaaaaaaaaaaaaaaaaaaa

SEQ ID NO: 6878 - DNA, 463 bp, Canis familiaris
cggtaggtctgacagtggaaaccgacagaaattagacaatgtcatttttaaaccattgtcttttgaaacatgtaattaaagaattgaatatttttaaaaaaatttaaaagattttatttatttattagagagagtacacacatgaggagagaggcaggcagagggggagggagagaaagggaaagaatcccaagccaactctacactgagggcagagccctacatggggcttgatcccacgacccacccccatcccccccaccaagatcatgacctgagctgaaaccgagggtcagacgctcaaatgaatgagccacccaggtgccccaaagaattagatgttttgtcatgggaaagggacttcatggtcttctgatttagtcattcttttttatagctaagaaaaatcccttgtaatttaaaactctaatagtattcaaaataatgttaaaactgatcacct

SEQ ID NO: 6879 - DNA, 632 bp, Canis familiaris
acgccccccctggccaaagcagctgctcctcctgtgctcaggcccagccccatgctttgtggccatgcttgtgacaggcacctagcgggacagtggcgtctgcttcagggacatgagcaccgagcgcaggcgggacacgtctttgcactgcttgctgctcttggggttgaagtcacacagctgagccactttctcccactctgtgccgggggtctcctccttggattccttcacgaaagcctcctcagatgcccggttattgatcttgttcttctcaacttgttcactctgacgctggttccactcctccaggtccttcttggctttttcccgccactcctgttctgtcaccttggaggcagcatccagctcctgcagccgtttcctctgctcctctctccacttgcggatgctctcaggttcctgagtcagtctgtcagcctgggcaatggctgcatagccatccgctggaccgttagcctcctgaaacacatctccattgatcgtggtccccatatcctcagaaccagccccgcccgcgggtcccggctgcgcgagggccgcatggctgccggcgggtgccccgaagccctcgtcgttctctatgcccgcgatctcgctctcctgctggg

SEQ ID NO: 6880 - DNA, 644 bp, Canis familiaris
ctccccttctctcgtgaccctcctctagggaggaggcaagtacaagtcatgtttttgttggtacttttgctttatgtgactttcttgtgtttcccttgtctccctccccctccctgctatgctctctccctgtttctttaagcggggggagggtggccagcatctgtccctgttcgttatacgtcatggagtaggtggggctgctgcttctggagcataacccacgtgtgtttcttctctttctaacccccatccctgcatgccttatccccaatttgtactccttacccccagccttttttgggcagcatctgaagagccatagggcttccacctttattcccacccagagaattctgggagccagtctcccattctaggagtcactggacactttcatcctagaatcccatcacactacagttgtttcctctcctctcttctccccttgggtcctgggaatgctgctgcttcaatgaccccagagcctaagaacagcagctgtctcttgagatgttgagagatggttctttcttagcccctggctatcttggaaagcctgatggcatcctggaaggatttatacttccttttgtgagtttggggaagggaaggggatatagattgtataaaaaaaaaaaaaa

SEQ ID NO: 6881 - DNA, 679 bp, Canis familiaris
gctggcccggcgttcctgctggtgtttgctattcatgaccgccccgagtttctacgaggtgggcacagcttttcacgccgatcctccgagtctaggaccgagacgatttccccctcgtgttggttgggcacacggctgatctcggagacacacgcgcccggtctcccccagtttgtgagcgctctgcccttggcgccctcccccccccgtggcccatccttggagccttcaccccactgggccttcaaggtgaacaagcccttggaccacttgttccgggccctttcccgggaattaacccaggaccaaggaggcttcccgccccaagcccacccaagtgcccccaggaagaaaagacggaggctgtccctgcgtcctcctctagcccgggtgcaaaaggagcagccagcatgagctctcgggaccagctgccttcactgagctctttccccttctgggtttcccaggatacactacacccccatccccaattcctggccttctccaggacatcgccactgtgtgccttctgccgaagccttccttccccacccaagcccctgggtgaggggctcccgggcttctgggtcactgctgtatataactcccctctctacccccagggaaataaacgtcactgccaatgtcaaaaaaaaaaaaaaacaaaaaaaaaaaaaaa

SEQ ID NO: 6882 - DNA, 610 bp, Canis familiaris
atggtgcagaaacccggatttggagtggaagggggatcgctccaaggcagtgaatgctcttcatgatcttcacacagctcctgcagaatggtgaatttcttacaccagcgtttggtatcctggagtttgaccctagtctatgatcaactgcttaagtttgtacacattttactttttgtgttaatgatgtgtgctccctctcccgcccttccctctcctcaccttttagtccttcacttcccattttgtggaatgatattcttaggaaaaacagatttttaaagaagagaaaaagactgaatttccttgctttacttttgcatatacagactggattttttttttaacagccgtttccccaaaggaatgtgtcttgcttattactgacatttggtatgtttcattcattggaatatttcttattttctatgtgttgcaaagcctgtgagaaacacaggatttgataaacatttgaaggcaggaaaaatccagattgtttgttctttgagagtcatgactaccttctggtgtgtagaaattgccattggaaaaattgacagttctgattcttgctggtatggttaaaaactgaataaaaggtattagtaga

SEQ ID NO: 6883 - DNA, 644 bp, Canis familiaris
  misc_feature (30)..(30): n comprises a, c, g, or t, or includes no nucleotide
aattcatctccgagctgaggatgcctgttnttctttgtcaacaacgtcattccacccaccagtgcccacaatgggtcagctataccagttttctgcctccatccaggaaccaccacgaagaagacttctttctatacatcgcctacagtgatgaaagcgtctacggtctgtgaagctgctgcccctgacgtgggggggggtccggttctacacaagacagaggtggcccccatcctcgacctactccttctttgggctcatccctcacctccctttgttgggacctgcacttcctaatgtttgaggctctcctccagcccttctcagcaggagggctcatgggggaggtggcttcttggacctctcctttctccccttcctcttcgacctttcccactctgctctagacttcttgattgtccgtctctgtcacatccggtgattgttttggtttctgttccctaactgcccaaggggctcagaaccccaaacattcccttcctctcattaccttcatttttgggggtagagggaagggactgaaattgttggggggaaggcaggaggcacatcaataaagaggaaaccacccagctgaaaaaaaaaaaaaaaaaaaaaaaaaaaaaaaaaaaaaaaaaaaaaaa

SEQ ID NO: 6884 - DNA, 722 bp, Canis familiaris
  misc_feature (52)..(52): n comprises a, c, g, or t, or includes no nucleotide
cttgaagagaagtgtgggtgagctccccagcactgtggagctctccagaagntgcaagagcaggtgcagacgctgctggtcaggacccggcccggcggcccccttgcctcaggacttcctggacagactctcttctctagacaacctcaagcctcagtcagccaagtggagtcggacttgaggatgctcaggactgctgtggacagtttggttgcctactcagtgaaaatagaaaccaacgagaacaacctggaatcagctaagggcttgctagatgacctgagaaatgacctagataggttgtttttgaaagtggaaaagattcatgaaaaagtctgaatgaatcgcgtgtgcagggtgcagatttaaagtccagtgtctcatgaccaaaaaatgtgttgttttctcccatgcaccctaccctccacgttcttggcccctcttaaaaagcggtgacacccgttccccgagcaccaaggcattttagttttgtgcccagtttatttatgatgattaccacacatcattggtttctcaagttttctgcttctgtgttgagtggttttcctcaaggcctggcccctgcaaatcagaggtatcttttaggaaggatgtctctagtgtcaggagaagaatggcttcaactgaggattaacagaagcagattaactataacctcagaaaaccttgcctggctggctgatttcaagttaaaaaaaaaa

SEQ ID NO: 6885 - DNA, 393 bp, Canis familiaris
cttttttttctttttttttttctctcttttttttttttttttttttttttttctctttttttttctgttcttttctgttcatgtgctgttgcatggtcgcgagggatcagggcaggccagctggccctgtccgccgcgtctcccgcccgcgccctgcgggcccagctccctgcccaagggctcttgccacctgctggagagaagggaacagggatcaagggctagaaacgaggacgtgagctcccgagcacagtggacaacggggggccggggaggcccgtccggggccacgagtggcgtcgctcagacctcgtgctgacagcaccgctgcccctggggagcctgcggcccgggccctaagcggggacccgcgcgcggacacaggccgccggg

SEQ ID NO: 6886 - DNA, 664 bp, Canis familiaris
agcaacccacacacaagcccagctggcagcagcagctgaatcgatgaagaacccagtcagtaaagcaaaacagagccggagtgaaaagaaggcacgaaaggctatgtcccaaactgggtcttcgacaggttacaggggttacaagagtcactatccggaaatctaagaatatcctgtttgtcatcacaaaaccagatgtctacaagagcccagcttcagatacctacatagtttttaggggaagccaagatctgaggacttatctcagcaagcacaactagcagctcgctgagaaattccaagttcaaggtgaagctgtcatcaaacattccagaaaacacacagactcctaactgtacaagaggtagagtgaagtaagtaagaggttgatgaaacgggtgtagaggttaaggacatagaattggtcatgtcacaagcaaatgtgtcaagagcaaaggcacgcttcgagccctgacaggacaacagtacatgagtagttgtaaagtagctattatggaacttacacaactgtaaccgtatgaaaacgacggactttttttggtgtttcaaaagaataactgcagcttggtcttgaaatattgtactgtttctatcattaataaagttatggcttcttgttggatgaaaaaataacaaaacaaaa

SEQ ID NO: 6887 - DNA, 632 bp, Canis familiaris
tctatagaaattttaacttaattattcaggccctaatttctgtgtataatgtattggatagtaatgaaaatctgccatgcagttaaactatgaaccataaccctcatgttaggaaaaaaaatcttgcacatctgccatattaactctgatttcttttttctttttgtttttcagtttcacaatcacagtattatttcatttaaattagaaattgccaaatagtactatgacctgagactaattttgataataatatttgaaagagattgcttacccaggaaaaattaaaaccctttctccacatgctcctattcaccaatgggatttggggaaattaagcatgttgtcttagatttttgtagttttttttttaatatttgcttcaagctgcttctggcaatggtaaattattacgtatcattaatgttttcccaacccaaggattgttcacatttttcctatacaatatctatggagtgtgtctttcaaagagaggaaaatacagaaatgtgaaagcgggaaaagctgaatgtgatgtgcacattttcatcccataccatgtatttgttttaataaatggaattttcaaattccaaaaaaaaaaaaaaaaaaaaaaaaaaaaaaaaaaaaaa

SEQ ID NO: 6888 - DNA, 597 bp, Canis familiaris
gttttttaaaaaaacaacagatacacagaaaaaaaaaagttgatctaatgagctgtctttgatgtgtcttaagaattttactttttatcatcgtgctttgcactcacttaacaatgtaaagtagggaatctcaggccaagcctggaggagatcaatgaatttacttttcttctcgcctttcagagaacttggttgcacacgtggctcagagaagtggtccaagatcagagatgatgacacagctaaggcgtgcttcgtcatgcttaaaagaaggaggaggggttgattatagagcttatgtagatccccaatatttttcatacccctccacacgccctgtgggctcgtaaataatgttctacattaaatataataagaccggacctctacaagcccttacctgttaatgccagtaatagagctccttaccaagctcattccaaactcacgtccctttgacatcccacgtggcattttatgtgtgtttaggtgttagtctgagcttttactgatcactggattctgcttacttttaggagttctactagtgccatcagtgttggagccaagccacaccacccttattatttaaaaaaa

SEQ ID NO: 6889 - DNA, 414 bp, Canis familiaris
attaggcctatttaggtgacactatagaaccagtttgtacaaaaaagcaggctggtaccggtccggaattcccgggatggaagccagtgtcaggaaggggaattttctctgccaagataacataggacagaatgtccattaagagagtacatgtgggggcacctgggtggctcggtttgttaagcgtctggctgttggttttggctcaggtcatgatctcagggtcatgggatcgagccccatgtcgggctccgcactgggcgtgaagtctgcttaatattctcgccctctccctctaccccttcccccaagcacatgctgtgtctctgcctctctctctttgtgtctctcatgaataaataaataaatctttttcttaaaaaaaaaaaaaaaaaaaaaaaaaaaaaaaaaaag

SEQ ID NO: 6890 - DNA, 397 bp, Canis familiaris
ccttgtctggccttcatctgatcctggaatgtccctggaatgtccacagtgtcaccagatcagattgtgagccacctgccccatcaatccgactgcctcgtccccagcaggggaggcgagaggaagatctggggatgagccgcagaagtggaggccacatctgggcagaaggactccattgtttccccgaacaatgacatttgattcctctcctggtgctggaatgtgctcgctgcagtcagctggcaatgactagtcaccctgggtgccccggacctgctgctcagaccacttttcctcccgatggagcagagggggagccactcctggctctcggatgttacaaaataaaatcaaatgctattgctggttttaaaaaaaaaaaaaaaaaaaaaaa

SEQ ID NO: 6891 - DNA, 490 bp, Canis familiaris
  misc_feature (99)..(99): n comprises a, c, g, or t, or includes no nucleotide
  misc_feature (116)..(116): n comprises a, c, g, or t, or includes no nucleotide
  misc_feature (148)..(148): n comprises a, c, g, or t, or includes no nucleotide
  misc_feature (163)..(163): n comprises a, c, g, or t, or includes no nucleotide
gaacaccaacccatcccgtggcccctatcacttccgggcacccagccgtatcttttggcggacagttagaggcatgctgccccaccaaaggacccacanggcgagggccaggctgncccctggaccgccccctcaaggtgtttgattnggggatcccaccacnccctatgacaagaaaaaagccggaaatggtggttccacgctggccctcaaggtggtacgcctgaagcctacacgaaagtttgcttacctggggcgcctggctcacgaagttggctggaagtaccaggcagtaacagccaccctggaggagaagaggaaggaaaaggccaagatccattatcggaagaagaaacagcttatgaggctacggaaacaggccgaaaagaatgtggagaagaaaattgacaaatacacagaggtcctcaagacccatggactcctggtctgagcccaataaaattgacttattcatccacaaaaaaaaaaa

SEQ ID NO: 6892 - DNA, 559 bp, Canis familiaris
tcatctgtagcattccaaattgtaagcccttaagatctcagtgatccataacttaaattggacttcataaaatgctcttgtcctaggtagtaaattaagtttggcattattgtccgactggataaagggtaagtcacaatagtatgatatgattagaggcttttcccctctgtctttaagccatattcttccacatatattttgtaaggaaatggtaactgaaattctagtggctgtttaattcctgatctattaccatgaactgacccctcctcccctcctcactatatccccacccatgcccacatgataacaacagccatattagatacaccaattaaaaatctttcccagttctttaagtatttaaacatctgagcccaagcctatgaccatagaatagaagttattgtatagttgttaaacttctaccactttgccaataggggctaaggtgtccaattatctatattggccttgctgaactataaactttctataccctgtaaaaaaaaaaaaaaaaaaaaaaaaaaaaaaaaaaaaaaaaaaaaaaaaaaaa

SEQ ID NO: 6893 - DNA, 333 bp, Canis familiaris
aatgtgctttcacctccctcagcctgcccagggtcagatttgccatccaaaccacgacctctactgttttcttttgtattttgataaacactgaagaagctggagctgttcaactttatcttggggaagttctcagaactggtttatttggtgtcgtggaacctcttactgctttcaatacacgattagtaatcaactgttttgtatacttgttttcagttttcatttcgacaaaccagcactgtaattatagctactagaataaaatctcttaactatttccaaaaaaaaaaaaaaaaaaaaaaaaaaaaaaaaaaaaaaaaaaaaaaaaaa

SEQ ID NO: 6894 - DNA, 577 bp, Canis familiaris
ggagacttatctgaattctcctaccagatagagacctctccaaggacgcaaggaagctaaaaatgaaacccaagaatgcttacacatcttcaaagtttagactctgtaatccatttggattcatgaaatgtattcctataccttcaagagaaactcttccctaactcaggaggtctttggcagcctggactatgccttgccccccctgatgactgtatctctctctaggtgggcttgtgctgggtaattggcttgcctgcttccttgtactttaagatgtttgtcgggctggtacttttctctttgtactgcaagtaaaaaacccatagggccccattaccggagatgcctcttttctctaatagcaacatcagtgcccagatcctggtttcttaatacccagaatgggacttctgtttatttttatttgctactaagatgaatcctttaaaactgaggaactgcagttccttcggaaaatatgtcactgttgcccactgccatgaaaacaatgaaataaaagggaagctaagctctaaaaaaaaaaaaaaaaaaaaaaaaaaaaaaaaaaaaaaaa

SEQ ID NO: 6895 - DNA, 610 bp, Canis familiaris
cttctctccacttctggctgccttggccgtggcagcatttgtgctacgaatctcatgaaagtatggaatcctatgaaattaatcccttcattgaaccggagacaatgccaatacatttatatctccgcagacagatgatggagagctaaagcctcaggagaggatcagagaaacccccaagcccgcctatgagctcaaccgggaagcctgtgatgaccttcaagctttgcgaacgtctacgccatggtttatggatacaatgctgcctacaatcagctatttccggcatcgccgaggaggcaaatgagattgagaaacaagtctcttctccttccagaggcctggtgcctggttttgtattccttctacacgtagcatcatcgagactacatcaaacacaaaccaattgcttagtttcttatagtgttcttgtctggctgttgccctccttcctgccccccagatctaataagcccactgatacaatgcgaatgtggtgaaagctctaaagagaatctcacagatgtgtgattattattacatcaataaactcttggatggatactttcaaaaaaaaaaaaaaaaaaaaaaaaaaaaaaaaaaaaaaaaa

SEQ ID NO: 6896 - DNA, 617 bp, Canis familiaris
  misc_feature (116)..(116): n comprises a, c, g, or t, or includes no nucleotide
agagagaacctgccacttgcgggagggaaatgggaccggagccgaagccgccccccaaccttgcgctggccctcccggggcgatcacgggaaggggcgagcggtggctggagggcnggctcctgcgtgcccgacatccctgaaacgggaggccagactgagtctgccagggtttaccccaggagggcctggacccgagggcagcccagagtgggtgggggactccgggggtgctgccccaaggaaacgcctggtaccgacagcctcagctttggtttctgtctctccaagaatgctctttgtgtctgggaacttgctttccctcggaatctttacctcctcgatgtcataaattccctttggtaggtcagcagcaaaccctaggaccacccccctacaggtgcataaggtgctcatgatgccacgtcaggagcacgtaaaccaccactgacctcagacaggcacttacttaacctcgagagatggaaggcgccttatcttaaggtggagggtttcccgatctttttatttaagccgtactccctttcagtgaacgtcctgtctcagtgccctctttcactatcacatctccaagcacattaaataaatgcctaaaaa

SEQ ID NO: 6897 - DNA, 451 bp, Canis familiaris
ttcacagtttggtttaccctcattctcagcaatctgggttctgggtcttggggatggtggtgctacgggtcctttgatctggtaatggcgagcgccctatacctccatctcagcccagaaatgctgggtacaatcatctaggctctggcatgttggttttttctttttcttttctcccttgactatagaagagctacttcattttaacttattatggtgatcatgtacgtaagaccaaaaggagagaaaaatgtacctcttttactggaataatgtttatgattacaagtgaaataaggcattttttatcaacataaaggcaaccttggcttatacaacctcttctcgattatgaatactgacatctttactgcactcactatcaataataaatatattttcccaagaagaaaaaaaaaaaaaaaaaaaaaaaaaaaaaaaaaaaaaaaaa

SEQ ID NO: 6898 - DNA, 429 bp, Canis familiaris
ttggaagaaaataaatgtggggcctcaggggaaccaaaaggggcttcccttgccctggatcaccatgtgcctgtggttctcaaatctggctaggcgtcagaatcactgggagaacttttaaaaatagaaaccactgggccccatccagtcctgggatgaagcttgtgcatgacattggtatggttttgttttgtttttttttaatgtacaattgattctgaatgctgagccaggtttgaaaaccaggggtaggtgatagtacaaggatactgaaaggtgaatttgacaatactgcgctttatctaaatctctgccctattgtttgaatccaaagaaagagctgtgtacataaaacagacataagatgatgaggatggcagtaataaaaaatacctaacactcaaaaaaaaaaaaaaaaaaaaaaaaaaa

SEQ ID NO: 6899 - DNA, 453 bp, Canis familiaris
tatgagtgagcttttctagtggctgcctcgccacccatccttccccagttcttaattttgaaccataaagggtaccggttctggaaggcatgcttttaagcagccataggaccaaatccagaaatgcccagtgcctgcttcgtagctttggaaaggtgccctcattgagcattctaggagtggctgggtcttctgggaccctcccatcaggctccttaaggtaacatcagccatttttagattggttctcttatcataccttcccactggccccatgtgagccaaggaactcactgcctgccctctatccttgcccagttctgcaggtggagattgataagtcaggtatccttttttgagatactattttcattttcatgagaatctttgtaataaaatggtacatttctacatccaaaaaaaaaaaaaaaaaaaaaaaaaaaaaaaaaaaaa

SEQ ID NO: 6900 - DNA, 603 bp, Canis familiaris
ggggaatccatcgctccattgcccccaggactcacccttattccccgaagtcagaagctcccaggacgactcgggatgagaaacgcagggctcagcataatgaagttgaacgccgccgccgagacaagattaacaactggattgtgcagctgtccaagatcatcccagactgctccatggagagcaccaagtctggccagagtaaaggtgggattctgtccaaagcctgtgattatatccaggagcttcgacagagtaaccaccggttgtctgaagaactgcaggggctctgaccaactgcagctggacaacgatgtgctccgacagcaggtggaagatcttaaaaccagaacctgctgctacgggctcagctgcggcaccacggagtagaggtcgtcatcaagaatgacagcaactaactgtggggactcgagggccttaggccctacagcccctttccaagaactgcagatagtccaggagaacggctcaccctactgcccctactcctcctatcccttaaccctaaaattatttctcggtcccatctactaaaaaaaaaaaaaaaaaaaaaaaagaaaaaaaaaaaaaaaaaaaaaaaaa

SEQ ID NO: 6901 - DNA, 327 bp, Canis familiaris
  misc_feature (35)..(35): n comprises a, c, g, or t, or includes no nucleotide
  misc_feature (143)..(143): n comprises a, c, g, or t, or includes no nucleotide
cgtggtggaaagaaccggttctcacgaacctgttntgtgtcacaattggccactttaaggtttaaatagtaaaaagagctggttaaatgataaccacaatgcattcgtaaaacctctcacgaaggaaaggaggaatgttttgntggaccactttgttttttttttttttttgtgcgtgtgtggcagttttaagttattagtttttaaaatcagtactttttaatggaaacaacttgacccaaaatctgtcacagaattttgagaccccattaaaaccaaagtttaatgagaaaaaaaaaaaaaaaaaaaaaaaaaaaaaaaaaaaaa

SEQ ID NO: 6902 - DNA, 418 bp, Canis familiaris
atcctatgtggtccttggggagcttagaaagtatctggtagtcgtaaacaatttgattttgcccaccgaagacattgtactgttgataggctttatctttcataattgagccagattttgtgcagtcacttctcaatccaatctgatatctaaaggccatgaaaaatacgtatatatgtaaaagaaataatttaacactataatcctttaaacttaatgccacttagcatcattttaaaagcacaaggaagggcagcccaggtggctcagcggtttagcacctgccttcagcccagggcgtgacccccgaggtcctgggatggagtcctgcatcgagctccccgcagggagcctgcttctccctctctctctctctctctgtctctcatgaatgaataaataaaatccttaaaaaaaa

SEQ ID NO: 6903 - DNA, 603 bp, Canis familiaris
ccaggaggactggagagaggaagcgccaatctgttcggggttgcattgtggaagccacatctcagtgttctccatttggttattgtgaaaaaaggggagaaggatattcctggactcacggatactactgtgcctcgtcgcctggggccccaaagagcccgccggatcccaagctttttaatctgtcggaaggaggccaatgtccccccacgtatgttgttagaaagcccctaaaccaagaaggtaagaaacctagaacccaagcaccccagattcagcgtcttgttactccacgtgtcctcccacaccaacgtcggcgtattgctttgaagaaacagcgtactaagaaaaataaggaagaggctgcagaatatgctaaacttttggcccagagaatgaaggaggcccaagaaaaacgccagggacagattgcccagagacggaggctgtcctctctgagagcttctacctctaagtctgagtcccagtccaaaaatgagatttttctaagagtgaccaaataaataagatcagacacccaaaaaaaaaaaaaaaaaaaaaaaaaaaaaaaaaaaaaaaaaaaaaaaaaaaaaaaaaaaaaaa

SEQ ID NO: 6904 - DNA, 468 bp, Canis familiaris
  misc_feature (1)..(1): n comprises a, c, g, or t, or includes no nucleotide
nataagcacggctggtaccggtccggaattcccgggatattttttttaaaaatgtaagaacgagaatttaaagcatggggagagaaaaaccagctaccataagggtcaggtatggccatcaacccagatggggtggagggcattgcctagctctttttccagtcttgtgacttgtgcaggcagttacttgagctagccatctttgaagtggaggcctttcttaaagtgaatgcctcagcattgaaaacgtaagtcaggggatccctgggtggcgcagcggtttagcgcctgcctttggcccagggcgcgatcctggagacccgggatcgaatcccacatcaggctcccggtgcatggagcctgcttctccctctgcctgtgtctctgcctctctctctctctctctctgtgaatacaccaaaaaaaaaaaaaaaaaaaaaaaaaaaaaaaaaaaaaaaaaaaaaaaaa

SEQ ID NO: 6905 - DNA, 472 bp, Canis familiaris
atggcctgaccaggctagaagagtaaagttgaaatatttaaaatatgatcataagtcagaatacattggttatattttgtaaattttcatgaacttgtttcttatttaaatatagtgttaattttttcagtgagtatatttatagtgtcaaacttggtagagtaaaggtaataaaaatcattgtcttaaggtcacagttctcctgaagtatgtatattgaatatttagaatgtttgtgaacacatttatgtttataaatgatgccaaaccaccgtttccctcctatgttagtggtatagtttaattctttaaaattccaaaagccactgagggggccactttatgggatgagtactgggtgttatgctatatgttggcaaatcgaactccaataaaaaaatatacaaaaataaaaaaataaaattcccaaagccatatttaactggaacctttgtaaaaaaaaaaaaaaaaa

SEQ ID NO: 6906 - DNA, 602 bp, Canis familiaris
gcatagctggagaagaatgaaatatatcagctagccggaccgactcctaatcaataaaaagctaacgcttaagcagaaaattcgtcaccgatttgttccagcaaagcggctctgtcctcgtcgccgtcgtcaccagaagccacattctgacaaatgacttgcttgaagccgccgtgatctgcgagccctatgtggtcgggtgattcggattgcggggtatgggccacagagccctaaaggcattgtgcatcagcatgtattgagacctcgttccaggtggccagccgctggactttcttaaaaataaaattccccaaataaacgcggagcgcctgtgtccaagcagtacgtgttccatttaaccgaatcaccctcgagacgttatgaatcgggcagaagagggagttgtgcatatttaatatatttgttttatatttcccctagccaacagaataatgaaattccttaactacttctctttaacttgcatgaagaaagcacggtatgttgctaaatctcttttcagcggcaccgcggagaaacaactttaatccttgttagaaaattgccgagtctgggactgacaaagagctcatgcttgt

SEQ ID NO: 6907 - DNA, 151 bp, Canis familiaris
ggtggagctctacatttcattgggctccctgctcagcgaggagcctacttctccctctccttctactgctcccccccgtgcttgtgcatgtgctctctctccctctctctgtcaaataaataaataaaatcttaaaaaaaaaaaaaaaaaa

SEQ ID NO: 6908 - DNA, 637 bp, Canis familiaris
atatccccaacacctccaattatatctatgaacgctttttttaacaacaccatatcatcggctgtaaagcagagcatattagccaagttacaggaagcggtagaggtcaatctcgggactgccatgacctacacgttgtttgagtacgccaaggacaataaagagcagttcatggagaatcaccagcctgtgaattctacgatccccataagcagtatcatctccgttgaaactcctaatacagccccatcgagtaagaaaaaagacaaaaaagaacagctttcaaaagcccagaaacgtaagctggcagataaaacagatcacaaaggagaacttcctcgaggatggaactgggtggacgtggtgaagcatttaagcaaactggctctaaagatgatgaatagtacttggaattgaagacaagagaagagcatcctttaaaaagtaaactgggttcaaaatccttcattactcttttctgctattgaggtggctttttataaaacagaatttttttgtatgtttcttatgtaaaaaatgttttaagctgaaagttcatgaagagatctggttgtattaaattattttcacaaacttgccttaataaaaggtgaaatgttaaaaaaaaaaaaaaaaa

SEQ ID NO: 6909 - DNA, 394 bp, Canis familiaris
tcaaggcgaagatccaggacaaggagggcatcccccctgaccagcagaggttgatctttgccggcaaacagctggaagatgggcgcaccctgtccgactacaacatccagaaggagtccactctgcacctggtccttcgcctcagggggggcatgcagatcttcgtgaagaccttgacgggtaagaccatcaccttggaggtggagcccagtgacaccatcgagaatgtcaaagggaagatccaagaaaaagagggcatcccacctgacccgcagaggttgatctttgctggcaaacagctggaagatgggcgcaacctgtccgagatacacaatatccagaaggagtccattctgcactggtactgcgctgaagggaagtgtctattcacact

SEQ ID NO: 6910 - DNA, 623 bp, Canis familiaris
  misc_feature (1)..(1): n comprises a, c, g, or t, or includes no nucleotide
ngtcaaccgacaccagggcctccgccatgccgcctaagttcgaccccacacgagatcacaagtcgtgtacctgaggtgcaccggtggcgaggtcggtgccacgtctgcctggccccgaagatcggcccgctgggtctgtctcccaaaaaggttggtgatgacatcgccaaggcaaccggtgattggaagggtctaaggattacagtgaaactgaccattcaggacagacaggcccagattgaagtgggaccttcttgcctctgccctgattatcaaagccctcaagggaccccccagagacagaaagaagcagtaaaacattaagcacagtgggaatatcacttttgatgagattgtcaatattgcccgacagatgcgacaccgatctttagccacgagaactttttggagaccattaaagagatcctggggagctgcccacgtctgtgggctgcaatgttgatggccgtcaccctcatgacatcatagatgacatcaatagtggtgcagtggaatgcccagcgagttaactacaaagggaaatatttcaataaaggatcatttgacaaccagaaaaaaaaaaaaaaaaaaaaaaaaaaaaaaaaaaaaaaaaaaaaaaaaaa

SEQ ID NO: 6911 - DNA, 592 bp, Canis familiaris
  misc_feature (1)..(1): n comprises a, c, g, or t, or includes no nucleotide
ncgccgtacccccctgcgccgtccggggggtcctgagcaccacgctcccctcccgtgtgcccctcacagcggagacgatcccacgggactcttcagttagccttcttcacgcccccgaggtctgccagcgacctcgtcgtgtgagggcccagacggacggaagccagggtccagggggaattttcagcccttgaaccctgagtctccccctccccgctgctcgggtcagacctggttcccgtggcctcgggccacggggctcagcacggacagactcgcaccagcgtctccagcaaacagcaggccatggcgccctcaagcccgcgtcccctgagccccgaggacaaaggtgctatcctgcagacccccccgtctactcggaagcctgggcctgggccttcagtggcacaaagcgaggtgttgctttttaaacaaataaacaaaacaaaacaacccaaagctcttcttccttaggagagtgattggttctacgttttactgaaaaccctctttatgtgttagttttctgattccttgtgtttgctcactgtgtccacgtcagccacttttcagaataaaggtgttcattcct

SEQ ID NO: 6912 - DNA, 643 bp, Canis familiaris
aaacaacggtgagaaagaggcctggcaacaagtgacctgggttggggatcatagttggagtcttactagccattggattcattggtgggatcatcatatgtggttgctcgaaaaatgtcaggaaggtactcgccctaaagagctgaagaattgtgcccttctaccaacacatttaaaagagagtttccgacttccccgtccccaagcatgtgggagaagatgacccatggaaatgcttggcgatcccactaccgaatccatggtgatccctccacttacccaaagtaacccaaggaaagacagttcacaagacttgctcctctaggcaggcatctgtcttctgaaaatgtttttaaatataaattttgcaaaagaggattcagaagacacaatgcctagaaaatggagcaaaaccacgtaaactgatttgtaactaagacaatataatttaattgatgttagaaattatgctcccatctccgttctgaccattctctcgtattgttaaaatgcaatcaagcctggaaatatttataccagtggagcccttgagttgagtgcgacgttcataaacagcagaagcattttgcaatttccgatctgttgaaatgtaaaaaaaaaaaaaaaaaaaaaaaaaaaaaaa

SEQ ID NO: 6913 - DNA, 644 bp, Canis familiaris
gtattagtcatcgctattaccatggtagaatccggttttgccagtacatcaatgggcgtggatagcggtttgactcacggggatttccaagtctccaccccattgacgtcaatgggagtttgttttggcacccaaatcaacgggactttccaaaatgtcgtaacaactccgccccattgacgcaaatgggcggtaggcgtgtacggtgggaggtctatataagcagagctcgtttagtgaaccgtcagatcgcctggagacgccatccacgctgttttgacctccatagaagacaccgggaccgatccagcctccggactctagcctaggccgcgggacggataacaatttcagcacaggaaacagctatgaccattaggcctatttaggtgacatctatagaacaagtttgctacagaaaaagcatggctggtaccggtccggaagttcccgggatgcggccagctcctctgtcccagggggatccacgcccccgagggctgagcggtgaagcccatctctgcactcagtgcgggaccctttgtcctttcctgcaaataaagtgtctgtaccagctgctagggtggcagcggcttggaaacaacaaaccccctcagaaaaaaaaaaaaaaaaaaaaaaaaaaa

SEQ ID NO: 6914 - DNA, 704 bp, Canis familiaris
gcattgggatacccaatcccaggtgaccaccatcctgccagaccgtcagagatagggcattctggacacagagagagagccccaggggaccacagttatgtcacttgcccagaggcggtgggctaaagccacgccccccaccaggcctccctgttactatagcatcagacactgtcacatctctccccttccggagagacaggcgacgtgtgcacgtcattcccctagaacgctactttgaaggcgacttagaagcatctgttgtcatcttcctccctggtgattatcttcgtccagcgatggagtgtgaggagagctacaacggagcgactgttattaagatcatctgagaggagaaagcacccaccccgcgtttctcgttgatagtacactatcatgagtttgagagacgcaacgcaaacacgagtgagcgctgtgatatatagtcgctttaagggagtacgggtaacatttttctttcttagataaggaatctggctaataatttaagccaggcttctatttcataccctctcccactacaaactttccgtgcagttacctttcatttttaaagcaatttcactgctaaatataaattgtatttgtggggttcatagttatataatgctgaagggaaccactctttcgttgaaaggtgataaaagttaaataaagactgtctccacagtaagaaaaaaaaa

SEQ ID NO: 6915 - DNA, 629 bp, Canis familiaris
cagcgtgaagttccttcgcttatcttggctgttcagctcttgatacggaatgtgagccggaaggtacgtatgcaggagagcacagaaggccagcccgtcattccagctgctgctgaagtttgtaatgtcaatattctgatagccttctgttttcttctgacaccactttagcaaagcattcctcttcgaacctccatattctctcgccaatgctgacagagggtccttccgtttcgtcccttatccgacttcgggtggtaggggtaacagatgccgtgggagaagaggacagggaaagctgtggagatgtagttcccatagccataagagaggccggtgatgctccttcaggtgcagagatgtctcgtttcatctcttcactacttcgtcgagacactgagatggtcttggcactttccatggcaggtactcttggcagagaagcaggtcggctggttgaagaggttcgtaatagatgctcttgaacagggatctccccatagtttggtctcttatctgacagcgctgtcagaggtttggatgtagatattggtccacttatggaatgtctctgcataggtgagactgctgcagcaggaggggttttcattggacttggacttaaaggc

SEQ ID NO: 6916 - DNA, 598 bp, Canis familiaris
  misc_feature (1)..(1): n comprises a, c, g, or t, or includes no nucleotide
ncgctagccagtattctcctatcagtcctcctaataaagcgggtcatttacactatccacgctaattattaccccaggacatatatgattaatctttccggcctgacccctagccctgatatgattcatcttctaccctagcagaaactaatcgagcccccttcgacttaactgaaggagaatccgaactagtctctggatttaacgtagagtatgcagcaggtcctttcgccctattctttctagcagagtacgccaatattattataataaacatcctcaccaccattctgtttcttcggggcattccacaacccattcataccaggactctactctattaacttcactataaaaaccctcttattaaccatctgcttcctatgaattcgagcgatcataccctcgagttccgcgtacgagtcaggtaatacacttattatgagaaaaattttctacccttaactttagccctatgcatatgacatgttgccttacccattatcaccgcaagtatcccacccccaacataaaaaaaaaaaaaaaaaaaaaaaaaaaaaaaaaaaaaaaaaaaaaaaaaaaaaaaaaaaaaaaaaaa

SEQ ID NO: 6917 - DNA, 516 bp, Canis familiaris
acggagcacaagaatctttcgttcagggggtcatctgggacatccaacagctttgacccattgggggttggagctgggaaagcactgggccaaaggaaattgagcctgaacttgatggcagtagcccagtcacctctcacgactcttccacgaacgggctaatcaacttcatcaagcaggagcgtgaggccagaagcccaataaactcatgcccggctgcagtccctgttgtaactggtccttgtctctcctcaccagagatgcgctgcacagtctttcccagagcaccctctggttgcgggcttggagcacaagccctttgggggaagccggtctggaattgccacccctgcccatccatgtccatgtgccctctgttttacgattggctgaagtgttccagtgcagctgatatttctgaccgtgttcgctttgttcgtgtaccagatagaaaaataaagatgccacaaaggaaaaaaaaaaaaaaaaaaaaaaaaaaaaaaaaaaaaaaaaaaa

SEQ ID NO: 6918 - DNA, 451 bp, Canis familiaris
catccatgttccccaatatggacccttcacttgggagcaaccacctacggacaggcaacttgacagacatgcacagtcaccagcaggtttgcagtgcgtgcactcacacacatgcattcttgtggttcatttgcatgggcacatgcaccctcccaaccatgcagaaccctaccgtccaggaaggtggggaccctatgggagccagccctaaactccattcacaggttgcagctggccccagactagaattgtctcccagaaggtgagggccatcccttggaacctctgatctccttgcttttccccctctttccgggtgctccctgggttattaggcctggatctgctcagccaagcttgtttcctgctctgaggtttgggggctggggaaacggagagcggagagtggaggtcggtgaaataaagtgatgcaattagaaaaaaaaaaaaa

SEQ ID NO: 6919 - DNA, 751 bp, Canis familiaris
  misc_feature (1)..(1): n comprises a, c, g, or t, or includes no nucleotide
  misc_feature (209)..(209): n comprises a, c, g, or t, or includes no nucleotide
ncacgtggatgagcacaccccggtcaaggtgcccatgatgagccgcctgggcatgttcgacatccagcactgtgccacgctctccagctgggtgctgctcatggagtacgtgggcaacgccaccgccttcttcatcctgcccgacgagggcaaaatgcagcacctggagagcaagctgaccaaggaggtcctggccaagttcctggaanaagagatacgcccaggtctgccagctttgcgcttgccccacaaacatgtccactcatctggagacctacgcatcttgataaagcagtccttgtagcaacaaatagggcgatcaaccaagggtcgttctagcagccgcaggcgtgtaccctccttcctgggggagtctaccatcgtaggggagagaggcgccccttgtagtagcgtcgtgctcacacgagggggcgtgcgaccaacagagccctggcgtgagcaccttggacgcagagaagagggctgagaagctgtgcggggagcccaccctttctgggaaagccaatccccaaggtccaatgccggccccacgttcggaacttctacaagcctttcctcatcatcatcgtcgtacagagacacccagagtcccctcttcatgggaaaggtggtgaaccccaccccaaagtaactgccttgtgggtcaggtcccttccagataccattaaagagtgacccacccccaaaaaaaaaaaaaaaaaaaaaaaaaaaaaaaaaaaaaaaaaaaaaa

SEQ ID NO: 6920 - DNA, 673 bp, Canis familiaris
tggaggagaaaaaaaggaagaagttggaagaagctactgctgcccgggccgttgcatttgctgctgcatctaggggggagtgcaccgaaaccttacggaatcggatcagagaattagaagcagagggcaagaagctcacgatggacatgaaggtgaaagaggaccagatcagagaactagaactgaaagttcaggagcttcggaagtataaggaaaacgagaaggacactgaggtgttaatgtcagccctcctcggccacgcaagatataacacagcacctggagaacactctgagtgcagagacacgagatcacaacgtgggaccctgtttctctgcaccgtgggggacagccaagcggacacgactctgagaattgccccacagagacacaatattttccaggaagacccggagatcaaggaccttaaacaggagaaaagccggagttcaaggcccgtcaatgcccaggcattacgtacagtgctgccaccagccccctgagccccgtttccccccactactcttccaaattcgtggagaccagcccctctggactcgaccccaatgcctctgtttaccagcccctgaagaagtgaaggccagctgcgggttttgtccaaccattggggttaaccagaaggcatcaccaaggagcatctctggcagtcacg

SEQ ID NO: 6921 - DNA, 631 bp, Canis familiaris
atgtttttgtactgactggcattctgtccaattgtgaattctaaaccctgctcttaaaaccgggactgggacctgtttacgaaccctgctcttgttttttttaatgtgctaccaatatggtgagtttttagtttttagagctcatccttataaagtctgtttaatgatagccataaggatcttatagaaagactggccgcccgttcttgggcctttgagaggcaatcaatgaaggatccagatccatgacactgctttctgtccactcacagaattggctgggtcacacatcacattagcagttgagtctgttccatgtattaaccggaggtaaaacacacttggccaaaggcagacatttaacaacagagccacccagatgcccccaaaataaaatcttaaaaataaaactacagtaaggggtgcctgggtgcctcagttggttaggtgtctgccttcagcttggatgatggtctcagggtcctgggatccagcctcccatgcggttccttgctcagtgggaagcttgcttctccctctatccctgcttgtgctgtgaaattaaaaaaaaaaaatcttcaaaaataaataaaaataaagctataatgaaaaagggaaaaaaaaaaaaaaa

SEQ ID NO: 6922 - DNA, 615 bp, Canis familiaris
tggactggactcctcttaccctgtggataatgacaagaatgggtaggtgaacttgggtgttttttttttttttgcctcctaagaggacaactcagtttttatccattcaaatcactgagccaatccaaatttaaagaacggatgctttaattgagttttagtagctgaaactgctgagatgctaaacttcaagcttccgatgactttttaaacgcctccaacgtccccgcattggtaggatatttttataacctccctgatgctgtcaccgatgttgaagcggcagccgacccggagcctggtggcaggggccccgcactctccccaccaccttcttctgcacttggaaagcacagcaacgtctggatagagctctagctttgacttcctgtttcctcctctgttggggcctattcctcagcacactcattctttttttcttttttctttttttcttgttttgtctgtgtttcttggggttttttgttgttgtttatttgctttgggcttccaccccctcccttttttcgtgatttgcaatgatgtacttgcccagctgacttttgaattgcactttttaataaatatttgtaacaattttttaaaaaaaaaaaa

SEQ ID NO: 6923 - DNA, 639 bp, Canis familiaris
agttggaagaagctactgctgcccgggccgttgcattgctgctgcatctaggggggagtgcaccgaaaccttacggaatcggatcagagaattagaagcagagggcaagaagctcacgatggacatgaaggtgaaagaggaccaagatcagagaactagaactgaaagttcaggagcttcggaagtataaggaaaacgagaaggacactgaggtgttaatgtcagccctctcggccatgcaagataaaacacagcacctggagaacagtctgagtgcagagacaagaatcaagctggacctgttctctgcactgggggacgcaaagcgacagctcgagattgcccaaggacaaattcttcagaaagaccaggagatcaaggaccttaaacagaagatagccgaagtcatggccgtcatgcccagcataacgtacagtgctgccaccagccccctgagccccgtttccccccactactcttccaaattcgtggagaccagcccctctggactcgaccccaatgcctctgtttaccagcccctgaagaagtgaaggccagctgcgggttttgtccaaccattggggttaaccagaaggcatcaccaaggagcatctctggcagtcacgataaaaaaaaaaa

SEQ ID NO: 6924 - DNA, 599 bp, Canis familiaris
ggccaagccgcagcccgtccgggggtgcgcgggcccgctgctcacgccgtcccagtccttggacggcagccggcgctcgggctacatcaccatcggctaccgcggctcctacaccatcgggcggacgcgcaggcagacgccaagttccggcgagtggcgcgcatcaccgtgtgcggcaagacgtcgctggccaaggaggtgttcggcgacaccctgaatgagagccgggaccccgaccggccgcccgagcgctacacctcgcgctattacctcaagttcaacttcctggagcaggccttcgacaagctgtccgagtcgggcttccacatggtggcgtgcagttccacgggcacctgcgccttcgccagcagcaccgaccagagcgaggacaagatctggaccagctacaccgagtacgtcttctgcagggagtgagctccccagacccccctcgcgaccccagcgcgcccgtcccccgtccttcctgcccaggggagcgttctaggtcgcccctcccgccccacgccctcccgctcccgcgtctcccaccttcaggagctgggccaggcccactcacaccccccgcccccccccacctg

SEQ ID NO: 6925 - DNA, 615 bp, Canis familiaris
tgaaccccttggttctgtcttgggagcctgttaagttttggctcctagcagcctgtggaatcaggccccgatcccaggaagcccatagaggccgctcttttgaagaaaagaatcctggagagactcaggattgagaaaaggagtaaaaggggaggaccagtctggagccataatgcaatcccacctcactcatttaaagaaaccacttactaagcattaaacctcatattttgggtctagttcacaaaactgacttgcacataaattttgtatctgcttatgtgattaattgccatcaccaattaactagaagcctaatggacaagaagccctattagaaagtcttgaactatacctggtatttttgccttatttactttgaaaaaataacatattcttgtattatatttaagcagtataaatcagtaaacagtgaaaactaattctccaactgaatcccttaatctctgctttagctctctgaagggaaatcactgtttccctgtccttgtttctgagactgacaggcagtctccggcctgcttctccctctgcctatatctctgcttctctctctctctctctctgtgactatcataaataaaaaaaaaaaaa

SEQ ID NO: 6926 - DNA, 546 bp, Canis familiaris
  misc_feature (335)..(335): n comprises a, c, g, or t, or includes no nucleotide
gtcccatgctcagtctgttacaagtatgaccacatggacttgtcatcctcgtactgagccaggattcccatgttgtcctttgtgcccctgttccaagggcacacatgcatgaaccctgtctgtccttcctgttgaagtcctccatcctctggatgctccctccctttcttgctcaaactggagtcccaccctccacttctgtaatttttcccagtgggatgccaagggtccttctctcctgtcgttcccagacccatctctctcccactgaaaccctgcagtcctgaagcttgatattggcacttcctgccccaccttgttggtttgagcccccntgacgaccgctcttcctttcatgaataacagttccaactcactgccacttgccactcctcttgtcatttttagatgcttgcaaagccacaccagtgatccttccacctccccgaccttagcgtctgtcctccttgtgaccttggccctctccctctctctctctctgtgactatcataaaaaaaaaaaaaaaaaaaaaaaaaattaaaaaa

SEQ ID NO: 6927 - DNA, 726 bp, Canis familiaris
agacctcctatggttcctcaaacctacacacacacttgctttggggacctttgccagacaccatcgtagctccctccctccttctgttggtgtgtgtgcatggggcacttcccaggtaggctttccctcccgcccctcagtgctctcccatctctgcccactttctttcctctgtaaaacgtgcaacatagggcacccttttgcagcataactggggtgatattttgtaatttgtttcaacactaaaaactcccctttgaataggcggcggggaatatttgcttctcgtgcccgcctcgagagaacttctcgcttcttcagcgaccggagaaataaagctctcttgggcacaccacaagggggaaaggaacttctaaagccaaaaatttcaatttaccaaattgacgcccttcaaggcctttcccgtccaatttctaagaattaagccttgtaagccaagggaggccttgggccccggccttcccccaatgcctctcccgagcctcgaggcagtgcctgagctgtggttcctcctttcacacactagctgggaaacactcaactacagcccactgctaaacgcagatagttttattgaaccagaaggtaatagttgttcctattgttctgagctgttgtaagtagaaaattataattccaccagtgaatttatcgtgtaggtgattcccttgttccaaaacacacctgaaaaaaaaaaaaaaaaaa

SEQ ID NO: 6928 - DNA, 612 bp, Canis familiaris
gtcaatgggagtttgttttggcaccacaaatcaacgggacgttcccaaatgtcgtaacaactccgccccattgacgcaaatgggcggtaggcgtgtacggtgggaggtctatataagcagagctcgtttagtgaaccgtcagatcgcctggagacgccatccacgctgttttgacctccatagaagacaccgggaccgatccagcctccggactctagcctaggccgcgggacggataacaatttcacacaggaaacagctatgaccattaggcctatttaggtgacactatagaacaagtttgtacaaaaaagcaggctggtaccggtccggaattcccgggatgtcctgagacccctcgtgaggttacctagccccccgtgcccccgacagacccaccactctcatacacggtgccagcacccgctgcctgcagtcaggcgcccctgcccggtgtcctcagctgcccctcgcccgcggccccccccacagagctgctccttggggggggggtgctgtttgagagtctttgtgttgcacattaaaactcaacaatttagacctgcaaaaaaaaaaaaaaaaaaaaaaaaaaaaaaaaaaaaaaaaaaaaaa

SEQ ID NO: 6929 - DNA, 636 bp, Canis familiaris
ccggaattccccgggattgcgcgctgatgtgtgggggcgggcacggtgtcccaggaggacagagtttgcattgatgaaaacccttcccagccctttgatagctctttcccgccgctctgaagttaactagctcagtcgtcggtgcaccctgctctccagctgcgcaccctcacaggccaggatggcattctgtctggccctacgcatggccctgctgctcctccccggggtcctggcccccgcagtgctcacagccgagggcccgcaggagcccgcgcccaccctgtggaacgagcccgccgagctgccgtcgggagaggaccccgtggagagcaccagccccgcccgggagcccgcggccaccgggcccccggcccccaccgccacgccgagccccgaggacagcaccgcgcgggagcgtctggaccagggcggcggctcgctggggcccggcgccatcgccgccatcgtcatcgccgccctgctggccacctgcgtggtgctggcgctcgtggtcgtcgcgctgagaaagttttccgcctcctgaagcgaataaaggggcggcgcctcggccgcggcgcgactggctgcagccccgggggcgcccccgtgtctcagtgaaaaaaaaaaaaaaaa

SEQ ID NO: 6930 - DNA, 617 bp, Canis familiaris
caatattttgcagaacgcgcaaggacggctgaggcggctaaaccacagcgttgccaaagaaacagcccgcaggagggccatgctggattcaggacttttaccccccctggctccccaagcaagtaaccggcaggaagagggaacccgagctgccctctggcctgccctgtgtcctccggggcacccgcagacctcaggacatggagaaggcagccccggcgggtgttggaagcatttatatcttacccgtgtagagcgggactcaagatcccaaaggattatggctctttcttccaagagtgagctgaggcttctacacattcacttgatcttagccaaaaggccgaaaagcgatgcctctacacattcaaagtccaactcctctgccttcagccctcgttaatgaggcgcttcctgggttgcatgttctctgactagttttcctttatttatagaggatttggagaagagggcaggcaaagtcatgggaatgacttctgcctaccctcgtattgattgcacttggcttgaatatagtggcagtatttctagaaccatttaattaaataaattcttaaacagtgttcttactttaaaaaaaaaaaaaaaaaaaaaaa

SEQ ID NO: 6931 - DNA, 481 bp, Canis familiaris
gactaaatgttcccccagtatatgacatattgattttcagtatgccaatggactgaatcacatatatttttctcaaccagtaactgcacaattatgccaatcacatcttcccaagtatggattgctcccatcaggaaaaaggctatcattggttgttgagttctaggaagaacttaaactgtactgtgtaaacagtaccttacatttctaaaatccccaatgtaagagaaaatatgcagacatacagatatataggtcaacttagtaataatatgaaatatacttaaagagcttttaaaactttgtatttttgtgaccaaatatttgcctttttacaattttttccttttcttccttttttttttttgtcattttaccaatataatacatggagccaaagaaaacaataatggtactaataaaaaaactcctagggttaaaaaaaaaaaaaaaaaaaaaaaaaaaaaaaaaaaaaaaaaaa

SEQ ID NO: 6932 - DNA, 539 bp, Canis familiaris
gggaaaagcagttttacaacaggatgacagtgttttaaaatgtggtcttctattaaacttcacggtttgtttttgtgaacactttctagaagtggtgcaacagtgataactacttcttcacagacttcatgattaagagggattaagtgtaattggcatccttcaaggctttggacaaagtccagcttgtttcctctgatctcaggctgttagaatagagaaccttatctgtcagcagccacctcgctctggacttggttatgcccttgagtaccatgctaaagatcaagctaatataatagctgaaaagtagttaatgctttccttcaattttgaaatgaccgttatccaaatcttatattgccacttcaatgtttagagccttgtgttgaagacattttgggaaaactctcagaaaaacatggaggaatgcctaagtttaagtttctctatcaagaattacttgatttaggagagggtaccttaaattctaaggaatcagcatctatataggttactgtgtaaaaaaaaaaaaaaaa

SEQ ID NO: 6933 - DNA, 495 bp, Canis familiaris
  misc_feature (26)..(26): n comprises a, c, g, or t, or includes no nucleotide
  misc_feature (43)..(43): n comprises a, c, g, or t, or includes no nucleotide
  misc_feature (65)..(65): n comprises a, c, g, or t, or includes no nucleotide
  misc_feature (78)..(78): n comprises a, c, g, or t, or includes no nucleotide
aaagctctgcttggcctgtgaagcangatgtcaacgtgcaggnatgatgacggcttccacggccnctcatgtgcgccntgtgagcacggccacaaggagatcacagggctcctgctggctgtgcccagctgcgacatctcgctcactgatcgcgacgggagcacagctttgatggtggccttggacgccgggcagagtgaaatcgcatccatgctgtactctcgcatgaacatcaagtgctcttttgccccgatgtcagatgacgaaagccctgcgtcatcctctgcggaagagtagccgtgagggagaccagccccagagccaaccgtccctcctcccttgccccttgtctcctccctcgccagcccccacgccgacccaccgacccaccgacccaccgaggcccaagtctcaaaggcaagtggggttttccttccgcttcccaggaggaactgcaacaagactccagcctaaagcgggtttctccttggtacg

SEQ ID NO: 6934 - DNA, 624 bp, Canis familiaris
cacagccttcttgaataaggcaatttttgtgtttcatctggagtatgaatcatttcccactttcttcccctcagccttccgaagtccaagttaaccaggatctccagatggctcacccacgatcaggtctcctttgattgttctaggaggattaattagtcaccaccatgagtaccaagtccaaatcaagaggcaatatggcagaaaaagagagagggagggagatctcgcctgccaatgagaaggcacagaagactacagaaggcacgtggattacacagatggcgttgccattcaggagctcttctcagaaatgccaatgtaggttggaccaggtgtgctgcacagtccaacctgatgattcatggtcctggccgcaccagaaccacctgtggagccttaaaacataccgatgcccaggccttgcctgggacactgatgtaagtggtgcatcagacctgatttcaagatttcttttttttaaagctccctggatgatttcagtgagcacatagtgctgaaaaatgctattgtagtgtctatttgttcaaactgctgtcaagatttacagcttttcccccaagtatttcttatcatctgcccagtcctgtattggtctctaca

SEQ ID NO: 6935 - DNA, 497 bp, Canis familiaris
ggacccggcctcgcagtctggcgaccaccaggctcctcgccagctgtctggtgcctctgtctccccaagtagggtcctcggtgagtggaccccctggggttcctggagtcgctgttccagctcttgtgggcggggcctctctgtgcgtagccggcactgcatctggtttcctggggaggagtcctgctggggagacactccatgagtaccgcctctgccgtctgccggactgtcccctaggagccattcccttccgagacctccaatgtgccctctacaatggccaccctgtcctgggcacccagaggacttaccagtgggtgcccttctacggtgcgcccaaccagtgcgacctcaactgcctggccgaggggcacgccttctaccacagcttcggccgcgtcctggacggcaccccctgcagcccgggcgcccaggggctctgcgtggccggccgctgcctcagcgccggctgtgacggtttgctgggctcgacg

SEQ ID NO: 6936 - DNA, 570 bp, Canis familiaris
  misc_feature (229)..(229): n comprises a, c, g, or t, or includes no nucleotide
gcagaggcctggagaggggtgtcccagaaggcttccccctgcagcctttgggggaggggggagcccaggtgaccagaccagagccaccaacaggagctcggagaacctgacccacactcccagcaggaagccgggggctgtcggccgagagcagagtgcccgggacaggacgtgcgactgagaaggacaggtctgacattggaagctttattgttcaacctcacacaancacagaggacggagggctggacatggaggctgaaggaggcttgtgcacgtgagcttggcagtcctgctcaaaggggcaaaccttcggactgctgtccatctgtccgtccctccagctgcgcccagtggccacactcacctggccccaggcaggcccgggccaccctggctgcagatccacccaagggtctttgacaaacaagggtttacatttctgtaggttgttctggaatttagttttctagatattaaaaccactcagattttgtaagtacctggtgaggtcaccaggtaaattaaaggacttttggaaaaattcaaaaaaaaaaaaaaaaaaaaaaa

SEQ ID NO: 6937 - DNA, 759 bp, Canis familiaris
  misc_feature (368)..(368): n comprises a, c, g, or t, or includes no nucleotide
attgaagatggacgaggttctgtacagcatcgcggagaagagatggcagataatgtgggatcttcctcatcctggtctcgagcccatgtcttggataccccacgctgattcttaaagttaaaatattttgcagttcatgttatctttttggattagttaacagaaacgtgcctgaccttcgcaccaaactgtatgaattgtatcgaatccagtccgactctgatcagttgcatgtttctgtcaggcaagcgaagcgaccgactacatgcacttgaattgagcggtgagctggctgactaactacaagccaatgaatctagggtggcacggtaggaacgaccaacgcaggcatgataaagtacaatcantcagtcgagagcttgttgtctacgccaggcggcggccgcagagaaggacgccgccgggccgctggtttgttttcctccacacaggatagtatctcccgcgagatcacagagatcagagcgtcacacgcgactgctcccgcgcgacacagaaatgtggtcgacagatattgttttcacagtggaaatattgtgaaactatttaaacccttagagaaagcgtttggaagtgaattcaaagctccaaggacttggagggtctttgtagtaagggttgcatggcatcaactctttgcctgtctggccattgtatttttatattagcaaatatttgtaaatacctagctgacacgaataaagtacacagtgatggaaagtcaaaaaaaaaaaaaaa

SEQ ID NO: 6938 - DNA, 642 bp, Canis familiaris
tgcgcggtggtagctgctacggcgctgaagggccggggggcgagaaatgcccgcgtcctccgggggattctttcaggagccacagctaacaaagcctcccagagcaggacccgggcactgcaaagccacagctctccagagtgcaaggaggagcctgagcccctatcccctgagctggaatacatccccagaaagaggggcaagaaccccatgaaagctgtgggactagcctgggccatcggcttcccctgtggtatcctcctcttcatcctcaccaagcgggaagtggacaaggaccgtttgaagcagatgaaggctcggcagaacatgcgggcatccaacacgggcgagtatgagagccagagattcagggcctcctcccagcatgccccatctcctgaagctgggcggggagtgcaggcctgaggaacactgcagccctcccctagactgttgactgtggcctccagactgtgaagccctttgggtttggccggattctggtccttgcctgtgaggtccaccagagggcgcatgaagcccaggccgctgccggcccctgccctgccctgccccttcccagaagccagccaaaggcaaataaagtcatcgagtgtttcaagcagaaaaaaaaaaaaaaaa

SEQ ID NO: 6939 - DNA, 472 bp, Canis familiaris
cactgacacccccaccacgttgccagccacggtccacgtgcagtgtcagctggtctgacaggtgagactccaccagggaacaacgcggggacaacaagaggaaacgtagccaccagcttctgcgccatcagggaccccaggacgctgagggacccggacacggtataagccattcagggctgccacatcccggagccggccccgctcctcctcgttgagctgccgctgcgacagggacaaagtgccatcctgctggttccagagcagggagccccgcttccgaaagtgagcactgtcatcgatctcgaatgagtgctccagcagcagccccacggtgccgcagccctcactctctcgaccttctgctcctgcccctcgcagagcggccccggaccggcagccactgccccgagcccggctgggggctgctgccgccatcagcaagagcaggaacagccgagtaaccacagca

SEQ ID NO: 6940 - DNA, 571 bp, Canis familiaris
  misc_feature (64)..(64): n comprises a, c, g, or t, or includes no nucleotide
gctaaaatgtggtgattcttatggggaaaacttatagcatcaggtatggattgaatatccttanaaggtgggttagctttaaaatctattttttgaactctgttcttgggtcgtcttggccacggcccctcccctagagggacttgcgctagcccctgggtccagacgctggtgggtgaggacggacatgctcctgcaggtgcagctggcagagggttttgcatgtgtgctttctggcctgtgtttcaagggctgctctcatctgttagtttggttttcctttattccattgtgccactttgttttctttctctcccaccttttctcctcatgcagataagtttctttgcttcactcctcctgagaccccttcatcaagctggctgtcccacctctctgagctctgcaggtggctgtatgttccccagctgccctggctcgctcttttagcaccctgcccaagagccaggcacaccgctttccattgtacagaagctcctcatttcagtgtcaaataaacactgcataagctcaaaaaaaaaaaaaaaaaaaaaaaaaaaaaaaaaaaaaa

SEQ ID NO: 6941 - DNA, 609 bp, Canis familiaris
  misc_feature (164)..(164): n comprises a, c, g, or t, or includes no nucleotide
tacaatacaagccaggccaaagcgcacctgcctcgtggatggcaaaaagctgcgcattggtgaatacaaggcaatcatgcggaacaggcggcaggaaatgcgacaatacttcaatgttgggcaacaagcacagatccccatcgccactgctggtgttgtgtacnctggagccatcgccatggccggaatgccctcccctcacctgccctcggagcactcaagcgtgtccagcagcccggagcctgggatgcctgttatccagagcacttatggtgtgaaaggagaggaaccacatatcaaagaggagatacaggctgaggacatcaatggagaaatttatgatgagttcgatgaggaagaggatgatccagatgtagattatgggagtgacagtgaaaaccatattgcaggacaagccaactgataagggccaaaagattgttatgaccttaggacttaaagaagccctagctggttcatccttaccagtggccaagcacattaactttctcatacactgactgttactttaactgttagtcttaaatagttgggacatcagctgactaatagacctcagcctcaaaaggcttggaaaggaaaaaaaaa

SEQ ID NO: 6942 - DNA, 558 bp, Canis familiaris
aagacaagtggactgggccctattcaggcaagatgaaaaaaaaaatgtgagcaaaatggcttaagagaaagtattttcgaggaagacagattaaaacaaccgttacaaatgagactacgtttggacttccttttatttacacttaagcctagaatttctcttttggtatatcaacagttaaatccaagactattttttattgctgaagattcttgcaaaccatgaagagacgttctcacagaacagaaccccacagctggataaggcccgtatatatatttgtaagccttgcaatgtgacaggtagcatcactatatatgcaatagttgttatgtagactgtcaaagatttttttttcctggatacatttgaagctttgagtgttcaaggttttccttaatgatttcacacagccaaattcttgaatcagttgaactaacctgtatgttactgttattaatgtttactctgcggtctgaacctggagattactggaattgttttccaagaggaaataaattcagtttaccattaaaaaaaaaaaaaaaaaaaaaaaaa

SEQ ID NO: 6943 - DNA, 699 bp, Canis familiaris
  misc_feature (204)..(204): n comprises a, c, g, or t, or includes no nucleotide
ggcccatgtgtgaaccaaggatgaaagatggacttgggaaacgggccttgcggggagacttcaggaggaagcaggcattagcagcagggccagctgaccatcattgaggggttcagaagaggagcctcaattaaagtggccaagggaacacagccgttaaatatgtcaatcgtactgggctgggcctgaaggtgtaaagggacntatccgaatttgtgaagaatcagccgtcttctccacatgaggccacccaagccctatcccgcctggcctggggcctaagaattaaggcccttcccaagttggcctccaagtttcaaaggaaaatggaaagccaagttgccttcccaagaaagaaccaacccagttttctctgctcccaccaagcatcctgagctgaccagaggagagtcatttacttcagtaggatccttgagggccttctgagatgaatactgtcagctccagggaaggttgtgttggtttttcgctcatcatggcaaagagcagataggatagtaaaatcagctgagaattctaagaggaaaggaaggtctcatcagagtgaaaaggaagacaaatgagttttaaaaaagagaaaagtctaggcatggtaagtgcgtccttgtactttataaataaacttcaggcagcttgtctgtccatctaaaaaaaaaaaaaaaaaaaaaaaaaaaaaaa

SEQ ID NO: 6944 - DNA, 616 bp, Canis familiaris
ggatggccagagcggtcagtgacgcagcggaaagtggccggctgcacactcgccagtagggcacaggggcttattgaagaggctgatgccgttgtagtaggcccgcttgaccccgaagcccacagggcagaagtcgttgacgcccaccttggtgatgttgttggtgtgcaggtacaccacctgcaggagcttgaggtccggaaggccggaagggggcttacagtactgggaacacaaggctttagtcactactgttaagaaaggtcttctaaaaagttaaaaaaaaaaattcttaagagttctgaggcataagtgcctgtgactcattcctgagagttattagtgccatttcactgtaagcaagaaagacctggaaaatggaggggagcccttcgttgagaatggggtgtatttaaacttgtcatgcacagtcaggcgctatactctgtagctgttagggtgtgaggatgctgggggccaagcctggtgtacagaggtagttccagatctgtagatggggacagccaaggggtcacaggctctacccttgtgctatcccctgtaattctgtgatccaaacctaataaattatttttaaagaaaaaaaaaaaaaaaa

SEQ ID NO: 6945 - DNA, 642 bp, Canis familiaris
tacttgccgctatgttgttctcaataaagcgcaaaaatgtaccggagagaaccagcatttttgagagaatgcttaggggaaaccacttttgggggactccctgaggggggcttcactcccagtggggaagggccggccaacacacaggaactgcatggcttctgagagaggcagatggagatgtttctgggtgatctgtttcatctggatgagtctcctctccagggaccctggatcaacttccatggaatcctgcgcctgactttagtctaagcccaaaggctttccctccaggtgaaagaaaggccgggattgctgtcaggagtcaaactcccacacctgggcgctgtggtgatggcgcacatttcttgtaagtgcttactgtaatggcagtgacaatcagggcgtgaggtgcaaatggacaacactttgtgagttcagctgagtcggcctcagaagtagaaaggggggcgcttggggggctcagcggctgagcggctgcctttggctcaggacatgatcccagggtccaggattaagtcccgcattgggctccctgcatggagcctgtgtcatcctctgcctgtgcctctctctgtgtctctcatgaataaagaaataaaatctttaaaaaaaaaaaaa

SEQ ID NO: 6946 - DNA, 582 bp, Canis familiaris
gcgagtcctctccctgactcttccccattccctccccagcttcagcagccactacacatcactgtcatttggatgttttggtaactcaagggccttgaaatggatttgaacctttgctttcactcggagcacctgtgtgcactggtaggcctaggggatagtatctctcaggtgccttgagagttaccatttctgtccatcttgatcttacgagactccctcccaaccagatccaacagctaggatcaagagtttacccgttggggtgagatgggtgtctgcacctggctttgggaccacattaccctctggcaccccagcaccactgggagcctcaggagggataccagatttccactcctacccctttcattcccacatcacagagaacaatagtatttcccctctgtctctccctgacatcggggagagcagactgtacacatttatttcactagggtccaaatacggaaggggccagcctaggggtatgcagctccctgatgggtctgtctggccatgtttctggtgaataaatttctgttgacagctcaaaaaaaaaaaaaaaaaaaaaaaaaaaaa

SEQ ID NO: 6947 - DNA, 623 bp, Canis familiaris
  misc_feature (326)..(326): n comprises a, c, g, or t, or includes no nucleotide
ccttaagagcaaatgatttatgccagctccaaggatgccatcaagtaaagctgactgggatcaagcatgagttacaagcaaactgctacgaggaggtcaaggaccgctgcacctggcagagaaactggggggcagtgccgtcatctctctggagggcaagcctttgtgagccccctccagccccctgcctggagcatctggcagccccagacctgcccatgggggttgcaggctgcccccttcctgccagaccggaggggctggggggatcccagcagggggagggcaatcccttcaccccagttgccaaacagccccctcacccnctggaccttcctcctccctctatccctgacggttctggctttcccaaaccgcttttgatcttctgattcctcttgggttgaagcagaccaagttccccccaggcaccccagtttggggggggcctgtattttttttaacgacaccccagttcctcacctgttcctcccttttcccatgctgccaacttctaaccgcaatagtgactctgtgcttgtctgtttagttctgtgtataaatggaatgttgtggagatgaaaaaaaaaaaaaaaaaaaaaaaaaaaaaaaaaaaaaaaaaa

SEQ ID NO: 6948 - DNA, 607 bp, Canis familiaris
ctgggctagcaatgtttacagaacagcctgccctgcctagccctgctcacctgcctcagtggccccagccccagctcggacctaccccatgccctgggggcgaccccgaacattctccctggacgctgtccccccagaccactcccctagggcttcccacgcggttgcccctctcccccagcagcgatccccaaggtccagaggcctcttcagcaaaggcccaccccgcacttggctccagtcaccagtatgagacagaaaggtgcttgcaacaggatctggccagaggaagagaggacctacgtgcagttgggctctggatgcggcgctgtcagtagcaggttggccagcttggcctccccttcctctgctggactgggggagcagaagcccctcttcagctgtggttgccaaggtgctgaggggctcattcctgggactggctgggaccccccttaaacccttcctgggagaaaaactggaaccaatcctgccctacctccctgcactaaccagctttgaggatggcactgaagagccttgggagtcacctcccttgtgactctcacaacaaccattaaaagttatttaacggcaaaaaaaaaaa

SEQ ID NO: 6949 - DNA, 581 bp, Canis familiaris
gtggtctagatataaagtaaaatccattatgcgatgcttataaagttatttttgcgtagtccttgataatcaccaccaatctaattctcacagaggttttcttttacattcttatataaacaaaccaacctagatctgacagcatgttgagtactggaccatagatggaatgacatgcttttcaacctagagcttctaaagtacctcttaaaatgcctcagtcttctttaaaacagtctgtggaattgctgttcttatacttgtttattgcaacatttcattctgttgcataccttcacataagattaagtaccatgtaagaaaaaaaaactggcatgtgactactttctacatcctgtttttcaagtcaagaatggtcagaaaaaggtaatcactcatatttttttggcttgtccagtttttacttattgttaaataactcaaagagttgcaaattgtacaatatttgtgaagaaatagaccacacatatctcagagtaaactttattacttttccagaaaatatattcagtaaatacagtaatgcatcaataaacgtggcctcataaaaaaaaaaaaaa

SEQ ID NO: 6950 - DNA, 533 bp, Canis familiaris
tctgctgtaattagaatgccagtcggagcttacactcaattgccaggaagatctgtgaaccccctggggggctactattccatgggccttataagttatcaaggttgccgatcagcctgtcagagttgtcatgcccttgtagcttggtgggtggcccgcatcttgggtatggtgtgaaagctcagttcgtatacccggtgcttgtatcattaaactcaagagacaaccagagtatgaggcatcttgatgctgaagggaccacaaagtattttatactcaatttcagcgatgctattcaagatacttttaacagctctcaattgctttacagaacttcatccagaatgtgcaaatgtactgaaagggtagtttaagtctaaaatgccctaacaatccctttattactggctatttttaatttgctttgctttgccaataaggcctacttacaagactaactttccaagctactttgaaataaacatgaaaaaatcaaaaaaaaaaaaaaaaaaaaaaaaaaaaaaaaaaaaaaa

SEQ ID NO: 6951 - DNA, 617 bp, Canis familiaris
gacggataacaatttcacacaggaaacagctatgaccattaggcctatttaggtgacactatagaacaagttttgtacaaaaaagcaggctggtaccggtccggaattcccgggatggccgcccttttttttttttttaaatttttattttatttatggtagtcagagagagagagaggcagagacataggcagagtgagaagcaggctccatgcaccgggagcccaacgtgggattcgatcccgggtatccaggatcgcgcccctgggccaaaggcaggcgctaaaccgctgcaccacccagggatccccagcagatccttttaaaagaaaaaaaaaatcacttctgttaagtacatatatataaatcctaataaaaaaggtaacaaatgtacctgaggcaaattcactgccaagaaccacctaaaaaaataaggatatttaggggctcattcagttaagtgtctaattcttgaatttggctcaggtcacgatctcagggtcatgagattgagcctggaggtggactctgtgctggatgtagagcctgattgggattctctccattcccctcatgtgcactctctctcttcccacccattctatatatatataaaa

SEQ ID NO: 6952 - DNA, 662 bp, Canis familiaris
tgtggtttggtccagtctgtgagtgcgatccccgaggtcagtccgtgtgcactgaatcatgttttgcaaaaggagaaaatgacatccgagatggaaaggcatagcaagaccaatgtctaaatactctttttcaattgtttctacggggattggctggcaatggtcaaggtaaacgggttgttaatgaatctccagatgatacaggcatgctttatttttatttttatttttattttagattactagggagtggaggagacccggggctggtagagggggccggatttgttgttgttctctgccggatatctatcgccaggtaaaacttcccttggaatcggaaggcgagaccaacagagtatttgatagtctcccgatattgtgacttcaacccttgccaataacccgagcttaaaaggggaattaattctccaattaaaggccctgggaacccaaccttggtaatttgtgggccttttaaaaatgttcagtgttcggcgtgtgcaatggtgcgcatttaaactctggatcaatgagtgggctttggaacagaatggggaaaaagagagagcccagatctcagtaatacaaggcaccttccagaaccgtgtgatttcttaggtgcaggaaaaaaaaaaaaaaaaagaaaagaaaaagaaaag

SEQ ID NO: 6953 - DNA, 392 bp, Canis familiaris
  misc_feature (40)..(41): n comprises a, c, g, or t, or includes no nucleotide
  misc_feature (43)..(43): n comprises a, c, g, or t, or includes no nucleotide
  misc_feature (65)..(66): n comprises a, c, g, or t, or includes no nucleotide
gagattgcttcaaggcaaaggcaccaaacttaggcagctnngnctgaggaaattcgaagttcaannggtgaagctgtctcaaacattcaagaaaacacacagactccaactgtacaagaggagagtgaagaagaagaggttgatgaaacgggtgtagaggttaaggacatagaattggtcatgtcacaagcaaatgtgtcaagagcaaaggcagttcgagccctgaagaacaacagtaatgatattgtaaatgctattatggaattaacaatgtaaccgtatgaaaacgaggactttttttggtgtttcaaaagaataactgcagcttggtttgaaatttgtactgtttctatcattaataaagttatggcttcttgttggatgaaaaaaaa

SEQ ID NO: 6954 - DNA, 510 bp, Canis familiaris
cttagaccaaggacactgaggacagcaacacctggaagcgtgacccctttcaggagagcggcctccacctgagccccacggcggccgaagccaaggagaaggcgagagccacccgggtcaacaagcgggcgccacagatggactggaaccggaagcgcgagatcttcagcaacttctgagcccctccctgcctgtttgccggtgacccggcctcccccgctcggccccgggcccagcccgcaggtctcccaagccttggtgtggccacgaagggagccttcttaaccccggaacccggggtgggtcccagcaccaccaggagccagcgggcgcccccgggagccccgtcctgcaccccccacctgcagggtgctggatgggggagagggggccccgaggctagagagggacagggagaggcagtggtgactgtgggctcggcccttgccgctctgcccaggctgctgacttaaaggaatttgtgtttttgcttttcttccaaaaacaaga

SEQ ID NO: 6955 - DNA, 354 bp, Canis familiaris
  misc_feature (53)..(53): n comprises a, c, g, or t, or includes no nucleotide
accttgaaacctttgggcctttgggggaaaaaaaggccccctggacctcctcnttggctgaaattgacctccccacaactggatggagctctggggctgtcgctggagattggggagaaccgcctggtgatggggggcccccagcagctttaccatctcgatgcctatattcccctgcggatcaactctgaggagagcaaggcagccttccataggaagaggaagcaattgatggtggccatgcctcttctgtcggtgccttcttgactgtgtttctttccgtgcttccacgtggagaagaggctggcagtggcttctctaaagttgaaataaaagattttgccctttgaaaaa

SEQ ID NO: 6956 - DNA, 603 bp, Canis familiaris
ctgcaggtggaactagaagggcccaggtgatacgtgtcggctagaagaagttctttggaagaagcctggagcgcttaaagcaggctggagaccctggctgccatttggagtggggaactggaaagtgtgcgagttcgtcacaaagcatgccttctgagcactgcagcccaggatggaaaaccttgtttgcactaacctgagagccctgtctgactctggcagaattcaatggtgacttgctaatggtagaacgattacaagtagcatcaactacaaagtgaaactcaccttagtctacctgtatggcactgtacatatctatctctgagttaaatggtggaggttacaaagtatatgtgcaccttttaaatcattccatttcagctttctcacccatactcactcttttccctggcccctccttgttccctcatctctttccatgggccaataaagtttattcctctcctgctctcactgtccatttcatatgttccagatcatgtcataaatgcatgcgtgtgtatttttgccatcagtcaactcctgctctatgagtgagaaaatttttttaatcaaataaattcaagatgaaagagagag

SEQ ID NO: 6957 - DNA, 564 bp, Canis familiaris
tttgtgatgatggccactcattagactagtttaattttctatacccacgatcatgttttctgtgtgttggtattaatatggtatgtgcttcagtggtggtaaacttggaattcccaatctttgctatcctaattgagaggctgattaagtagagtgtgtgtttgtgtgtgtgtgtgtgtgtgtgtgtgtgtgtgatgtatttattacattattttgaaagataatagtctgttatgtggatgtatattaggtacagccaaattggatgtttccatttggcaaggaaggtaggatttctgaaactcaggccttaaccagtagtttggaagacaagaccaattgaagcgttatgaaatatgtgtttttgtcgcttctgtcctatctgtcttgggtttattgtcttattctttaatgacttttaaaatcttgtgcctaaaagtttattttgcataattatgaagtagatgtgcatgtttacatttatgtaaaatatttgctgtgtaaagtttttttggtttattctcttaaagatcactatatttaagtaaaaaaaaaaaaaggtca

SEQ ID NO: 6958 - DNA, 166 bp, Canis familiaris
  misc_feature (1)..(1): n comprises a, c, g, or t, or includes no nucleotide
ngcttgggaaagttaacccagggccaggttaaaccagccccacccctggaggagaagaggaaggaaaaggccaagatccattatcggaagaagaaacagcttatgaggctacggaaacaggccgaaaagaatgtggagaagaaaattgacaaatacacagaggtcc

SEQ ID NO: 6959 - DNA, 415 bp, Canis familiaris
  misc_feature (1)..(1): n comprises a, c, g, or t, or includes no nucleotide
  misc_feature (157)..(157): n comprises a, c, g, or t, or includes no nucleotide
  misc_feature (247)..(247): n comprises a, c, g, or t, or includes no nucleotide
nttccccctggtatttgtcttgccaggatggttaggtacacaaggacgcttattagatcactgagaagaaaaagcccaacccgcttctctggtatgaacatctagtttgagagcaagccaaacagtaggcttgtattagtgctttaatggagtaccntggtaacattgtttcttttcttgatatggaatcttgcttatatttagcgcaggctctctatttcataccctctcccactaccaactttcncgtgcagttacctttcactttttaaagcaatttcactgctaaatataaattgtatttgtggggttcatagttatataatgctgaagggaaccactctttcgttgaaaggtgataaaagttaaataaagactgtctccacagtaagaaaaaaaaaaaaaaaaaaaaaaa

SEQ ID NO: 6960 - DNA, 561 bp, Canis familiaris
gaactcctgccagtgcctcgaccctctgccccggcttcccatccacgagtgcctctcctggtgccgccgccaccaccgaacctccagagccacggttttctagtcatcccacctctgtttacgctctgcgcgggtctccgctgtgtgtcaatctgtgacgttgacaagctgaatgttcatggggcggccatccagaggacgccgttgtactgtttcatagcttttagggcatctgccttccgttcaaagtgcacatcggctgttcctaaactgcgcccggagcggtcatagtgtacagctgccttcttcagagttccgaattcagcaaagagttcctgaatatccgcgtccgacactccgaaatccaggttggacaccagcagtttcccacccgtctccacgccggcgccgcccccgaagccgctgtcgaagaggtcgtgctgccacttgtcgggaagttgtttcggcctgctgtagggcgccggccggttcctgccgccgccgcccgccgcgccgcgggcgagggccggtcggttccggatgggcccgccgccccggcta

SEQ ID NO: 6961 - DNA, 594 bp, Canis familiaris
tttgggctatggaactttcaggtgattctggtcacataatctgcacctgatcctgaaggagaaggagccttaaggatgtatggctgcagctgtaaaagatcgcacggtgtacaacctgaagagatatcctatgtcaacgcacatgcgacttccaccccattgggaagatgctgtctgaaaaccaagctatccaacatcttgttcaaagaccatgcacctgcccttgcagtttcgtcaaccaagggagccacacggacatctgcttgggaactgtcaggggcggttgaggcagcttttacagctctggcttgttattatcccgaaactaccacctactgtaaacctggattgtacagaaccagcatttgatctcaattatgttccactaaaggcacaggaatggaaaattgagaagaagatgtattggactcaccaattcctttggttttggcggtactaactgcaacactttgtattgctggcatgtaggacaaatcatttgtaattaaacacttgatttcttaaaatgttatagactatattaagcagagaaataaaatgtttatataaatataaaaaaaaaaaaaaaaaaaa

SEQ ID NO: 6962 - DNA, 478 bp, Canis familiaris
gcgcataaggcttttgtgggtcgtttggcttcgacaagggggctcccctgggggagcaagatgggtcctctcaagcccacttctctcggtgttaagatgtagatgtctacacgggaaaaatgtttctagatatccacagatgtgatatatcgcgacccccacatattgtgaagagaacagaggttagagacgcgccgcggaaccacatgttagaggtgtgggaatccccggatttggctgttcggacccggagtgtaaagatgtccaggcagagagagaaggctttgtgagcacgttagtgacccatagaagcctgtggtggaagcacaggctatagttgcaggttaaccaattagttgctaccttagagtcacatatattcagaatgataaaacaagccagaggatggctcctgactgagaattgagcaaatggaagaaaacacagtattccttagatcagaatcattaaaaaaaaa

SEQ ID NO: 6963 - DNA, 461 bp, Canis familiaris
agtttagaaccctgcccatctgtgcttaattgagaccagatgagctgaggagcaggacacattttgttttagccctatgtgtgtgtctgggagttcctcaggcctgcatgaatgtggccccctgctgctcacctgccttgggtaccggcactgcacctacacgccagaggtcaggggttcaggaatgtcaccaagtccatcccctggctgtaactgaggttgtcctcttactcccaggtgaaaatccctggctgtcgaggctcctttggccacttcacgtgggagccgcacagacgcttgtcaatctgggacacactgagtgtgagaaaacccgctgaccttagagatgtgatgttgcaaagggtgatagtgacccaggtttggtgatggagggaaagacacccatgtatgggtgtctgtggtggtgatggggtatatttttataacttagtaaaaaaaaa

SEQ ID NO: 6964 - DNA, 630 bp, Canis familiaris
agaacaacacccagtgctcatcccgtcaagtgtccacctcaatgcccgtcacccagtcaccccaaccccgcccacctccccttccaccacccctagttcgtgtcccagagttaggagtctttcatgttctgtctccctttctgatacttgcccactcattttttctccttttccctgttattccctttcactattttttatattccccaaatgaatgagaccacataatgtttgtccttctccaattgtaaagtccttaaaattaaagcccagaaaccagttactctggaattatcccatttattttatgctgttatcaggcagctccatagttgctaatttaatcagtaaattgatttactattcattaactggggaactatattctgagggacctgtcaggaactagggagtttaaaaatatgtaaaataatggcctttatcctctgaagaattcagtctagtatgcatatctttccctgaatcatgtctttgatttggctcttctccctccaaagaatcatactcaccttaagggattacaggtgcatttgacattacatgatggataaacgatacgttgtaaaggaaattttatgcctcttcacattaaaaaatgtatttacattg

SEQ ID NO: 6965 - DNA, 596 bp, Canis familiaris
taggcctatttaggtgacactatagaacaagtttgtaccaaaaaagcaggctggtaccggtccggaattcccgggatcgctgccccacggtgaggtaccacacgaaggtgcgggccggcaggggcttcagcctggaggagctccgggtggccggcattcacaagaaggtggcgcggaccattggcatctcggtggacccgcggcggcggaacaagtccacggagtccctgcaggccaacgtgcagcggctcaaggaataccgctccaagctcatcctcttccccaggaagccttcagcccccaagaagggcgacagctcagctgaagaactcaaactggcaacacagctgacaggaccagtcatgcccatacggaatgtctacaagaaggagaaggccagagtcatcacagaagaggagaagaacttcaaggcatttgccagcctccgcatggcccgtgccaatgcccggctttttggcatcagggcaaaaagggccaaggaagctgcagaacaggatgttgaaaagaaaaaataaagtgctattggcaactcctaaaaaaaaaaaaaaaaaaaaaaaaaaaaaaaaaaaaaaaaa

SEQ ID NO: 6966 - DNA, 603 bp, Canis familiaris
  misc_feature (1)..(1): n comprises a, c, g, or t, or includes no nucleotide
  misc_feature (148)..(148): n comprises a, c, g, or t, or includes no nucleotide
  misc_feature (159)..(159): n comprises a, c, g, or t, or includes no nucleotide
  misc_feature (181)..(181): n comprises a, c, g, or t, or includes no nucleotide
nccatgacatttcttggcaggactacattccagtgaaggagaagtatgccaagtacctgccccacagtgcaggccgctatgcagccaagcgcttccgtaaggcacagtgccccattgtggagcgcctgaccaactcaatgatgatgcnatggccgtaancaatggcaagaagctcatgacntgtgcgcattgtctaagcatgccttcgagatcatccatctgctcactggtgagaaccccctgcaggtcctggtgaatagccattattaaccagtggtcccccgggaagactccaacccgccattgggcggagctgggaaccagtggaggcgttcaaggcttgtcgatgtgtcccccctacgccgtgtgaatcaggccatttggctgctgtgcacaggtgcccgtgaggccgccttccggaacatcaagactattgctgagtgcctagcagatgagctcatcaatgcagccaagggctcttccaattcctatgctatcaagaagaaggatgagctggaacgtgtggccaagtctaaccgttgatcacctggctgtggcttcaataaacctgtctgcccttggggcagcctcaaaaaaaaaaaa

SEQ ID NO: 6967 - DNA, 545 bp, Canis familiaris
gtttgtacaataaagcaggctggtaccggtccggaattcccgggatcttggggcctgccagcagctagagcctggggaagagaccctggtgaccaggggccacggggtagcccggcctgggcggcacactgggctgcggcagtgcttgtcaccagctggctgcctcggcttctcttaccgtgtctttgtcctaaggtctcagcaattacagaactctctcccctccttcctttccccctgccacctctgcttctgaaataagaaccatttgtgtgacaccaatacttaacttaagaaagacatgcattatgtggttgtaatcaaacctgatgctttcagatgacctacttacatcttcaatgtggaaaagattaagaacaaaacaaaatcatctaaacttctgggccatccagttgacttttaaaacataagaatggaattccaaacacttaacacattcagctatatgacagaaagtaaatctatggatatggtattttgtgaatgatcttttaaataaaagaaaaccttacgtaataaaaaaa

SEQ ID NO: 6968 - DNA, 604 bp, Canis familiaris
tacgtttaccctgccgtaccctgggctctgtgtaacacagactctcctttgcgctacgtggacattgccatcccgtggcgaacaacaagggagctcactcagtgggttttaatagtggtggatgctaggcccgggaagtcctgcgcatgcgtggcaccatttgcccgtgagcacccatgggaagtcatgcctgatctctacttctatcagagatcctgttagagattgaaacaggaagaacaggctgctgctgtaaaaggctgtaactaaggaggaatttcagggtgaatggacggctccagctcctgagttcactgctactcagcctgaagttgcagactggtctgaaggcgtgcaggtgccctctgtgcctattcagcagttccctactgaagactggagcgctcagccagccactgaagattggtctgcagctcccactgctcaggccactgaatgggtaggaacaaccacctgagtggtccttaagctgctcttccacagaagggacagaatggaaataaggttgacgggaaataaacagtttctaaaaaaaaaaaaaaaaaaaaaaaaaaaaaaaaaaaaaaaaaaaaaaaaaataaaa

SEQ ID NO: 6969 - DNA, 524 bp, Canis familiaris
aattgttttcagtgtgcttcagtcgtgcggattaatattgaagatgggaactagagcagttatgttatgaatttgttcgatgttattcttattagaccgatcaacttcttgaatgtgattccaagttgcgtattataatagtcttcgaaatattatttgtaccggcacctgcccactgatactaagttctgttcttttcgaaatgatagtcacacattatttgaccttgcctaattcctaaataacatatgggtggattgttactaacagtgcttgttttaaaagtcatacttattaaactatcaaacatttttttccactaaggtattttctcccaggtagcttgatatagcagtaaaatttgaaagttacaaattgaactttgtatctaatttaagtaatatatgtaagacttgaaaataaatgttttatttcttatatgaagtgttaaattaactgataccagatttcactggaacattttcaactgataatttatcacaaaagagcatacttgtaatact

SEQ ID NO: 6970 - DNA, 635 bp, Canis familiaris
  misc_feature (22)..(22): n comprises a, c, g, or t, or includes no nucleotide
cttcatcatgtacatggcagcnaatactatgctccatcttccctaactatgatgggtgttgtatgatggccttggcggccccattcaggcatcttatggccattgtcagccactttgcaagatgtctatgaaaagttcaaagccaggaagtgttcttctagaggttttggtgtattctcaacttgggaaaccctcactgggggttttggcacttgggctcgtgttataaaagtgccacgtcaatggggacttctgtcctaacaacacaggcatcacgactcggttaagcctctcacttgaagagcccccctcgatagaaggaattggaagtttcaagttggttggaaggaacttgcctttttggggaacctggaggaaaggagcaaccttgctgccccaaggtaggctctttcccagcacactaactctcagtgttagcacttatgctgaagagaaccccaagctctctttactccttggtgaggagaccaatcccagaaagacaacatatgttatcactgcaaacacaaagaaactatatcacagcccttgactgaaaataatgtagaaaactttatttatgtttccagtacagagcaaaacaacaaataaaactgtaactctatgtaaaaaaa

SEQ ID NO: 6971 - DNA, 426 bp, Canis familiaris
cctgccccctttgtggcccaaactatacctcttccttaccgtttacaccttaccctgtaatggttgggaccaggccaatcccttctccacttactgtaatggttggaactaaacatgtcaccaaggtgacttctccttggctgagaggtggaaggggtgggatttgcctatgggccccctcagtccccagtgagggcaggagaaagaagccgtcctcctctcccatctcgctccatgaggccaagggctgagagaaaagccctgtcctcccctcagaggccaggggtgctgctctctcccatggtgccaacgcctgtgtgtgttgtgtatgtgagcaatcccacatgtggggggaaataaacacctggcactgagccctggggtttgtccttcttcaaaaaaaaaaaaaaaaaaaaaaaaaaaaaa

SEQ ID NO: 6972 - DNA, 599 bp, Canis familiaris
tatcaagctatgggatacctgggtgtatgcaagtacaccgtacaggaacgaggagccattccagagtgggttccttggtgtcccgattttccaccctaattagcagccaatccccatccattgtctccctgtgggtttggaacaaagtttggttccaagggttatgggaaccctggcaaactgcaagttgaagaccaatccaaccatcggcccacacgggctacttggacaccgtgaccgtctctcccggatggatctctctgtgcttctggagggaagggatggccaagccatgctgtgggatctcaatgaaggcaagcaccttttatacacttgatggtggagacatcatcaatgccctatgcttcagtcctaaccgatactggctatgtgctgccacgggccccagcatcaagatctgggacttggaaggcaagatcattgtagatgaactaaagcaagaagttatcagtaccagcagcaaggcagagccaccccagtgtacctctctggcctggtctgctgatggccagactctgtttgctggctacaccgacaacctggtgcgtgtgtggcaggtgaccatcggcacccgctag

SEQ ID NO: 6973 - DNA, 372 bp, Canis familiaris
aggctccatgcagaggaagcctgatgtgggactcgatcccgggactccaggatcatgccctgagccaaaggcagacactcaaccactcaggcacccaggcgtcccaatatagttgaatcttgaactttttggaaataaccacttctccctcactttttgtcattaaattttaaattctcatttgtttctgtctgtgacatttggactgttgagtcccactaatatatattttctgcatcttaacaacttaaatacttgaggcttatctatgtgttttatatttcattttcaagtttatcacacacactgcttccatttcagactctatggcatatgtattagtctgtgttctcccaggggaaaaaaaaaaaa

SEQ ID NO: 6974 - DNA, 635 bp, Canis familiaris
attttgtgccccgagcatcgaaagaagatgcaccctgtgctgccgagatagccggggtgacgattttgcagctgccagcaaaggcaggggtcaggcctctgttacacctgattctccggcatgaactcccaaatgcctccctggatctgtcagactcggctgagacgtggggtagtcctcctgcctaatcatccccaaggagagagggggacagctggccacctttgcattggagggaaaaggctggcacagcaaggagacctacacatacatttctggtagtggctggacagagagggcctggaccccaacttctcaggaagacaagaccccctccttggatcatgcggcctgacatctctccagtagcctcccacaagcagtcaccagaatagaaaaagctgaaaccacacccaccaacattaaagatggggcccaggatgttggggtgaggctgtggggtgaaggtgaaaggtggtggtgtgggcaaaagagaccaggtatggggaggtcagggtcaaaggatgccagaaagtgcatggctgtgctacagacccacccaggaaaagggtggccatgaagactaacaaataaatatatggcaaagtctcaaaaaaaaaaaaaaaaaaaaaaaa

SEQ ID NO: 6975 - DNA, 661 bp, Canis familiaris
  misc_feature (1)..(1): n comprises a, c, g, or t, or includes no nucleotide
ntaccaagacagctccagcttctacgtggttatgtgaaacagatggacagacatactgtcaggcgaatcccttcagtccgtagctggaacccgcattcagctcaagtctgtgaagtcctccacaggccccggggagcagctgcggaatgcactctggcacacagggacacagcatcacaggtgcggctgctgtggaaggacccccgcaacgtggcttggaaggacaagacatcctaccgctggttcctgcagcatcggccccaagtgggctacatcagagtgcggttctacgagggtcctgagctggtggccgacagcaacgtggtcctggacacaaccatgcggggtgtccgcctgggggtcttttgcttctcccaagagaacatcatctggcccaatctgcgctaccggtgcaaatgacaccataccagagtactacgagactcagaggcttctgcaggcctaggatgggggtggggacccattgctggaagatggcaacacagcatttcggtggggctatcccgtttgttgctcactgcacaaccaacactcacagggagcttggcacccggctccaagaggtagctgccctagaggggctcagaaatggacacaaaataaagtgtgtgtggtggaaaaaaaaaaataaaaaaaaaaa

SEQ ID NO: 6976 - DNA, 564 bp, Canis familiaris
ctccatgagagcctgcttctccctctccctctgtctgcctgccatccccctgcgtatgctctctgtccaaatgaggaaatcttttaggaaattaaaaatatacttgctgagagtaaatcttaaaggtctcacccccaggaaaaaaaatgggaaccaatgtaccgtgataatatgttaactagacttactatggtgatcatcttcaccatatatatattccaatctttatattgtgacatcttgaaaataataccaatagtgtttatgtccaattataatgtcaaagtctattaagatgttacaaatacttacatagaaggaaaaaaaaaaggggggcagccagggtggctcagtggtttagcgccgccttcagcccagggcctgatcctggagacccgggatcgagtcccacgtcaggctccccgcagagtctgctttttcctctgcctgtgtctgtgtctttcatgaataaataaaaatttaaaaaaaaagaagaaaaaataaaaaaaaaaaaaaaaaaaaaaaaaaaaaaaaaaaaaaaaaaaaaaaaaaaaaaaaaaaaaa

SEQ ID NO: 6977 - DNA, 662 bp, Canis familiaris
aagagcttcaaggaaatccagtgctcgcttgcaggacgtcggctctgcctggcgaacaccgcacttcttcggcccaggaggctcacttaagacatgctacatttgaggcagggcccatccttgggagctggagcaagtggattggacaaatattccaacccagctcccaaccactcacggcttttattctgccgtcaggggggcaaagagcagctgtgcaactgcacttctgtcgggctgtgtgccgccgagcagagagacgcgtggtgccgcttgtccagatgggtgagaccgacgctaatgtggccaagttcttaaacagactcagcgactatctcttcacattagccagatatgtggccatgaaagaggggaatcaggaaaaaatatacaagaaaaatgacccgtcggcctgagcctgcggcacttggaagtagtgcagaaggggagatgtgcagccccctcggaggtgaaaaccttgtccttcctgtcctgatccctgcagatctccgccaggggcgctggacgagactcctgcccactcccctaggctctcctgggtgggaatgaatgagttcagtactgcagaaaaagaaggtaaagtgactgctgcaaggaagagccacatagaaaaaaataaaagtgggaaaagcttaaaaaaa

SEQ ID NO: 6978 - DNA, 558 bp, Canis familiaris
ggccctttctcgacagacgacatagccagcaactgcgtccccgccctgcctttgaatgagcccacttttgtggatcgtctcctatactctcatgagcgtgtgtggaatcatccttctgtatcctaatcgtcctgctgctacttcccttccggtgtcggcacctgccccgcgatcccgaggttgtcaatgacgagtcctctctcgtccggcatcgctggaagtgaagagtgaagcctgaactctagcggcctcgaactctctgttacgagaatgacgtttcaggtggagcaggcggggccgtaaggcagggtcgcttcctgtctccactagtcttaaatctgttctgctcctagatgccttccagattcactgtattttgattcttgattttaaagcttccttcttctccctcacttccaagaaaagttataataaaaaacacctcattctaaaccaaaacagagtgaattgggcttcaggctttatgtgactggttatgcccaactgtctaggtgtgccaccccaaaaaaaaaaaaaaaaaaaaaaaaaaaaaaaaaa

SEQ ID NO: 6979 - DNA, 629 bp, Canis familiaris
gttggcatcatgagaagcagctggcttctgtgctcctcagtaccgatgttaatgcatatgctcccatagaccgcatcgctttcagatactttctgtccatgtgtgtcattctcattccttccttgcattctccaggatcacgccctgggccaaaggcaggcgccaaactgctgcgccacccagggatccctgaaagatattttgaaactgtgtgaacgggcagaaaagtgttcaaattgtggggtggctaagtgtaagataatgtaactaaagagattatcccagctatatttatagtagttctgatgaggtctgttctttcagttagaaccagggaggggacacagtaattattatagagtatagactattctctggtgatattcagccaagtgttctgctgtggccagaaaagccaacaacatgtgaaatatcatcaaaaaagatttgggggagtgcctgggtggctcagttgggtgagtgtctgccttcagctcaggtcatgatcccagggtcctgggattgagccctgcgtcccagctccctgctcaacagggacccttctttgcctgctgctccccttgcttgtgttttctctctctctctccatcaaataaataaataaaatc

SEQ ID NO: 6980 - DNA, 620 bp, Canis familiaris
  misc_feature (30)..(30): n comprises a, c, g, or t, or includes no nucleotide
gagccgccccgcccgggccagtcgcgcagnccgcagccagtgagcgctgggtccccgcggccgggctgcgggcgggggccgggcggggagccccgcggaggaccgagccgaacctgcggagccggcgcgccgagcccggtctggggagacttctgggcccccctgtaccccaaggcagcagagcctcgggcaggtgagctgtgcgggttcgggacgcggtgctgcggagcgggccctggcctggggagagcaaagagctggtgagacccccggagggaaggcagtctgtcccgcctgttctgggcaaggggccgtctggccatgtcacccgtggctgctgctgagccggacggggcccagcgcaacaggtgatgccgtgatcctattcccgccgccgccaccgccctactttcccgagtcctcggctcctgcggcgactcgaagtcctggggctgacggtttgcgtctagatgaaaatccaccttcgtattacagtatttttaactatggtcggaccccagctcctgggcgccagggcgcggcccccgaggcgcatggcgaatccatatacaccatttccggggctgctgcggcccccgacaccctcccaccccccgagc

SEQ ID NO: 6981 - DNA, 702 bp, Canis familiaris
  misc_feature (559)..(559): n comprises a, c, g, or t, or includes no nucleotide
atcccggcgctactctaaggagtttgagaaaaacctcttattggaagaatgaatgtacggaactgagaactatgcaaggggataccgtgctttaataactttaggactaagcgaagatggaggaatgcccaggtttgaatacaggaaagaaaatccactatgcacaatgactttacatattcagtttaaaaatgggggggtgggatcccacattccttatggcacgttgtgtttctcagggcccattacaatgcctaacacacttgaagcagataaagaaggtgcgcagcatgtgaccttgcagccttatatacttgttatacttactgtctggtattcttgaggaactgtctgctctgcacccaggttacatacttgcctagctctcttcatcagctccttgcatttctgcaataatctctgtcgactttcatccagctcaatgaaatgttgctattgcaagaaaaagaattgaccatttttctgttatcattagatcagcgagctactttgaatccaaaggaagccaatttcaaccagggcatgctttggggacacntgtggattcagtcccagagtacctcaatgaagtggccatcacacgaaagcaagtcaaatgaatgttttagtttcctagcacatgtaaaagttacatttaccaaatgtggtctaattgtgcagggcattatatctttaaaaaaa

SEQ ID NO: 6982 - DNA, 622 bp, Canis familiaris
  misc_feature (318)..(318): n comprises a, c, g, or t, or includes no nucleotide
aatcccacgtcgggctcccggtgcatggagcctgcttctccctctgcctgtgcctctgcctctctctctctgtgtgactatcataaataaataccaaaaaaaaaaaaaaaaaaaaaaaaaaaaaaaaaaaccaagttaatggtctatttcttattttaaaattgctcaccattcttcttcataaaaataatttttaataaattatcaaagaccaaattctggattttaccccatagccttcccaaaagttgcctttgtaagtttataaagacattcctaataaatatatgatcaattccctaagccaatctaccccanaagactaaattttaagtgctaagatttcagaggattcataacaaaatgattaactgaccaattaatattttagtactatttatgagcaagtataaatgcttttgaaaaagcaatcaagatgactattctaggcctattactagctccagctactttgctacaattgttataaaaagtagaaagttaaaaatcagcaaatggaagatcaaagtttatttactacctgcatacaaaaacatattgcacatcaaacaaccaaaatcaaaaaaaaggggggtggggagaaaaaggaaaaaaaaaaaag

SEQ ID NO: 6983 - DNA, 610 bp, Canis familiaris
  misc_feature (169)..(169): n comprises a, c, g, or t, or includes no nucleotide
ttcacacgtcctccctgctgaagcagctgttcgagccgttttagctgggtgtccccactggctatacctcacgtcgaagtgggagaccccttctatctccaggtcactgacggtgggttctcagacttctgacgtcccagtgttcccgtgggcttcactaaggtggttntgaagctctttgattctgaccccctcccggtgatgatccccgaagcagtctccagggaccatcctgaatttatggagactgtggcagagaaggctcttcacggagtatcgcccaaagccccgagaggaatgagatgtgaaccttgcttctcccaatatgggagggctgagttcctttgacccccagatgagtgctaggcccctagagagagctctgcatgtcacccagtgaccaggccttgcctcgaggcgctcctgtctcctaacccagctttccttcctctggactccgcactgtaacgcctacgtttgctgatcatgggaagaactcctgtgtgccactaactccataaaaccgcccaggaaaaaaaaaaaaaaaaaaaaaaaaaaaaaaaaaaaaaaaaaaaaaaaaaaaaaaaaaaaaaaaaaaaaaaaaaaaaaa

SEQ ID NO: 6984 - DNA, 620 bp, Canis familiaris
ctggagtccactccttccccccaccattttgatcttttcccactcttagaaatcttccacctgacctgatggcagccccctcttatttgctttcctttggcctccccgacctcaggaagtttggccttccctgccccgcccccatcccagtgctgtggtttctgccattggccatgatttcagggagctagctgaggccacggctgtgccaatggggcttccctggtgctgtggcactttgtaaaccacgccccagcctctctccttggacatgtgaacacagtggcattcagtattggtagcctggcatggtaggtactgcccgatgaagaatggactatatattttctttactataggccatacttatacagacgtgtatatatatttatataagatctacctatcctagggtggaatgtttgagggaaaataaaattgaaggctccccctaaaaaacaaacaaacaaacaaaaaaaccacttccagttgtgagccaagagagtaagctgagagcagccaggagcagcttcctgtcagtaaccatgttttcaataaatactctttcatgtacaaaaaaaaaaaaaaaaaaaaaaaaaaaaaaaaaaaaaaaaaaaaaa

SEQ ID NO: 6985 - DNA, 615 bp, Canis familiaris
  misc_feature (4)..(4): n comprises a, c, g, or t, or includes no nucleotide
tggntacaacgtagctcggcggcggctacgcggcggcacactccgcgggggcggttacgcggggcagttccggaggcggcgcagccacgcggtagctcgggcgcggctacggcgcggcagctcctccagcggaggtcacaagtcttcgtcttccgggtcggttggcgagtcctcttctaagggacccagatacttaccaaaccagagtaatcaagaccattattgaagaagtgacacctgatggtagagtcctttcgtctatggttgaatcagaaacccaggaacactactattaagccgcgtcaagaggaaagagtctcccttcacacagacccttatgtacagatgcatgaacaaccaaatctccacaggaaacacttcagtcttaatggtctacggaaataggttcactccttgaaaataaggtgtctgaaaggtgttttgtggtttctgtatttcttcttttcactttaccagaaagtgtttctttcatggaaaaaaaaatcttttctattctcattcactaatgaattcccataaactttcttactgatgccagctaaaaaaaaaaaaaaaaaaaaaaaaaaaaaaaaaaaaaaaaaaaaaaaaaaaaaa

SEQ ID NO: 6986 - DNA, 606 bp, Canis familiaris
cgttgctggatctctgggtagaactgttcgctcttgcagggggccatggggactcccacgggggagcgttggctgagaagatgtaaggattctggaatatcccgcgggatttcctgtccctgtgcctgcctgccttcccctcttccctgcccctgctaaccttttgctgagtggggcggcaccactgacatttctgggcaacgtcggcgtcgctgtcaagttcctgtactactggcttttgattttcattttggctaaccatggatcttcttataggaagtttgatctgaggggatgaatcattatgaatcagccgctggggcctggtgctttccaggaccctcgagttgggaggaggacgtagtcaaggcttccaggtagctgaaggggcagtgactcagttgactgctcctaccacccggacgcctcccctgacccggtcaggggtcagggcaggagtggctgaatcgagacaggaaaactgttgtgtacaagtctttccagagaagtttcttaatcagatatttgtatttatttccagacccataaatttgtaactttgcagtgaaaaaaaaaaaaaaaaaaaaaaaaaaaaaaaaaaaaaaa

SEQ ID NO: 6987 - DNA, 633 bp, Canis familiaris
gggatgctgaacggtgctgaagtcgacgacttctcctgggagcccccaaaccgaagcggagacgaaggttctgcaaagcgcgaagggagcgacaggatcgcatctctcggctcatgggcgactacctgctgcgtggttaccgcatgctggggcgagacgtgcgcggactgcgggacgatcctccttcaagaccaacagcggaaaatctactgcgtggcttgtcaggagctcgactcagacgtggataaagataatccggctctgaatgcccaggccgctctctcccaagctcgggaacaccagcttgcctctgccgtggagctcccctcgggctctcggccagcccctcagcccccagtaccccgtccagagcactgtgagggagctgcagcagggctcaaggcagcccaggggccaccccctcctgctgtgcctccaaatgcagatgtcttggcctgcacacaggaggccctcctgcagaagctgacctgggcctcagctgacctgggctctagcacctccctggagactagcatccagctgtgtagcttgatccgggcttgtgctgaggctctgcgcagccttcggcagcttcaacactaaaaaagccccgcctgagaaaaccctctagaa

SEQ ID NO: 6988 - DNA, 626 bp, Canis familiaris
aaacccctcgtccctccctgcaaacacgcccggcccctgtagtcctatcacaattgtaattctgatttgctgacagcgttgcccgcctgctccccgttttcccacacaccccgtggctccaccgaggtggtggcagtgagtcagacaagggtgtgtaggatcgctgccgcaccatgatgccctattagccttggctccgaaccccacactgcatacgtcctccgtgtactcaggatcaagactgatgtttactctctgggcgctgttgtaagataggtgttgtcacaagcataatcattgtctgccaaatgtttggtgcaaggaagactattgctaattttgtgaaataaagagtctcgccctctcctttaatggacttaactctcactggcatctgtagcatcgttgggagtgtgggcgcccatggaaatccatgcccggtgcacgggttctaatgtttttctaacaactgtggagatttgagggaatgcgtggtgaatgtaaaatatctagtttacttggcagtctcttgtgtaaattacagtaaaaccaagtaaatgaaattgaaaccaaaaaataaatttgatcaccaaatgaaaaaaaaaaaaaaaaaaaaaaaaaaaaaa

SEQ ID NO: 6989 - DNA, 618 bp, Canis familiaris
ttgcagatatttgaggttcccctaacgtgaaatttgggggtgatatactatagatattccttgacaaaaatggtgtgtgtgtgtgtgtatatatagatatatatatatgacacatagatatggtccaccattccagtaaagcttttgtttaattttcagaaggaatccaataaaccagtatcccatcttctgtagttcgtagggtgttaggtcccttaacgtaaagtccaacttccaattccatctagctctgtgttaatccccgttattactggtaaagcttcatttgaattatgtaaattccagtttaggctatgtaaaatttttgctaatgtcatcattctgaaaaaaataaatttaccaatacattcacaaattaccacttgtaaaaaagtgtaattgtaaatcttccctaaactctattttctgatgaaagcacgacacctgtgttcttgaccaaaatagcaccatcttttcaagttctcagatatttcttttactcctgttttttgacacttgtgtattataacttacagtatctataatcagtgctaagttgataaagcctaattttctctgaaaaaaaaaaaaaaaaaaaaaaaaaaaaaaaaaaaaaaa

SEQ ID NO: 6990 - DNA, 309 bp, Canis familiaris
cgggcctcagtttcccctcgggaagcaagaggggcggacacacgggggtcaccagccccttggagtttgggcaccccctgtgccccgggccctcccgggctcggggagccccgcccttacgggggtgccgggatggaaagcctgtgtgggcccagggcctcccgcgccgccccaggggagcgggtgcgctggacccggacaccgcgcccagggacggcccctcccccgccccaggacgcggcctcagagacccgccccctccctggacctaaggagcgactgggtgccctgcccccgggtgagcccggc

SEQ ID NO: 6991 - DNA, 612 bp, Canis familiaris
gagctggaattggagaacatctgcctggccagggctctggtcccagggcaggtggagtatactaagaagtctccacaagctaatctgccctaggactttcaccactagactctagaatgatctagtagggctggatgggcccccgatcagatgtctgccagaagctgcactaggggcagtgtgccccatctcctggcaccctccagcccatgtagcccctgcttcccactcaccctgggcttcccagcacttgagcccatcttcccctgcagttgggggcctgggctcccccagccagcctggagagatgagtgatggctgacaagtccagggtgaccacccatagaccagagcagtggaaacaaagcttgggtcccaccccaggtacaggcctcacctgggggcactggtgatggtgccccataggtccaggatgtggtggggggcatcagagcagccagtgcccaggtagctggaggggagctgtttcctcccacctgccactggcgccccctgtcttcaagttgtggaaagggcgtgtgctgcccctcacttctgctctgtggattccttgcggggctccctgggcagggcaataaagagtttgactcc

SEQ ID NO: 6992 - DNA, 372 bp, Canis familiaris
tatatatctctgtagcacagttgatagtggttggtggttgttggttgttggataaaaaataataataataggaaataataataataatacaccaataaatagtgtcaccaatccagtaaagcttttgtttaattttcagaaggaatcaaataaaacaagtatccatcttctgtagttcgtagggtgttaggtcctttaacgtaaagtcaaacttcaaattccatctagctctgtgttaatccctgttattactggtaaagcttcatttgaatatgtaaattcagtttaggctatgtaaaatttttgctaatgtcatcattctgaaaaaaataaatttacaaatacattcaaaaaaaaaaaaaaaaaaaaaaa

SEQ ID NO: 6993 - DNA, 508 bp, Canis familiaris
ttatagactatccattccctttgggtggattgttgtttgacttgtgaatgaaaaaaatctcttaaaccacaccactattgaatgaaaatattgaaattgtatctgtaagaaacatttaaagaggagatatattagttttttaattggtattttaatttttatatattcaggaaagaacagaagtgattgaatattgttaattataccacctgtgtgtttagaagagtaaggagcagtcagttttcatatcaatgacagcatttaaggtattgttctgttgaataaaacatatgacctggaattattttactgtttcagtagtattacctgtattttctcacttgtttggatgatttccggtgaatctgtgtcaacagttccttttaaatacaaatcaataaattcccaaaaaactttaccacattttgaattcttcagtgtaaaaatccttacaataaaggctgtctctttaaaagaaaaaaaaaaaaaaaaaaaaaaaaaaaaaaaa

SEQ ID NO: 6994 - DNA, 605 bp, Canis familiaris
cgattcagcctccggacttctagcctaggccgcgggacgggataacaaatgtcacacaggaaacaagctatgaccattaggcctatttaggtgacactatagaacaagtttgtacaaaaaagcaggctggtaccggtccggaattcccgggatcgccgccgaggtcgcacgcgtgaggcttctccgccgccgagatgcgctacgtcgcctcctacctgctggccgccctcgggggcaacacctcccccagcgccaaggatatcaagaagatcctggacagcgtgggcatcgaggcggacgatgaccggctcaacaaggtcatcagcgagctcaacgggaaaaacatcgaggacgtgatcgctcagggtattggcaagttggccagtgtgcctgctggtggggctgtggccgtgtctgccgccccagggtctgcagctcctgctgctggtgctgccccagccgcagcggaggaaaagaaagatgagaagaaagaggagtccgaggagtcagacgacgacatgggatttggcttatttgattagggtcctgcccacccccacccactggcaaataaaaccctttttgtgtaaaaaaaaaaaaaaaaa

SEQ ID NO: 6995 - DNA, 585 bp, Canis familiaris
gaataataatggcttttttccattaagaatgaataatattttggacaatgcccatagaatgtatgaacttagtgtccacatcatagattcagagtccgatgtgtagccagtgaattagtataatgaagggttgaccgtgatgtcctctgtccccgcacacctgtggtctaggggactaccatctggatgcctgccaaagcacagatttcacatgtgtcccacgaggtcaagctccagcctcgagatgtaaaatgtacagcgagcttgtagaaagaagggtgaacagcagtggccttccgctgagagctgcatttcacacacaggagtttgtctctcggcgttcctggtgaccgttaggaaatagcgctaatgatacagtgagctcgggatctggaagggtcttcctccgccctcacaagatggccattaagacacgaaacagcagcaggctaccgactcaacaggcagctcccgtttatgtaaagcgcagttttgagttctgttagaacataagagaccattcaaaggactgagcgtttctttattgtaacttaaaaaaaataaatacaactgtaactaaaaaaa

SEQ ID NO: 6996 - DNA, 538 bp, Canis familiaris
tgtcagagggatcaaaagggtggagggcagaatactggtatactcctcatagaggacgactctggatagcagccacagccaaaagaccctcccctcaagaagtctcagaactccagactacatacagggttcttcgtgggaaagatgtggaatttcccaatgactatccatcaggttgtcttctgggctgtgtggacctcattgactgcttgtcccagaagcagtttaaggatcagtatccagacatgagtcaagaatctgattctccatttgttttcatctgcacaaatccccaggaaatgattgtgaagtttcctattaaaggaaatccaaaaatctggaaactggattccaagatccatcaaggagcaaagaaggggttaatgaagcagaataaagctgtctgacccaggaaaaaaggaactatacagcatagtggagttttgtgtactaaaattgctatccactggtcctttggaattgaagcattagaaatctaaaggcttggcatcaggcttgattctctcagaatttaaac

SEQ ID NO: 6997 - DNA, 433 bp, Canis familiaris
gtccagttaatcttggtagcagcttctttggcagctccagttttcaattatgctgacagcatttatcttcagatactctggtgttttacagctttcaccaccagctgcatcagcttacagttactatcattatggtcgaaaaactgttcaggtgataaaagggagatgaaagccatctatcatcattagcaaggaagccatatacatcacttggtggcacgggcaagtggaaatctacacggagtttccgtatttcggtgttcagcttgaaaaaggatcttgtcagaaccaaccactgtcatcaaaatttaagtaatgtgcattgaaaataagcttgatcatgggcatatgcagaatttccaatgtatttttaaatacaaataaaactataatttagaaaaaaaaaaaaaaaaaaaaaaaaaaaaaaaaaaaa

SEQ ID NO: 6998 - DNA, 511 bp, Canis familiaris
  misc_feature (114)..(114): n comprises a, c, g, or t, or includes no nucleotide
ctgttttgggggttacactctgtgtccctgtcccaaccctgcagcccctatcagagcaggccctcagccgtggtcacacgggtttggcttcatgccgtccgcagggatcgctgnccctgggcccttgggaccccgtgggaccccggccacccgggctgcctggaactggctggctgccactgagcatccgcacccctgtggggaccggccccctggcccgtctttgtccctcacgggcttccccgaggcagcagccggcgtggaatctgactgggggcgaacccggcatcccggggggaggcccacctgctgctggcggcccacgtgtcctgtcacgttggagtcggaagcgcctgcgcggtggcctgcgctccttggccgcggtgggcagccccggggcagctcacagccccgtctcggggacagctccttgctctgcctttttctgctgcgacaataaaacctcccacctgttaaaaaaaaaaaaaaaaaaaaaaaaaaaaaaaaaaaa

SEQ ID NO: 6999 - DNA, 640 bp, Canis familiaris
agaacccgtgtcacagccgaccacgcccactaggggccagcccccagagctgcatggacagacagcttgccctgacttcgggagagcctttggccccgtgctgcaggcccagcagcccaccagtcttggtgcctgctccttttctgccaccgctgctgcttccagctttgcctctgtcctgcctggtgtggagggctccgtctgacgctgaggaccaaggaggaggagaaacctctgctgccctgggttgggggctgaggtggtgacccgggcaggggccagtgtcgggagctgccatcactggagctggggccctgtggcttgccctgtctggttgtgctcctcttatgtggagagttggaaggaggcattgccacctcccaccaggatgcaggattgggggttgggggtgtcatggcctcttgctggcaaaggtttgttggggggacagtagccccaagccccccactcctccagcctggaatgtgaagtgactccccaacccctgtggccatggcacctgtggactaggctgccactgtgtgggcaggagaaaaggtgccaggaggagcatgggcgtgaagagtcctgtcagccaagaaagaaataaaagtttacctcagaaaaaaaaaaaaaaaaa

SEQ ID NO: 7000 - DNA, 666 bp, Canis familiaris
tccacttctttgtcggtttcctagactgcaaaccaccacccagtcgtatgcagtggtccatgggatcagcctccctatcccctatatctgctccttttcaaagccagtgctacttagctgggccatgtcacctctggaccttgggggaagaattgtccctgccccgctgcctggaggaagtgcttccactccaggcccaaaggaagccatccttctttgcttgctcagctgcccatcaaggatgtaatctatagacaatgggcagagggtacgatatatttggtatatttttacattacaatgcatatatataatgctgtaaactctggatgaatgcaaatatgcctataactgtttggtcttgaatcatacattttctttgtcccttcatttcatacagttcctttagaagacgtcagtagtggggatccctgggtggcttaggggatccctgggtggcttagcagttgagcacctgccttcagcccagggcatgatcctggagtcctgggattgagtcccacgtcaggctccctgcatggagcctgcttctctctgcttctctctctctctctctctctctctctctgtgtgtctctcatgaacaaataaataaaatcttaaaaaaataaaaataaatgtttaaaaaaagaaagaaaaaaaaaa

SEQ ID NO: 7001 - DNA, 465 bp, Canis familiaris
  misc_feature (413)..(413): n comprises a, c, g, or t, or includes no nucleotide
agaagaagggggccatcccagagccattaataatcagtactccttcgtgtgagacaccctaccccaccctttctccactcttcttgctccccagcccctagtgcgtgaaattggggctgggccggtcgtagaggagcggtaggaatcccctcccccatgtgcttcctgacccttgatggccaagggaatatacgttggtacaagaggttcaagagccctgttaactccccagttcatacactacaggtgccccatcccctgggcaggggatttgggctccattacctccccgaggggctcttatggtcagccccacccctgggggccatttccccgctaaccaccccctagcccgaggaagggtgagggggaagggctgtcagttatattaaggtggttgttgttgttgtttntaaacaaaatggagaagcataaataaataaaagggtttatctcaaaaaaaaa

SEQ ID NO: 7002 - DNA, 646 bp, Canis familiaris
catgatatatactttgtgatgaaacttctcatcttaggcgctcacaggcaggtaccaacccaatttgggcccgtggttaactagtttgtaaatttgagattgttatttgtgataactcatgtacttaaggccccattaatataaatgggagtttcatggtttatgtttaggggataccttagagattgctgctgttctatttattttttggaagggagagcccgatttgtactttggaacttcctggaagctcttcagtggtctttggcctaatgaattctatctctttatcacttaaagagtattattcttatgtcatagtgagaataatcactttaaataccttggcataataaatgcctaagagaaccttttatgaatctattttttttcttgctataatggggctattgtaaatcatgccatttgtattaatgatatttcttaaagccaatatatgaaaccaatctaccaaatggttgtaggagtctaccaaattctgttcttggttctgtaaactttgttggaatcttttaacccaccagattattttgtgggaatgtatttataccattgttaaaaaatttaaaaagaaaaaaaaaaaaaaaaaaaaaaaaaaaaaaaaaaaaaaaaaaaaaaaaaaaaa

SEQ ID NO: 7003 - DNA, 595 bp, Canis familiaris
gaagcaagcgtgcagggcagcagcccaggccgccggggaggctaggaggccaggatcacactgccacacggctcttccggacggaggagctcacagccctgccttcacctgcaccaggtaaacagacatgggtgagcagcgtggcggtctttgcattgacctgggcccctgccctggccctttggtttgctataggctcgaggagcagaggcagactgtcccacaccagcttcgccttcaggagctcccagtcaatgttttgcagtcttggcccaggccgaggcaaccatctttctttttttctttctttctttttttttgccattggagcaaatccaggatactctgtgcaaatttttcacatgctggactggactgcttttccagacctgggtttaactcccctgcccagtgtgatttactatgttcatcatattttaggcatggaagtcagtggttagctaggacctggataatgctagtatttaaatgcaggtatgtttctgagccacaaaagatttacttgagctgtgattcatgttttcagaatctgtcaaaggaagctgttatgtgggccgtcatcctaaaaaaaaaa

SEQ ID NO: 7004 - DNA, 638 bp, Canis familiaris
ccctcgcgacctgcggtcctcctgctgtcagcctctcctgctgtcaacggaggcctgcgtggagcccccgatcaccccttcctttacaccccctcggatgccgtcatttcccctgagactgttttcatctggagatctccctgacgtgccagaaccacgggtcccgaacatggctctttatgctgacgtcagtgggaaacagtttcctgtcacccggggccaggacgtggggcgttatcaggtatcctggagcctagaccaccagagcgcccatgcaggtacctacgaggtcagattcttcgatgaggagtcctacagcctcctgaggaaggctcagagaaattatgaggacatttccatcatcccacccctgttcacggtcagtgtggaccatcggggcacctggaacgggccctgggtctctacggaggtgttggctgcagccatcggcctagtgatttactacctggccttcagtgcccagagtcacatccaggcctgaaggtggcacccctgggctcttgctactttaaataaacagttgctggctctaaccaggacacgaaaaaaaaaaaaaaaaaaaaaaaaaaaaaaaaaaaaaaaaaaaaaaaaaaaaaaaaaaaaaaaaaaaaaaaaaa

SEQ ID NO: 7005 - DNA, 545 bp, Canis familiaris
aagctcgcatcccctgtgaaccaagggccgccggctagcagcacagtcttgtgggcggaaatctggaaacacccaagaagaggacactagcctgcccagtggtgtgacaatctgacaatccgatttccagctgcgttccaaacccatcacctgctgtcttccctgaaatgacttggggggcaggactcgtgaccagacgtctggagagacagagtcggctgtcactcccgaaagacagtccatctttgtgcccagctttaccgacttcgcgttgtctatgtgtgtgtttttgcacgtggctgtgttgtccaggactcagtgctgagcagggtctgtccggggcccaggccctccccgcccccccgtccctaacctgggcactcccagccgcatccagctgctgtatcaacagaaaacatgaattcctccgctgggtcaggtcgtcacgctagtgctgagtgtgccccttgctgccacaggcggcctctaagacataaggccatttccttcgttatcacacatgtggctacagctctctgtttaat

SEQ ID NO: 7006 - DNA, 633 bp, Canis familiaris
tagaagaacttggttgcgataagttcatcagcagggaatagccaggcgatggaactgcttccgggggagcccctgcgttcaggacctaacgccaaatcctgtcgccgcactttaaaaagtcatcgtatatgagataaagcctggcctggcggggtggcaggggacgagtttatcacgaaaaagcaccaggaaagagagaagggggaattcaaagccccgtgcctccttctcccgcgttgagtttgcgattgatgacagattctttgccctgcggcgtggagaggcctttccagaattgcttccccgaaaggcgaaggatgggttttaggaaaccgagactggatgaagaagtgttgaggatagcagagcccgggatgatggaagggattatcaaataatgatgggaggagtgaggagtcccaggggagatgcccggggagaccccggaaggctacggacagaacttgaaattggcggaacgcgtgctctcctggttcaggttccacggaaggttgtagtctaaatggattttgtgttttctgaggcatttcaaatggcaggcagtgtcactgttgtacatattccctgataaatatgtattcgagaaccaaaaaaataaaaaaaaaaaaaaaa

SEQ ID NO: 7007 - DNA, 654 bp, Canis familiaris
aaaaccccgtagaagcgcccagacttcagtttatctaagcctcttcacctgaggtagaggtgtgtcaggaaagtactttggcgattgtaaggaggaagagctattgccgaaagctatggatgagtctgttgctagaaaactctgggatatcagcgaagtcatggttggcatattaaaataggaacacaggagtgaaagagctatttataaaactggctgcccagttatatctgtaatcagaaatggtgtggcttgagtacttgctacttgaaaacacagttttggttttaccagtagtactgctaagaggtacatatggatatttcaaagttaccaaaaaagttattttttggagaacataaaatttaagaaaagatgttttaaatatataataagcataatgaatagtatgatgagccatattattataatatactttagaaatttaactgagcaagcatggattacaaatattaaggaatccagtgacttaaacacctcgagaagtttttcaaatatcttttgagtttcatggcccaagtgttaaatatttttattgcagtgccgtttttttgtgtgaaaataacatgcctgttgtgtgccccattcttatttggaataaattcagtgatgcaaaaaaaaaaaaaaaaaaaa

SEQ ID NO: 7008 - DNA, 638 bp, Canis familiaris
  misc_feature (1)..(1): n comprises a, c, g, or t, or includes no nucleotide
ncctccgccatgccgcctaagttcgacccccacgagtgtctaagtcgtgtacctgaggtgcaccggtggcgaggtcggtgccacgtctgcctggccccgaagatcggccccctgggtctgtctcccaaaaaggttggtgatgacatcgccacaggcaaccggtgattggaagggtctaaggattacagtgagaactgacccttcaggacagacaggcccacgattgaagtggtaccttctgcctctgccctgattatccaagccctcagggaccccccagaggacagaaagaagcaggataaaccttaagcacccgtgggaatatcaccttttgatgagattgtccatattgcccgacagatgcgacaccgatctttagccacgagaactttctgggacccttaaagagatcctggggagctgcccacgtctgtgggctgcaatgttgatggccgtcaccctcatgacatcatagatgacatcacatagtggtgcagtggaatgccccagcgagttaactaccaagggaaatatttccaataaaggatcatttgacccacccaaaaaaaaaaaaaaaaaaaaaaaaaaaaaaaaaaaaaaaaaaaaaaaaaaaaaaaaaaaaaaaaaaaaaaaagaaa

SEQ ID NO: 7009 - DNA, 623 bp, Canis familiaris
gccaccgcagagctggagcccttgaccgacggacaggtgtcccagactgacgaggaagacatgggcatgacgtacgcggagctctctgtctacggcaggctccggaagatcgccaaggccgggccctacagcatgttctgcaagctcgtcaacatgtggaaagacgcgtgttccccacaggcaggtggctgacaaagtgaggcagtttttctcgaaatacgccatggacagacacaagatgaccacgctcacgcccgcctaccacgcagagagctacagccccgacgacaacaggtttgacctgcggccgtttctgtacaacagcagctggccttggcagtttcggtgcatagaagatcaggttcatcagctggagagcagaggccctcaggacctggatggcgtggactgatgccggctcctgcacgggagggccccccaccaccagggtccctggtgttacgtcggcctcgccagtaatctgcccagagagtgcaccagcatcctgtttcacgtctgatgggagaggggtcttttcattctagttcgttaaaaaagactcaaataaagagcatgtgatttctgggaaaaaaaaaaaaaaaaaaaaaaaaaaaaaaaaaaaa

SEQ ID NO: 7010 - DNA, 608 bp, Canis familiaris
  misc_feature (1)..(1): n comprises a, c, g, or t, or includes no nucleotide
nccagcatggaggtgttcagctaccaccaaggtctgaagaagtgggtagaaatcgggaattctggggctcttccgccccgagatgctgttgcccatggggctccctgaaaatgtgtcagtcattgcttggggcctctccctggagcgcccgaccatgatccaatatggcatcaaccatatccgggagcttgtgggccaacaaggtgaacctccagatggtgtacgacagtcccctgtgccgcctggatgctgaaccggggcccccacggacacagggcgctgcatgacatgggccactctggatacctgccttccctgggccccagctgtccagcccccttacatccctaccagtgacccccttgtatttataaggcctccgtgaggccatccccccacccctgttcctggtatctcctcttccccacctgccccaaggtcccaggggcaagggagcaggtagcaggcttgatctatgaaggtgggagccctgcaggccagctgctggctaataaagtgggcatttgtcctccaaaaaaaaaaaaaaaaaaaaaaaaaaaaaaaaaaaaaaaaaaaaaaaaaaaaaaaaaaaaaaaaaaaaaaaaaaa

SEQ ID NO: 7011 - DNA, 635 bp, Canis familiaris
aggaagcccggccaaaagatgtacagggggttggtgcccaaaataatgccctggactggacccactgttaaagcctcttgtgggggccaaggaaacgtgcccccaaagtttgggctaagctcagtcttatgcttctgggggctgggtccaatggctggcccagttgggaaaatccccgatctgattcagaagggcgtgattcagcatataaggagaaagtgcaagccacatgaagggatcaagccactgaggcagggacagagggacctttgatagggctacgttcctgctttctttgcatcactcttactcatcccgttgcttccccccaaccccttcacccataattgttactaagtagctgcatcaggcattgctggggggaaaatgaacagcattgctactgaatttccaaggctacacagggaggggaaaagactggggctttgggaaacccaaagaccatctgtatcccttctccaggtggggcgatgtgagattccggaaggatgggggagggggtgcctgccgaaagtgggtgcatagcttttttggtttttggagataactcatcaataaaagctgctttcctctggtgaaaaaaaaaaagaaaaaaaaaaaaaaaaaaaaaaaaa

SEQ ID NO: 7012 - DNA, 630 bp, Canis familiaris
cggcccgggtcccccaccaagggtccggtccccccatggcgcaattcttgggggggacagttgctgatgactcagcccctgcttgccactcggaatccctctaaggaacccaggggtcaagccccaacctgggggccacccgccgtccacgcctccgctcgcaggaccccagagcccaacgtggccactgtgttggcttccatgagcatcgtctcatgactggggaggaaggttccagacctgcaggctcctgctctctccgcaggaaagaacccccatgtaaagcatcagtggagaacacccggggccacacgagggatgggggaccctggcgcccaagcgcggcgcgaacttccaaactgcggcaagagctttcatactcacggtgcacgtgtgaccggttctggttgctttctcttaatatatattttatttcaaagcaaaggggagggcgtggacaccattccacacagaggtcatcaggctggttaggggtgcgttgttcaaacatgtttattgaaataacacaggcagtgatacgttggaatactaaaaagtaaccgagatttttatatttttgtaaattatactttccatactgtaaaaaaaaaaaaaaaaaaaaaaaaaaaa

SEQ ID NO: 7013 - DNA, 649 bp, Canis familiaris
tcctctggctttgctagccatgaactgaccttcagtttatctttctgaaggagcagggactcggcacagaattcactgttaaacggggctgaaggagtgtccctcctggtatgtgaaaaagaaatttggttttattcttcattctgactttttaactttggctcacttccaggttaatttggatgaaagtaatgttctacttggagtcaaggaggccaggacatcatttctcatcggcacgatgctaggtatgtctgccctctatttggacgtcattgccattaagttccttctgggcttcatggaaactcttttgttaggttccagcagtacccagacttcagaaaccaagaccgccatgcagccaaaatctcctttaagttttgtgcttaaggacaaatggttgatcataaaggttgtattccttcatgctaaattaaattggggaaaaaatgttgagtttctaccattcagaaactgcaaaataggaaaagattgataaaaaatcattttcctttcttcattgtacatagttcaaatctttctttgttacatttaaactatatccatgtacatcagtctgttggactcctgctagtgttacagatggaaataaaaccattaatttgaaccagaaaaaaaaaaaaaa

SEQ ID NO: 7014 - DNA, 376 bp, Canis familiaris
gaggaaatacacacccgtgcacaactggaggagaatattataatcggagttataatgggagtgatatagattaatcttatatttacaccttggagatacaccacctcctctatttggtagaatttatttaattggtaacttaaattgggtagagaggcacttctaattggagttgattagtgtgggatttttatacactacacacgatacacttgtgagttatagtaatctgtgatatgaagttggctaattttaagtcacatgaaccctttggacatttttatcctaattaccatgaatttgctgagaaaagctcattaaaaaaaaaaaaaaaaaaaaaaaaaaaaaaaaaaaaaaaaaaaaaaaaaaaaaaaaa

SEQ ID NO: 7015 - DNA, 714 bp, Canis familiaris
aaagtcaagaaggtcctggaggagaatctggcgacagcaccagcaatgacctactcagggttcaagaacagctgagcatggctgaaaaggaattagaaaagaaattccgacaaacagcaagcttttcgaaacatgaaagagattctcaccaggaagaatgacccaatcaaagacctgaggagaagactggcccagtacgaacctgaagattaaaactcaaagaagatttcttctggaagctgccacaacgtgaaagtacaagctgtttcacacctcaggcatgtattttgaagcagtttgttaatcttccctctctttatttttctaatatatagactttgcttctaatatttagaactagacttcctatttcagttatgtaattgagaagaggggaccttctgactgattctggccagccgtcctctgccgagcgctccagacgtgtttagtttcaatcgcaatcgaggatgtctttatagtagtaaaagaatgatgtagaaggtaggggggaagaaggcctccgtgcgcccttatcactatttggagaagagagtagtacacccgtttcattaaatgttaaagctagcatcatctattcttgtgcattcccccagtgtaaaaataaaagcagttattaaaagatagttattaccgataaccctatttttcaaaaccagaaaaaaaaaaaaaaaaaaaaaaaaaaaaaaaaaa

SEQ ID NO: 7016 - DNA, 683 bp, Canis familiaris
  misc_feature (101)..(101): n comprises a, c, g, or t, or includes no nucleotide
tttagaattatggtttattacaggagtgacacttcttaggttctggtcctttaaaaagattaaatttttctgctttaggttcttgctcagaactctggttntgaccttcaggaaacacctagttaaagttcaagcaagaacattcagaatcaggtcaacttgtgggtgtggacttgaacacaggtgagcccatggtagccgccgaagtaggcatatgggataactattgtgtaaagaaacagcttcttcactcttgcactgtgattgccaccaacatcctcctggttgacgagatcatgcgagctggaatgtcttctctgaaaggttgaatttgaagcttcctttgtgtcatctgaatcatgaagactacagagagaccttaaggatatagctatggaatttttgtccaagcttcaaataattttaaaaagcatattctttccccatattaaaagagaatattgacacttaaattctgaagttctgaaattaaaattacagtattttttttaattgcactgcagtgtacacacattaagtaggctatttatacctagtgaaccagatgttttgctttagcttcagtgatgtaagagtaccatgttaaataaatatgttatctaccttgttattaaatgttccttgaaaaccaaaaaaaaaaaaaaaaaaaaaaaaaaaaaaaa

SEQ ID NO: 7017 - DNA, 514 bp, Canis familiaris
aggatcttcctcgctggctcgctcttctctcccctgtccctctgccacgtgtccgtctcatcctcccgtgctcctgctctgcacatggtccccgctgggtccgctgtctgtggcgcggggcctctgctcagcccctacccaggcaagccccggggcagagggcagctgcccccaagcctggacagtcctggaggaggtcagcaggtggagacgatgcaccctgcatgcactccgcactccaaggggagcattggccccggaaagggcccagcctcccactggagccccagccagctttcatcgtccccctctccccacgagatggctagctctcccctcccttcgccttctggcccctggtatggtgggggtttctaacgatcacacccagcttgaggaggggctgctttctgaggtcggttgttgtctttcaattaaagaaaccctgtgccaaaaaaaaaaaaaaaaaaaaaaaaaaaaaaaaaaaaaaaaaaaaaaaaaaaaaaaaaaaaaa

SEQ ID NO: 7018 - DNA, 602 bp, Canis familiaris
gtccagggcctagagtgcgctgtcccattcagtagccacaagcccaatgcgacatttgaatttaaattaagttaaattagaattcatttcctctgctgtcctagccacatttcaagtgctcagtaacccgaaagtggttagtggctactgtactggaccttgcgggccaactttttcatcattgcagaaagttctaggacagcactgacccagccatgctgaagaacttgtatcacttgtgcagtagttggaacttactggcagtggaataaaaggtggcttccttggttctttgcctcctgtccttgaggcccaggaagagggggctaaggattgtttcctgggtacctacataagacttcctacactgggatccctgggtggcgcagcggtttggtgcctgcctttggcccagggcgcgatcctggagacctgggatcgagtcccatgtcgggctcctggtgcatggagcctgcttctccctctgcctgtgtctctgcctctctctctctctctgtgtgactatcataaataaaaattaaaaaaaaaaaattaaaaaaaaaaaaaaaaaaaaaaaaaaaaaaaaaaaaaaaaaaaaaaaa

SEQ ID NO: 7019 - DNA, 621 bp, Canis familiaris
agtcctagcatcccctccgaaaccctagggccttagtccctgctgcctttagccaccagaggtgcagtccctaggtctctgtccaactcaaggtcttcagtcctagcaagctccctgttggtcgtgggcagtgtagcaacgttcgcctctccatgtcaccaaatccatgcagggtgctggagcccctctgctctcttagtggcatttcttcttgtgactacagggggcagccgtgtgtcctataagcctgcattgctgttccgtgttgattagggggccgagtggagatgtaaatgtgaagccatttagagagcttgtgtgatgctgcagtgttagcccggatttcattagtgtgtgtaaaaccagcgtcttccgtggccacaggcacacacttgcttttttgaatgtgatgtaaaatttgtacagtaaaagtttttatattttctatcaactgcatttgtcttccagaaatgctattaatttaaattaaaatggttagtattaatgaacgtgctgtattagttttttgccactggcaagaacacatcttttgtgccaggccaggcctgggtgtctggagtttgtgaataaaagtgtaccatgaaaaaaaaaaaaaaaaaa

SEQ ID NO: 7020 - DNA, 680 bp, Canis familiaris
  misc_feature (12)..(12): n comprises a, c, g, or t, or includes no nucleotide
tttggctctggntgagttgtcatgaagtcagtttgaggataccttgggagaatggccttctagggcaccaaaactcactctagtttatattatatgtagcgtatattttttactaaatgtcaccttacaaacatctacaagtaaaatttcttttcttagctgtgtggccaggcagtctgctttttacgagttggctttttgcaaatccaacccactgaagtgtttgttagcgatttggggaagcattttggtgcttctagactttgcagggaagggaagtgtcttaagtgggagtccatgctcaggttcccagccaggtttgtatccagtcctgagacaggaagcagcagcctgcagacccagagagcctctctcctgaagaggaagatgatcctggaaacaagactgttccaggtctgaagtgttgctgaatttaaaaacaaaaactcgacagcttttaaagtgtcttctatttcactgtatttttttttaacttgccacaatggtagaaaaatcttttgctgaaatgattttgatgatttttgttctctatcttgtttataaaaggaaaatatacatacttcgaattttgtgactttgtgaaggtttctttaagatgtgcattcctttctgcttgctctagtaaatgttttactactggaaaaaaaaaaaaaaaaaaa

SEQ ID NO: 7021 - DNA, 612 bp, Canis familiaris
tgcttactcttgtgaaatgccccagcaggcttggacccccctgtcccacccaccaagaagctgggggccccaaagctcccagcttcttccttctgagcattcaccgcttctcccaaaggaagctgctgctcagagaacattcccaaggcacctctccctgaaggggcttctgagctccgctgagatttttctggcagaattgggaaggaaagaaaggcacctctttggcccaactagccctccgttttgcccgtgcctcatgggccctgctctcagaaaacttccctgactgtggtttacctgcagccaggtgtggggcagctaagtgctgcaggtcagcttgaaagccagctgagggcaatctggttcaagtgcagctgccctggtgaggaagggcggggcggcccaccgggcagccttggggctccctcctgccagattgcaagaccaccaccgaggacagcttcccctacaccatgctttcgctctctcctctccaaaacctccctgtctgggccttgtaagggcatctaaccagggctgcagccttcctgctcccagaagtctagaacagtgcttctcaaactttaaaaaaaaaaaaaaaaaaaaaaa

SEQ ID NO: 7022 - DNA, 631 bp, Canis familiaris
atcaaaaaggctttatgactgtacttcgtggaactaattagcaatggtagcagagatgcaggatggaagttaatacacataaggcaattgcattcctatctaccagcaatgaacacatgagatttgaaatttaaaacacgatattatttatatgtaacaccccccaaatgaaaaaaactaggtattaatcaaaatacatacaagacccatatggggaaaataacattctgataaatcgaaagaagaactaaatggaaagatattccatattcatggataggaagacacaatatcgtctggatgttagttcttcccagcttgctctttagattcagtgcaatcccaatcaaaatcctaacaagttattttgtgggtattggcaaagtgatcctaaagtttatatggagaagcttctggtggcagggtctgtgaaaggggtgcaggtgccatgcctggatgtgaaggtggcaagaaaatgcccctcaagtggcccaagaagcaggccaagcagatggatgagaaagataaggcattcaagaaacagaggagcaggagaaactccaatgagctaaaagtgaaggctgtggggatgggccctggggtcacaggggaattaagatatctgacaaaa

SEQ ID NO: 7023 - DNA, 487 bp, Canis familiaris
tcaggatgtactgtagcatctcgtcccaaagggaggagacggtggcgaaccgttccttcattgctccccgtcacattgatctgcggtcgtggctttggcattcccttgctgggttgtcattccacgaatgtgaccggtctctccatcttgtgagcccaggagtgttacctacagaagcggtgaggccggttggcgagtgagacgggggcaggcgcccgctgtgcggtttcgtcactgtatacagtaagtgcagttaggtgctcggcccaccgccgggggctttcactgtatgctgaggggctgccctggctgcctccgttcctggccttgttcgcgtcgctggttagcctgaagccgtggctggggagggcctccacgggaggggcggaaggccgcttgggccgggcctgccgtgcggcctaacgtgggcctaacgtgcggcctgccgcgaccgggccgacctgaggacctggaagcctttctcctt

SEQ ID NO: 7024 - DNA, 475 bp, Canis familiaris
cgtcgcccgcgtccctgcagctgggcccgggcgcgggggccgcgggcagccccgcgcagcagcacgcgcacctccgccagcagtcctgacgacgtgaccgacgagctgccgctgcccccgggctgggagatgaccttcacggccaccggccagaggtacttcctcaatcacatagaaaaaatcaccacatggcaagaccctaggaaggcgatgaatcagtccctgaatcctatgaacctccaccctgctgccacttccaccccagcatcccagaggtccatggccgtgtcgcagccgaatctcgtgatgaatcatcagcacccaaagctgagattcttcttaaactattccctgacacccctacattcatatattgaattacccctactgtgctatgtcagtatctccaggtaaacccttctcccctcccctatgtacgcaaaaaaaaaaaaaaaaaaaaaaaaaaaaaaaaaaa

SEQ ID NO: 7025 - DNA, 627 bp, Canis familiaris
aatggtgcttggcaaaagtctgggaggagtagaggacaaaaggacaaagaatatacaggaggtgggataactgctgctagaagctcaaagtcacaactggcagagatattgagtgaatccagtccctcatttggtctgtgttcatttagaactcactcattctaggagtctgctccagtgcctttaccgttatcctactgcacatatggatgtttctaatatcctggaagtgtaggcctcaggcatccccgttttctcccaatgggccaccaccaccagttactgggtgcttgagaaggggcaggatttgcagaggtggccagatagggctttcctacagagcagcaagagaaggccaagcagagactactgcagtagtatggaccccagcccctgccagggcttctgccaagggaaaaaatatatatgccattcacctggcaggcaatccagtctccctcaagattactgtgcatctcaggactggcctaaatttcaagactcaaccaagtttctggagtgaactttgcatggactaaattagacacatataagagatgattcttacaggtctgacaccctaatgccaataaaggttgctcactatggacagctaaaaaaaaaaaa

SEQ ID NO: 7026 - DNA, 643 bp, Canis familiaris
  misc_feature (120)..(120): n comprises a, c, g, or t, or includes no nucleotide
gacactgccgggatcaggctgttccaagtggaatgctttttttgttgaagtgcaaatggaatcactcgtttgatgcccaatgacagagtgcagcatggccggttttatagtttgaaccanggctcttcggtggaaaaggagggtttggatctatgctccgtgcacttggtgctcagattgagaagacaaccaatcgagaagcttgccgggacctcagtggaaggaggctacgagatgtcaaccatgaaaaagcgatggctgagtgggtgaaacagcaagctgagcgagaggctgagaaggagcagaagcgcttggagcgcctgcagcggaagcttgcagagcccaggccctgctttaccagccgggcgtaccagcagcaatgccatgagatggctgaacgcttggaggactctgtcctcaaaggcatgcaggctgcctccagcaagatggtgtcggcagagactggtgagagtcggaaaagacccaacaaatcaaaagcagacagaggagccagagcagggaaaaggaagtgcttttggttgggcatggatggactgcagacggcagaggagtccagctcagagacctcggatgatgatggggaagaagctcctagtacttcgggaatgagcccgcaggctct

SEQ ID NO: 7027 - DNA, 582 bp, Canis familiaris
tggccgtggcagcttttgctacgaatctcatgaaggtatggtatcctatggagtgatcccctcattacaggagaaatgcccatacatgtaaatctccgcgacagagatggagagcttaagcccaggagaggatcagaggttaccccccagcccgcctatgtagctcaaccgggaagcctgtgatgacttcaagctttggcggacgctacgccatggtttatggatacaaatgctgcctaccatcgctatttccggcatcgccgaggaggccaatgagattgaaaaaagtctctttccttccagagcctggtgcctggttttgtattcctttacagtagcatcatcgagactacataaacacatacaaattgcttattttttaaatgttcttgtctggctgttgccctccttcctgccccccagatcaataagcagtggaaatgcaatgtggtgaaaggtcaaaagagaattaagatgtgtgattattattacataataaactcttggatggatactttccaaaaaaaaaaaaaaaaaaaaaaaaaaaaaaaaaaaaaaaaaaaaaaaaaaaaaaaaaaaaaa

SEQ ID NO: 7028 - DNA, 310 bp, Canis familiaris
gaagttaaatgggaggggcttccgtcccctcccgaaggtgacaactccgtgagtgtccgtgagaggcagctatctgcactctaaactgcacaacagagaatcacggtgttttaagactgaatgtttttatttatccaaatgtagcttttggggagggaagggaaatgtaatactggaataatttgtaaatgattttaattttatattcagtgaaaagaatttatttatggaattaatcatttaataaagaaatctttacctaaaaaaaaaaaaaaaaaaaaaaaaaaaaaaaaaaaaaaaaaaaaaaaaa

SEQ ID NO: 7029 - DNA, 594 bp, Canis familiaris
gttgtgacagggaatccccctcagcctctcagaactgcagtcctaagccttgacttctctcctacaaaaagccaaaagtgagatgaaaggaaacaaaggtgagacagcagtagaggccccgcccggcctcagtcatgctgccccagaagaaaaccgctggcctttccagagtgttccggggggttagggctgagcagctgtgcaaatagaagagggctttggccttattgtgaacttttaaatgtcatcatcatcatgttatttatttaaatgtagttattttggtatttaattttttttaaagagaggagaaaaaaaaaaccctgtattttcctggtggaatgaaacggctcagaatggtatatttaggcaattttaaaacatttattatttacctacaaaccaaatatgataaatctgttcaagtattgtgtgtcaacccacagtatggagctgtcacaatgttattgcagataacgcgtattaaaaattatgaaattactgcacactagctggatttataactcagccatttaaaaaaataaaaaccaaaccatcatgtgaaaaaaaaaaaaaaaaaaaaaaaaaaaaaaa

SEQ ID NO: 7030 - DNA, 616 bp, Canis familiaris
ccaaggtattccagatggagtatgaaatgcaggtaacaatttcaccccaagttccactgctttctttcgaaatatctcttctccagatagatagtaggctgagagtagtccaccaacaaagcgtatgtttacttcaaagacagaaacttcagcattcacattaaaatctagattttcttcaacccatgattttgcctcttcaaattcatctttcatttccattataaaaagagtatccagggcatctactattgttgctcctttaatactaccaaacaaactgctagaatggccttcttttgatataggtttcagttcatttaatccccaggcataacgcttataattattccaagcatgtttcatcatctcccggatctttgccctcttgtcgcggacggcggcgtcggccggctcccgggccaccgcgccgaccgggggcacgaagtccagcggcggcagccgcctcgccagcgccttgtcgcgcagctggtcctgggccaccttctccttctccagcaggatgtccctctggatctcctcgggcagcttctgcagggtctccttggcttcccggagagcccgctcgtggttctcgcggatccgggccaagttg

SEQ ID NO: 7031 - DNA, 513 bp, Canis familiaris
catgtgagaaggtgcttggcgagtttgaaccatagtagtcagtgtcacagaacgaggtgaccatattgaggggaattggagaaagcttcactgggtccacacctaagtgatggctgaagctcgtacaggcagaaatagggggagaacataccaatccatgggaattgcatagggaaggagcccaggtcaggatggaggaagtgcacagacactgggggagcaagagggaggtcagggctgtgttctggagcccttggtcgtgaggccaagctgataggccatggcaggtatgggagcccttgacagtctggtcttggaggggcaggctggttccatatttgaggaagaggaatttggtgtcctcccatgggatgggagcaggggaaccagagtcataatttcagttgcagaagaccctttaataaaaaatttgagtaaaaaaaaaaaaaaaaaaaaaaaaaaaaaaaaaaaaaaaaaaaaaaaaaaaaaaaaaaaaaaaaaaaaaaaaaaaaa

SEQ ID NO: 7032 - DNA, 594 bp, Canis familiaris
aacttggctcctggcttcagatgtgaggcctgcccagtgggcttcactgggcccgtggtgcagggtatcgggatcagttttgccaagtcaaacaagcaggtctgcactgacattgatgagtgtcgcaatggagcatgtgttctcaattctatctgtattaacaccttgggatcttaccgctgtgggccttgcaagccagggtacaccggcgatcagacaaggggatgcagaactgagagaagctgcagactgataaaaatgacccccacttgtgtgacttcattgagactcattacctgaacgagcaggtgaaatccatcaaagaattgggtgaccatgtaaccaacctgcgcaagatgggggctcccgaatctggcatggcagagtatctctttgacaagcacaccctgggaaacagtgataatgagagctaagccttaggctgtcttcccatagccgcagggtgacttccctggtcaccgaggcagtgcatgcatgttggggttacctttaccttttctataagttgtaccgaaacatctacttctttcgtttgtatcattccttcaaataaagtaatttggtaaaaaaaaa

SEQ ID NO: 7033 - DNA, 596 bp, Canis familiaris
tctcatcactgaccaagtcatcctggattatgaaacccgggagagggtgaatcattgaggaagtgctagaggcggggaaacaagctgcacgagaaactggaaccgtttgtctcccgtcgtcatggaccagtatccccacctcccaggccaagcctggctaacccggccagtgcagcgcctgggcctccgccctatgggatccagcgtcctacgtacctatcttgggcccttgtcggggtctccgtgcctctgtgccttaagtagtatggagaaagtgagaggaggatccccgtctttcgccctccccgttgctgtcaccccccttcttctccgagagctagtgccaaggcctgcctcgcaaacgcccgggctggtgagcctgttgagcttggcgcggtagctactgctgccctttagagacgcgctttcacattcccgggcccgtggtgccccctgcaaagcaccagagcccgcaacaagggccggtccagcccaatacctcgtgggctttaatatcactgtattccgagaataaaaagaaggatgaaaaaaaaaaaaaaaaaaaaaaaaaaaaaaaaaaaaaaaaaaaaaaaaaa

SEQ ID NO: 7034 - DNA, 625 bp, Canis familiaris
  misc_feature (277)..(277): n comprises a, c, g, or t, or includes no nucleotide
cagtggaaaagaggcggaacagtgctgttattttaaacagaaggttgtattatgatgtttttgttttgtttttgtttttttactattgcttgattaaatttggcatttaaatagtggtggaaatattttatataattttcattttttggttgtgcagttccttggctactgtttttcttcagatttgttctttcattctcaagtgcacaagtctttgataaaatattgttaaactgtattataagtattattacacagggttatgttttcctggtcntggagcactttttaaaatccaaactgtctgtcctgtggagcaggcagtgatttttgtttcaaaacttttatacgcatttggaggaaagtactttctatttacagtgtgttgtctgattttaatgtccattcttagccaagctgctagtaggcatcaattggatcctttcctatgttgaaatggaagaattaatgagcttacattaattagtattgtaatgtgtaaaggaagcccagcaaaattttttgaaaacttgatgatcccaacgtatttaccattgtatgttaaagcaaaataaatcaccatttttttagaaaaaaaaaaaaaaaaaaaaaaaaaaaaaaaaaa

SEQ ID NO: 7035 - DNA, 588 bp, Canis familiaris
tgtactacccttaaggaatactagtgaagaaaattaaattcaaagagcaaatgatagaaactacaatgatgtttaaatgcaaaattgtaggaattaacatgtttacaatcaatcttgaactggttgtgcagccatgtccatgagatatctttgtattataaaatgtgaagaaaaaccatgtaaactgatgtaaaggaggtactgtcattttaattaacctatgtttaatagcttttccttccggactttgcaaagccttcttgggaaacacattgcaaagcattctctgggaggcctggcctccgtgtgtgtactgtactgtgcagacatgaaaaacaaacccgtttactgtgtacgtgtaaatagcctgggcttcaggccattttcagccaatagtcacatccagtgcagctttgcacagaagacgttggggtgtggtttgtaagtatgatctgtaaaataagtgggatgaattcccatgtatacctgtgtaaatagatttgttaactgaaatgtactttaagaaaagataaaatctgtaaataaactgatttataaattaaaaaaaaaaaaaaaaaaaaaaaaaaa

SEQ ID NO: 7036 - DNA, 632 bp, Canis familiaris
gggccacacgtggccaccagcactttccccgtgctgagccgaggccgtggtgctgaccttgctggccatctatgcagccggcttgggcccttccacacagcacccagcgggtggtgagtgcacgggccccagacagaggctggatggcgctgaagctcgtggccatcatctacctggcgctacaattggcctgcatcgccctcaccaacttctcactgggcttcctgctggctgtcaccatggtgcccgctgcggcgctcacgaagccctatgggccccggccactctatgctaccctgttggtgctgacgagccccgcagccacgctcctgggcagcctgttcctttggcgagagctgcaggaggcgccgctgtcgctggccgagggctggcagctgttcctggtggcagtggcccagggtgtgctggaacaccatacctatggcgccatgctctttccactgctggctctgggcctctacccctgctggctgcttttctggaatgtgctcttctggaagtgatgcgtggctgccctgcagtgtagactctgggtgggagctcccccagcacccccgtgttgtctccttgggaaataaacaggagttttgtttcaaaaaaaaaaaaaaaaa

SEQ ID NO: 7037 - DNA, 551 bp, Canis familiaris
  misc_feature (1)..(1): n comprises a, c, g, or t, or includes no nucleotide
ncttgggccttcttgggcaacaaaccctgtgtccggcggcgctggctccacacacccaatggcggcctgcagtcacccaaggggccttgcgaaacccccgacacccatcacgtccccagacccgtcaagtcggagcccaggctggggggccactggcgagtcccacgtgccgctcacaagtccggtagacaagggaccccgggcctcgagggccagcgggaccccgtcagccaccgagatgggggaaggggccgccctctgggtctcgtgcgtcccactctccccccgccagaccccgctgtccccatcgcagggacacacgggggcggcacgtggacggctcaccgtgggaccgtcctccgcagcctgggagcagcgcggcctcgcggcacgtgtgcacgacgggcggccacgttcgggaatggccgttttgaaaacacacgcacgggttgtttatggactgaaataaaacatgctgagaaaaaaaaaaaaaaaaaaaaaaaaaaaaaaaaaaaaaaaaaaaaaaaaaaaaaaaaaaaaaaaaaaaaaaa

SEQ ID NO: 7038 - DNA, 624 bp, Canis familiaris
cgtgcccgttctggtcttcctgggagagatgggcctggggagcccagcgcagacagcgagaggagccggtgccggcactgacggcgggcagcgagggtggctgcagccccacgggcagtggggtcaggggcagggccagggcctgcagctgggacagctgatgggcttggagctgctgtcggatgatggagttcagctcgggagcggtgacctgcttagccctctcgatggctcccaagacctgctgctggtgctcttgggaaaggtagggtaggacctgggcacaaatcccattcagcctcttgacgatctcggcctgcttgtgcatctcgatgttcaagccgtaggacatctcgtagtacatcacataatgacgctgcatctcggacttctcgctggccagcttgtcacattcgagcttcaggctgtggtactgagcctgcagcagctgaaactcgtctttgatgcggtcgcaggagtccgaggtggtgaatttgagttgttggggtaggtgagaggagcccgaatgcctgctttgtggaaacatcatgtcagtcgcggcggggggcgcgggctgcgccccggttgtgcgccccggctcgggcggctcgggcggctcggggc

SEQ ID NO: 7039 - DNA, 605 bp, Canis familiaris
tacgggtggcttgccatcaacaccagtggggggatttcaatgttattcctaggcaaggtgctgatagtctgcagcacaggcttggctgggatatgctgctcaactgaccagcaagattacacagtatgggtgctgcctctgatcatcgtctgcctctttgctttcctagtcgctcattgcttcctgtccatttacgaaatggtagtggatgtattattcttgtgttttgccattgatacaaatacaatgatgggagccctggcagagaattctatatggataaagtgctgatggagtttgtggaaaacagtagaaaagcaatgaaagaagctgggaagggaggcgttgctgatgccagagagctaaaaccgatgctgaagcgaaggtgactggtcccatgagcccggaagaatgaactcagaagaggctgtttacatgaggatctcccactcaccagctgttgagagtctgtggatgaagagcaggatcttattacttcaatggaagtgggggaccatgttgctgaaccaccacagccaagtggatttggcacagtagggctgcctaataaatgattcatcagaagaaaaaaaaaaaaaaaaaaa

SEQ ID NO: 7040 - DNA, 491 bp, Canis familiaris
aggccccgccaagcggctaccccagtcacccccatcaccaagaatcagacttggcattaaaatattgtctactcctttactgttatcttcgcccacgtaccaccaccgaaaccaagtagggtcttgatttcctttccccgaaaaggtgctactacctcattcccaggcagaggagggaggacaggacttcaggctgaggcaccgtgtagggtctccctcccccagccgggagccaggggtgggaagtgacacgtggtgatggatggatggaaggaaggaaggacacacggacagagaaagtgggatcaggaaggggctactgcgagccaagcccccactctttgcagtttggcctctgggggtggggggataggagaggcccgactgagcatccgggccagagcagtgcctagctagaccccaaccctttgtggggtatggggtagtccaataaacatggtggattctcagcaaaaaaaaaaaaaaaaaaa

SEQ ID NO: 7041 - DNA, 609 bp, Canis familiaris
tcgtataggtaggaatttgggagaccatacaaaactcataggcaagggtggatctgagtctttgtggagtttagaagcttcgtgctaatttctagggactttaaaaaaacctttctgttttacagcaaagtggctcaaagggacacctgggtggctcacgtggttgaatgtctgccttcggcattagggcactgatcctgggatctgggatatgagtcccacatcagggctctccaaggggagcattgtttctcccgtctgccaatgtctttgcctcttcatctgtctctctctcacgacatgaatatcatcaaatggtttttaaaaaaaaaagggtagctcaaagtttcaagtagatgcatgctacttgaaagtagcaagttagagataggcaagcttaaagcagaacgtctctcggggattccctgtggctggcgccagtggtcttagcgcctgcctttggcccagggcgtgatcctggagacccgggatcgaatcccacgtctgggctcccggtgcatggagcctgcttctccctctgcctatgtctctgcctctctctctgttctctctcaatctgtgactatgataaattaaaaaaaaaaaaaa

SEQ ID NO: 7042 - DNA, 572 bp, Canis familiaris
tggggacagagatcccgggaatcccatcgcatttcctgtaatctgctctgagattgttggccttgccaggagagcctgccctcagaaacgcagggccagacaccccgcctccatctttccaagcaccggggcgaaaaaccacaaaaggaaaggaagacaaatttatatatatataatataaaatcacttggtgattaaaaaataactgctccataaataaaactcctaaagtcactatgtttaaagggtttggttgtgtttttttgtttttcggagaaatattgtaaatatatattttttgttgctgatttagagtcaatctccaatgttgtgctaaaaaatttaaattaaatgtaagcattaaggggacaagtcctgctatctcagttgagacattggggttattttgggcccagggaaggagggaagctagttggacttttgttttctaaacgttctccactattggttttagaaagagcaaggacatctttcctctgacacatgggaatgggagatatttgtgtaataaaatttttaaaagaccaaaaaaaaaaaaaaaaaaaaaaaaa

SEQ ID NO: 7043 - DNA, 595 bp, Canis familiaris
cttcctgcgtgacggtttgcaggctgcgcgtaaagagtttctcgcgtgcaagccctgaggactccggaccgtgttcccgtgctggagtcctaccgagcttccagcacacatagtctctctctcaggctttggagaacacgagaggccccacaaccaagactgtgcaacaaaatgctgattgatccagacccagactatccctactcctacaattcacttttctgcagaactcttactggtgtggctagtacttcaaaatcatacaatgaaagaagagggaaggcgtgtcttctcacactgttccctatgaagaaaaggcgagcaaatgagggtgactcaggacttctagtggcctacacgcgactgaacatttttctgaatgattccacgtatacactttggaattaggaagagaaacattttactcttcactaaccaaataaaaccgtctataaatcatatgcaaaacaactttgagtaacgagggacttaagtctaggaattgaagagttctgtattttccctttaactttttccctcctttgggaaataaacaagacatctgccaccaaaaaaaaaaaaaaaaaaaaaaaaa

SEQ ID NO: 7044 - DNA, 627 bp, Canis familiaris
  misc_feature (348)..(348): n comprises a, c, g, or t, or includes no nucleotide
cctgctgtctgaggacttcttgggacaggaagccctggcccaggtgcaaatgaggagcttcttccaactgtggaaccatgtataggggataggtgtcccagcctcagcagaggccctgtcattgctgccattgtcaccgtcctgtgtctgctgctgctcctggcaggtgtgggggcagtgtggggccaccgtaagtgccagcacaagagctctgtgtacaagctgaacattggccagcggcaggctcggcactaccaccagcagattgaaatggagaaggtctagccaccttcagagcaggctctcccaaagccacttaggaggaaataaactgtgccatgtctcatntgataaacactgataattcactagagcatgaaacaggtggagtagggcttgtctttatttttctcaggtctttgttctataggccaagaagtgtctctggaggcacccagtaggataagaaggctttggtggcatcatcacacacatcaatatctccttaaccaactgctctggactgtattgtgctaatcccagacctgtgctcaggccctcattccagtgtgagttcaaaactcacctctcacttcatcttcttttccttgttttaagaaaaaaaaa

SEQ ID NO: 7045 - DNA, 682 bp, Canis familiaris
cacaaagcagctgttacccgtccggaattcccggggatctactggcacaagccagtgagaccacccacaggaccacggagagaccatgaagagcctgctccttctctccattctggctgccttggccgtggcagctttgtgctacgaatctcatgaaagtatggaatcctatgaaattaatcccttcattaacaaggagaaatgcccatacatttatatctccgcaacagagatggagagctaaagcccaggagaggatcagagaaaccaccaagcccgcctatgagctcaaccgggaagcctgtgatgacttcaagctttgcgaacgctacgccatggtttatggatacaatgctgcctacaatcgctatttccggcatcgccgaggaggcaaatgagattgaaaaaagtctctttccttccagagcctggtgcctggttttgtattcctttacagtagcatcatcgaactacataaacacatacaaattgcttatttcttaaatgttcttgtctggctgttgccctccttcctgccccccagatcaataagcagtgaaagtgcaatgtggtgaaaggtcaaaagagaattaagatgtgtgattattattacataataaactcttggatggatactttccaaaaaaaaaaaaaaaaaaaaaaaaaaaaaaaaaaaaaaaaa

SEQ ID NO: 7046 - DNA, 564 bp, Canis familiaris
tgctgacgatctcatggaagtatggatcctgatggagattaatcccttcattgtacaggagggtatgccgcataccttgatatctccgctacagagatggaggagctcttagcccacggagaggatcagagtgacctccaagcccgcctatgagctcaaccgggaagcctgtgatgacttcaagctttgcgacgctacgccactggtttatggataccatgctgcctaccatcgctatttccggcatcgccgaggaggccaatgagattgaaaaagtctctttccttccagagcctggtgcctggttttgtattcctttacagtagcatcatcgaactacataacacataccaattgcttatttcttaaatgttcttgtctggctgttgccctccttcctgccccccagatccataagcagtgaaaatgcacatgtggtgaaaggtcacaaagagaattaagatgtgtgattattattacataataaactccttggatggatactttcaaaaaaaaaaaaaaaaaaaaaataataaaaaaaaaaaaaaaaaaaaaaaaaaaaaa

SEQ ID NO: 7047 - DNA, 632 bp, Canis familiaris
  misc_feature (1)..(1): n comprises a, c, g, or t, or includes no nucleotide
  misc_feature (120)..(120): n comprises a, c, g, or t, or includes no nucleotide
naaaagggacttcgattcgggaaaagttctttttatcgtatcagaagtatttttctttgcaggcttcttctgagcctttacccctccagccttgcccctactcctgaacttgggggttcntgacctcctaccggcattattcctcttaaccccttagaagtgcctctactcgacacctcagtcctcctagcctccggagtatctattacttgagcccctcatagtgttaatagaaggtaatcgccaacatatacttcaagccttattcattaccatctccttaggcgtatattttacgctattacaggcctccgagatactatgagacatcttttacacattctccgatggggtatacggatctacctctttttatagccacctggagtttcacggagttacaccgtaattattggctctacattcctcattcgtgtgcttcctccgacagctatactaccaccttcacatccaaccccccaccttcggatttgaagccgctgcatgatattgaccctttgttgatgtagtctggctatttttgtatgtatctatttattgatgaggatcctaaaaaaaaaaaaaaaaaaaaaaaaaaaaaaaaaaaaaaaaaaaaaaaaaaaaaaaaaaaa

SEQ ID NO: 7048 - DNA, 604 bp, Canis familiaris
gcccccccgcatacaccagttcgagtccggggaggcatcagaagtaccgagccttgaggctagacctggggacttctcctggcggctcggagtgttgtacacgcatatcaggattatcgatgttgtctataatggcatcccacgatgaactggtccgcaccatagagccctgctgcagatactgtatcgtgctcactagacagcacaccgtaccgacagtggtacgagtcccagctacgcactgcccccgggacgcaagaagggggccaagctgacgccctgaggaggaagaagggggccaagctgacgcctgaggaggaagagattttaaataaaaaacgatcaaagaaaatccagaagaagtatgatgaaaggaaaaagaatgccaaaatcagcagtcttctggaggagcagttccaacagggcaagcttcttgcatgcatcgcttcgagaccaggccagtgcggccgggcagatggctatgtgctagagggcaaggagctggagttctatctgaggaaaatcaagcccggaaaggcaaataaatcttctgtcttcggtcatgtaataaaggtgtttattgttcaaaaaaaaaaaaaaaaaa

SEQ ID NO: 7049 - DNA, 638 bp, Canis familiaris
ataataggtgatttaagataattctcccagaagaaattttgaggatttaagcttaggatattttattgttataaagcccgattattgttagactaataaatcattggtgattttaaagatggccattaagttaggagagtccgctaaatctttcagatattcaaggggatctatgaaagatatctttagctgggccgtgttgatgtgaatagaaagagaagtatctgaaagggatgggaggttttgtagtgacacttgagcacgactgttgctcagagattttaaattcgaggaagtccacgctgccacggatgtatagaagacctgctctagccccctctcccactcccctattcccttgtagacctcctaagccctagaaggttggccctggctcaagtgacaattcccctgtgtgctggtgatcccacggagacagagaaggatttctgaggctttttttgaacaactaaataactgtaactcttctcttttcattgctctcccaatgcataagtatgtagtacacgtattttgctttatcataattaataaaaagtaacatcagctacttataaaaaaaaaaaaaaaaaaaaaaaaaaaaaaaaaaaaaaaaaaaaaaaaaaaaaaaaaaaaaa

SEQ ID NO: 7050 - DNA, 587 bp, Canis familiaris
tgtgtgtgcccgctgttcgattggaccgagctgctgggaagagccctagcatgccagcatgttgtgcctgtcggcgaagccagagcgagagagagagcgtggtgtgaaggtcgtgatagcggaggaagcgtgcaggcgcagttgttcgcgtgcgccatgggggtcgtgtagtgctgtgttatgcgttcagagctcgtgtgcaggggagtggatgtcagtggtcgtgcatagtgtgctgtcccagggcagaccccagagccctggatcgtaatatgaatgtgtcttttctactctacacgctaggccagggctgggggcaagttaccttttctcagggtctggggagggactggaggcccctctctgcatgatcttgacaaagcactttgctaactgtgcacttatccccagctttgatatgggggaatataatatttttaaacaatttcaaaaaagtatctttcatacctattttgtatgcattgtgaaaattccaaaaagagctgagatatgcctatatttgttatttgtcttctgcatcctgggtttataataaagagttctctacttaaaaaaaaaaaaaaaaa

SEQ ID NO: 7051 - DNA, 623 bp, Canis familiaris
ttgtttgtggttttgtgcgttttagggaatgttaatatgtatcagttcataaagctttttgcattttgcagctatggttggtttggattaagtgtagagatgttatgtgcttacctctctgttaactacagaaagaaatgtattgattgagactgcttgtaatagccagttagtcattctggcaaatagcctgtgttagtcagacagtgcctctacagtgtttaatgctgggggtgggggttaaatttgcctattttggtggactcacggaacataaggatgaaagagaagttaaggggaatatttcgtaatatgttaagtaaattgttatttctagcctctacttcgttgctgtctggcatccaggtagataaacagtttcgaaagttcaaggacacgtgagaacttttgccctgagaatgtttggtcacaaactattgttccacagcctatttaagttatcgagttaagaggtgctccatggaatatattgatttttgatatatggttatgtgctcataaaatgcatttttatgcagggcaaacgtttctcatgtcttcgaaaatctttcattttgtagcataagcattggtttctaaggtgaagacagagttcaaaaaaa

SEQ ID NO: 7052 - DNA, 694 bp, Canis familiaris
aaggcacttttaaggcataacagggtcactattctaggcaatgaaaatggtttctggtacctatagtgcaaataatagataattccgagatctagactttactgctacttgggaattatacttaaatttgagggcattttataaaagtaaaactacaggcctagttattttggcatattaagttattgttaatatttttcctaaaaaactggtggtttgcatccatggtaaaatttacacagtatttgctgcctccatctaatcccatcaagaaactttgtttttattgtgttagtaattcaaaataactatgctcccaaaacttgatttaacactccagaagtttttactaagggctgtttttataaaaactgctattgcttctaacttagaatttttaaaggaagagaatatactttcactacttgcccctcctgtgcccaaagaaagtctttaaaaaagtcagtaggcatcctcataattatgaagttgctaaggtagtatttgagattttcttttaagtcagtgaccgtaaggagatctacggcagttaaaagtgatgtaaacagttactcagtgcagcaagtagcttgtgtccatccagaatggctgtacccatttatgacatgttatgggtaaatgtgcactggaaaataaaccaaagaaccacaatataaaaaaaaaaaaaaaaaaa

SEQ ID NO: 7053 - DNA, 529 bp, Canis familiaris
cccttgtatctactttaccagctgaccctcaagccacgagggagagaaggtactggctctgggtatctgacaccacagcatcagtggatcgtgtttcctgccctaccttgtcctgtggacttcattgtgagtaactgggaagtgagaccaggtataggggtaccctatttacattcctgttccatgcctacatcttggtgttctgaactgttcagtgtaagatgtggaaagacttttctgacggattatctgggaggtatagcggatcattggttcagagggaggcgagtctgcttcaaggttgtgaagattattgactggcgtctcttgaatattttaaactgaattggcattttcagtaataattgccatttcttttccaagcattttatagaggggctcttaattttctaccattagtatgtatatctttttattaaaggaaaaagaatgttcccagaataataaagaaataaagcataatgtgttcatgaaaaaaaaaaaaaaaaaaaaaaaaaaaaaaaaaaaa

SEQ ID NO: 7054 - DNA, 168 bp, Canis familiaris
gaaactgctgcgacgatcggtacactgagtgatgcctggcctttctttaacgatttcttttataaggtgcctgttactgtggctcactcttaaacatcataaaagcctcataatgtcatcattaaaggatgtgaaccctttaaaaaaaaaaaaaaaaaaaaaaaaaaa

SEQ ID NO: 7055 - DNA, 600 bp, Canis familiaris
aatcttcaacgcgcatacctgaagttttacacacttggacgtcacctgacagaatcactagtgactcaatggtctgaactaccaactaatcattgttaactgccagtccattatttccccaggtacgtgctagtgaatgtattcagagatcagcttggaaaactttaagccgttaaaggactaggaaaacccacccgaccccttgttgacagctggaatatcacagtgccttaaatctctttagatctagctatgccaattttttaagtttatgttccaagacggacagttccaattcattagttgtgttgaacttccgtctttatgaaactgcacttgaaggtcattcatatattgtttttcagtaacagcttgtcaactgctgttattagaagtactgtactgaaaaatcagaaaatttcaatcttatgcccacctgagtactgctttatggtccccttgtaagtagtggagctgctgtgtttaggtgaactccttacatcaaaggaagtgccccctgcaataaagtaatacacacccaaaaaaaaaaaaaaaaaaaaaaaaaaaaaaaaaaaaaaaaaaaaaaaaaaaaaaaaaaaa

SEQ ID NO: 7056 - DNA, 541 bp, Canis familiaris
tgctccgaagtattcagtaccgctcagtatttgtaatgagaatgatttctcacttgtgatttggtttgggatccatagggaagcacaggcacctacccacatataccatgtattgaaatgattttgctcagaatttgaagtaggaaagttgaccccaacacttctgcttccacttaactggcctgccatattgtaagaatggcatatccttgttactgtgatatttaaaatatccccagtgtccaccttttcccaaagattctagtaatgatctagaaatatctttctcttatctgttatttatcaatttttccccgtatttttatatgggaaaaattgtattgaagacatttagtatgcagttgataagaggaatttggtataattatggttggtgattattttttatactgtatgtgcccaagctttactactgtggaaagaccactgtttaataaaagatttacattcccccaaaaaaaaaaaaaaaaaaaaaaaaaaaaaaaaaaaaaaaaaaaaaaaaaaaaaaaaaaaaaaaaag

SEQ ID NO: 7057 - DNA, 593 bp, Canis familiaris
tgggtgcctacccaccctcaggcacgtagacacccaccaggtcctccataaagagattctggaatgccatcaccttgaagccagagggtccccaagtcctagccgtaagcactcaagcctcaaggatgtaagcctgagcataagtaacttgactccacagagctgctccctgctcccacggtggtccctccttaacccactgactctgaggcaaccaaaaaatccggacagcaaacagccacctaacgtcccccctcataaggctttaggttcagagcccatggcccccagggctttggcatagcctcagatttctctgacttcctccactcccaatgtgaacccaacagcttactacctgacccaaggctacccaccccaaggaagggttgggggatggcagcactggtgggctggcctgtgtaaaatgggcatggggtggggtgaactgagtcactgtggtgagggtgagaggaggacttgggagctggaggtggggagcctccagttctactcctattaaaggacttttctgaagggaaaaaaaaaaaaaaaaaaaaaaaaaaaaaaaaaaaaaaaaaaaaaaaaaaaaa

SEQ ID NO: 7058 - DNA, 620 bp, Canis familiaris
aagaagctggaggagcctgagaagccacctgaacgagagtgagagaggaatgaaggtcatcgaaaaccgagccatgaaggatgaggaaaagatggagctgcaggagatgcaactgaaggaggccacagcacatcgctgaggattcagaccgccaatatgaggaggtggccaggaagctggtgatcctagaaggagagctggagcgctcagaagagagagcagaggtggctgagagtaaatgtggggacctagaggaggagctgaaaattgttaccaacaacttgaaatctctggaagcccaagcggacaagtattccaccaaagaagataaatatgaagaggagatcaaattgctggaggagaagctaaaagaggctgaaacccgagcagagtttgccgagaggtctgtggcaaagttggagaagaccatcgatgacctggaagagaccttggccagtgccaaggaggagaacgtggagattcaccagactcttgaccagaccctgctggagctcaacaacctgtgagggtggctcagctccaagccgggctgtcggcgccaccccaacgcaataaagtggatgttactggcaaaaaaaaaaaaaaaaaaaaaaaaaaaa

SEQ ID NO: 7059 - DNA, 668 bp, Canis familiaris
gagcgtggtgatttatggcgcggggggaaaaccccaggctcgtctctgcaccggaggaaagtcactctcgtctttggctcggggccccctaaagctcagaacaagcatggagcactgcagaaccctcttacccctccctcctcttccttcagcatcctgttgaggagcgaaggctctggagcagactgctttgcccctctcaggatctccatccagaaggagcaccaaagtattcagagttcagcagaagggataccctgatactcctgatacaggagtagtcctgtatcagagttgagcttccccccacctcttttagggccacagcacagagtctgcttcttctcacctataaaccaagtgaaggatgacccagggctggaaaaaagctagcctgaagccggagagagagactgaccaggaacctccctcgaattgtttaacttcccttcaaattcccttcggctggctcagtcagtgaagcatctgctttgggctcaggtcatgatcccacgttcctgggatcgagttctgcatcaggctccctgctcggcggggtgtctgcttctccctctccctctgcccctccttgtgctcatgctctctctctcaaataaataaataaaatctttaaaaaaagaaaaaaaaaaaaaaaaaaaaaaaaaaaa

SEQ ID NO: 7060 - DNA, 648 bp, Canis familiaris
gagctcagctgagttcctcctggtcttccgcaggaggtgttcacggagctgcaggagaagtatggggagattgaagagatgaatgtgtgcgacaacctgggggaccacctcgtgggcaatgtctatgtcaagtttcggcgagaggaggatgcagagcgggcagtggccgaactcaataaccgctggttcaatgggcaggctgtgcacgctgagctgtctcctgtcactgacttccgggagtcgtgctgccggcagtatgagatgggggaatgtacccgcggtggtttctgcaacttcatgcacctgcggcccatctcccggaacctccgacgtcagctgtatgggcggggacccagacgcaggtcacccccgaggtctcataccggccaccgtccccgagaaagaaaccgacgacgttccccagaccaccggcatggtcgcttctgagaccctggctcccttgacccactcctgacaggcatcagtgttcctggccaggacccctcctgaaagctcccttacctcgccagcgccgtcttccccagactccggggctccaagatgtaatctgttcaacacagggatcttctcttaccaccccttccctaataaagttctctattgagggtttaaaaaaaaaaaaaaaaa

SEQ ID NO: 7061 - DNA, 590 bp, Canis familiaris
aactccagggtttggcattatcattttttgggggggcggaactggatcctgaaaaattcatgaaagatgctaagtacctacactgctttaagaatttggaactgagtcatgaaaaggaagacagaagtaagaaattgggaacctgagtagccctgcaaaaacaaaaaagaataagaacaataacaaacagccataagcgaactattaccattttctgttgttgctgtggtctaatagagaaagtgggtgttggaggtacgggggagtgcacctcatgcacatggcagcagggcatatacccatgctttccccatgaaaagactctgctggttcctatgatttcttggctctcttttgaaacaggctggcccaacatcacttgacactgagtcctcctttcacatgtgtccatgatgggtctcaactgcatccatgttcttcccagtactggctaagccaggccccgtgttaaggtgtaaagagaacaaacatcagtgataatgtattgtgtaagacctttgcatcttgtaaattttgtcatttttctaaaaagaaataataaaatcctagacctcaacaaaaaaaaaaaa

SEQ ID NO: 7062 - DNA, 629 bp, Canis familiaris
cgctaaaggaaattgctatgctcttcgagcctgaaggctattgggctgacttattgacccatcatctggttttggcacttttttggaccatatacagacacactctttgttgaacacacgatgaacggctatcgacactttaggattctctgtggatgatcttggctgctgtaaagtgattcgtcataggctctggggtacccatgtggttgtaggaagtatcttcactaatgcaacaccagacagccatattatgaagcaagttaggtggaaaccaacagtaatgtcaatgtattggctgtactcattgatatgtaccatttgggttgatctataaacactgtcaaaagcttcaactttttaaaatttacttatttctgggtatttatttcaacatttatgaatttacagcacttggcacaatggtataatttttaaatctcaaatgtttattaatactatcacttgaatacatgttgatcacatccacatcgctatagaatgtgataattaacatgtaaccaggacatgatctcatattgttatttctcccctttattggaaaaacttgagttttatttttctctaaaaataaatcaatcacacatttggtaaaaaaaaaaaaaaaa

SEQ ID NO: 7063 - DNA, 610 bp, Canis familiaris
gagcaatgggattcacctctgcctccctgccccagaggggactggggcaccctgatagagaaatatgtataagaatagaattacagttatatcccgataaccttctttatgttttaaaggattctttccaaattcattatttataaataacatcctttttccccctcttctagtttttaaaactaaaattggtcattgaatttttaatttttgcaattaaatggaattttgcaattccatttaattgaggaagaataaaactgtattgtgtttcttgttgagaaatatgtgaaaatcaaatgggcaggtgtagagcaatgcatttgagtactgagtcctgctggaggctgggataacgaacctgagccgcagggcaagtctgaaggaaatgtgatggatgttccctattgcaataatgtcacaattgcctcaaacaggcaatgttagtaataattacatcaatttagtcagaatcctgagtgtatttagatctcatgacttaatcttgtggaacttttcctatatgcaaactgaaactttaataaagaccaagcaatcccatgtgattatctgcatggtgtatctaaaaaaaaaaaaaaaaaaaaaaaaa

SEQ ID NO: 7064 - DNA, 596 bp, Canis familiaris
  misc_feature (231)..(231): n comprises a, c, g, or t, or includes no nucleotide
attctattttccattagatggatcttttttagttcagacgtatttggtgcttgatttgagttaaagtgtaaaggcacacatacacatagctaaagaaattaggagagtagtaagggtgaaaagaagaaccccaattcctcaaatttagcagcttgactataaaaaatagaaaaaaagaagctttgttatagtatccggcttcaagaccacgagtaagaaaggctactaacnataccttacttgacataagtatttacccttttatgtttgttttttgtttctgcaagcttgagattttgaaaactgttttctctgttacatgtaccgcaggttataacgtttcttatgtgttttgttgcagctccaaaaaggcttccagaatttcctcaggcaaacacacccttcccctttgagaagcctgagggcaccttgggtaatagcagcagcttcacgctggcattaagataggggtggccatcacttaattctataggacatgcttactgaatccaatcttagcaaatctcgatgacctgatgaattccattaactcaggcagacaaggggttgatttaaaaacaaacagaaaaaaaaaa

SEQ ID NO: 7065 - DNA, 644 bp, Canis familiaris
tccatcctctgatcaggatgacctccactccatacccccctaatccggagccccttcgaccagtagctcaaacagtctcatatgaagtaaccgcctagcaaattattctcctatcagtcctcctaattaaacggggtcattttacacctaatccacgccttaattatttacccaagaacatatatgataatcttttccggctgacccctagccatgatatgattcatctctaccctagcagaaactaatcgagcccccttcgacttaactgaaggagaatccgaactagtctctggatttaacgtagagtatgcagcaggtcctttcgccctattctttctagcagagtacgcaaatattattataataaacatcctcacaacaattctgttcttcggcgcattccacaacccattcataccagaactctactctattaacttcactataaaaaccctcttattaaccatctgcttcctatgaattcgagcatcataccctcgattccgctacgatcagttaatacacttattatgaaaaaattttctacccttaactttagccctatgcatatgacatgttgccttacccattatcaccgcaagtatcccaccccaacataaaaaaaaaaaaaaaaaaaaaaa

SEQ ID NO: 7066 - DNA, 592 bp, Canis familiaris
cccagaccgatgaaatgatttatgccccaaagtaccaatacttgcttaaggtgcttgtgagaccatgcgagcctgctcagcattgcataaatgattcagtgagaaatgggagccttcaccttccaaaatgatgagccaatggccgtagaggtttgtagagacccgtgtttgtttcttaatgtttaaaaatattaagtacactttgatacccaaaatgcaccttgtaaactctgtaacatcttttaaaaggctattgcagtaaaataatgctctcagttttatgcatatacagattagctataaataaatgtcacgtaagatggtaagaggaaaattagagaaacttgcatttggagcctattttttatgcttggccaggaaaaaagaataaatcctattggagcaccaatttttaaagaacactttttttgtaagttttctaaatatatgtacttgtattttgcacgtggtttaagaaatgacctcagacactttgcaattacagattcaatcgtgccattcaattgtacaataaaactaaagatatataaaaaaaaaaaaaaaaaaaaaaaaaaaaaaaaaaaaaaaaaaa

SEQ ID NO: 7067 - DNA, 654 bp, Canis familiaris
  misc_feature (14)..(14): n comprises a, c, g, or t, or includes no nucleotide
cagccctacatggnccacattcaggcgaacccggagctgctgtgcgggacatgctgcgggcctttgaagctcccggcaggcccgagcctgcccctggagtgtcggcggaggaccacatggacgacggttcccccatccggctccgcgtgcagatcaacctgagccagggcagcgcagtatttgacttcagcggcaccgggcccgaggtgtttggcaacctcaatgccccgcgggccatcacgctgtccgccctcatctactgcctgcgctgtctggtgggccgcgacatcccgctcaaccagggctgcctggcgccggtgcgcgtggtgatccctagaggctccatcctggacccgacccccgaagcggccgtggtgggcggcaatgtgctcacgtcgcagcgcgtggtggacgtcatcctgggggccttcggggcctgtgccgcgtcccagggctgcatgaacaatgtgaccctgggcaatgcccacatgggctactacgagacggtggcgggcggcgcgggcgcgggccccggctggcacgggcgcagcggcgtgcacagccacatgaccaacacgcgcatcaccgacccggagatcctggagagcaggtacccggtcatcgtgcgccgcttcgagctgaggctggggtccg

SEQ ID NO: 7068 - DNA, 609 bp, Canis familiaris
gctttctgggagacatctcggaggtacaaaccctggggagtgaagagtatcacgttcctcaaggatttcagttataaccgggaagactttgccaaagcagggctgcaggtggagttcatcaaccccatcttcgagttctccagagctatgaatgagctgcaactcaatgatgccgagtttgctttgctcattgccatcagcatcttctctgcagatcggcccaatgtgcaggaccagctccaggtagaaaggctgcaacacacttatgtggaggccctgcatgcctatgtctccatccaccacccccacgaccgactgatgttcccacggatgctaatgaaactggtgagcctccggacactgagcagtgtccattcagagcaagtgtttgcactgcgcctgcaggacaaaaagcttcccccgctgctctctgagatctgggatgtgcacgaatgactgctctttccccccatatcttctgttttctgaggcacctgcctgcttcctagaggtgaagcagatggagaagggcaaacattcctgggagctgggcaaaggagatcctcattgtggcattaaaggagagtcaaaggaaaaaaaaaaaaaaaa

SEQ ID NO: 7069 - DNA, 609 bp, Canis familiaris
  misc_feature (230)..(230): n comprises a, c, g, or t, or includes no nucleotide
aacttgttgctgatctggacctgtatccccagtaactgttccctggtatatgtttaatacccggacaatatcgttggattttacacccttagcacatgcggctcggtcacttcaacggctgaggtttgagaaacattgtttatgggagagaaatccactgatttggagaatccacaagaccatcgggttcttgatctgtgcagggtattcatgtgtaagaccgcctattncaggatttctctagaggctggcaagagtctgaaccagttgtcatttctgtcttgccggtctaacaggtttgggaaggtccgagccttaggacccactttcctgtcttacccaatgttttcctgccagaacaccgtgggtggttaattgccttgagttggaaaacggtttgcatttacaactgtaaatttattcatccttttaatttatgtaaggttttttgtacacaattctcaattcttttaagagatgacaacaaattttggttttctactgtcatgtgagaacattaggccccagcaacgcgtcattgtgtgaggaaaataaagtgctgccagtaaaaaaaaaaaaaaaaaaaaaaaaaaaaaaaaaaaaaaaaaa

SEQ ID NO: 7070 - DNA, 495 bp, Canis familiaris
  misc_feature (18)..(18): n comprises a, c, g, or t, or includes no nucleotide
cgctgagcgagatctacncagtggatcatggacctcttccccttctaccggcagaaccagcagcgctggcagaactccatccgccactcgctgtccttcaacgactgcttcctcaaggtgccgcgctcgcccgacaagcccggcaagggctccttctggaccctgcaccccgactcgggcaacatgttcgagaacggctgctacttgcgccgccagaagcgcttcaagtgcgagaagcagctggccctgaaggaggcctcgggggccgcgggcgggggcaagaaggcgaccgcggcggcccaggcctcgcagggtcagctcggggaggccgccgggccggcctctgagactgcggcgggcaccgagtcgccccactcgagcgcctctccgtgccaggagcacaagcgagggcccctgggagagctgaaggggacgccggccgcggccctgagccccccggagccggcgccctcgccggggcagcagcagcagcag

SEQ ID NO: 7071 - DNA, 270 bp, Canis familiaris
  misc_feature (1)..(1): n comprises a, c, g, or t, or includes no nucleotide
ncgtgtacgtggagtctataaagcagagctcgtttagtgaaccgtcagatcgcctggagacgccatccacgctgttttgacctccatagaagacaccgggaccgatccagcctccggactctagcctagccgcgggacggataacaatttcacacaggaaacagctatgaccattaggcctatttaggtgacactatagaacaagtttgtacaaaaaagcaggctggtaccggtccggaattcccgggattgacggtcacggaggataag

SEQ ID NO: 7072 - DNA, 636 bp, Canis familiaris
cggtctgcttcttgggaggctggaaaagattcatcccacctgggaaaatgtttattctttctgatggagaaggaaaaaatgggaccattgagttgatggagccccttgatgaagaaatctctggaatcgtggaagtagttggaagagtaacggcccaggcaacccttatgtgtgcatcatatgtcccgtttaaagaagataaccatcctttcgatcttggcctttaccatgaagctgtgaaaattacccactgagtttcctcagttttttcctttgggggttgtgccatatgattgatcttgatgagcaccttgaagactgtcatagtaaacccctgatatttgagggagatttctgtgatttttaatatttaacttgttctcttttttatttcatttacctaaccttatgaggtactgcaatatcccacttttgatgaaacctgtctgtatattgaaacttaagtcctcctaaagaatcccatctcccgtaatatggtcagatcagatgcacagaaccaagcagtcaccttgaatttagttttctgttttactaataaaagctgaaatggtaaaaaaagaaaaaaaaaaaaaaaaaaaaaaaaaaaaaaaaaaaaaaaaaaaaaaaaaaaaaaaa

SEQ ID NO: 7073 - DNA, 548 bp, Canis familiaris
  misc_feature (18)..(19): n comprises a, c, g, or t, or includes no nucleotide
tgaagctgcaggacccanncgaggttggtcgaatctttccttcagggataattttagaaccagcccgtggacgattgggaagatatgggctgtatgccatggagttgtgcattacaacttggagaaagagcgtgaatcagtcactacttggaactgcacacaactggccacctgattaaaatgacccccaccttgtgtgacttcattgagactcattacctggacgagcaggtgaaatccatccaagaattgggtgaccatgtaacccacctgcgcaagatgggggctcccgaatctggcatggcagagtatctctttgacaagcacaaccctgggaaacagtgataatgagagctaagccttaggctgtcttcccatagccgcagggtgacttccctggtcaccgaggcagtgcatgcatgttggggttacctttaccttttctataagttgtaccgaaacatctacttctttcgtttgtatcattccttcaaataaagtaatttggtaccccaaaaaaaaaaaaaaaaaaaaaaaaaaaaaaaaaa

SEQ ID NO: 7074 - DNA, 708 bp, Canis familiaris
agaggacttttgagagcatgaagcatccgaaggttgaatccgacttgctggttcaatggatggtgttggaggtgcttctgaaaatgatgacccttccaagatggttatggttctggcagctactaatttgcctggggatattgatgaggcgttaagacgacgtcttgaaaaaagaatctatattccattaccatcagcaaaaggcagggaggagctgttacgaataagtctacgtgaactggaattggctgatgatgttaaccttgcaagtatagcagaaaatatggaaggttactcaggtgcagacattaccaatgtgtgcagggatgcatccttgatggcaatgagaaggcgtattgaaggtttgaccccagaagaaatcagaaatctttcaagagaagaaatgcacatgcctacaactatggaggattttgaaatggctttaaaaaaggtttctaagtcagtttctgctgcagacattgaaagatatgagaaatggatatttgagtttggatcatgctaaattctcacatgcaaactgtgagaaacctgccttaagtgtttgaataataattaaatgtagtatttcattgcattgagtactatatttttttaaagtttcataatggtaagattttaaaaaaagaaaagtatgattctgaataaataaaggcaattttttaaagctgcaaaaaaaaaaaaaaaaaa

SEQ ID NO: 7075 - DNA, 667 bp, Canis familiaris
atcaacttccacagcgctatccagagaccccgctatttgatgcaccccgttcaaagagttcagccttgttatgcagctctgaaggagttctgttgacctcatgaactgtataggattcaagtttactttcccagatgaatcccaggtgatgtgattacttttgactactggcgcctactgcacggccgacccagctacgaagcaggaaccgagatttcccggcacctggaaggcgcctacgccgactgggacgtagtgatgtccaggcttcggatcctaaggtcagggggtcctacacagaaactgactctcccgtctgtgagctcagtaaggttccgatgactatattttgtccgatatggacaaggtggccttcctcgaccatgacccatggcctttacatactaatttctttcccatcgaacacgtcccctctcttgaacgggttcccttcctttgtgctcatacagcgagcccactctgtagacggctgagccctgctcttcccagatagagcatctctccggctctattgtacgtatgacctaatttctcttgcctgtatatgagtctccagaatgcctacaaatagtttagtgtcaaataaaacttggtcagataaagctctttttaaataaagcttgtgtttccaataaaaaaaaaaaaa

SEQ ID NO: 7076 - DNA, 443 bp, Canis familiaris
tgtgtgtgtgtgtgtgttgtgtgtgggttgggtgtgggtgtgggtgtggtgactgcctcttgcttgctcttgtgtccgcccgactgctgaagctttgccttgtgcatctgtagtgctgcccggagcccacctttgctctgggcgtcccggccccttcccctgcgacccccatttcgtttgacctttaggtaaatgtggatgacaagctcctaagcctctggctgtcaggtgcagggtgtgctaggcgtgctctccaggggccctggctgccgccctgcctctctcacttggccacctcttctgttcactttaagttgccaggagacagtaagacatgcagttactattaaatagacttaatgactttttggtttgttttgcactaaagttcctgtgatttaacaataaataaaatctgttaacccaaaaaaaaaaaaaaaaaa

SEQ ID NO: 7077 - DNA, 577 bp, Canis familiaris
ggcagtgtgatatcacctggcacaatagcgtgatgcttttaacggggagaaagggaggggagtccccattttggtggaaactgtctgatcctgaactattggggagcagagcaagtcattctgtgtcttcgtttcttcagataagatttgtgaacttcaagatgactagaaaacatgttgggtgttatggaaagcagagcataattttcaggacaaatgcttgaggatggtagagggaaatttcaccagctcactttcctccccaacacagtatgtcccttttttcctaagatctgctgagcccatcgcctgtgtcttctacgtatttccatttctccttcctctgattatccttctttgcttcttttccttgttaataccttcttattgctctccccttcttcctctgtattggtccaggctcattcctggagtagacaaaacaaaaaaagcaaaccctttccccctcatttatgtaaaaaagacaatactgtggtgttgagcaaaattggtataaaaagatcctgtcagaatcccagatactctgtattatgggatagaaagagttttcacaaaa

SEQ ID NO: 7078 - DNA, 541 bp, Canis familiaris
tggcttcggagcccaagcagtcaggctccttccgctacttgcagggcatgctagaggccggggaggtggggagcggctggggcctagcagtccccgcaaccccaagcccactgccagcaagctgggcactccgctgagcggcctgcagggactgcccgagtgcacgcgctgcggccacggcatcgtgggcaccatcgtcaaggcgcgggacaagctctaccaccctgaatgcttcatgtgcagcgactgcggcctgaatctgaagcagcgcggttatttctttctggatgagcggctctactgcgagagccatgccaaggcgcgcgtcaagccacctgagggctacgacgtggtggcggtgtaccccaatgccaaagtggaacttgtctgagctgctccaggaacctcccgtccccgcttctgcttttaatgcccccgcgtggtccagtgtaaatatgcatttgccctctgcctctctaataaattccctctgctcaaaaaaaaaaaaaaaaaaaaaaaaaaaaaaaaaaaaaaaaaaaaa

SEQ ID NO: 7079 - DNA, 567 bp, Canis familiaris
gaggccaaggagaaagtgcagaaggagcaggccatcaagcgtggctcgggagcatggaatccgattctgttgagacaagtgccaaatccagcacgaatgtggatgaggctttcagttgcctggcccgggacatcctgctcaagtcaggaggccggagatcgggagacagccacaaggcccccggcactgacctgaaaccctgtgataagaagaacaccagcaagtgctccctcggctgaggacactaggcccagaggctgaacctcagggaggcagggctatgggtgggcaggggagaacagcaggtggggtgaggggagggggtctagaggagatagatggtggaagagtagggagcaaatgtaaaagaaagtaggaaggggagaggagagaagacaggggaaggagaggcaaggaggagagagaagcaagcgagcagaaagaggtgagggggtaggaagaaggggaggaggaaaccactggccctgggtgtcagcctttcccgggacttgagggcagacacaaatgtaaataaaaagttgacttgttgttactgaaaaaaaaaaa

SEQ ID NO: 7080 - DNA, 623 bp, Canis familiaris
tttggttcttgtcacttgcttaacagttagagggctacattgttggactcacactaattaatgatcagctgtagaggatagtatgttatatagtgtgacaatatgggtttgtaacattagtttaaaaaagggaaagtttcattgctgtatattttgtgtaccgtttgtacagaataaaagaattacgtattaaaaaccatgtaaccatggcacttgatctgatgtgacctgaagtggtaatgagggggattaactgctgtaatcacatctgtaaaaatgacttgtctttgagtgttctgtgtgcatgtaattgtgcacatttcagtttcctatctgagcttatttgcaaaatatacacatgctgtgtggataattcagactccagctatgaagggactcttccaacctggtgttgtctccacaagaagaacccattctgacctagccagttgtctccctcatccctgcgaacctgctgaaacatcagctctcgctcacttttcatgctcggctgtgtcctcttcctttttgggtaagagctgtgttcagatgaaccccacaccacagatttgagaaataaaagatgtgcaaggcaaaaaaaaaaaaaaaaaaaaaaaaaaagg

SEQ ID NO: 7081 - DNA, 541 bp, Canis familiaris
gacacttggggcacaggactgcccccaagtctttctcagactcatcctctgcccggctggcagccacctggctggcatgccttggaaggagtattggggccccttctggggttcaaggctggtggctggagtcaggacacaaggtggtaggcagcctccacctgcagcaccactagacctcacatccgagggacacttgaatgtggccatcactcttctgtccaccatgccctggactcaggaggctggaggaggctgccctcggcacactgcccactccatgtggcaaacaggagccgcgactcaggaccactcacaggcagggagggcaaggttgtacattcctactggacaacagtgacagcctggggctctccggagttgggcttcccctctcttaggcttggctcactccccagacacatggccacaggtctgggatgagaggtgggtgccccgggtgccccgcaagccgtgcaaaataaaaagtgcctgaaaggtaaaaaaaaaaaaaaaaaaaaaaaaaaaaaaaaaaaaaaaa

SEQ ID NO: 7082 - DNA, 613 bp, Canis familiaris
gaattgtggagaagaaaattgactaaatacacagaggtcctcggagaccccatggactccgtggtctgagcccaatgaaaattgacttattccatcatgcttggcctgacactggccctttcgctccatcgccgccctaggatatgggggactccccaggggctgctgccctcatgcctcaggcaacctggggcttacagtactgggaacacaaggctttagtcactactgttaagaaaggtcttctaaaaagttaaaaataaattcttaagagttctgaggcataagtgcctgtgactcattcctgagagttattagtgccatttcactgtaagcaagaaagacctggaaaatggaggggagcccttcgttgagaatggggtgtatttaaacttgtcatgcacagtcaggcgctatactctgtagctgttagggtgtgaggatgctgggggccaagcctggtgtacagaggtagttccagatctgtagatggggaacagccaaggggtcacaggctctacccttgtgctatccctgtaattctgtgatccaaacctaataaattatttttaaagaaaaaaaaaaaaaaaaaaaaaaaaaaaaaaaaaaaaaa

SEQ ID NO: 7083 - DNA, 594 bp, Canis familiaris
ctctggcttgcctgtgtcctccgctcagctgtcaacgagggagtacgtcatcatgggcctatggaggatgatggagcgttgccaagattactgttggttggaagggtctattgccttgagaaaatgggaagggatcgacttggtaaaaaagttcaagcgctgggacatgaagctccgtcatacttggactgataaaaggtgatgtctaggccacagtgattccacccagagtcagaagatctggcaggacgccaaccccccggcaagcacgcaactaaatcctggaatgcaggaaagaacaccagtggacttcctactaagacttgcgttgctggatcagcaaaggaaaattgcactattgcacgccatattctattttttaccacaaaaatcatgtggttactgatattacttctattttctctgttttctgtttctctctctctctctctttttgtggtctgagtgcagatccttaaatatatgtattctgtttcactaatcctgggaaactgttctttgcaataataataataaattaaacatgttgataccccaaaaaaaaaaaaaaaaaaaaaaaaaaaaaaaaaaaaa

SEQ ID NO: 7084 - DNA, 616 bp, Canis familiaris
tggcctcgagccagctgggctgattctgtactggtgctaaaccggcccaggtactggtatgaagtggattaggctggatattctatggcttataaacacatgcagtgggaggaggacagactgggtaggctgttctgtcctccctctgtcgttcaagtgctcactgccgtctgcccgtggatggcagagacgcagctgcgacccttccctcatgaagcctgggtccaggcagcttctcaacctgactgggtgcagtgttgtggagggaagtggaagcccttgcttgtttcccagtcaatgctgagtggcagagaaaaaggtgaagctacttgtgtgtgtgtgtgtgcgtgcgtgtgtgcgtgcatgtgtatgcgctcagggtcttagtctcttcaagcatccattggagatctgtctcctccgtgtctgtcatacactgagggccaataggctaagaagatgtcccagactgggaagaggttgggagaaactggagacatggcaatgagggaggacgcgtcagcctaactgcctgaggaaggctgagctgacattggaatggaatctttaataataacctggagagtatttactgaaaaaaaaaaaaaaaaaaaaa

SEQ ID NO: 7085 - DNA, 631 bp, Canis familiaris
  misc_feature (324)..(324): n comprises a, c, g, or t, or includes no nucleotide
cctgggtaccaggttctggctcctttccctcagcacctatcccttcccgtccgctaggctggcccaggggcttccatgagaaccttggaagtttcccttgggggcttgcaccagggacctaggactgcatcaggcttcaagctgttcccttacaggcgctggactccaccgtgctcccccaaacctgaggttgcctgcccttttcctgtcaggggtcagcatggtccagtcctgggtggagaaggctgacgctgtgggggcctggctcagggcaggcgtaggagccggggcacacccagtgccacccccatgccacccccaccnaggtggtaccaacctggttggggagggcagccttgagtcctgtgcttggtccgtgatcctgaggtctaggcaggacttgcagggccgccattccccccctgctcctcaccccccacccccgcctgtgcctgctttgcaacccctttgcttgggccacggtgtctctgcattgcttgcctctttgcctttacctctttttttcctccaccccagcacatgtggggtcttggcccccaggctgtgagctccttgggggcaggccctcaataaatgtgaagtgctgctgcccaaaaaaaaaaaaaaaaaa

SEQ ID NO: 7086 - DNA, 637 bp, Canis familiaris
ttcacaataggagaggtcaacaagtttcaagatgtttcttgatgattggaatattcaacggctctttggctctaaaagggctgtgttatgaacgagcctccttgagtccaaccatccagacgttcattctgtctgccatttggcacggggtgtacccaggatattatctgacatttctaacaggagtggtgatgacgctggcagcgcgagccatgagaaataactttagacattatttcatcggacctccccaacttaaattattgtatgatgttttaacgtggataatgactcaaatagcaataagttatacagttgtgccatttgtacttctttccatgaaaccatcagtcatgttttacagctcctggtattactgcctgcacattgactgggatcttcaatattattgttgctgccggtgaaaaaactcaaagaggaaagactacacatgaaaatgtgcagctgtcagccatccagaaagttcgatgaaagagaaaattctttgggacagaatagtttttccacaacaaacaatgtttgcaatcagaatcaagaaatagcctctagacattcatcattaaagcaatgaaggggaaaaaaaaaaaaaaaaaaaaaaaaaaaaaaaaaaaagggc

SEQ ID NO: 7087 - DNA, 655 bp, Canis familiaris
agtactccttgtcttaatctgactgacatatgttgttgaatactgtgggttttcatcttttgttgttgctaccccttcctggagtcagggggtccagaagccagctgtatccccctgcatggggtacgtccagtcaccaaggagagctgctaagctgcttggtcccctctgtcctgctcttaggctcttcctgggattactcagtcataaaacttgaaactcttggagtctaggccacagccccctactaccaccgttgtgggaatgatttgggctggtccagatggtccacctccaggagatcccagctgggatgtggaagcttgggaaggagaactggagatgtcatctaaatgcaagcccccaactgatgtgtctggcgtggtttataggatagaacaaacattcaccatttgatgagtgtgcggtaccattctccatctgtacattctccctcccagtgtatgtaaaatatctccatagttgaatgtgcctcgacattttggttttgtctgaagtgagagacagtctcattagttgtctgcagcaaatctggatgcttgaaaaggagtttgattcttgaaatatttgtcatctttagaaatggtcaaaataaaagggatacttctgccagtaaaaaaaaaaaaaaaaaaaa

SEQ ID NO: 7088 - DNA, 650 bp, Canis familiaris
ctagtgaatgacatatgtgaatagaagtttatcaagtaaatgtggtacaggacctggttaaggtgttacatgtgtatctcacctggggaacctgctcagcagcttggtttctggggcttggggacatatgttatttctttcacaagccaaactgctctttcattggtttcgtgtacatacgttgtatgtagacatacgtgcatccaccttcatccccactgtcccgtgtactccctcacatactctgttgtctgaagtggcctcttcagtcgggcccggaaaaggctcaggagcagtctgttcctgccgccagggcccgggtccgggtggccagggtgcagccttgggactgtgcacgcgggggggttgtgcggtagagcgatgtccccgcagcccttcagtgctgtgacgggtctctcgggtgcggacccgacgggctccagcccccctgccccccactgctggctgtggctgacatgatcattcccatggaagcctagtctgtatgatgcgagaggcttaactgcaagtgactgatgtcatttacgttgtaatcacatcccttttctgcttcaccaacctgaactcttctatggatgaaagtatcattaaagttctggtctctttccaaaaaaaaaaaaaaaaaaaaa

SEQ ID NO: 7089 - DNA, 519 bp, Canis familiaris
gaggctacatctggggggggggagtggttaggacaacaacctgagcacttaggtgggtgaaagtggcagcaggaccctctagaccaaggccctccagatggttgttatctctaagtccacgctatctatttgcctgtgtctgttcctggagaggatgttctagaagtggttggttctgtgcggaagtcattacctttgtggagaaagttggaggcacctggcagctaggcagggtagaaacggtctgtttggggccagaggtcccaggctaaataaaatgtcaccaataaaggcacaaaggtgcctagagccaaactgccttaattcagagcaccaggtatcctgcaggtgcctgtcctggggagaccggggtgtattcgcagttaacctcccagagggaagtaggtgtgtggtgtttacagaggacgctacggaactcttggcttaggcttccacaactctgaaaatttgtacgaataaatacagtcatgctaaaaaaaaaaaaaaaaaaaaaaaaaa

SEQ ID NO: 7090 - DNA, 630 bp, Canis familiaris
gtttggaaaaaaaattggatgtggcaattttggagaattacgattaggtaagactattttgtttattccattatgttggaagcatttgtgtttaaactgaaagtactgttctaatgaaaatgatattgttattgcttagttatttaattgtggtaattttaaagaatataaatgttggaactttctttcgtatttgtattttcatttgtaaggagttccctagtatatgaatgtctgtttacttgagatcacccatatgtaatatgaggaaaaagaaagtaaaataaaaagtctctaaaaagctgaaaaaacacctttaaggagccattttcagggtgctatttaagaatgatatttatgctacttttttccgatttgaaaacatgtagtaactgatcactttaggagggtatgtatggcttaaagtcaaggtaatatactgaaactgcataaaaatcagaagaattggggcacctggatggtgcagtcagttaagcgtccaactcttggtttctattcaggtcctgatctcagggttgtgagattgagccccggcattgaactcagtgctctgcttaagattccctctccctttccaactgcccctccccgtttttttctcaatacaaa

SEQ ID NO: 7091 - DNA, 641 bp, Canis familiaris
  misc_feature (110)..(110): n comprises a, c, g, or t, or includes no nucleotide
atctgtcttgaatgcaaatggtgatgttgaaatggatgctagtatcatgaatggaaagacttgtctgcaggagctgtgtctgcagtccgttgcatagcaaatcccattanacttgcacggcttgttatggaaaagacaacacattgctttctgactgaccaaggcgcagcaaaatttgcagcagccatgggggttcccacgattcctaaagagcagctggtgacagagagaaacataaaacgcctagaaaaagagaagcatgagaaaggtgctccgaactcagactgtcaaaaaaacctgggaactgtgggtgccgttgccttggactgcaaaggaaacgtggcctatgcaacctcgacgggtggcatcgttaataaaatggttggccgtgttggggacaccccatgcataggatctggcggttatgctgacaatgacattggcgccatttcaacaacggggcacggggagagcatcctgaaggtgaatctggccagactcactctcttccaggtagaacaaggaaagaccctggaagaggcagccgacatgtcattgggttatatgaagtcaaagctgaagggtttaggtggtgtcatcttggtcagcaaagcaggagactgggcggtgaggtggacctc

SEQ ID NO: 7092 - DNA, 632 bp, Canis familiaris
ccttgtgtgctgctctttggtggcacaagaagggactggccttattattctgcatattgcagttcttgtccatgacctggtacagcctgtcatacatcccatatgcaagggatgcagtaattaaatgctgttcttctctcttaaattgagaaatcagaaactttgaaaagagcattggaacttcagcgttctgttttttgtgaaatacggttttcctgatgtaataatcactccccaaacaactggtgtgacaggttaagaccattttgtgtactggtggaaactacatgtttgattaaactgttaaatacttgtaacatgaaattcattatgtgtcattaacgtgttctttcccaaataaggagtttttaatcattgccaactgtaaatgatttttagttttttaaccttttctaaacagcatttaaaatgtgaatatttaaggataaatctatgctgcaggcttttttggctctttaaaaatgtcaagttttactttaaaaaaaaactttaaatgtgaaagtttttaagctaaaaaattgcttattatatgtaataaataatatataaatctttacaattttgaaataaacccacacttggaaaaataaaaaaaaaaaaaaaaaaaaaaa

SEQ ID NO: 7093 - DNA, 511 bp, Canis familiaris
ctggagaagccaggagagattgtctggtctgagccctgtgtcatcaggcaagaatatatcttagccatccagggtaggtaaaagtatatcactgtgtatcttaaagatctctagggacaaagattccaaaacttctcctggaaggctattccaagtagccttttaaaaattcttacctcatcctttagaaaaatgagttcttttataatttcctttctcttctagtattctactggaagcggaaaaaaaattcctttcacatttttcctttccatctttctttatgccaaagaatctgtgtgcttctacttttattacttcaaaatggacttacgtttccaaattaaatgtgattctttggttgcttcagtttattatttgcagtctttcttaatgactgttttgtattaaacagtcctaaactcctatctggttagtttttggttgctgctataacaaattaccacggatttggtggcttaagacatcacacatttattatcaaaaaaaa

SEQ ID NO: 7094 - DNA, 625 bp, Canis familiaris
ttcaatcggtgggactgtcttatttgtgttcaaatgtttaaactttgcttctccgagacacaaagtactaggttggccaaattataatatctattttggtgctagtaaattctcaaactagatttataaatgcactgtaatatttacacaacttagaaacccaattacaagtattcagtgtcagaatacttcatgaatgttcaagtcaaccaaagttagttcagtagcttatctcagttatgagtataatacattacatgtaaattaagtgtgtgtatactgtaatcgtgctattttttatcattgaaacatgtataaactagaataataatgcccttaatgtgagggtttgtaatggtgcttattaagaccaaagacttgttaaatgtatacaccaagtggtaaggaaatttctgtgactggcccacacgtgcatggaggtctgggaggaccaagaaccagcctcagcagccagaggatcaccagtgcatccttcatcacacctgtgcaatatgccaagattaccctcggtcattcctatcaacaaggggtccatgtcataaatgtcacaataaaacagtctctcttttttttagtgtaaaaaaaaaaaaaaaaaaaaaaaaaa

SEQ ID NO: 7095 - DNA, 550 bp, Canis familiaris
tagtagtgcatagaattctagcttgttttcctccgtttctctgtatattgggctcagagagttacactgtgtctctatgtgaatactggacagttagcatttacccacatgtacctgtctactttctcttgtttaagaaaaagatgacacttagaaaatggggttatagaaggtcagcaaagggtgggtttgagatgttctgggtgggttaagtgggcattttgacaacatggcttctcctttggcatgtttaattgtgatgtttaacggacatccttgcagtttaagatgacacttttaaaataaaactctcctaatgatgacttgagccctgccactcgatgggagaatcagcagaacctgtaggatcttactttggaattgacattctctattgtaattttgttcctgtttatttttaaattttctttttgtttcactggaaaggaaagatgctcagttttaaacgttaaaagtgtacaagttgctttgttacaataaaactaaatgtgtacaccaaaaaaaaaaaaaaaaaaaaaaaaaaaaaaaa

SEQ ID NO: 7096 - DNA, 524 bp, Canis familiaris
actacacatcggttggtagtagcccgcctgcttggaggcgacaagtgttaacagtatttctgctctaatcttcttcccattctggtttctgtagacaggtttttagaagactagaggcttatggttaggatgtaggctttaaataataaaattaaattatatacccagttcctagagctaacggaatgggaagcaaggagttgttgataaatccgagattctaaatagtcctcgttaaaacttaaaagccagatactggttagaggactttataaaggtacctaaccacgcagccattaaaacgttttcatggataatagtggggggggggggggagaaaaatctatttgtaataattgctgttttctcaagtttctgccttgtgcttcgacctggattgcattatggtttatacaaaaagggggggaaaagtaaagcacaggactttcatatatattatatatttctgtttaccattttaaaataaaaacattttcccaaccaaaaaaaaaaaaaaaaaaaaa

SEQ ID NO: 7097 - DNA, 680 bp, Canis familiaris
ttcagatctggatgcagccttgaaacccacacactggggcttgaggaccagctccatcctgatgagctgtgtggccctgaacaaggttcctgtgtgctacacaaaccctcctgcaacctgcttcttctttcatctatgaatcatcatctcttgatgtcaattaaggaagatcaacctaatgtcctctgatgactgcatagtcattcttagaaaatgtaccacaatttattgaacctatctcctaccgaaagacacgtggagtgtttccaatttcatgccattataaaccacactttaaaatatctccatatatttatattcacattatttgtcctactagctccttaagatatattatcatgggctggatcaaaggaagtgtgcattttaaaccctaatagatattgataaattcatttccgaaaagaatccatccatttatactctagccatagcatttccttctgcctcatcagcaccaggcggcattattgtttttaatcttttccaatctgataggaaaataaaaatcttgtggctgttatttttgtccttactattgaggtgactgtttctagtttgtcttgtaactgcctgtttatgtttatgttgtcgtttaccttgacatactaaaaatatatatcaatcctttgtcataaaaaaaaaaaaaaaaaaaaagg

SEQ ID NO: 7098 - DNA, 644 bp, Canis familiaris
gaggcaagcggaggacaaggagtggatccccgtcaccaagctgggccgcctggtcaaggacatgaagatcaagtccctggaggagatctatctgttttctctgcccatcaaggaatctgagatcattgactttttcttgggggcgtccctcaaggatgaggtcttgaaaatcatgcccgtgccaaagcagacccgtgctggccaacggaccaggttcaaggcactggtcgctgtggttctgtgctggtgcgtctcatccctgcccccagaggcactggcattgtctcggcccctgtgccccagaagctactgatgatggctggtattgacgactgctatacttcggccacggggctgcactgccaccctggggaactttgccaaggctacttttgatgcgatctctaagacctacagctatctcacccctgatctctggaaagagactgtgttcaccaagtctccctatcaggaattcactgaccatcttgtaaagacccacaccagagtctccgtgcagaggacccaggctccagctgtggccaccacatagttttataccagaaaaataaaagtgaattaaagcttgttaaaaaaaaaaaaaaaaaaaaaaaaaaaaaaaaaaaaaaaaaaaaaaaaaaaaa

SEQ ID NO: 7099 - DNA, 589 bp, Canis familiaris
tcttgcaaccttgaggaattccataaggatctgtagttgggctgcatgtgattctgcttccagttgtttcttcttctgcactagtaattccaacatgaggttgacattggccaaatcaaggttatcttggtcagttcccaacaaatcctgtaatatttgccacctgtggccattggtgctactcactgagtggtctaatttgaacctcttttcctcaaatctttgcttctgtttgagaataagctcattcaccaagaaattaggatacagatggtcaatattatccacaacatagttacactttggacatctattattatcctccaaactctgatgaatacacttgtagcaaaagctgtggccacatttcgtcatgtatgcttcctcaatcatatcaaagcagatagggcacacgaagtcgttgcttttgtcctcgtaggagttgatgagcccgttgcacaggggggcgagcagaggtctcttccggctgccgctgccgaggccggagctgctccctcccacgccggcgctgggcctggccgcgcagctgagccgagactggcccgcggacaccgccccgccgccgctg

SEQ ID NO: 7100 - DNA, 545 bp, Canis familiaris
  misc_feature (265)..(266): n comprises a, c, g, or t, or includes no nucleotide
  misc_feature (277)..(277): n comprises a, c, g, or t, or includes no nucleotide
aaggtggccctacgtgccaacgaccagggggtacctcgggaagagatcagaggaggagtacgcagatgcagaggaggagccccgtgaggacggaggacacaggagggacgcgccaccggcccaggggggtgcctggggccccagacactgggagaggcaggaaggaccctccccggagcctctggaccttggtggtcctgcccccgctggacacgtactaccctcaaggcaccaaccaagtggggtaataacagcacactggggnnagtcaatcccntcaaaggggtgagtatgatctcgtgtccgtgcacaggcatcggagccctgacacctgctgccatgtgcacattcctcgaggacacggtgcttggtgagaagaccagacaccaaagtccccgtgccgtggggtcccacggatacgagatgtccaggtcggggaaatccacagacggaaagttaattattaattgctgtgaagaggaggatggggaaggctgcccatggggacagggtcttcatttgcgggaatgagaatgctctggaac

SEQ ID NO: 7101 - DNA, 555 bp, Canis familiaris
  misc_feature (1)..(1): n comprises a, c, g, or t, or includes no nucleotide
ntagcatcagaactgtcacatctctccccctccggagagcacgggcttgcactcttcccctaggacctatctttggaggccattagaagctttgtgtttcattttccccctggtattgtcttgccaggatggttaggtacacacaggacgcttattagatcactgagaagaaaagcccaacccgctttctctggtatgaacatctagtttgagagcacagctcaaaccgtaggcttgtattagtgctttaatggagtactggtgaacatgttttctttcttgataggaatctgcttatatttagccaggcttctatttcatgaccctctcccactaccaactttccgtgcagttacctcttcatttttaaagccatttcactgctaaatataaattgtatttgtggggtttcatagttatataatgctgaaggggaccactctttcgttgaaaggtgataaaagttaaataaagactgtttcccccagtaaaaaaaaaaaaaaaaaaaaaaaaaaaaaaaaaaaaaaaaaaaaaaaaaaaaaaaaaaaaaaaaaa

SEQ ID NO: 7102 - DNA, 650 bp, Canis familiaris
gccctacacatgcggagaatgtgggaactgctttgggcgccagtctaccctaaagctgcaccagagaatccacaccggagagaagccataccagtgcagccaatgtgggaaaagttttcgccagagctcaaacctccaccagcaccacagactccaccacggggactgagagcaagcctcattctccctgttcagaaggaaagcatctataaggcttctgtgtttctccttcccctgacttgcatgtaaatcacagactgtgtgtgtgacttacagggaaagcaagaagtcctcaaggaatgccagtgcatatttggctgctgaggagtcccagaagacatcaagggggatgtgaccctgtcagtgacagagtgaagagatgtcaggtctgggtgttaggtgagagagaactgaggtctctgctttccagcagagagtaactgctaagacaatctggctgatcctgcaggtgcccctgtccctttatttattctctaaatacgttcaagggtaaatcacacatatagttaatgtactgtcataccagacaatctttatcacatacacacttctttaataaagatcagtgacccactaaaaaaaaaaaaaaaaaaaaaaaaaaaaaaaaaaaaaaaaaaaaaaaaaaaaaa

SEQ ID NO: 7103 - DNA, 674 bp, Canis familiaris
  misc_feature (1)..(1): n comprises a, c, g, or t, or includes no nucleotide
  misc_feature (115)..(115): n comprises a, c, g, or t, or includes no nucleotide
ngtggaaagcatccgggctaaaattctgatgtgtgatgccagggtgttgatcagattgaggtagggttgttactttttaatcttctgaagagcagttttaaggctcaacttaganacatcagttctggaacatgggaccctatgcagggtactggtggggaggtggtcccaggaggcatggggtcctgtggttgcgcacacagaaccagaccctgccccaggagtgttgttgccctgtgctctttgtgtctataaagttgagagaaggtgccagagaaaaggttcaaggtagagatgaaactcattgcctggaagaaaagtagcccaagttaagggtgtgcctggtgcctggttgacttgtggcatatactttccgagacagaacaaatagggtgtaaatatgtgagtggctctggctttctctcacagtggagtctgttttggtcagaacagtcttctgttccaggtgatgaaaacccaagccatggatccctgggtggcgcagcggtttagcgcctgcctttggcccagggcgtgatcctggagacccgggatcgaatcccacgtcgggctcccggtgcatggagcctgcttctccctctgcctgtgtctctgcctctctctctctctctgtgtgactatcataaataaataaaaattaaaaaaaaaaaaaa

SEQ ID NO: 7104 - DNA, 459 bp, Canis familiaris
aatcagaaaggcagctaggtcagatggaaacattccactattttggttcataatattcactatgtgctagggaaaaaaaacttgctccagtctcctcctaaattctgtgcctgagaaccacctgctgcatatgtattttttattttgtatcacaactgttaattgaagctttaaaagcatatatgaaatgtataaatctaagatgtataataaaatgcacctgttgactctctgaatgtgttctggaagcatgttggtcctttataaaattggatcaggattggggcatctgggtggctcagtggttgagcatctgcctttggctcaggtcatgatcctagggtcctggggtcgagtcctgcattgggctccctgtgcttctgcctctgcctgtgtctctgcctctctcatgaataaaatctttgaaaataaaaaaaaaaaaaaaaaaaaaaaaaaaaa

SEQ ID NO: 7105 - DNA, 634 bp, Canis familiaris
  misc_feature (31)..(31): n comprises a, c, g, or t, or includes no nucleotide
tcgcttcctgattaaccgccttccccagctncagcagtgggaacgtgaagtcccccagaaataaagataattccagcccccagcaggaggtcactccgcaagatcccctgaaaaccgccaactgagactgcgttccggggcatctgggcatccgggaggcaagagttccgaggacgcgtggtctccctcacccccagggagagggaggcgttgactgcgaggtaacaggttcttcttacgaccccagaactctaagcgtgcacctgtgtggctggccaagcttctacatttctgttcatgcaacgtgtgggaaaaagaaagaaaatgtaaaataatagagaaatgccttagttatttaatatcctaactttactgcatttgaaggtagtcgggttcatcctgacaaaccatagtcgggtctttaaggaacgtagcagatcggcttgctttcgtatacatcaggcctctgctctttggtcggaattccccccagtatttagcttcctgtacctgatgatggggttttgattgtaattattttttattcttatttataaatcggaagtttttaaagtgtacagctttctaaaatggaataataaaggttaagcataaatacaaaaaaaaaaaaaaa

SEQ ID NO: 7106 - DNA, 501 bp, Canis familiaris
gttatcgcccgtgagaagagtaagcctgtgtcatgcatgagagggaattgttgagggttaggtggcctccttgctcattattgttacgtgcctgggcgtgtatagaccgtttagtgcccccatgcccccccacgcagttgaaacctgtataatcctgttacccagctgtattgttgcctcctgtgaaggaaataatattacttctgttcttcccccattaattgctgttgcattattttacttgtttctgtactttttttctttgcatcgacattacagacatcgaggacctcatccaatccatttaaaaacgagtgtgaagggggaaccaaagtccaaatatttttagaaggtcttaagaaaccatgcctctgtttagcatgcccacaagaatgcattgatattgtgaacatttgtgatacatgtattaataaatagaatcattaccaaaaaaaaaaaaaaaaaaaaaaaaaaaaaaaaaaaaaaaaaaaaaaaaaaaaa

SEQ ID NO: 7107 - DNA, 581 bp, Canis familiaris
gccttcgaccagaggcaagactccgtccgctccttcctgaagcgcagcaagctgggccggtacaacgaagaggacgggcacagcaggagccgaggcctcccagcgcctgaacgaggagaagacccaggccagtgccatccccgtgggcaaccgctgtgaagtgcgggcagcctgggcagccccctcgccggggcaccgtcatgtatgtaggactcacagatttcaagcctggctactggattggcgtccgctatgatgagcccctagggaagaacgacggcagtgtgaatgggaaacgctacttcgaatgccaggccaagtacggcgccttcgtcaagccatcggttgtgacagtgggggactttcctgaggaagactacgggttggatgagatgtgacacctgaggaaaggcatcccccagctccaactaactggcctactcattgcccctccctgtgtgtgcccatggccctcttccccgagcccatttttattttattcaccttgctattgacttttgagactcatgcattaaatttcctggaaacctgaaaaaaaaaaaaaaaaaaaaaaaaaaaaa

SEQ ID NO: 7108 - DNA, 673 bp, Canis familiaris
aggagtcgtgaagcgcctgctggtgtccaccctcggcgagaagagtggaaagggactgaagacctgcaagagccccggacggaaaagcaaggagagcagcccgaaggggcgcagcagcagcgcctcctcaccccccacagaaggagcaccaccaccatcaccaccactcagagcccccgaaggcacccgcgccgctgcttccgcccccgccccctcccccacctgagccccagagctccgaggaccccgccagcccccctgagccccaggacttgagcagcggcgtctgcaaagaggagaagatggcgagaggaggctcgctggagagcgacggctgccccaaggagccagctaagactcagcccacggtcgcgaccgccgccacggccgcagacaagtacaaacaccgaggggagggagagcgcaaagacattgtttcatcctccatgccaaggccaaacagagaggagcctgtggacagccggacgcccgtgaccgagagagttagctgactttacacagagcggattgcaaagcaaaccaacaagaataaaggcagctgttgtctcttctccttatgggtagggctctgaccaagcttcccgattaactgaaataaaaaatatttttttttctttccaaaaaaaaaaaaaaaaaaaaaaaaaaaaaaaaa

SEQ ID NO: 7109 - DNA, 618 bp, Canis familiaris
  misc_feature (1)..(1): n comprises a, c, g, or t, or includes no nucleotide
ntggttcttatggattctgcgaggctaaaataggaagacagaactctagattagagaggtggggtaatagtttaagtgccaagtgtagagaatggaaaggtgacagtgtgtgatacacttagaacatccatgtgtattggttatttacactgagctgtttgaaccactatagcataaaatcagattttttttttagattaaagtagaagaataggaatgtaaaaaagttacacacttaatgtagaaatatcatttttaaaaagactgggcaattatgtgatgtgacttttgtgtcaacttttcttcagctattagaacccagtagaattacatatgaaagtctaaagagttagttatgtatttctaaatttttcagaactccagatatactgatgaaaacctggggattgggatccctgggtggcgcagcggtttggcgcctgcctttggcccagggcgcgatcctggagacccgggatcgaatcccacgtcgggctcccggtgcatggagcctgcttctccttctgcctgtgtctctgcctctctctctctctctctctgtgtgactatcataaataaataaaaattaaaaaaaaaaaaaaaaaaaaaaaaaaaaaa

SEQ ID NO: 7110 - DNA, 582 bp, Canis familiaris
cttgttcctggaggcagtatcatgtggtggatttgttggcaagtcacagtctgtggagcttttgcaggtggattttgcagctgcagtcaccacacctctggatgtggcaaaaacaagaatcatgttggcaaagacattctgtaagcaatgtggggctgtttttacgggtgacagacctgaggcccagagagttgactttgcttccatgctattgcagcaggctggttcccagcaccgctagcggcaatgtactctctgcgctgcacggggtctggcggacgcaggggctgtcaggattatttgcaggtgtcttccctcgaacggcagccatcagtctgggaggtttcatctttcttggtgcttatgagcaaacccgcagcttgctgttggaacttggcagagcgagcccctgactccggacggtgccccatgctctgctctcaggaaaggggacgccgtgcgagcagctgcagtcgccaggctcgggtgtgcgaggaccggagccctggccctggtggtgccctcagccctcctctcagacccccgtaataaatccatgtggtgatgctaaaaaaaaaaaaa

SEQ ID NO: 7111 - DNA, 634 bp, Canis familiaris
gcagaggattgaagggcccatcccgcctaaattgagcctttgagctctgcatctgagcttgcccccctgcgtcccacttaacctctgtccccaagacccccctcagtaacaggactctcatgccagagccctttgcaccaggttgccaagggaggcttttgaagcttccagaatggccacccagtcacctgtgtgagggtccaggctcagtcgtcggcttagagagacaccatgggggctcctgcccatggtgatgccacacgcacagccccacaggactgtcagggctcgccttgcgtgtgatgccaggacgcgcccaagggctggggcccatgggggcagtgctgcccagactggcgccccaggagcccccagcgtgccgccgaggggccccctgacctgctcacccccccacgacgggggccgaaaggctctcgggggcttcagccccacacggggatgagagaagcagctcacagctcacacgaaagagaggcaaagtgcctgatatatttttatatatctaacagatggtgcatgttctctccagtctgattaacaagaaataacttaaaaacttgactgatattatcttaataaaatgtgcaacctgaaaaaaaaaaaaaaaaaaaaa

SEQ ID NO: 7112 - DNA, 618 bp, Canis familiaris
agacggtgttggaactccttgcacaatcgtcgtgcagcaagctgacccatcctcggtgtttgtaggaacttctcgaccaccgcagcagttgctgcagtcgtgctgaaatgcagggagacccttcaggcattccactcactttgagttgtccctaagcatacacctggactcgatcggagggaacactgtcaacagtcaccctagaacccgagggcaactcattggaggaagagttgcacaaagtaacagtcccctactcggagtagtaccctgttgctgacacctggttcttaccatttaaataggtgtcagaggctgtgttggcacaactggtgatacgccctttgctccgtgtggttagtgtagagttctaagcaacacctttatagggtgggcagtgaaccaaagtccccttgtagtgagcatggccccatgtgtgtgcacagctagactccttgagtcctggccaagccacgtggcgcaccagacaccattccctgcaaaccaaccacaggtcaccgctcagattcgccatcgaaagcagtactagggttgttcaccagagagcctcattcacttattttccgccttggttacagttttttttttttttttttt

SEQ ID NO: 7113 - DNA, 498 bp, Canis familiaris
ctctctgctgtagtaagcatgcacccacttggtcatccgcgcccaccagtcactggagctgtcatcctagcgagtgttccagacctcttaagtggggttaaaaagccttctaagtagtgcggtagttgctgcagggtttgagtgctccaaatggtgtaggtgttctggggattacccagccccaaagttcacagaattctgcaatctatgggcacccccaactaatattcacacgctccccctaccctaaagtctcaggggacttggggaacaacaagctagaggggaaatctccccaccaccgtcgttatctgtgaggatgcagggggtcaaatgtaggaggacaccccactggcccaggggtcgagggccctgcctctgggctgcacacagacctgatcagcaaagccaggggaggggttggtcagggaccagaccacctgctctgcaccagaggcaggtagatcatcagatcttcagaaacagtcctaatttagc

SEQ ID NO: 7114 - DNA, 614 bp, Canis familiaris
  misc_feature (35)..(35): n comprises a, c, g, or t, or includes no nucleotide
  misc_feature (161)..(161): n comprises a, c, g, or t, or includes no nucleotide
cttctggtcccactccttgtagccgacactttagngttctatgcctaggtttcctagttgaactcggaaactcttgaaagcaggggtatttggtatcaagtctttggttgtccagtgtgatcactaggttttggttaaccctggtaaaaaggttttacttnttgtcccacaggccgaggtcttttattagttggtccacgtcctgagccgtgtaggctttgagggcaacctgtgcaacaaaactcattaagcagggcactcctaagctagcttagtcataaaagattatctctagttgctgttgggcttgtttatggctcctaagtgcttctcaccgcccggtgagtggagaccctttgggacacttggttacagaccctctgcaacccccagatatttggtaacctagtgctgtactggtcccactgttttagatctttattttaccttccccctaaagtgttgctgtgtttgttttgactgattttgtttgcctgtattgcaaaagtaaaaatataagcaataagctaccacaatcccacttatttctttaaccaaaaaatgaaccactttttttttttttttttttttttttttttttttttttttttttt

SEQ ID NO: 7115 - DNA, 658 bp, Canis familiaris
tgctctcttaagaaccagtggtctccaccaaaaaccagggcttgctgagccagataatcaagagttgtccccatccccttggactaccagtagcctgattactaaatggtagttagtagaactgagtattatgatcaatgaataatgtttaatgcaattagggtagcaagggaggcactgcggaagtgccgccagccaaaggcactgggagagtactaggtgaccctctacgggcacccagctaggtgccaccaacacacagccatagaaacagccacacacacacacacagagagagacacactagttatttatttattttacaattgtattttttttttaatacaatgaggccaaccaagccttatagtaagtataaagtagggaaaattttttacttgcagtaaaagtcttacactaggacctgtgttattgttctacctgaaagagcaaatcagttctaaatgtaaaacagaagtcacatgaggttgtccaaaggaatggcagagccttcagagcaatctccagcattttgctcaagtctaaaccaaaaaggtaggttaggtaatagagtgcttaactttctttatgctgatcaatctgtcagtttattttacaatttattggcaaagaaattaaagatttttttttttttttt

SEQ ID NO: 7116 - DNA, 649 bp, Canis familiaris
agtacaccctgcatagcattagtgccacatgggaaataaaacaattaatctgatggtcgggaattctggattaagacccatgcattaacgaccaatgtctacgaacaactagtttctataatagaagatgcactaaaactcatagagcaaactttatggtgctgaaaaagcctaatagggtggtaaagccctcagtaacccaaataacactggaatatcacaattcgtatcaagtgcttttgtaactcaaatcttaatagaaagagggtgatttatattcaaacaacccacttctaaaccatggaaatacaggttatccacgacgtatcacagtcatccctgtagctatatcatccagtttatccgacaccacatatggtacgaaatacacgcaatctgcggagtagcaatattaaaaatagtaaagggttgccaaagctacctttcgtgttgaagcatatgatgttcaatcatcttcattctaagtgagtcatctaggtagacccccacctatcctctcgaacgttgttccatctatagagtacctttttattgtttggttggttacgttcccccattttaaggaaacttgccttagactattcctaatagacaaacacttactgttttttttttttttttttttttt

SEQ ID NO: 7117 - DNA, 624 bp, Canis familiaris
  misc_feature (120)..(120): n comprises a, c, g, or t, or includes no nucleotide
tctcggttataagaacgacctatttttgttctcagaagattcattcaggttaaatttcaatttgttaaagactggtttggccacagtggttattctactgtgctgtttgcagttgggtanggagtgactacccgaagaggtatactgtgttgtagtccagagccttgggccaggtgcgtgttggagaaaggctctaccttgttgatgatcgttggacacaggcaggtgagtccagggctgagtggtgtgaaaagcgtcctgtaccctgtgctgggctaggtctattatgttgtccaaaggcaaagttggcaaaggtgctcatggagttgagtgcctcctatagcaaatcttgaggaagcagaggcagactagagatggactgccagtttggttgttgacaggagggtcagggtgtgtcctgagtggtgtcctaatctgatgacatgttttgattctttactagtaagatcgtcgcttagttaacaatccttgcttgcttgaccttgacaccctcctctggatatttcttataccattcaaagttctcctagaactatctagagaaaagcatgaaaaagtttaattagattgaggtttatatagcagagataacccttttttttt

SEQ ID NO: 7118 - DNA, 461 bp, Canis familiaris
gcgttctagacacggccagactgtttatgtttggacgaagtaataactctgaaactggttacagtagtagcagtagttgtaataggttgtgtaactggcccacctgcattgttttaacgtactacaccccgtgttgcatttttattgtggcgtacaggtttgttaactctggtggtatgagtggtcaccgttgtttttgtagagttgtccttgtttgtagtaacactcactgctgtggtatgagttgtagtttttgttgtactatttttagatcgcctgcttcggctggctgccacatttgctgcaacctttctgtgtgtgtagcactaggttgtcgagggctgagttgttgtgcttgttgtggtggtagtggctcctaacctggtgtttgtaacaggctgcgtagttgtaaaccactaggttgtagtagtcgtatgagtcataggctgaacttttttttt

SEQ ID NO: 7119 - DNA, 568 bp, Canis familiaris
agcaggggatctgtctggaccttaagtagactcagatcgagtgcctgctctactgtgcctgccacacaacactcccggcatcgcagtagggcggcacccgagcaagctgcagagtacctgtgggagacatagcagttagctgtttcagcctcgtctcaggactcttgcctccagctgctacacagaacaacaagctccccacaaaagtgctccggatctatttttacaacacaaacaaccctggttggatgaatctgacacgtacttagagcactccttcctcctctacaggatacacacccaaaaaatcagggtcagggaagaatctttgagggctatcagggtctagttctaccaacaagttagctttgggtctaaagagagctgctcttgattttagtacaaatctgtttacaagaaatctagctactctaaatttcggttgttttacatgcagaaatcttgaaaaaacagttcttagcaacccctttactgggttcacctaatagtgttcgagaccttttgctctgtcggctgtgggtaggtactccaggcagacgacgggggc

SEQ ID NO: 7120 - DNA, 504 bp, Canis familiaris
aagagagaagttagagagaaggggggaggagtatgactatattcaagactaaatgcactctggacacaggtacttgtttcagtgtttaatctcccctaaacagcaactgcctctacagttccaagtagctggaactgtcacgtggaccaggtaaagtgccagtagccctaaagggtagtgttgaaaggtggacaaggttagtgggagttctataaaaagctaggagaggattatatttattaattagtcctgttttatgtaagagaatgtatgtttttagaatctttaaacatcctacccacatagagagacccaaaacttacaaataaaagcaaagagaaactgaaggttattaaacagaattccatacaactggaactaggtaaaagtccccatcccagaacttacagaaattccccatcaacagaatggacatcagtagttccctaatttggctaacaactacactttttttttttttgtttttttttttttttttttttt

SEQ ID NO: 7121 - DNA, 603 bp, Canis familiaris
tcctgggtggtgtggcaccgaccacccgtggccgctcgaaacgaatgtcactatgcaggtacgtgccactcaggttgagctgagccaggtgggtcctgggcgagagggaccctacgttgctgcagcccgtggcagtgggggtcgtggcccgcatgcctggagcagcagggcttcacgcgccactgcaccacccgacactacacctggtgcgtcaccgtagaccggggaatgtcgaggagatgtctagttacctgttccgtgtgaggcactgttcgtccttaaacttccgtgctctaacccagaaccaacagagccgctggccttcgggacaggtcgaagtaacagggtgagtcctttcagcatgacaagggatttaaatggtgccgcagttacccccgaatgctcccgacccgtagcagaagatttgcaagcgtgaatcaatcacccaagctattttttagcagttcctgaggcccacccaaagaccacgaccaggctgcgtagggcggagaaccacttaggcttagtagcagtgtttgacaaaagctatttttaaagttatttcaaagtgagtaaagtgagttttttttttttttttttttt

SEQ ID NO: 7122 - DNA, 647 bp, Canis familiaris
caccggcaagtccccccagctctccgagtcacacaggcatcacctcagacctcccggagaatacctcactgaaaccctatttttttgtttctgcataggtggcggggcctgtggctgccttggccaccctgacttctcctactacgtcgaggtccgagaggcaggcaaggctcccgggcttgactgctgctacccctgggagcggtctggacccctgtggactctggcctgagggccccagtctactgtgcacccctgccagtgccccgaccctgcagggccatccttgaacttggcctgcctgctcctagcttccaacgacagtggcgccagttgcccctacccctcaggcagacccaccagccgccgctacagtgcagccactccaggtctcgagaggtggccagagtacacgaggggtctgcccctatactccacgtgggccaaggtggggcctataaggcctcctcgccaaagggtgcctttcatggcgtgggctgtgaggccatgccaaggtcgcacgcctaggcaggcactgtgggcaccactgtcccagcccagcagccccacggccacatgccaacccacttatttacttcaaaggggtcccttttttttttttttttttttttttttttttttttttt

SEQ ID NO: 7123 - DNA, 643 bp, Canis familiaris
aaggcctcatcactcgggtttgttaaccaggtggtgttcgaactatcagcacctggtcaacagtgtctattggtaccagctgcctgagtactgtggccgggttgcagtctaacctaccagggtgcactggagtccacaactgttggttgtgtagcagaacaggcccaggtgggcagttggccttgccctgggaaagtcaccaagtccctgtggtaagagagtcaaccacaacactcacaagaccatcatgccagaacctaccacaaccacagcacactgtaccagatggacctaggtggggcttgcttattgcttccagcccccctcccatgccccctgtcaacacccattattaagttgggttgtgctaaaaaaacaagaattgctcctggaattggcaggggctgacccaccactccagcactaagcaagggcggtttctccaaccctatgaactacagagaggcactacccaaaccctccttgtgccctacaatcagccaccagacggctccaggtggcaaccaccttggcctcttggacaagccatgccagtggtcaattgaccaagagctgcaaatgaaactacgcctgttctttaattttaaaaaggtgttaccttttttttttttttttttttttt

SEQ ID NO: 7124 - DNA, 542 bp, Canis familiaris
tacaactcggggccccattggtcacagtccggctccaggggtccaggggttagacctagcaggctcagtaagccgtgcctacaaactggtatgtggtagtgctgcagttggatagggtagagtaaggccgttgccaggactacgtagttggtgttgtagtacagggccagggaggcctacccaataccttggactctggtttcactggtgtgtggaaggccagaggctactacgctcgcacagcaggccaaaacctgttcccattgctgtacagcaccagagtaggccaatcctacagggtggtgcgtggccggccctaagcaggagtgggtcgtttggtgcctgccttgcccccagccctccacagttctaggccactgcaacgggaaagaacaccctgcagagctcagacatcaacctgtgtgtggggtgggtggcccagcaagccctgaccatggtggtcaagggatctgggagagttggaagcagagtagaacccaagctttaatttgaaaataaaaccatctgtttttttttttttt

SEQ ID NO: 7125 - DNA, 551 bp, Canis familiaris
gtccaggtgcccgcaccccccagtccagcataggcgaaaccacaatctgggtcaggcaccctgcaactccccctaggggaaccacatccctgtatcctgcaaaccattccaatctgtgtcccttggccgccagagccagggggggcggctggggggtgaccaccacaaactcaccttcaagccagcagcccccaaagacaaccagcaacctgcagggcaagggtgagttgagggtgtgtgtccctgctccacaaatgagccattgcccaggcttgtggccaagccagttcgcccccacaaccctgtggcagccctgtccagggccagggccgagcgagactacgagaagcagctgagccctggttgggcagtgccactgtgttcaggccgccgccccttgagaaaacaggggtgtcagtggagagcagcccaccagacactcccgcaccacctttcccccctttaccccccaggttgtgttatattttatttacaggtatcctgggttttttttttttttttttttttttttttttttttttttttttttt

SEQ ID NO: 7126 - DNA, 703 bp, Canis familiaris
gaacccgtagtaactccctgagatagttgccagcacacacaccacatttggtcaggggctcactagcagccttgtggcaccaggccacagggggcggggaaggggctcggtggttgtgccggctcccccctctgggtgtggcaggagccaaccgaccaccgcacctgccagcccgaaagccgctcgcaggggtcggcccagcgaaggggacggcaggttcacagcagacgccagaacactggtgcatctttgtacactaacaagaacagttgcagcctctcccctgctgccaagctaactgggcccctcacgggagagacaggtggggctgcaccgagccaatcaggcaccctgctggctgtgtccagcgagcgctgcagagcttccccagggggtggtgcctcctctgtgacctcaacggcggtctgaggcgagcacagggattcccgtgagacagcaggacttaactggctccagggggtcagctggcctggcaggagccgagggttgttcagctcacggagagaaaacaactgggaatgttactctgtaggggagaggagtgttggcgggtagcttgagatgatggaggagattcaaaaccaatttgagttattagggattaaagacttatttgctaaccaaagaggttgtgcccctttttttttttttttttttttttttttttttttttttttttttt

SEQ ID NO: 7127 - DNA, 676 bp, Canis familiaris
ttattggggtttttaaacttaggcataacgagctactcataatgatttacttccctaaagtagatttgtaggtataataggactaaactttgagtaaaaaggaaaaggattgagggaccatctgctaatagacaactaaaaagagcgaataagctccaggcatgataaaactaagcagccaatagaaataaagcagccttacccacacttttcagagagctcaggaatattaggattcgtggttgtattcactttcattttcactttcctatgctgcaactgtctgtgtggtgtgaattcactcaaactgctagagctggcatctaatagctagggtagtttatattatggctttaagctgctactattatttatgatttaaattgttctatattgccgaggtctgataaatttgcaggcgcaatttaccgaagttgatgcctctgataagaacaactaactacaaacctaccacacacaccctgaccacaagcccctgccaagtgtggtattagtaaactctggtgacatgtccctggtgaatttaaacgcaagcacatcagacactttaattcgacaaagaagaatcaggacagaaacagaagaagacaaaatcttgacaaagtcacttatgatgatgctttagtatgtgtacgaacttgagacaatttttttt

SEQ ID NO: 7128 - DNA, 594 bp, Canis familiaris
gacttacatacacttaaacattttttggatatcagttgactctaatagacccccctgttgcaggtagaaagcagtacgtgtctacagtagttaataacatctctacggcaatgaaagtgtaagtaaacatcaatgctttgttttcattgttgcaaattttatacagccaatggtaggtatatataggtttatccaggcttagaaagggctttgtttaaaggtaaaatagtgagaaagagctagattttatataaaaaaatcctagtcaaattttaaattttaaatttaaatcaatgccaattctgatggaatacatgataataaagaacatcaacagagtttttatcaggctaaaagtatgggtaagctaccttaacagatgtaagaaaagggattatagttctaaaattcttatagggtcatctctttttatttttgcaaaagaatttttttttttgcaaaagataggagttggtttcctagttcttttctttgagctcagttagggtgttgtataaagctttaggatatacattattgggtaaatataccatttatatatttgttcaagatcttcactgctccttttttttt

SEQ ID NO: 7129 - DNA, 670 bp, Canis familiaris
gcactgggacgctcactacgaaccgatccttataggcccagcatacccctgcgaagccctctatctgcaaagccagctggttctctgccttctggccgagctgccgccctccaggccagtggccacctgcacccgcccgtactccactactctaaccaggttggctaacacctgtgccccgtactccttgacaacagcccattagcccaaaacaacctctttcagggggactcaggggctgtcgcttcggccgcagtggagctaggggggcagttgggcctcctagcccacatcctcggccacctgcagccggcgctggctggtgagctgggagaaggctgcctgttaggcagctgcaggtcctccgagccctactttctgggccctgattagtccagactggttcaccacagggctcttggactgcctcaccaggaccacaacggcccctttcactctacaccgatagctctgcagccctctggcagccagtaccactaatttcaccgtaaacacagcgaagtagtacacggcgatgccagcgaacctgggctgcgcgcggccccgcgctgggcagcgctcaggccgggcgaccgggcggcgcggggcgacggcggtgccggggcccgtgcccgtgccgcgctggttgcggggccgccggatgggctcg

SEQ ID NO: 7130 - DNA, 607 bp, Canis familiaris
  misc_feature (16)..(16): n comprises a, c, g, or t, or includes no nucleotide
ttttacaggtgttggngcaccagttgcccagtttgaaatgtcttatcaagtctaccccccaccctgttgttgaggtagtgtcctgagcagtggtagtgggctacactctgtggttgaaacaggtaggcttagtgcactcacaggcagtcagcttccacaagcctttcacctctatgatctggaggagagattgtttatctggggtaacacctaccctgtggagaaccgcggtgagctacggatcaagcgattagccatagcacgggttgtgaaagccacctccagacctgtagtagtggtgtacgtgcaggcaatagtgcttgaggccttggcccactttattgacccaccagtggcaccgacacaccacacctaaaacacctctttgtctcctgcaggaaaactcgaggcatccctttggtctctcaacttttaggcctgagggctgtgttaccagttgcgcaacatctgggcaggcaggggggcaggtggggtagtaggggttacatggattgtaaaaataagaggggaggagcgggatgggccgagataaactgattattttatctgtaaggtttttttttttttttttttttttttttttttt

SEQ ID NO: 7131 - DNA, 648 bp, Canis familiaris
caacgccttgagaaactgttatccgcttgatctgattgctcgtctaggtccttgaaacaggtacaggtgtagttttggagtctacgtgtttagccactcggcatacgagttgagagcctcttgctttccatagaacaagcagtgttgcaactagtggcctagttgggaacaggttcacgactattgtctcagtactgttaataggaaacccgaactgtttaagtctagttagtatactttgctagcatcctgttgaagataggagacacacacagccttgcctaccaggtagtttccttgggtgtaatagttttttaccaggaggcacacagcggtgtcattcaaaccaaagtagtactcttgcaacaagtactgttgtcaaaaattactatacaaaactaacctatactatgtcaatttatggtttgaaaacactgctggttatctgacatgcatttatcaaacattttttatatgccatatttaagaaaaatatacgcttcacctagattgaaaaaaattttcatataaatacccttttatattttccactattttgtaagaccattattctaatccagtgtttgtagaaagagctgatgttttattttagtacaagctggttttttttttttttttttttttttt

SEQ ID NO: 7132 - DNA, 685 bp, Canis familiaris
cctgggcccggtcagggagaagacgattgtcaatagagtccccacggtggcccaacgtgttacgcgccacgtcctggtcagtttcagtacggacgtgatcgggcacacggttctttcgagtgaacaggtgggacttgaaatccaggccttgtaccgcttgaccgcccgggtgcagcagtcgcaggtcgatttggtcccgcggcgccagaacgttggattagcccatcagcggcgtcaagatcgctacggggagcaggtagtgggcttttagttgaaggtaatctaacagggccagttgtacgtggtaaacaatgtgtgtcgccagctgtccctggacaaattgcagggcaaggccttgacctacctcctagcccgagagcagtaccgcctgcgcctatactgggaccgtttgctggatgagttctacccgaccaactaagaccgccaggtcaccctgttgctctacgtcaacacccaccgaacaccgatagggggaggccgccctggccgcgagttgtggttgttagccttgttgggcctgggaggggcaggtgccggagtagtcgttgtggtggtcagttccctcccaacctacccaaactggcccgaggtaatacatgaaaaccatggccttattattttctgagaaaaggttacgaattttttttttttttttttttttttt

SEQ ID NO: 7133 - DNA, 615 bp, Canis familiaris
gtgatgtgtgacccgcccgccagccccttcgcgggctgcgcctcccgctgtagtctctcgcacaccgcctcccttcctttcctcttcgagttaaagcttctggggtggttttttgttccctttcaaccttggccagcaaaaaaacaattttgatcaaatttttggttttaaagaaagataaaaaataaatctaagaatataaaaagatctataagaatggggactgcctaaaaattagtacacggtagtcctttcctgccaacggtgcgaacacagaccatcaacagtcaaatcaagaggagagtcctagaactaatattacactttggtgttttttttccaagatttttttgctttttcttcttctttttttcttacaataaccgtgctaacctgattcaaaaaaagagatagatcaatgcagatcatattgatgaaggaaagatagtgtaggaatttttggcctttgtattttggaaacaaaaaaaccaaaaaagacatagttgaagcagaaataaaaaaaaggccagaaagtagatagagagtttcttagaagaccttcttatttccggttaaaataaaagcagtgaagaacattctttttttttttttttt

SEQ ID NO: 7134 - DNA, 638 bp, Canis familiaris
aggggaaaagtttaaaagcaataataactagtgtctctctgtgtggctgtctccctggctgtgggtgtggctggcacccagcgggggtcccgtggctgtcgcacttcctcggtgcctccggggcgccctgggatgacaagttacccgtggcaagtgcatgcaggaggctatttaaatgcctaatccaaaaccagtgccaattaaaacaagtcatagtttagatgtactacctccactattttatctaacaaattaatgacttgggtctaaataagaggaatcactgggtgctcaaaagaaataaaccatgaccaggtttagtcttcagattcattaggtttacggagtataatgggatccaatggatactcctatagaattctaaaataatttcctggttaccacacaaacacccacaaccaattgttttttgggaaaagggtacccagggaggcgctgcggaaaggcgccagccaaaggccctgggcgcgtaccaggtgtcccgggtacgtgaccctcgaagggcaccctgagctaggtgccagcagcacccacagccagagacacagccacacacacacacacacacagagagtcatactgttttgttttgttttgttttgttttgtttttttttt

SEQ ID NO: 7135 - DNA, 610 bp, Canis familiaris
gaagacaggttggggatggtccagtttagaaataacaatccatcaggtcagtttagggcaacctgtcaggcattcctccacctgcaggctccaatggtagacaccagggctgttggcacataagggtgcagcagcacagtccgaaaagcaatatttgttaccacctactgacggactgtacctagtctacaacatcacccctaagagccaagttctctggagcactatttttatctaatttatatcctgagtggagtccacctctgcacaccgttagcttagagcaaactgtaaacagtggccattcattggcctcaaggacagagacattaacacagtgaaacatgtaaaagggactgaagagataaataagcatagatctatggtaagactgtgaagttgagggggtttacctataaacaactcctcctatgatcaagatgttgttagcagattgctgcagtactagctgtctaggagtgtcagcacctaactatgttcacctaaaaacttagaattaatagaaagccctctaattaaaagcatcaaaaatgggggtttccaaactctaactggatttatttttgagttacttgaatttttttttttt

SEQ ID NO: 7136 - DNA, 649 bp, Canis familiaris
ggtcccggaccggttaacccgggtagaaatgtgcatggctgagttgaggtatacacagttggtgtatgtttgactgtaacatcagcaatctaatccgagtacccactgagctatttggtggttgtagccccccactgtattagtctgaggctacagatagtgaccagtgaccatacaagggaccccactgctatgccccacatccacctggggcacacctttatggtgccagcagacacctggaacccacagaggaacagcccgcccccttcccatagtcccaccaggtgtgttgtccgcttttgatttggaagtgtttcatgtattgtttcagtttttttaggtgctgttcttgtctgctgcctcatggatccgcctgttgttgtgggctgtgctggttgcccactcaggagtgagatttgttcaggttttgttgttcgtggcacagttggtgtgggctgtaacaaatgcattggtgtacctgatacagtttgtaaagtatgtggtggactgtttggcctgggtgttgttttgggaccccatgaagggggagactggttagagagcaagatctatggcaagcgcagttgcagagaagattatttaataaaagatgagtttgatcaagttttttttttttttttttttt

SEQ ID NO: 7137 - DNA, 630 bp, Canis familiaris
  misc_feature (589)..(589): n comprises a, c, g, or t, or includes no nucleotide
tcacggtgcaggagccctacgcctctctgtccatcgtgggccaggaagggccgcgtgatccagctcgccgagttgggacaccacagagtacccttccgccagcccctcatccagcgcaggagagagcagacctcaccagtgtacctgttgagcggtgtctaggccgaggccaactgccggctgcggcacttgcctgtgtacctgagcgagacggccgtgacaccccttctcagctaggttcggtacctggccgggctgtacgtcgcggagtcccagtggggcgtggtctccatccaggcgggtctgttgctcggccaggagcccgcggcgggggtgcgcatagccccggtcgtctcgtgctgcacgatcaacgccgaggccgaggagttgcggttctgcacggtcgccaacacccaggtcgtgcagcggggctggcgcacgagcctcccgggcaagggctgccccgcgggcagggtctaccccgagggcgcccagcagcggtggggcaaccaccggccctgggtcagcgtcgaccactctgccgagtgcctgaacaactgcgcctgcagcgagccagacttcttccccnttgttcatcccggccacgcagagcgcccacagcgagggggt

SEQ ID NO: 7138 - DNA, 617 bp, Canis familiaris
attgtggatacaggtaaacagttataactattaagagaatcaggggtagtgttataaggttgaaatttaacatgcccatgtaaaatgttattttaactcactgctcaagtaagttgatccctttttagaaaccctttttgagtatgaagattgaatacacttttagacaatgtcatggaattggaacactgagtctagtgttaactcatcttttgataaatcataggtgatattaacacactgcagataaaactgaaaaccatccccttatttgctataagaaaaaattattcagagatttagtcatttctttagattgtgtcttgacctagagtatgaaaattaattttagtgaccaggttgaaggtaaaagctaaagtatacagaaaggtgaaaatgtgcctcagagaatttttttttttttttttatcatatagatgcttggttttggagcaaaaatcaaaattacccaaattacttataggcaaaaaacctttaaggcattaggtacttttagtttccagacttagagttaactgaataagtccaagaatcaagaaaaagcatgtttagaataattagattatttatacttcgagggtgtatttttttttttt

SEQ ID NO: 7139 - DNA, 702 bp, Canis familiaris
tctctcctatttaccagaaaacccggtttgatagtctacaatttatcaagatgctttttccaagactagttcagtaaaagttagaaagataaaacaaagagccagagtcaaaagtatcaggcaaagattagagcacaaaactactaaagattataatgagggtctaacttcacatccatttactattgttaaaaacttcttattgaagacagttgcctaatttagttcaaggaaggtaaaggcagggagagtccgaagaaggtccaatttactttggtcaacattattgatacaaccctttgctttagcatgttaccataacttgagctatagatctaagactctgtgctttgatttcattaaggcagcatataaaatatattactaaacagcttttgccctgaaaaggtatcattataaagtctaggaatttacaataattaaagaaggttaagaaataagaattattagctttatgtattaaaaattaataccaattgattctaaactcataattaggaaagtttagggaggattgctttccttaaagtttattttatagttctagagcctaagataatattctcatatctcaaacaagtctgaatttaaaaaaattttagaaaaaaagatgctagataagatatagaaatatgatatagatgatttatttttataggcccttttttttttttttttttt

SEQ ID NO: 7140 - DNA, 463 bp, Canis familiaris
ctaaggctccactgttactatgaggaacaagtactggatagaagtgtcagaagacaggggaagacagggagggtggggtaagagcaggcctgcctgacaaaaaaacagacaaccaaagcattcaagggtaaaagtgctggaagggtagagccagagtaacccagcctcccagggttcctcatatcccaccaagggccctgtcagcagtacctgggatgggagagagagagactgaggtgggaggggaggtgggggaagctgagagggtttgatgcacagtggaagtccactgcaacactgctatgaagaccaaaggggtgcaagtggttcaggggactggccttgctgtggccaaggagcaggaaggggtaggggccagctgtgacaatgaatcagtaaactaaaacttattgacatggaaagaatctaaggaaacccttatttttttgttttaagttttttt

SEQ ID NO: 7141 - DNA, 640 bp, Canis familiaris
cagtggatctgccggaatacctttggcttaccctctccagggaaaaccaccttccgagttgttttaagtagctgcagaaaagtattggtgttgttgttttcgatcaacaacgatggtgtctttatcaggcgtaaagtagtgttgtgtcttacctaggtgcctggcaaacccttgctttatgctgttgtcaaacctggggaagtcacgttggaagtagcagcgaaagttgctaaagggaaaatcataaacaacttaggtacaactctgaaggtgaaagtccctttagctttgtttgagtctctagaaaagttgtgcttctgcaggaagttaagaagtgcagcagtgtagctcttctctgactaaagtttagttgcattattgacaaatccatttacaaagagttaagtgcaggaaagaaaacaccagctagagaggagtcagtctgatagtgggactccagcgagacaagcaggacttaactctaataataaggtctaaagtgctagcagcagtgcaggagcaaagtactctagggtattcaacctctgttggggttgctcactagagcttgtcctgagtcagatatatgtcataaatcaagaataaattatttgtgttaaggactgaatttttttttttt

SEQ ID NO: 7142 - DNA, 683 bp, Canis familiaris
gggaaaaggcttgtagtagtgagaccagcctgctcccagcccccgagggtgacagtacctggtttaacctgggccagtgctttggtaaggtcccttggactaaacagcaggagggactggcacctagcccattccagcccacaagagttgagaaggctgcagaggcctctgtcaaaacctgggaaaaacaagccctgacgtgcactacagcaccatcccaagccacctgactcaggcatgtttccagccacacacaggtcagcccattctccatgttgaggtggctggctgtgttgtgtgcctgttacatgtataaaaggggttacatcccaagtgggacaactgtgtgctaacacatcgagcagagagggctcactgaccctcccactcctcaagccacctgcctccaggagtaacttctgcccaacaccctggtgttgtctccactgggttccagcacagagtcatactcgccataccatactccagtgtcagtgggtctaacatgactcacagagtacctatcacctcccagggtgcagagagatcctagttgttcagaaccccaggcaacatgaggccctaggcagagaacagagacagaagataaggtggtattaatgtttctaggcaaaattttttttttttttttttttttttttttttttttttttttttttttt

SEQ ID NO: 7143 - DNA, 556 bp, Canis familiaris
gggtcttaacagagggctgcccctactcagagaactctgagagtgttagatgcctgtgccccagcagcagcagcaagcagcagcagctagactcgtacgggagggggcagcgaggggtcttacgtactaggtgggaacacactgcagtgaaccggtatgttgtcaagtcggggtagacccagggtagagggggtaacagatccctgggtggcctccacaggcctcccttacaagggcccccctccccgggcctgagctggggctgggtctgtaggtgccctacttggatagtgccttgtctaggggacttggtgctggacagctgaaagtgcctcggtccaggggagggggaggggccggggccaaaacagccactaaagcaaactgagtttgccgctttgctgccttttcctgccacaccccccaccaggtgaaagatatacctgttgcaaaagatcaacaagaactaatttagaaataaaaagatttttttttttttacttaattatttagtctaaactaggcttttttttttttttttttttttttttttttt

SEQ ID NO: 7144 - DNA, 603 bp, Canis familiaris
attgtaacagtggcaactggttttggcctgcaaggtaactagcacatctcaactaagattaaaatgaaggccctggaaatataacccttaagagaagagtggagaaacctttaattaaccagtactaaagagataggttttaagtatgagtctatcatccctgacaaagcctgataacgcgaaacaagttgaatatttcctggctctgggaactctaaccggaaaattgctcaaaatattctctagtgttgagccaaaaaggtttaagggagtcaaacttctgaaagaattcaggtgctacacagcccaaaatgaaaacagggctgtaacctccgagaccagcccccaccccaaaagctaattactttactaaaatatgtggaggttacattgagaaagagagacctaaaacaaagctagagctgccagaagcagagctagaactgagaaagtagccattaaggtctaagttacttattgagatttatgtgcaaaagtacagattagcaaaatatccttgaaaaaataaaattattattttctaaaataccattttttttttttttttttttttttttttttttttttttttttttttttttt

SEQ ID NO: 7145 - DNA, 577 bp, Canis familiaris
  misc_feature (335)..(335): n comprises a, c, g, or t, or includes no nucleotide
ctttctatactccaaaggagtctagtcttggccttagctttactaggtctgcacctagaccagttgttttggcccctgatcgatcaggaaacaccagtggcttgaacttgtaaagggtgcacagagtactccgagtggacgtgtgtcttgttactggaagacgcagcagcagggtggtgaacacagggtacccggcacacaggggcccagctcgacatctgccagggccaagtaatttgtcaactccgagaaaaccttcccagcgagcccacccacgagccttgactgcacctgggagtgctaacaggaggtagttgcgggtctactggggtgcncagggtgtaccagcttgtggtagctagccacccagggttctagtatctgacacaccaaccaagcaacccaagagaaattgcaataacccttcaatcagccagagcaaggtccagaagatcttccacaaaccacaacctctagttatccagggacaaacagtagcaaggtttggcacagaggaacaaaatggttttccacagactcctaaacaccattttatttagaccaaaatttttttttt

SEQ ID NO: 7146 - DNA, 589 bp, Canis familiaris
cagggacaacgtcgactacctcgtggagggccctctgccaggaacggcttcgccgactccttcgcctcgagggtggtgtagagaagtgcgtgggccaggcctccatcgccctgcgccgataatcctccgtgtccatcggggcagccaactccagacaggtgtcggccaaccgccaggtagcccatctctggctgtagttgcaccacggtgtggtctgccctgagtgcttgcagctggacttgcaggtgcctggtgagttaccctgcctccagtagttccagaaatcaatcgtgttgggcatcagcaacgagatcatccagaccctgcacagcggtgtccccctgcgcaaagtcgtcaaacaccgtgccatcgaggtgttgatcttgaactcctgcgaggacgccctggtccagaaggtcaccaaccagtgcaacaaccctgtgcagttggtgctgtgcgaggtcagccgggctgggcaggtgaacgtgcgcaggcacttcgcctcgggcccgccgcaggccgtgccggtccagacactgggtacctgccagtcacggccggaggtggcccacaacctgcacaggtccgc

SEQ ID NO: 7147 - DNA, 598 bp, Canis familiaris
gccgacctcttctcggccgagcacaaccagctgttcgtcccaggcaaagcctctagggggccgtctcctgtgcggcatctggtccagtgatccgccatccggctgactgccgctgcctctgcacctgcaccaccagcaaccacggtgttcttggtccgggtcacgggccgcgttctgggcccatgccgcgtgccactcccctcgattctctaccagctgggtggtggtgcccctgggagcaggataggtcagcagggtcactggccacacggggcagtgctgtcccctggtcccacccccagtggaggcagctggtcactggcagcctggactatggttgtaataggcacagcctgggcacccccacccagcccgtacccccttcaccactccactttcactcaccttcaccagagatttatgtaccctacccagcccaaccggacccatcctacaataagcctacaagaaactaaagattttggtttatctgttcccagcccacccccaagtgttagagagtgggaacaagtgggcctttttttttttttttttttttttttttttttttttttttttttttttttttttttttttt

SEQ ID NO: 7148 - DNA, 568 bp, Canis familiaris
taagcatattgtttattgatatttgaacaaatatatggtattttggattatacaattattgagggtgtctagcttgcaaccagttcatttggattaagcggactgttaaaaagcaggtataaaagtttctataattcaataaatttttatatatacctttttatatatatacctattaatgaattgaatctaatttttttattttttgttgttgtgggagttatggaggatggtcatcctgtatcagtcaattttaccagctaatatagggaagtctcttgagctgtctttaggtaaccgttattggacacatggtcttatactaaatagattgcaatctaaatttaaatttagagaccctattatctctctctctttttggacctttatctaatgttatggggagtttggtttatgatgaggtgttagtggtatgttgtggtaaattgggctccagggaggcactgcattgagccagtacacggcactgtacaattacacttgtaagagtgaacttgcaactctcctggcaccgagcacgtagaggtggcataattttttttttttt

SEQ ID NO: 7149 - DNA, 625 bp, Canis familiaris
ggcactcgttgttgacagtccagcgattccccttggggtcctagttgttagccggcaactcaccccttgtcgccttggcaaaggggttaagcagctggcagagccgcaggcagtctgaaatccggctccacatccccatctcggccatcgctatatccaaaaggtccatctagtagttagcgcgtacccttttagaaggaaggcgccaagtcatcaacaagaagacactcacacacaatccagctaagagagtctgcttgtaccgaaccttggccacagggctgagtcctcagaccatactccaatatccatgcgcagagtctagcaccctttagtcaggttgccagggtttattgaccccccaccccttgcatgcaaattttcaattccacctctttcaacaaatttttcagcacacatgtctatacagctcagataaacccaacatttttctctttaccaacttcctggcaccatgagtagcaaacaaaattcccccacccccttaaaaaagccaaaaaaaatagaattgcttttgcatcatcagtagtcaacaaaagttcagacctctagttttatttgtgcctatgaaacttttttttttttttttttttttttttttttt

SEQ ID NO: 7150 - DNA, 336 bp, Canis familiaris
ctcgagaggtagaccttgctgctggcgccgccgccgccgccgccgcccccgctgctgccccgctggcgccccgcctgcccccgctggcgcccccgctggccccgctggcgcccccgctgccgctgcccgcgcccccgctgccgctggcggcgctctcgcagtccccgcagtgctgcgtgccgggcctggccctgcgttcgctctacttgtcggtgctgcagtgcccctgcctcatctgcgtgctgctgctgctcacgccgctgctgtacgccatctgccccaactgccacccgctcatctgcccgaccatcccgccctactcccgcacgctgatcg

SEQ ID NO: 7151 - DNA, 584 bp, Canis familiaris
catttgagaagagatgagaaaagatttatacttgctgtgcttgacaagtactgttgtgatctagagctgtacatttctccatttggcatatgcttttaactggcccctttttctaagcaggtgcatctttggagacttatcaccattgggatgtctctctcaaagagcccttagcatgcagaaatgcagttgtatttggtcttccacagcccctagaagtcattcagaagtatactctttgcttctttttgctagaagtatactctatacttcattccaggggctcatcctcccacagaatctaaaacagtgagctggctccccgtggggagcctgcttctctctcttactatatctctgcctctctcgaataaataaatagaatccttaaaaaataatacaatcattattctgcacatgatagccagatacaaaggttatatattgtgtgattccattcatatgaatattcaaaataagccagcccataaaatcagaaagtagatttgtggttgccagggtttgggggcaggtgggagtgaggagtgaatgggtataagatttccttaaaaaaaaaaaaaaaa

SEQ ID NO: 7152 - DNA, 607 bp, Canis familiaris
ttacgcaagatatagaaatagtaccagtaagcaatactaccgtaacgaacaatagtagaaagagttaacaagggtacatttgaagaagttagggtattatttgaaatgatgaataatttataatgtgggcatcatgaaagaattgtcataaggagctaattatggacttgaggacatccagaaggtggaactccaacttccacaagcagataatagcaagaataaatgagggggtagcaaaaacatgaagaccaggcagccaaacagtttttgcttcatggttatttttcccatggtagctgttatctgacatgcattatgataaaaatgaatggaatttgattgataacagaaaattttcagtagaccagtaatatataaagatagtcttttaggtaaataatgtaatttagaatgctttttcctagaatgcctttttgtgatccttgccatagaaaagtcttttcagtgaggaagactgtaaggaataatatgttacagattagtgatgcattttggaaattaaaaaaaacaaaccatagactgtgccaaatgtaatcatatagcaacaaataataaatacttataacaaaaatcaaaaaaaaga

SEQ ID NO: 7153 - DNA, 568 bp, Canis familiaris
gaaaaaccaatttaagaatctgccaaagacttgctgagactagaagcgcaagcaagcagcgtttctcttttctagggagaataaattccctgcttcttgtcccacaaactgtaagagtttaacaccactcgtataacgaatgctgttactcttgtaccacgaggagttcctggttaacccttcaccacttattctctgtctttaatgcttctttgtcacatcaaaggttttactgcaaaattggacctttgttcttttccagcaaatgtacttcacaggatgagtcaagatttagatatttaatatctgtagtttttaaccatctctttcatttcatattagaatgcacatgtggaatttactccttgtagactcaactgtgcttatgacagtagctgaaactagaagacagtaaaaaaaaaaaaaaaacctgatgtcatccatacttgctatttatttagtcttcttgtttggaacaaaaggtaaagaattcacaaataccaacatctaaaagcacctgtttcaaatttaacatcagcttcagcttccaaaataatttctttataat

SEQ ID NO: 7154 - DNA, 584 bp, Canis familiaris
gttccactctgggtcagttggccctctgatgtctgatgcaatgtagaatgcagcctccggcaaacctttcctggaaggaatcgagagctttcaaattgagacaacaagggaagaataatccgagcaccaccgagtgcaattctcagaaagctttttatcaagaggtgtcaggaccttgcttatatgatagccgatatagacacatcaatcaagcagtgtcactatagagccagcgactaccccaaagaaattgcaaatgcctccttgtactgaatgtgaggtgaagaagactccagaaataccattgaccagctttgatgggagggcgactagagaagaaaaaatactgtaaatatcaagaaactgtgttaaaagcattcatttacgattgtcttcatactctttttcagccacaggcttgatggaaatactaagtttttaaagcatgcaactttttcacaattttctgtactttatataaagtagtctacaaattttccaaaagattccaggccaattatgatccttaagcaataacctaattaaaatggatatccaccgtcaaaaaaaaaaaaaatttataa

SEQ ID NO: 7155 - DNA, 620 bp, Canis familiaris
  misc_feature (365)..(365): n comprises a, c, g, or t, or includes no nucleotide
  misc_feature (419)..(419): n comprises a, c, g, or t, or includes no nucleotide
ggatgtatatagtcataaatgtattgtagcgagaagaaaatgtagtgttatttgtgacacaggggaaacacgtgacttatgttgctgaagaacttgaagctagtgaaagggtctttcctcagtctctgagagtggccccaagtgacataaggaccatccagcaggcagctgctgggtagctctggtaagccagccatggcttggcacgggagtgagcgacgttgtgaaagtgttgtccaggggaaggccagtttttctccctttgaggcctcgactccggtttgaaggggcagaggccgggtactccactgccacaagcttttaaggaacgaaggtgttacgaacaccaaatgtaaggggggtcnagagagctgggagtaattgaccaggaagctaatttatttgctgaaaaggatgtnataggagtcactaccctctgttttgatctgccaaggatttcctctcagagctgttgcacaactaggggttgggcttggtaagacaccaaatgggacagacaacgcacctaaatttctaatgtgttctgtgggtttcaattctgaaaaagaaaaaaaaagaaaacgaataaagattttaataagtaaaaaaaaaaaaaaaaa

SEQ ID NO: 7156 - DNA, 599 bp, Canis familiaris
ttagtctcggagatcccaagttggtgattccaacaaagtccacactgctctacatgctgtacatctcccccgtctcctttggctgatcatccagcaggtgtgtgataatgtcagcatctacaaccctgatagtgcttgacatcacagaggaaactctgcattctcgcgttcctggagggtgtccgcaacgttgccagcgtatgtctgcagataggttacccgactgttgcatcagtgccccattctatcatcaatggatacaatgcgggttctggctttgtgctgtggaaactgattacacctttccacttgctgaaaaggtcaaggccttcttggctgatccatctgcatttgtggctgctgctcctgtggctgctgccaccactgctgcacctgctgctgcctcagccccagccaaggttgaagcaaaggaagagtcggaggaatcggacgaggatatgggatttggtctctttgactaatcacccaaaagcaacccattcagccaagtttatttgtgaaacaaggaaataaaggcttacttctctttaaaaaaaaaaataaaataaaaaaaaaaaaaaaaaaaaaaaaaaaaaaaa

SEQ ID NO: 7157 - DNA, 629 bp, Canis familiaris
ggctgtctctcagctgcagttttcttcatctctgaatacagttatacttctatctcagaagaccatttctaggattaactgagaaaggacagaggcactttaggcttgagacaggccctacagagcagtagctgtttcttaattgttaagtagtcttttcatgctctaggaaaagggaatgaagaggtaagagaatggtgttaggagacagattaaagggatgttgtagactttgggatgggtaggtatattgtgttttccagttgggttgggtgggtatattttgtgttttcccatttattttcacattgctttacggtgttatttctataaacttcaatgttttaaacctcttttataaaattcagtgacaactagtagaattttcttctttgcagaagttaacttatctccaaagtggctgaaaatattgttcatcagtacatgattatcaaatgactgtgaagaatataaaattaaacttagtgacttaattagtcactgccttgctaactgtgctgtaatttttttaaacgtcttgtttttaatatagcagactatctcaatagtggctggattaggttaaataaagaatttttatgttctctaaaaaaaaaaaaaaaaaaaaa

SEQ ID NO: 7158 - DNA, 600 bp, Canis familiaris
tgatgaaatattttgcaaggacacccgaaatgtatgaagaatttttcagagtaactatacctgaacactttcaattgaaccagacattcttctgtttccaaagatgcaatactagaaagctacttatttaatgaaaaaggccatacttggctctttatcagcagcatgcctaaatcaagttgtaattattctgaaatggctggtgtttcaagtggaatcttttagtagtatttttacagcatcaatttagattttaaatgttgaaattgaaatgaatgcacatagatttgcatataatataaatgagcatctgtggtacagttaggactcagtctacctttatttttcctgtttgatttttgttatttttgagggtttttttggagaggcaggaattattataacaatatacacatgtgtgtccaaaggaaaaaatctaggatatagttaagaccattgcttatttgtatgtctgaattttcctatatttgaaaatgtatcatttgtgtaattaaatgaaaattaacttttaaaaaacatatgtatataaataaaataaatataaaaatagtgctaaaaaaaaaaaaaaaaaaaaaaaaa

SEQ ID NO: 7159 - DNA, 583 bp, Canis familiaris
ctttgtggaaattgggcgggcgcggaaggcgaggacgacggctttcccggggggaagcagaatatgctgccatcaactccatgttggaccagatcaactcctgtctagaccacctagaggagaagaatgaccacctccatgcccgcctccaggagctgcgttgagtccaaccggcagacacgccttgagttccagcagcagcttggggaggcccctcctgatgccagtccttaggttttgggagctcccagccagctccaaccctgcctccctgggctaggctctggcctaggcactcaccacctggcttcaacacctgctcaggggctggcctacaggtcccccagtgggtctgcctgccttggacacccttctggtactccccttggcatgcctgggccagcccccaacatccgacatcccctctcggggtcaggtgtgggccctcgacccacccaccttgcctgcctgcccagttctggggcactcttcactctgcccaggccttgagcgtccacattaaacgggtctccaacaaaaaaaaaaaaaaaaaaaaaaaaaaaaaaaaaaaaaaaaaaaaaaa

SEQ ID NO: 7160 - DNA, 340 bp, Canis familiaris
ggacaggaacccagaaggagcaagtttagatttcccccatatcttcttgctttcccctgccttgttgcagctactaggactatatggcctcagttgacatcatctgtgtggatcacacacctctcccccaccccaccaaagaagctgatggaggatgtatccagtggcatctgggttcaaatcttatacagacttttcttaatcaggtatctgtcacatgctggttttgtgatcccaggcaaggtagtttatctcctaggagctcagcaatctgatcagtaaaagaagagtatttacttctgcaagtgtttgagagactaaaatatgtttctgaaaaaaa

SEQ ID NO: 7161 - DNA, 422 bp, Canis familiaris
  misc_feature (1)..(1): n comprises a, c, g, or t, or includes no nucleotide
ngcattctcgcttcttggagggtgtctcgcaacgttgccagcgtatgtctgcagataggttacccgatctgttgcatcagtgccccattctatcatcaatggatacaatgcgggtcctggctttgtctgtggaaactgattacacctttccacttgctgaaaaggtcaaggccttcttggctgatccatctgcatttgtgtctgtctgctcctgtggctgctgccaccactgctgcacctgctgctgccgcagccccagccaaggttgaagcaaaggaagtagtcggaggaatcggacgaggatatgggatttggtctctttgactaatcaccaaaaagcaaccaattcagccaagtttatttgtgaaacaaggaaataaaggcttacttctcttaaaaaaaaaatgaaaaaaaataaaata

SEQ ID NO: 7162 - DNA, 125 bp, Canis familiaris
tgtgagtttatcttttttttaggcccctgcccatctgcccctccctcagcctgaggcgctgcccgccctgcctggacctgcccacgccctgaaggactggcgccttggctcacctgatcttgagc

SEQ ID NO: 7163 - DNA, 577 bp, Canis familiaris
acttgtgacatattctcttaaggggcttcaggtcagtcgacactatggagttgctcctgaaagggcctttaaccttttggattccgcccttttcccagtaatggacgtaatacaaaaaagtggcagaggagggatgagatgtcaaagggagaggaaaacctgatgacaagggagccttctcctggagtcacccaaacgttctcaggaggcccaacggtcacattcctaaggtactggaaccatggcactctgacccaggtggaaaccaggtctcccaccttagctcggacgcgcaaggagacgtttaagtgtggtaggaactcctgtgaagggctggttggggtgaagtcacactccatcgtggtgatgttcatacagttcacacctatgctgtccacactgaagtcgtaccactgactgccagaggcgtatttatactgcacctggtagaccacgggcctcgagtcattgctcagggacactggctcccagctcagaacccgctcggcgttgtacaggtgaaccttcgggtttcgaggagcagggagctgggaaagggagtctgctggggacgccg

SEQ ID NO: 7164 - DNA, 583 bp, Canis familiaris
ggggggccccggcctgacaccccctcagaggcacacagtgagagagagaaagagagaggcagagacacaggaagagggagaagcaggctccatgcaccaggagcccgacgtgggattcgatcccgggtctccaggatcgcgccctgggccaaagagtcctgatggcagcggagcccctgacggagctggaggccgccattgagacagtggtcaccaccttcttcacctttgcagggcaggagggccggaagggcagcctcagcatccatgagtttagggaactggtcactcagcagttgcctcacttgctcaaggacgtcggatccttagatgagaagatgaagagcttggatgtgaatcaggactctgagctcaagttccatgagtactggagactgattggggagctggccaaggagatccagaaggagagagccctggagatccggaagaagtaaagcccctgaccaggataggctgggctgggctggccagcagaaccccactcccctcaaataaagtcttttcctgaaaaaaaaaaaaaaaaaaaaaaaaaaaaaaaaaaaaaaaaaaaaaaaaaaaa

SEQ ID NO: 7165 - DNA, 531 bp, Canis familiaris
ttcacacaagtccaaaggtgactgcttctggtcacactgtatgggtgcctttccttcctgacagaggccacatttatggctctgtggtgtggggtttaccctatgcacaggagagcaatgtgactttcataggacaggctcagaccatttgtgtttaatagtcaagaaggaagatcttccctcttgcaaattaaagtgtttcccaatacaggctttagtacataaccctccctggcctcctacctcagttctgccccttttcctttcctgctctctacttctcttcctcatagaaggctgtgaggcttgatccttaggaagctatcacttagcctggtacaggaggggctcctggcacctggtttctttgcagcaaacataattaatggatgcaaagagtgatatttttgagctcctaactcatcacactgtagacatttagattctatacccaaggcacttttttaacactttataaataggaaataaattgaattctttttccataaaaaaaaaaaaaaaaaaaaaaaa

SEQ ID NO: 7166 - DNA, 607 bp, Canis familiaris
  misc_feature (1)..(1): n comprises a, c, g, or t, or includes no nucleotide
nattaagtaccagtggaatcattagtatgccaggatcaggatatgatggtttgatgaaagtatgtctctgaagagatgatgttttaagttgggtctgaaggttaaaaaggagtgaatctgtgcaaggaaatctgtgggaagtacattccaggcatgagtgaactgcatgttcggcaaccgggagtaggaaggagctttgtgagctggcggtctgaggggcttggtgggctgcaggtcttgagggagggggaggagagccacccaagggaaggttggagaggtgggtgggactaaatcaaacagactctaaggccaggagtttgggttttattctaagtgtaatcagaagccattagaagattttaatctttagccagagatgataggatgccctttttaagaagatcagcttgggggatccctgggtggtgcagcggtttggcgcctgcctttggcccagggcgtgatcttggagacctgggatcgaatcccatgtcgggctctcagtgcatggagcctgcttctccctctgcctatgtctctgcctctctctctctctctctctctgtgactatcataaataaataaaaattttataaaaaaaaaa

SEQ ID NO: 7167 - DNA, 628 bp, Canis familiaris
aggataacacatctaattggtatggcctatgttcaggtgccatgaggtagctgcaaaggaggcctgtaaaggatctatttgcatttttagcttctttattgggaggtagggaattgcctagatatgagaaggggattagatggtaggcagtcaaaaagaataacacatgccctttctaaatggaacatgatggctgtgaagaagagtagtagtagatgaggctagagttttgactatcttgtaggcagtagggagctatgaactactgatgatttttaagcaagagactgacaagtataaatagataaaatatggagagatgggagatggaaagttgagagaaggtaagtggcatttgaggactgaagtatagtaatgtcagtgagaatggaaaacaagatcagatgtgggcagcttgggtggctcagcggtatagtgccgtcttcagcccaaggcgtgatcctggagacccaggatcgagtcccacattgggctccctgcatggagcctgcttctccctctgcctgtgtctctgcctctttctctttctctctctctctctctctctctgtgtatgtctctcatgaataaataaaatcttaaaaaaaaaattaaaaaaaaaaaaaaa

SEQ ID NO: 7168 - DNA, 577 bp, Canis familiaris
aatgacgtcttcgtggtggcttgtcttgaggatttcactgaaaatgctcgtctcttgcatatttgagactttttgtcgcatccaccagtgtatcagcattaacatgttggcagaccaactggacatgactccagatagaagctgaaaggtggattgtaaatttgattagaaatgctagactggatgcccagattgattctaaattaggtcatgtggttatgggtaacaatgcagtctcaccatatcagcaagtgattgaaaagacccaaagcctttcatttagaagccagatgttggccatgaatattgagaagaaacttaatcagaatagtaggtcagaggctcctaactgggcaactcaggactctggcttctactgaagaactgtataaagataatatgaaaaaaactataaaataaagatgaaataataaaatcactgtataaagagtgacatacattttagaaacagttaacatgttgagtataaatttgggggaatttgaataaaattggctgtgtttcattttaaaaaaaaaaaaaaaaaaaaaaaaaaaaaaaaaaaaaaaaaaaaaag

SEQ ID NO: 7169 - DNA, 544 bp, Canis familiaris
  misc_feature (529)..(529): n comprises a, c, g, or t, or includes no nucleotide
gggagcctgggtggctcagtcggttaagtgcccagctcttggtttcagctctggtcacgatctcagggtcctgggatcagccctgtgtcaggctccacactcaatggggagtctgcttgaggttctctctccttcttcctctgcccctttcccgccgcctctctctctctctctcaagtaaatatacatacaataaatatatattacatagaaagggagagcgcgtgtgcatgcgtgcctactgactccgcatctgctgttcctcatactaccaccttgtttgaaccgtcggtgagcgtcgatcaggagtctttattctcctgttctaaaaataccatagtcttcatttcctcgcctgtgcgtgcacacctcgcaagagtatatcttacttaggaaagtcaacagtgcaacatgcacctcaaaaacagattctataggtaaaaacatatgggaaactctctgatactattttcccgtgggagatttatagcacacgttggcatttaacgtctttgagaagctgtgtccntggagcaaaaaaaaa

SEQ ID NO: 7170 - DNA, 624 bp, Canis familiaris
aaagtcaggctggtaccggtccggaattcccgggatgccatctgcggtggaaccgccgccaagatgcaagatttttcgtgaagacccttacggggaagaccatcactctcgaggttgagccctcggatacaatagaaaatgtaaaggccaagattcaggataaggaaggaatccctcctgatcagcagagactgatatttgctggcaagcaactggaggatggccgtactttgtctgactacaacattcaaaaggagtccactcttcatcttgtgttgagacttcgtggtggtgctaagaaaaggaagaagaagtcttacaccactcccaagaagaataagcataagagaaagaaggttaagctggctgtcctgaaatactacaaggtggacgagaatggcaaaatcagtcgccttcgtcgagagtgcccttcagatgaatgtggtgctggagtttttatggctagccacttcgacagacattattgtggcaaatgttgtctgacctattgcttcaacaaaccagaagacaagtaattgtatatggattgataataaaagaagtgaactgataaaaaaaaaaaaaaaaaaaaaaaaaaaaaaaaaaaaaaaaaaaaaaaaaaaa

SEQ ID NO: 7171 - DNA, 542 bp, Canis familiaris
attgttcccatgacgcatggcaacaccggattcagtggcattgaatccagctctccaagaggtgataaggctattgggcaggtttggatgcatctgctcagactacttcctcatgaactcaccgattccaaacgatttgattggctgcataatcgggcgtcaaggcgccaaaatcaatgagatccgtcagatgtctggggcgcagatcaaaattgcgaacccagtggaaggatctactgataggcaggttaccatcactggatctgctgccagcattagcctggctcaatatctaatcaatgtcaggctttcctcggagacgggtggcatggggagcagctagaacaatgcagattcatccataatccctttctgctgttcaccaccacccatgatccatctgtgtagtttctgaacagtcagcgattccaggttttaaatagtttgtaaattttcagtttctacacactttatcatccactcgtgattttttaattaaagcgttttaattcccttaaaaaaaaaaaaaaaaaaaaaaaaaa

SEQ ID NO: 7172 - DNA, 437 bp, Canis familiaris
cctggttttttagggagacggtattccctggagcagagggcaggaggagggagcccctcccctctctaggagacataagccagtagaataatatattcagggtgccaaacggggtgggttgctctggggctgggtttatttaagggggactgccgggaagctatttaacacacatgtcgagctagcccagacccatggagcccctgacagtgtgggatggaggaaggtctgaggccgcttcatacccagagccccaccttgacaggctgagggctcgggaggccccgtgggtctgcggccatactggggccaggccaggggccactgcaatgcctgcgctcccccgaggacggggtgcgagcagttgggcgcactcaactccatgaggcttggataaatggtgctgtggaggttctggaaaaaaaaaaaaaaaaaaa

SEQ ID NO: 7173 - DNA, 609 bp, Canis familiaris
ggctgaagaccaggcaacaaaagaagcgtgattgagggcctttgtgttgcagactgggaacacggttcttagtctacacgagcagcatggaagttgtggggcccaacattaaaggccaccacttctacaggggcaatgaggacaccccatatgaagcagtacacaggcacccctatccttgcagcaaggcccaagctgagcggctggtcctggaagccaatggaaggaaggtccatggggggctgcccctggtgacatgcgccctgcgtcccactggcatctacggtgaaggccaccagatcatgagggacttctaccaccagggccttcgtctggggggtcgactcttccggaccatccctgcctctgtggagcatggccgggtctatgtgggcaacgtggcctggatgcacgtgttggtggctcgagagctgcagcagcgagctgccctgatgggcggccaggtgtacttctgctatgaccagtcgccctataagagctacgaggacttcaacatggagttcctgggcccctgcggactgcggctggtggagacccgcccgctggtgccctactggctgttgatgcttctggctgctctcaacgccc

SEQ ID NO: 7174 - DNA, 604 bp, Canis familiaris
gaggaggctccactgattaatggcacttgctctaacaccagagggctcatttgtagaaggagggggtaagaactcatcttggccttcctccagagcatcttcgagggagcatggagattgggcccattgcccttgcaggaaaggtggcttggcagagctgctccaggatgcctacttgtctcctacttggtcaaggtccatgttcttctgactcttcctgcattctcattcctgaattgtgagtgctaatgtacgaaaatatgcagactaaattgaggccactcgtggcatcagtactgcaacttgaatttgacaatcatggtttgctggtctcaaacgggcacttaaatttcagtgtgggtatatgatttagtaatcgaaccctcctttctatttgttggttatgtttctacccttcaattagctgccctgttttctaatgtgctgtagagtttttgaaataatttatgcaagtgtttggtttccatgtttacaatttatactgctttcctagcattttaaatggaaatgtccaataaatgctatgaattggtgtcccaaaaaaaaaaaaaaaaaaaaaaaaaaaaaaaaaaaaaaaaaaaag

SEQ ID NO: 7175 - DNA, 515 bp, Canis familiaris
tgtctggtacggtgaggacagtgccccctgctgcccccattcctgtgggtgctgtggggcagcgctgccccaggctggcgctggtgctggcacagcgctcatgtgcttgcccaagaccagggggcgttctgtggactcagttcaggctccagcccagcctgctgccccctgaaggagctgccctggttgtcatccttgctgggcgtgttgtgggcgtgtcgtttcaaagtgtgacagtgacacgtggggccagcgtggactggatgtcgagggacgtgtttgacaggatccaccctgctaaagctggctggcccgtgaagccagacctctgtccacccacaatatccaggaaatccagagtggatgtcatgggagggggacaggacgcctcctcttggtgacgggaacctgttaaagctgggcatcagggtgcctgtgcagctccacattggggtggtgggtttgtgtcccacatggggtgttgagtttactttagaaaataaaactttttaaag

SEQ ID NO: 7176 - DNA, 626 bp, Canis familiaris
gctgaacctgacctgggatccctgagtggctcagtggtttagagcctgccttcggcccagggcgtgatcctggagacccgggatcaaatcccaggtcgggctccctgcatggagcctgcttctgacctctgcctgggtctctggcctgcctctctctgtgtgtctctcgtgaataaataaataaaatcttaaaaaaaaataaaacctgaccttattttattgcttattcttgcactgtcattctgcttcttgataacattacagtaaccgtgtgtctgttgcaaaatcaccatatgcttatgatgcatccagatggcatggacagagcacgataaccagctcgaggcaaggaaagcagagacatttacagttcacaaccttgactgtgcttgtagggcaggcttacccagcagtttgacacatcttttaagacccttctctcggggatccctgggtggctcagcagcttagcgcctgcctttggcccagggcatgatcctggggtcccgggattgaggcccacgtctggctccctgcatggagcctgcttctccctctgcctgtgtctctgcctctatctctctgtctctcatgaataaataaataaaatcttaaaaaaaaaaaaa

SEQ ID NO: 7177 - DNA, 680 bp, Canis familiaris
acccgtgcgcagggcagcgtgcgacagggacctagtaattccctacaggattgcggagaagttcaccaagctctacgacgagctgctgcagtcctaccaggagaagatgtgtcaacacgtcctcctggctgaagcagctgtacgaggcagttttagctgggtgtcccaactggctaaccgtcacctctaagtgaagacccagttctatctccaggtcacgacggtgggttcctcagacgttcttgactccaatgttcccgtgggcttcactaaggtggttgtgaagctctttgattctgaccccatcacggtgatgatcccagaagcagtctccagggacaatcctaaatttatggagactgtggcagagaaggctcttcaggagtatcgccaaagcaccgagaggaatgagatgtgaacattgcttctccaaatatgggagggctgagttcctttgaccccaagatgagtgctaggcccctagagagagctctgcatgtcaccaagtgaccaggccttgcctcgaggcgctcctgtctcctaacccagctttccttcctctggactccgcactgtaacgcctacgtttgctgatcatgggaagaactcctgtgtgccactaactcaataaaaccgccaaggaatctgaaaaaaaaaaaaaaaaaaaaaaaaaaaaaaaa

SEQ ID NO: 7178 - DNA, 549 bp, Canis familiaris
tggggagggaactgtgagagggatcttgaaatagaagggcaacatggaaccctctcctggaaggagaagaagccccttccacaggagaaggatttaaacaagctactggatggatatgtgagaaaagaagcctgtgtgtgcagaatgtggaaaaagctttaaccagagctcctatctcataagacacctaagaacccatactggtgagaggccttataaatgcattgagtgtgggaaaggcttcaaacagagttcagaccttgttacccatcgcagaacacacacaggagagaaaccctaccagtgcagcgggtgcgagaaaaaattcagcgatagctctacactcatcaaacatcagagaacccacacaggggcacctgggtggctcagtggttgagcgtttgccttcaactcaagtcatgatccctgggtcctgggatcgagtcccccatcaggctccctgcaagaagcctgcttctccctctgcctgtgtctctgcctctctctgtttgtctctaatgaataaagaaataaaaccttaaaaaaaaa

SEQ ID NO: 7179 - DNA, 662 bp, Canis familiaris
tggttcagaaagaggtttgtttctcctgagggcagtttagaggctctatggccgaaaggtgggccacaagagttcttatgtgctattgcccaggcagagtcacttgcgttacaaactccttaggaggccttgctgtgcggagggcctgctatggtgtgctcggttcatcatggagagtggggccaaaggctgtgaggtcgtggtgtctgggaaactccgaggacagagggctaaatccatgaagtttgtggatggcttgatgattcacagtggagaccctgttaactactacgttgacaccgctgtgcgccatgtgctgctcagacagggtgtgctgggcatcaaagtcaagatcatgcttccctgggaccctagtggtaagattggccctaagaagcccctgccagatcatgtgagcattgtggaacccaaggatgagatactgcccaccacccccatctcggaacagaagggtgggaagccagagccgcctgctatgccgcagccagtacccacagcataaatagggtctccttggcagttggatctggaggctggattttactctgtgaagacctttaataaaatatttgagtaaaacacgtggccaaaaaaaaaaaaaaaaaaaaaaaaaaaaaaaaaaaaaaaaaaaaaaaaaaaaa

SEQ ID NO: 7180 - DNA, 551 bp, Canis familiaris
caaacaggaattgattctgtcacagtcccagagggcagaagtctgaaatcaggttgtgggcagggtaggttccttctggaggctctaagggagcatctgtcccaggcccctctcctggcttctggtggccaccgacagcccttcggtgttcctcggcttgtggtagcatctctccgatctctgcctctacctgcacatgggcctcttcgctttgtgtctctgtgtgtctagtttccttcctcatctaaggacatttgtcacaggatttagggcccactgtaaatccaggatgatctcacctcaggatccttatattaattgcatccacagaaaccttatttccaaatgagatctcgttcacaggttccaaggatcaggacttgggcatatcttttgaagggacacaagtcgacctactacaacccaggttccccaggccacactacaggcagctgtggctggaccatggtgggaacctggcctgggtctgagcctgagttcatggtacctctgtacatcttcatgaaagatttcttcccttaaaaaaaaaa

SEQ ID NO: 7181 - DNA, 597 bp, Canis familiaris
agccatccccagagtcgcctgagccaggcacagatgtcgtccccgcagcccccaggaagccgaggaagttctccaaactggtcctgctgacggcctctaaagacagtgccaaggtggcaggagctaagcgcaaaggagtgcactgcatcatgtccctgggggtacccggccctgccaccctcgccaaagccctcctcaagatccatcctgaggctcagagggccattgaggcgccaccccaggagcctgagcagaaacgcagcaagctggaccaagacggaaaagaagaaggaagcttggcagggcagcccgcccccagtgccccggcggagggggagcccactgcagatgctgtcaggcccgcgctcctgtagctcctgtagctcttgcccacgtgtctgcccttacggcccgtgaacttgcctgtgactgctcgacccagggacccagccgccaactgattttcattctcgaacactgtataattttttccaaatccagcacaaattacttttataaatagaaaaaaaaaaaactaccaaaaaacctcataaagaataaaagaagccgtatgctaaaaaaaaaaaaaaaaaaaaa

SEQ ID NO: 7182 - DNA, 606 bp, Canis familiaris
gctaacaagttaatcgtgccatagttttatggagactagtagagttcacacgcagagagtttgaaggggcatttatcaattagagcatagtagtagtcataacattagcaatttgcatccgtttcttgaacccagttcccacagggtgacaggaggtttatatacctcttatacatataggaggttatactttaagagaggaatcttgaatttggagaactccagcctctcaaatgggcagtaagcatgcctgtccttttctctgggtgtggcactatgtatgtctttccaggcttttggttatacagctgtttgaaaagagagtctggaatacaggcagtcagcgcttctgtttgaatgtgagaaaacctgtggaggattggctcccaatgaaaggtgtgctgattgtgcctttgctgagcactgctgaacatggaacttacatcaccttctttggatttcatctacttggaatcatttcattctgttttctgggacgaaatataacaactcatcctgatcaactgctcaacaaacttaaattgtcataaaatggactatagaaagaacttagctggcttgctatttattaaaaaaaaaaaaaaa

SEQ ID NO: 7183 - DNA, 590 bp, Canis familiaris
ttcggccgcctcgcgaggtgcgcgcccgccggtcgcgtcctctttcgggatctgggtaacccgctccccttgccaagagacgcgggacgtatataaaggcgtataggctcggccattccgatccccgagccccgagcccctgcggaaaaaaatggggtttcattgttttgcacttaaacggcaatgctaattggtaatgtttatccctggatgtcttccaatctctcacatccatctcatccttttaagcagttgccggtcaggtgtccaaggccaaatttgggaccgagacaacgtagttctccatctgggcaggaatcagtcatgggctgggctgcttaaaagggactgctgggtggctgggactaagagcacggtaatgtagagaactgacgggtcactgttggacgcctgaaactaatagaacacttaattatcctggagcttaaaaaaaaaaagattgatacatgcctctcccaagtttttattgtgatttttatttgtaacaaaagcctaggtgatgttcatcctgctgtttggggaagacacttgagaaccactgaggtaatagattatagtgattcaaaaaa

SEQ ID NO: 7184 - DNA, 695 bp, Canis familiaris
cccgcttcagcccaggctgatcctggagacctgggatcaagtcccatgtcaggctccctgcatggagcctacttctcccttctgcccgtgtctctgccccctctcgtctcctctctgtctctcatgaatgaatgaatgtatgaatgaataaataaataaataaataaataaattaataaataaataaataaataaataaatatttttttaaaaaatggaagaaggacatgacaaacagccagtaatctcacaaagatgtgcaacatgactaatcactggggacatgcaaatcagagcaacagtgaaacacagttcacacgtccatgaagacgaccacaaacaggcaccatgtagaaaattataacaggtgttggcaagggtgtggggagactggagcctgtgttcatggatggcaggcacatagaatagccactacggaaaatggtttggtggttccccaaaaagctaaatatagattcaccatatgaccctctctctctcaaatttttcttaaaaaaggtttaaaaagtgcctcagttggttgagcattatgcttaggttatgattttcaggtcctgggatcacaccctgcatcaagctcccagatcagtgggtatctgcttctccctcttctcccctcactcatgcactcccgcacactctttctctttctctctgaaataaaatcttttaaa

SEQ ID NO: 7185 - DNA, 734 bp, Canis familiaris
cagacatagctattagtacactagacaagtgtgacaaaaagcaggctggaccggtccggattcccggatctcaccaggacgaggccatgtcaagttgaagcgccagatcgtgaagcccacggcgagagccgacgagtttcgagtccggcatctccaggctttcctggagctggagatgtacttccgacctcaagcccagcttgagggagctgaacatcacggcggccaaggagattgaagtttggcggcggccgcaaagccatcatcatctgtcgttcccgtccctcaactgaagtctttccgaggaaatccaagtgcggctcgtgcgggagttggagaagaagttcagcgggaagcacgtggtgttcattgctcagaggagaattctgcccaagccaactcgaaaaagccgtacataaataagcaaagcgcccgaggagccgcactttgacagcggtgcacgacgcgatcctggaggacttggttttcccaagtgaaattgtgggcaagagaatccgcgtgaaactggacggcagccggctcataaaggttcatttggacaaagcacagcagaacaacgtggagcacaaggttgaaaccttttctggggtctataagaagttgacgggcaaggatgttaactttgagttcccagagttccagttgtaaacaaaaaatgattaaataaaactttcacagtaaaaaaaaaaaaaaaaaaaaaaaaaaaaaaaaaa

SEQ ID NO: 7186 - DNA, 497 bp, Canis familiaris
gtccttctggtttgtgcctcacagggagcttttccggtctatctgagtaaattatattctctcccttgttacgtgcaatgtgaggaaatccagcctgcctcgaggtggtttattccagatctgtcggtaacggggctcatctgtgctcctggcgctgtgcctcagcgtcggcggagctcacctgcctcccagtcactgtcgacgggggacgcgcctgtgcacctcgtcgctcatcgcctctcatttttattaaacacgctcagtagctttgttgagaagaaaatgggttctttatcctaaagatgattaccgttttaaagtgctcttaacattttcatgaatcctttttatttttttcctcgcggttttgtactccgtattttggggcgttttgtaatgtggctccttaccaagattattaaaaccttattaaaatctaccaccaaaaaaaaaaaaaaaaaaaaaaaaaaaaaaaaaaaaaaaaaaaaaaaaaaaaa

SEQ ID NO: 7187 - DNA, 612 bp, Canis familiaris
tcggagtaccagacctgctgaatgttaagatggctctcgacactgagagtgccacttacaggaagttgctagaaagcgaggagagcaggattgctcttgcctcgttccagacttgttccttgcactgaacctgaagggtaaaccaacctgggattcactccctctgtgttgacactcactcaagaaagaacgcttctgataagacggttgtaactagggatggacaggttatcaacgaaacttctcagcatcatgatgaccttgagtgaagcttgcccaagattcggtgcagcaattactaccagcaagaataattaaaataagatattcgtatcttaaagaaacagctttcaagtgcctttctgcagtttttcaggagcgcaagatagatttggaattaggagtaacctctagttcttaagaaccaacactcttaaaagatttaggagaaagtttacaacataatctagtttacgaagaaaacttgtgctagaatactttttaaaaagtatttttgaataccattaaaactgcttttttccaacaagtatctgaccaacttgtttctgcttcaataaatctttggaaaactcaaaaaaaaaaaaaaaaaaa

SEQ ID NO: 7188 - DNA, 630 bp, Canis familiaris
  misc_feature (1)..(1): n comprises a, c, g, or t, or includes no nucleotide
ntataagcagagctcgtttagtgaccgtcagatcgcctggagacgccatccacgctgttttgacctccatagaagacaccgggaccgatccagcctccggacttagcctaggccgcgggacggataacaatttcacacaggaaacagctatgaccattaggcctatttaggtgacactatagaacaagtttgtacaaataagcaggctggtaccggtccggaattcccgggatctatattccattgtatggatgtaccataatttctgtaaccagtttgctatttatggttgttttcaatattttgcccttacagagaataccaaaatgaatatctttgtgtatatgtggtgatgaatatctgtagaataaattcttacaagtggaatttcttgttcaaaagataggtatatttttttaaataaatattgccagatgcaatagaaattagaccagttaacactttcaattaatagtgaataaacttttcttaaatagaatggattcttaaaatttatagatttgaaaaattttattgtgctgttctaatagaagaggcataagtagggtcccctgggtggctcagtcagttaagcatttgactcgtggtttcagctcaggtcgtcatctc

SEQ ID NO: 7189 - DNA, 610 bp, Canis familiaris
agcctcacggtcatccaccaggcgctggagaacgcgcgctacctcaactccttctcgcacgtgggcgcgggcatcgtgcacgccatcaaccaggtggtgcacggcgcccgggccggggcgcgccgccacgccgagctggccttcgtgttcctcaccgacggcgtcacgggcaacgacagtctggaggaggcggtgcactccatgcgcaagcagacgtggtgcccaccgtggtggccgtgggcagcgacgtggacgcggacgtgctgtccaagatcagcctgggcgacgccactgccatcttccgcgagaaggactatgacagcctggcgcagcccggcttcttcgacaggttcatccgctggatctgctagcgccccagacccacgcccgtgccccccgcccggccttgctcagcccagccccatccctggactccttggcccctctggcgcccccgaggtctccgcctggcctctggaggtcacgtgacccagactgagccgggacagcaggccctgcacacccccccaccccgtgcacatgcccagtccaataaagtctttgaactgcaaaaaaaaaaaaaaaaaaaaaaaaaaaaaaaaaaaaaaaa

SEQ ID NO: 7190 - DNA, 530 bp, Canis familiaris
tccgtgttttgctcccgaagtattcagttcccgctcagtatgtttaaagtgcaaatggagttgcgcactgtgtgatttgattggggatcaatagggaagcacaggcaccaaccgtacatatacaagtgtattggagaagtgatttttgtcagaatttgaagtaggaaagttaccccgaacagcttcgtgctgtccagcttaactggcctgcaatattgtaagaatggcatatccttgttactgtgatatttaaatatccacagtgtccacctgtttccgaaagattctagtaatgatctagaaatatctgttctcttatctgttatttatcaatttttcccagtatttttatatggaaaaaattgtattgaagacatttagtatgcagttgataagaggaatttggtataattatggttggtgattattttttatactgtatgtgccaagctttactactgtggaaagacaactgtttaataaaagatttacattccaccaaaaaaaaaaaaaaaaaaaataaaaaaaaa

SEQ ID NO: 7191 - DNA, 521 bp, Canis familiaris
ctggtgataatttcagggtcatgagttaggcctcacatgtggcctcatgctgggcatggagccagcttgaagagttctctctgctccgtccgtctgcccctcgccctgctcttaaaaaagaaagagaagaaaaagataaaattcctagtggaaataactcttgttggcttgtttttaggttttatatagtttgaaaagtactctttcacttgggagcatattaatgaagtagtttaacttggtacagtatgaaattgttgttctttgtgtacactgacattcattactgtgaagccaactggagaagaaagggaggagaagcccagggaggtcagtggtatgcatctctcccttccttggcagcagtccttctttttgtgggcttgagagaggatacttgtgtattgaagctaaaatgttttacaggcaataaaacctaaatctatatatattcctaaagaataaaaataaatataacttaatgctattgaagtgtacacttaaaatatggtaaaaaaaaa

SEQ ID NO: 7192 - DNA, 201 bp, Canis familiaris
  misc_feature (1)..(1): n comprises a, c, g, or t, or includes no nucleotide
ntcgaatggatacaagcgggtcctggctttgtctgtggaaactgattacacctttccacttgctgaaaaggttcaaggccttcttggctgatccatgtgcatttgtggctgctgctcctgtggctgctgccaccagctgctgcacctgctgctgccgcagccccagccaaggttgaagcgaaggaagagtcggaggaatcg

SEQ ID NO: 7193 - DNA, 575 bp, Canis familiaris
gagaggccaatcgcgcaaagagctaggccacggaagtcggacctctcagaggactttggcatatgggatgagaccttggcagagtatggtggcaggatctctggaagactaaaccacctaagggccagttccctagggacaaaagctccagagacagaacctccaatgaacctagccatgaggaagggaaaaaccagaggattgtaccatggcaatcaaggccgcctgagaaactgtcttcaacagggacactccacatgggagaggaaggccctccttggggagccagggggaagacccgcttccaaaggggggtgctatgagagggtgatgagggaggcagggcttcatccttgctccctgctaccagctctaccttctgcccttggccattggtggctaatggggccaagagaagctggagcaaggagctggcaccagcatagggagaggataggaagagactctcttccatcctctgtctgtagcttaatccaaattttgggacagggagttatccggggtaagtaaagtggggagcctgatagagaataaaggtttttcatggattctaa

SEQ ID NO: 7194 - DNA, 654 bp, Canis familiaris
taatttctcaccaggcgccagggcaattgtaaagacattaaagttttttgtcaccaaacccgtgattttgtattgaatgctaatagaggatttagaattagaggtgtctgatcgattatctctccacgttatcatcgtagcagaaagacacagtcccatacacaggaaattaagaatgaagctaactacccttccattgggaagccaaggatttaatgctaggcacagtaagaaaattagcttctgattcattaaattggctatatgacttctaatattttggataaattaattcactcaggattcaggaaagaatgagtaattaaagttcactatacctggataaatgtgtgtaaaacagatccttatattgtgaaagtacagtctgtaactgataaaactttatgattttttttccctattatgcccccacatatcaagatttgggcactttattttagaagaaaatatatatcttttacatatgtgtgtatttataaatgcatagatatatgtataaaaatttgtaagagctggaggctttaattcaccagtgcatttggacaacttggtgtaactattttatgtgatcccaataaaaagcataattttcaaaaaaaaaaaaaaaaaaaaaaaaaaaaaaaaaaaaaaaaa

SEQ ID NO: 7195 - DNA, 622 bp, Canis familiaris
gatcggagcggcggcgcggcgcgcgcctccccggggtccggtacatgcggcgccgggcgcagggcccgggcccggagcgcccccggggctggaggcggccctgcagaagctcgcgctgcggcggaagaaggtgctgagcgctgaggagatggagctgtacgagctggcgcaggcggcgggcggcgccatcgaccccgacgtgttcaagatcctggtggacctgctgaagctgaacgtggcgcccctcgccgtcttccagatgctcaagtccatgtgtgctggccagaggctggcgggcgagccccaggaccccgcggccgtgtctctgcccacatccagcgtgcccgagacccgagggagaaacaaaggcagcgcggctctgagtggaggcccagcactggcagagcgcagtggccgggaaggatccagccaaaggatgccccgacaacccagtgctaccaggctgccgaaggggggcgggccggggaagagccctactcggagcagcacctgacatgggcagacttttcatgtggcccagctgtgggctttggcagcctcctaatggaggctacatggggttccacagttggtaataaagctttgtgggaaaccgaaaaaa

SEQ ID NO: 7196 - DNA, 649 bp, Canis familiaris
tgaggccaagtggcaggctcctgatccctctggccctgtgctgggccggtggtctgggcagggctgagctcaccgcagcacagcagcggggcctgcaggtggccctggaagaatttcataagcacccgcccgttcagtgggccttcaaggagaccagtgtggacaaagccgaggacacgcccttccctgcagggaccttcgtgaggcgtggaatttaaactccagcagacgagctgccggaagaaggactggaaaaaagccaactgcaaaatcaaacccaatgggaggaagcggaaatgcctggcctgcatcaagctgaactctgcagataaagttctaggccggatggtccactgccccatccacacacaggttcaccaggagcctgaggagcaccaggaggctcagtgcagcagggtggagcgcacaggcgaggacccccacagttactacttcccaggacaatttgccttcttcaaggccccgcctcccagctgaggccccacagagttgggtcccgcttcccggacagctgcaggaggtaaccagcaaaggacccccgcctgtccctgagctcagggaggacaatcccatcatccccgagctaataaaagtgctctcccaaaaaaaaaaaaaaaaaaaaaaaaaa

SEQ ID NO: 7197 - DNA, 480 bp, Canis familiaris
ttcctttggttgagtttacgacagccagttgtaaattgggcgagtgggacatgttaaggcctattcaaatttgtgcccattgtggagtctgtggatcatatgtttcctgacaaagattgcctcgaggacgaacatgtatataaagcacccatccgttaaaagtatgttcacagtttgtagaaatgcagcattgttctgtttctgagatcagtttgtgtgaattgttacataaatctttgtgagttagagcgggcaagcacaaattcctagcttggctttcttttttataatcctcaaatgtagatatttgtaacactttaaatctttactacatcgaatatattcaaactgtgccttactagaatgatgtctggatgtgaatatctgatcttccagtttatatgcctaatttatactcttgtacactcttgaaattaccatttatacaataaagcaaatgatttctcctcaaaaaaaaaa

SEQ ID NO: 7198 - DNA, 603 bp, Canis familiaris
caccccattgacgtcaatgggagtttttttggcaccaaaatcaacgggactttccaaaatgtcgtaacaactccgccccattgacgcaaatgggcggtaggcgtgtacggtgggaggtctatataagcagagctcgtttagtgaaccgtcagatcgcctggagacgccatccacgctgttttgacctccatagaagacaccgggaccgatccagcctccggactctagcctaggccgcgggacggataacaatttcacacaggaaacagctatgaccattaggcctatttaggtgacactatagaacaagtttgtacaaaaaagcaggctggtaccggtccggaattcccgggatagcttataactccagctgttgtctctgagagactgaagattcgaggttctctggccagggcagcccttcaggagctcctcagtaaaggacttattaaactggtttcaaagcacagagctcaagtaatttacaccagaaacaccaagggtggagatgccccagctgccggtgaagatgcatgaacaagatcccaccaactgtacattttgggaaataaaactttattaaatgaaaaaaaaaaaaaaaaa

SEQ ID NO: 7199 - DNA, 396 bp, Canis familiaris
acaccgggaccgatccagcctccggactctagcctaggccgcgggacggattacaatttcacacaggatacagtctatgaccattaggcctatttaggtgacactatagaacaagtttgtacaaaaaagcaggctggtaccggtccggaattcccgggatcgaagccttcctgacctcacaggtcaagctggacgtcagacgtcgaggcccaggcggccagaggggacccagcaggcggagggtctgtttcagcctgtctgacaggccgtcctggaggccgggcccaggctggggtccgggagcagctccgccaggaccgccctcgcccctacccccttttgtaaatcttgttaattgtaaatcaaatatagctgtgtttttcaaaaaaaaaaaaa

SEQ ID NO: 7200 - DNA, 558 bp, Canis familiaris
tggacttcctggattctgcttcgctctccctaccccaccaggggctagaaaatttgtttgaagtttttatatcttatcagactgtttccaccacaaatatgaacagtgggttggggagaggaggtggtatacctgagtaatttcatgtgttaactcattcttggtccccttcttaggctccttggtgtttgtttgctctctttggtctctcccttttgacctggggaagggactgtggcccagaggggggctttccctgtcttcttgcatcccatgccctgtccctcagggaggaagtggcagagagaagtcctcaccttctatctgaatggttatccaaggctccaggcttcttcctgctccctgccctagctgcccccattgccctttctcttcccccatcatagttctccagcccaggcttggcttcttggctcctattggggtcatcactccacactgactatggccgctgactactagggcctgcctcccaagtgaatttcactgtgacaattaaaaaagaaaaattgcaacaacctaaaaaaaaaaaaaaaa

SEQ ID NO: 7201 - DNA, 524 bp, Canis familiaris
gacagcctagctggccattctgggaaataacctcgcagtcagcctgcacagacccctcgcactgtatcaagcgtcagactacagaagctggagctcacgggccccacggaggagccgccccagcacagcccactgagaggagcttccaggacgcacccaggatgctgagcccaggagccccgccaggctgacatcccacatggatggtgtcctcttcattgccgctttctgtcatataaggaattccattaaagaaggaaaaaaaaacatatcccacattgtgtatgcacccacctgctccccaccccacgccccaatcgccaaaaccgcatctgatttttccctcctcgatgccaaagcaaagcaaacctattgtaagccatggactgagtttagagacatttctccaatctctcgttgtgcctttccagggaccagagcagggacagggggagaaggggaggggttaagttaaataaagaagattattttttgtttcctgactttaaaaaaaaaaaaaaaaa

SEQ ID NO: 7202 - DNA, 634 bp, Canis familiaris
aactcttgctgacaacaagtgtgattgatataagcctgataatattaggataactctacttgaaaacttagatcatgtacctggcatctaaaggcaggcattcaaataaatgaactgaatagtgaaagagtatggtttaatgtgactaagttaaagctaatatattaaaacatgaaaaaagtcatatttaaaattctataattttagggacaccaggctggctcagtcggtagagcatgcaattcttgatctcagggtcgtgagtttgagccccatgttgggcatagagattactttaaaaaattaaataaaaatatatatacataaaaaataaatgaaattctataatttcaattaatgaagctttatgaaaagttattatagactactcacatttgttcattccagaaacatatttaggtttcagctattaagaactggtgagggacgcctggatggctcagcagttgagcgtctgccttcggttcagggcgtgatcctggggtcctagggtcaagtcccgcatcaggctccctgcatggagcctgcttctccctctgcctgtgtctctgcctctctctgtgtgtgtctctcactgaataaataaaaataaaatattattaaaaaaaaaaaa

SEQ ID NO: 7203 - DNA, 598 bp, Canis familiaris
aagaactgcaaaagctgaaagcagcctgggttaagacttgggacccaggcttgttagctggagggaagttttaaagggcagcacaacatccaccctgtagaaccacagtggatgtcctacatccaaaccttgcctgccacctgtttccataaggcctaaaggctaagtattgtttttctattttaaaaaatcatgaaaaaaagaatattttgtgatgagtacaaatgctatgaaatttcagtgtccataaattaagtattgttagaacacagcccacacctctttgtgtctacactatatgttcacgctacaggtctagaacagcaaaattatgtacttgcagaggagtctgtgtgacccgaaagctgtaagataatggcttctggctcttcacagtttggcaacccctcctacatacagactgcctgcctcatttactgacagacaagacgaaatgaatagcccagaagggagatttcattgaactagtagatggacctgatatttgaaagacaggataatcagcttacaataatttcattacttaaacaccacaaggtactcttagaaagcttcttacttgaatgtaaaaaaaaaa

SEQ ID NO: 7204 - DNA, 678 bp, Canis familiaris
  misc_feature (639)..(639): n comprises a, c, g, or t, or includes no nucleotide
aggacgacaagtcttgttcctaatggtgctcaccagccgacaaaccctcgggccccaaacgaggcacacgagactataagcaaccagtttagaggggcgccagagcccctacccttgttgctggatcccctaggatagttgcctgtccacccaggctggccactgggttctgttagtactgtccaaagttagtaacactaaaaattgcgtttatcataaaatagtttggaaatctaagactttttagtagtgatatgttatactttaccagagcagcatcccatccttgtactaaaatgaggtgacttaaagctgatctcaccttgaggctttgaccaccttgcagcaaatgttgattcttagttgttctgtgtctaaaaattatatttgccagaaagacaaaagaagaagaagaataagaaagataagaactttggctgtgataacattttttagagatatatatattttttttttttttggactagggggcattcaaccggcaggaaaacaaaagcagaggggataagaatccaggaaaattagtatttagagccaggccgccagtccccttttcagatctgataggaggcacctcacgcacattgtgatgaagtagaagctaaaaacaagaacaantttttctagaatgttgcttagtctatatatttttccact

SEQ ID NO: 7205 - DNA, 584 bp, Canis familiaris
cctacgcagggcattgaagaaatgtgtcttggagtagactgtgaattattggtcaaccgggtgctgatagttgttaatactgtttacttcctctcggcaacgtaccaggtctggtagctggtggtaaaattgagcagcggggccgcattcatctctgtcaggctgtccgacacacactagcccttgggcctggacccagtcaccagcagctacttagactcgttggtcagagggtaaacaaacttagagttgttatacatcacagtgggcagcgaggtgttgtaagggggcaggcagtgttgcttagagcaggaggaggcagctgcggcccagggctaagccaacgaggtggatcagggttaagacaacgccagcagccacgagttgtgataccgttgaggcatagttgactagatggggacaggacacaactgccccaactacattgggtgagggtatgatctcacctggaaaaacttaatttcggtaataaaaaactgtcagttttttatgacactgaaatacacgtttttttttttttttttttttttttttttttttttttttttttttttttttttttt

SEQ ID NO: 7206 - DNA, 525 bp, Canis familiaris
agttggctacacgaactgggccacagatactaagtagtatttgggataccaacggctgtactcagatttcgtccaaccagaaggacgcacagaggtagtgtctcagcgtcaggaactggccaacctgaaatgagtcttggctaggggttgagagccctgcaggcaggttgccaggctgagtatcctacttgccagtagacctgttgtgctttgttataaacagcattgctgttgagtgcgccacgcctaaaatgtaccgggcagatgagggggtacctagttttctgttacaaaaaaagatcataagactagcaatattcttgtcaaatgtcacagctgtagaggatagaggatagggtcttgtccgcccaaaccagctggggaaggggtggcctgccaaacaaccacaggtgtgttaggacagtggagagcataggggctggccttcagtatagatctgatgatgcttggctactcaaaagtacaaaagaagaaacataatttcaagttcagtgtttttttttt

SEQ ID NO: 7207 - DNA, 209 bp, Canis familiaris
cgtggggaccagtgtccccacgagtggaatccatgccccccgagcccccgtctgtgccctcctcacactatctcggagcctgctcccgcagccagctgactggcgccccagcccggagaccactgaagccccacgcccgcggctccccgcccctctgtgcagcaccaagggggggggagcagaaagtgtgacaaagagaagctctaatt

SEQ ID NO: 7208 - DNA, 504 bp, Canis familiaris
tgagaccgtgcggcaccgtttcaccggctggcgtcaccgcctctggttgaaataacactgcaccaaaacagtttggtggtttatgttgaaacacccggcgggctgcctaaacaaaactgcacaaaacagaaaaaccgccctagacagttgacgggggcctccccggtccaggctggcgcgtgccgccgggcagccgaaacccacagtaaacctgcaaaggactgggcctgccgaccctggcagggcaccggcagggcaccggctagcgcgctgggtgctgggtggcgcgggggtgggtctcgggggtctgctgctggtctaacatgtgggtgggtcctgggaggccctgcctggcctcctgctggctgctacctgggtgctgttgcgctgcgcgtggcctcacgcgtggctctggaccccgggcagacgccgctcacccgcccgctcccgctcccgctcccgctcccgccggcgccggggtgtcgccggggtgtcgccggggtg

SEQ ID NO: 7209 - DNA, 437 bp, Canis familiaris
ttctcgttttaagaaggacacctcagaacatgagttgtaaatctcgcagggttttaagcacactattttctaggggcttggcagtttttcagagtacaaataaaaacctggtttcctagaacagcaagacagttttagtaagaattagcaggtgaattccgttaaactatcaggcctgcagtacctgtttattgaaagcaatcagtgccaacatgaacagttgtagctttgaatgtagcctttgcggaggtttgtaagttgactttctgacgggccctagagagagacaatcaactgccaaaggagagaatataggagctgaaagatgtggtgtccacaatctttagagtcaaataacttttttaagctttttctaagccggtagcattcgaagtcaaaataacagttagatttcttgtttgttattttgttatagt

SEQ ID NO: 7210 - DNA, 691 bp, Canis familiaris
gattttgattctcaggcagatgccttcgaagggagtcggctacaagtagtagatgtaggtctttccaggagtgactagttgttgcctatgaggaactacactgagagtgtagatgttatagaaagaaagcttgcagacgtggtttcaaccaatttacatcaaaaaccaccagtcttttctctggtgagactgttcaaggcaaacccatttgagcttgccaaggccactcggtatgactggtctgttgacctccagaatcccaggtttcaatccaacacccactcaaaaatccctgtgcaacatcgggtgttttttgctataagggaaagggtaactgcaacacaattggttcaatctgttaaacctggtgaggtattaagttctaaacattcccaacacagggttgcagtaaccgtacactaatagacagaaaccaggggccaagtaaccctgatcagaaggagcaaaatgcagtctgaataacaaccaagcaaagtggactgtgttggactccttaggcaatgactactgacatgtttgaataacaaacctgtcagtaaattaacttatttatgagtggaccaatttgaacaaatgccaaaggtacattatgaggatgagcaaagctaaaaagttggtaaacctaaacataaacctcgagctaaaactgaaataacaataattttttttt

SEQ ID NO: 7211 - DNA, 667 bp, Canis familiaris
ccctgggtgttgtagttgaagttggtcatttcgcaattagtccgtgtatcagggacgacttgtaggtgaccagcttgtcagggactaagtagtcagctaaggattcaggaggtgtcctttcaaaggtccaccactgatacctatataaccagctctataatctttccattggtctattgttgaagaaaaaggaacttcaacttgtgtttgccaagaaagctgacccatttttaatcttgcaagatgcagctccgaagaaagttaagatagtcttagcccctggtataggtccctactaaacatgacacccactgcaacagtgctggaacttaaaatatatcttcagttaaccagctctgaggtgttgattttgttgccgacacagagtgctctgcatatctctgagatgttatttccaggatgttttgaacaaaaggaaaaatacacaaaccctgacccatttaagcatccatcaaacagaagaaagttatgatttgaattatagttgttcatgtatgaggagatttctttagagtattagaacttaaatcaaaaggaacatcacaatcaaaaagatcttctaatttgttatagtgcaacaaacataaagataaaaaaaaacctctaatttcaagattttttaattttttttttttttttttttttt

SEQ ID NO: 7212 - DNA, 576 bp, Canis familiaris
cagctctgtttcaggatattctcgccaactgatatcatctgacttattagcactgaaaagaaaagaaaaagaaaaggctgaagtcttgttgaattaaagcatatgagtttacccactacctcccgaaacacatagttatgcacaaccaagcagaaaattagaggatctctcatatgccacgctgtccataatcacctgatattacagctgagaccattcatttgaatcgagtcaaggacaatacagctgaaaaagagaccagaaagcaacaagttacagtaattcatgttctaaacacaagcaccaaaaattatagagtagactcaagtccattaaatagagatgttgctacatctcctaaggaaacctgatcccatagagattgtatctctcaagagagctgtttgatacacccaactggcaagattatcccaactcgaggttgtacttagtgggtttacaaatataacagatatttttctttactttaaatatatcattttactaaagacatttttaaattgaagaaaactgtatttttattttttgctaaacagtatagcttttttttttttt

SEQ ID NO: 7213 - DNA, 565 bp, Canis familiaris
ttaccctaacaaagatagtgctgttgaaaaaaaatgtgccagaaagcactgttggaaatagacttgtggccagttaaataagaacaaagagtttctggaggagtgttgaaaaagattgtccagatgtgcaggttaaggggaagggtggggggcatctctgaggtgattggccgtagttaacctttgttaggtgatggttctcagattaagtggtaggaggcctagttgtccatctgctggcagcccagtgaaccaggtaaacaatcacaggagcaggaaccaggactcccctgctgacatccctctgatttccttgccacttgaactcaagtataccccaacacccaagcagagctcagtgtagggaaatattaaccctctgttaatgacccagttgccagaaacagaaacccaaagtgcctacaaggttaaacctaccaacacaccccattagtttagttgtataaaggagaaggggacaccagccccacttacacgagaggttccatgctgaacagaatagacccactcctacaaagtagttaattaattcagaatttttttt

SEQ ID NO: 7214 - DNA, 503 bp, Canis familiaris
cttgcggcttgtggatgttgacacgagggtgtcagtagtaggcaggaagccctggcgccctgagccgtatgcagtaggttacaggtacataggggcagttgccagtgctgaggctagaagagttgtgcatacgaggattctaagcagagcgagcctaggtaggtgattcctcagtgcatcaagagtgcggactgagagtatgcgtaaaccagggtgtgccccagaaatagccagaagacaagggaccctcgctgagaactataaagctcagctaaagactaaagaattcctgtaagatactaattatgaagagaatcttattgcctggtgctgggaaatgaagtgcacctcgaaaataaacctgcaacagccttggtaactacataatggtatgagttgacagagagagtagggggtgagaacttttattactaattatttgtagtcaatcaaatcttatttttttttttttttttttttttttttttttttttttttttttt

SEQ ID NO: 7215 - DNA, 531 bp, Canis familiaris
ctctgctgagcaatggtttcagaggatgctaagagcaaacagtagtagtatgaattcacctacgagcgtacgccttgagtctaggataacaaggagttgtaggtcggtgtgacgctattcagaaccaaggagtagtgttgttatttgagtcgaggaacatatcagagaacagcattgctcaaggagttacagggagcaaaggcttgagacccaaaaaaaccaaaaagaaaggtataacacaccaagcatcactttgagaggaccaaggtacttgtgccactgatactccagggtgctagtgtgtttagctgtgacaaggggcgcccggtagtcactgactgaagggagacagcaaactgcactgtactagtacgctgggaccagggaacttgcccatcgatgggcaccccagcactgctgggtgaaagcaacacccacacccacagccccaccactagagcactcactcactcacacacacactttatttattttacaatttttgtttgtttgtttgtttgtttgtttttt

SEQ ID NO: 7216 - DNA, 601 bp, Canis familiaris
agggctacatacctgctgaggtaccacaggtaacatccacacgttactaggtacccttctaagaaggtttagtgctaatagtagaagcacgaggggatcttttgtaacagctggtcatctttacacacctggtctactaagcctaccagggataggtagttcaaacagtggttgtcttgaagtcagagacccgagctcggttttatctgcgaaacaagacactgcctaaccttgatgcagtggaaaactctggactataggggttgcaggatccacagttggtgtcctactttggtaacctgctgtaaaaggctggagttatagtcctacaacctgttctggccaacatataggagggtccctaagttgttgcagaggcttttgcagtcttgcaggcagttgtgctaactagtggtggaccaaaaggctttcattgctcagtactaccacggagcagagcagcaagccccattacattgtttttacagaaagcacagatggcctctagtttgccagagaacagacagttgtgataaatttgaaaccttattttagatctacccactttttttttttttttttttttttttttttttttttt

SEQ ID NO: 7217 - DNA, 568 bp, Canis familiaris
ggaagctcagaacagaggactgcaactgcctggagcagcagcagttgtgctaacgactcggtgttgcgtgacctgccccctgggcggagctcaccatggacaagcagaccaggcccctggcccagccagccttgcagctgcggcacccctggcggcccaggggcaccccgtgggctgagttctctggaggcccccctgctgcctgagccagctgtgccctgctgcccgagaggccccttggtgggctaacggatgggctgggccctaggacaggcagatagtggtccccctgagccctgacaaccagggggcggcactgggcgcaatcagagcacctctgtgagaggtacgcagggcaagagagagaccagaccacctaggtggggttgggcatacctagaggcagggcacctaggtgtgctgtggtgtccacagtgattgctgcttgggctcagaggcagggagcagccagtggagtgaagcgagctcaccctgtggctgctcacagccattatttttcattgctggtgcccctaggttttattttttttttatttttttttttatt

SEQ ID NO: 7218 - DNA, 569 bp, Canis familiaris
aggcctgtctagtgttaaatgcactttaattgcagcactaaatttagaaatgtctccattaaatataagcattaagtgaccctgccacagtagctgagatcaaatgcatcaccatccgatttattgctataattaagaacctctcctggcctactgtacaattattccgtctgaatacatgttcactgagacaccattataaaacccagctagctgccaactaagtaaaagctgctattatatctgagtactaatagacgcaacaggtaatttttaaaaacgagagaattgaagccaagatttgtgctagaagtgatttaggggctgcgaggccaaagaggatgaagaatttgcttttgtttgtagaaggtgctcaaagttgtatgtacaaaactggttttcagatgattaaattgaaaaaagtgtttgttgagtatccttatggtttaagactattagttgaacaactacctgctggagaaattctgagaataaaagcctaaaagcctaattattagatattcctacatagtgagtaaatcttatttagtaatagttaaatttttttt

SEQ ID NO: 7219 - DNA, 414 bp, Canis familiaris
actaaacccccaggagtaagacaaggcctggtaggaatggatctcttggtcgcaataatgtactcagtgttgtattttgccgtgtcccgcaacacaggatagttctacatgaaagtgtgcttgcgtttctgatggcaagataatgagcaaattaggtgatcaggattgctagaagacgaaacaagtatggttacagcagatgataaatggcctggcaacatagactatcccacgaccctcgaatctttcaaagccgagctgaatccaaactaaagaatttgcttaaactgcagcatttatatttaagataaagaggggaactatgaatatattagcagttgggttcctcacaaacgaagtttggagtattttgaatttatttgtcagacacctctgattttttttttttttttt

SEQ ID NO: 7220 - DNA, 673 bp, Canis familiaris
ttcttttctgctagcttactccttgtctcggccttggcaggtccggggtgtcagtggtgcagctactagtccgagagtcacaggtggagggcttggagtacctgctgggacgactgtgcttggggcagtccctgttggtaaaggcttcgttttacttcgttttgccgctggactacgcggtcatagtgtgcggtcgggcctaaccattattcctggaacagggcttttacgtgtgtgcctacggccacttgcagcgggggttggtatacgggttgccgtaagtgttggggccttgggcgtttagttctctttgccacgtttactgagctaaccggcagtagacgccaggcaggaagcccaagtcctcctgcgcctgagcgggacacaagtcgaggccgcgcggttcgcggggcgcctgcccagccctggttcccccaatccctatccagcagactttctttcttttccaagatatgctaagcaacaccagtttaaaaaaccacacctacacctgagacagccctgtcggggaggcaccccggggtccacagtgagggtcatccactggaaggaggggcagagggtaggggcttccagtacgggtgtgttgtcccgacaccggaccggcaaaatgtgttgccttatttctaaagaagcccaacttttttttttt

SEQ ID NO: 7221 - DNA, 139 bp, Canis familiaris
cacctcaggccaagtttggtgaaccacaaaccagccctgttcccttctccactaaccagagagctgctgtgcttatttgtgctgtccaactccaccgaataaaatattttttttttttttttttttttttttttttttt

SEQ ID NO: 7222 - DNA, 512 bp, Canis familiaris
gaactacgttgaatgaataagtaaaaatttaagttgtaatgctcgttgggtctctttacaagacaggatggatgtatcgatgatgtagaaagagataggataattatgcaagtctttgtaaagggtttaccactagtgatctaccctgccgaatgagcaatgatctgaactttttgaaaacagacaagtgtatctaggttgattagtacattcactatagataattatgggtgtgctagaaccaaaaagcagaaggagtaaagttgtaagtctattattatagtgatgttaaaaaataattaaagaaaaaagtaaatgcttataagatctttaagcagaaaccaaatggaaaatcagatgttataattactactagactgcaactttgtcatgccaaaatacgaatataatttagtatatcgagctaagtattaatattaatatatacagataaaataatttttgagcaattgtttaatatataatttgagagaagcatttcccaaaatttt

SEQ ID NO: 7223 - DNA, 598 bp, Canis familiaris
gcagcagcaactgttgcgggttgctccagcacctgattgtcattagaggctgagggcgtgtgcttggcctttgttaacaagtgcggccagttgcgcctgttgcgtctgcagagggtccggtcacggcctgtggacctgctgaggatactgctgaaccacatatagggaaacgtcgttgcgtttaaagttgtagtctactcaatcaggcagttctgtgtacgtttagggctcgtcatagtaatcatcctgcgactcatagtcgtggtcgccgcctacggacccctgtgccccatctgcaactggctaggtgcctgcgacttcaatcgtagtcatcagtcctttctccccaatggcccaacgggggtcccggccgcgggtggaaggttccctcaaggggcaagcccaaagctcccttcgaggcaaccgcagggcaaatcacctgctgtacaagccatcccccaaacagctgcctggttggttgtgaatttcttatatttagccaaagtataaactagcttgagccattctacgctaaactaaattttttatgtttattttgctgaaagaatttttttttttttttttttttttttttttt

SEQ ID NO: 7224 - DNA, 394 bp, Canis familiaris
gagggccacccgtgcgtccgccccccccgcacgcctgccagggccaccctggcccagaccccctgcgctgggtaccctaccacatgcagcaaccagccaggtgcctcccccttctccggcctcctgtgggcccaccagcaaactcggtgcacccagttcactgtgttggatcaggttggaaaggtcgtttgcactcctctgagccccctcctccctgccggaaaccgggacctgttgcccagggtccagagcggggctgcagaagggaaaacctagcagtcaaagtcaaccccgcccacagcagaccccctaccgtgtactcattttaagctccgagccacccctttttttttttttttttttttttttttttttttttttttatttttttttt

SEQ ID NO: 7225 - DNA, 611 bp, Canis familiaris
aaatagcttgttacttaggctctgatcaggttgtgtttcgtcttgatgaaacatgttgacagtttaaaaggtttcccagttggttcataccattccacagtagggggcatcatatttggtcttaaaagaactgtgatgctgagaaacacaatatgggtttaaagtcactgtagctgcctgggtatcttgtcctaaggtccattctggcaactcgaaaatactaaacttcaattgatcaaaagcagcagtaggtaggttctgtgtgttcaatcataactccactttacacataatggcaggtacagatcacatcacacccgacaagcccaagtcccagatcctagttaaccccaccaaaatgctgtttgggcgtgtggttactagtgcaaccctgggaggctgctgacagcaaggcttcctgacttagaaggcatcttttggagccactctcgttgatccactaagatgttattctggaactaagttgttggagtgcttttctatggtaattagttattgttaccagcaaaggtaggagtcaaggtatttgtgaaaatttaaaatttttttttttttttttttttttttttttttttttttttttttttttt

SEQ ID NO: 7226 - DNA, 671 bp, Canis familiaris
gacctgcagcgtctgggtcaatgagtaacccacctgtgaggcggtgatggaactccttgcacagtggtacgtggcagcaggctgaccatcctggtgttgtagaacttctcgacgcacccagcagttgctggcagttcgtgcttgaaatgcagggagacccttccaggcattccactgcactttgagttgtccctaacatacacctggactcgtcggagggaacactgtcaacagtcacgcttgagaacccgaggcaactcattggaggaagagttgcacaaagtaacagtcccctactcggagtagtaccctgttgctgacacctggttcttaccatttaaataggtgtcagaggctgtgttggcacaactggtgatacgccttttgctccgtgtggttagtgtagagttctaagcaacacctttatagggtgggcagtgaaccaaagtccccttgtagtgagcatggccccatgtgtgtgcacagctagactccttgagtcctggccaagccacgtggcgcaccagacaccattccctgcaaaccaaccacaggtcaccgctcagattcgccatcgaaagcagtactagggttgttcaccagagagcctcattcacttattttccgccttggttacagtttttttttttttttttttttttttttttttt

SEQ ID NO: 7227 - DNA, 558 bp, Canis familiaris
ccggggtgacatattgttgatccgtgcccagtggcatgtcgaggggttcaacaccaggggcacggtgagaagatctcgcttttcctggtaatacgtagaagacatattagctacctcttagttcaggaccgctccttgtcccaggagttgttcagatacgagcactaagtctgctctccgatccgtctgaggatcgtgaccctcatcgctcagccccagggtcgcttgttgggggccttgcagtcgccagtggtggttgtgtaaaatttattttttcgtactttgttttacctgttgttgatagtagtttggtttttgttagccctttactgctgacaacaggtggtgctgaaccttctgggcttgcaacaagctagctacgcaacgtgtcctggcctgagcggccgggctgtaggcatagagcatgtgggcttggtgcaggtgaacatacagtggttttactttgcccggtttggctttatttacaacagacaacggactagaattttttttttttttttttttttttttttttttttttttttttttttttttttt

SEQ ID NO: 7228 - DNA, 647 bp, Canis familiaris
gagttactgatgactaaaaatagcaagtttttgataacagtagataggaatatactctgaaagaatacctaattcaagaaaggttgggctagagtgaagaagcattgaaaaaggcttaatcgttatagcagcatatttctaaagagatgtcgaaaaagagagttctagaaattgaaaacattcatatagaaataatgtttcagccttgcctaaacagttattaagatcctaaaatctaactataaactctatctagtgcttagatagtatgaacagataaaaagcagtttaaaggttaagacctagaaagtagaaaatgcctaacattataaatatatctgctacattactaggaaaatgaaagatgaacacagtaggcattaattaaagttctagaaaactgagatcaattaagcatacaaatatacaagataggagtttaaacagaacgtgacaacactaaaggtcagttaagaaagaaaacaatcagaagttaaaagagttaacaaagagataacagttatcttgttaacacagtttctactaagatttaggaaacacactgacatgcaaaacaaaacaacacaattgtttagttttgatttgaaatagtaaaagtattttttttttttttttttttttttggg

SEQ ID NO: 7229 - DNA, 497 bp, Canis familiaris
gaaagacccctggttgtttgagttacgcagtatctcggctgtgtggcctgggaagtgggtgttgaggtccatgaagggtaggagtggcagtctgtttcctggttgcccagaagaccctgtgatcttccctgtttggttcctcaggctaatccgggtccaggtggcttaggcctagacactctggcgctgtcccctacaactacgtagctgtcaacctgtgctctgaccccgggggtccctaaggtgggctttcgcgtgactcacagtggttagttctctagctgatctaccactccaggataggccacagagctgcatctaccatccataggaaattgtttaaccatcgacggtcaccaggagatagtacatcagttgatgcaccgcaccacaccagttattactcattgactctgtaaaacattgcaaacaaaaatttgtaatcgagggaatggatagtgaggatagttatttacctatctgatcttttttttttt

SEQ ID NO: 7230 - DNA, 538 bp, Canis familiaris
agatgagttgcgaaccagaacttaagactttcgggacgcgaagaaaagcgagaacaactgggagtgtggactcatacgactacaagactcagcaaacacgaactagttcccgtatcaaaggcaccgtgccaactgctgctgcattaaacaatgcattgtatacaggtgactgggaaactgaggaaacagttactcaattagctacaactactactccatcctatcataggattggtgagcatggaactacataaaactaatttcctatgacaaagacagcaggtagtatagaagcctggtagaactaaactaccctcaacagggtaaaaaatcagtgcacgacgacgtcgcaccagccgggcagcacggccgtggcctgctccgtggtggccgcggctgccaagaacaactggtaccccaagtagggccggagcgtggccgaggtggccgcctaagcccggcgcaccggcggacggcactgcgacgcagcccggcgcgggccgggtgggggtggctcacgccgggtgccgcggtgccc

SEQ ID NO: 7231 - DNA, 643 bp, Canis familiaris
tttcgcgtaatactgtaacggttgtccaacaatcgcaccgctccttctgggaccgccgttgacggatttttgtagatagggttactagttcccgtgtggacgctttctttagtcgaagtttgttgagggactttatttcagtagacctgtctgctacgggtttgtatatgttttgcaagactgaccataaatacctcacctagtagaaaaagaatgtttttgatttgtagcagttgttgcccttgaaagttaagggttttcactaggtgcaactaggagttggatgatgaacaggttttgcatcgggggtagtgtccggagcatttgaagttcgtgcagtaggtatagttcctcctgaccttgttacagaaattttaactgtctaaattaggagtccttatttttctataaagagtagaaattaaacaatactaacaaaaatttattactggcacggagttgctgtagaaaagttcagtccgagagttcaaaactgttcataagataggtacaatacctaagcacaaggcatcatttatgcagcttttgggatgagtacataaaattgcagatgagtacaggtaggttgagaacatgtaggaattattttggtttcaaaaaattttttttttttttttttttt

SEQ ID NO: 7232 - DNA, 533 bp, Canis familiaris
cacatcacagccctgcatttgcaagtctgaattataataggtttcttgccggctgtttaagtttgttgtgacacactctatgcagggcatataacagctgcaggtgaagttgttgctgacaaattttgcaggatagtgctcttgcctgctggatttttaaattgcagctcagaattgcatgtaatgtggaaatttgtttttcatgaaaactatcagggctggcgaagacctgaaggagatgttaaggttgaaacttgtttgaatgaaatccaaagcaaaatggactattgaaacaatagagtaagcagatagagttctctctgcacaaagattctaacacataaaggagtaaagtttcatcacttgtatcctgagaccagcctgaaattgggatctaagatgtgcagttcaaagtgaatcagagcttgtaaaaaaactagcagactaaagattatagaaagagttttaccaagggtaatttgaaaaggaatcctttttttttttttttttttttttttttttttttttttttt

SEQ ID NO: 7233 - DNA, 618 bp, Canis familiaris
ggcagacggccgccacgaaacacgacgcgcaaggcgcagcccgtgcctcagctacacggcgcactaactgcacttcctctcgcgccgcgggccagacccaggtggtcagagtcagcgcgctggtcgtgttcagcttgacctccttgcgcgcctaagtgccgagcctagccccggtcgtgcggcggcggcgcgggcggcgcgggcgcgggcggggactagggcagctccgtggcccggcggcgcagcgtccgcgtctgccgcagcttccaggccctacggccgcatccagtccatcagcggcttgcacaacttcgggcagcgcagctccgtcgtgagccgctcggactacgtggtctagcaggccgagcccttggcggcgcagcacttcgtcagcgagagcgtcgggcaggtgcggccctacagcgtgacggacttggtgttctaggcccgccagagcaacggcgccgtgcagggcttcggcccgggctgctgcggcacggtcggcggccaggtcgtcatcatcgtcgtggtcatcgttgtcgtgccgcgcgcggggggcgcgggcggcgtgctgcagcaggtcgtcgtcgtcggcgccccgctcccggcgcgcccggg

SEQ ID NO: 7234 - DNA, 596 bp, Canis familiaris
acaccagcggggtgggtctgggcgcgggtgcgtgcgcgctagcgcgccggcggccaaaaccctcgaactcgaggccagggggacggtcagcgggacaccaggcgcgacggcggcggcggcacctgtgcgtgagggtcagcggcggccggtggctaggctgggctggcgaaatggttgaaacaaccccacaaagtccgggaaaatgacgtttggtgagctgcagtttcagattcctttggtggatactagcatcctgtttttacacttgggtttgagaagcttgcttctgatgaggcagaaggtacgggaacctttggtttgggaggtgtgtaacttcctgaatgagagtttgaaggtgtatttgaacaacaccctgttataggtggctcctttgatgaccatgtagtcttggtaataaacaataaatgtgtaggagtctaacacggtttgatagaggtcagtttactaacaaacaattttcggctagttgcgttgcagccctaacctgagttgaagagtttacaagctactagatttattaaaactagacacacaaaatattatttcattaggatacctttcattttttttttttt

SEQ ID NO: 7235 - DNA, 565 bp, Canis familiaris
tgaatcgcaaccagaaactagatcccgaggcaccccaatatagcctgtgcaaaggagggctgagggggggcccagaaatacctgcagatgatgcatgaaacaactaaagatatccaggtgccctcagtaccttaaaatggtgagagattagaaactgataattaatgttgttggtccatgaactcataggaaggtagggtagggctgaggtgttattgtaattatcagcaaagtataacaccttgtgtttgaacattctcaagctgatctgaaaaaacgacccaaaacaggttttattggtggtttagctgcaacaggagacactcaaagtgtctttgacagcaaagcctgtgtgctttaagtggatttaactctccccaggttaagcaaagtgaactgtgccaagtgagggtgggtaagtgagatatgtgtaccaataatgcacagatgcaataacagatacggaattctaaagatcttatacggaatgtctgagggtgcactattagaggtcttattttgtcgttgaggactcaccatttttttttttttttttttttttttt

SEQ ID NO: 7236 - DNA, 566 bp, Canis familiaris
cacatcctccgggcctggcgtgctccagcggttagcccagaggctctctggtttctcccaggcctggagcgctcacagaggctagtcccacgtctctatggcaggtttgtaaactcagccatctgtaggcgacactgcctccggcccttgtcgggaaactaacgcgaggagtagatagttgggttgttttactaggcagtaactggtccctacatagtcttttcaatagcaggaggatggcatgggaagaacgacaacacacttgtttaggagaacaacacagtccagtttatcgttagctgtgtaaccattactttcagaagtacttttgtcagtaccattccttagcaggagaagctccaacaggttcctcgggcaattgttttccccctggtactcaccacccagccaaaacacagcaagctatactaagaggtctccatgttatcgggtcaagccacgtgtcctagcctaaaacctttactgtcacggctggatgccacagttcgcgttgtgttacaaccttgtgctagttctgaatcctaggagagcaaaactttttgctt

SEQ ID NO: 7237 - DNA, 560 bp, Canis familiaris
ggtgttacttttgtgggccatggccagcaacataatggacccagctgcttcggggcagcagaccggtgatacacagggcccaacctgacagctaggaggtgttcacagggcctttggagcaaggggggtgtgggtggtttcctgcagctgagtttgaattctcctgtcggagccccacgactgagaccaaaatttgttttttctatagtcagatgaactgattgtatgcttcagatattttaagcattttatgtaaaatgttactatctgagagacacaaggaactacaacttttactgtcagtacaaagtttcatgctgaaaaattactttgcaggcaaatatggtggtgatattagatagctcatcagaaaattttcttaatgagagagagagaaaaagatagtaagtgccctaactacgattgacatttcaagaatgcgaattagatccctagatgtcatgctttgatgatagatgtagagtaacactgaagatttatgtttttacattaacttatttcacagatactcccccagtttttttttttttttttttttt

SEQ ID NO: 7238 - DNA, 597 bp, Canis familiaris
agaagttgctgtagcaaaactggatacttggaatctaaggagctgcccatgaaaaggggggtgatgtagaatcaggtccactccacatctgctacataccactaggtacttcagtattgaagccaatagactcctagggaacaggaaccaaggctgcttaggcagagaaagttgtattgaaatggcctgtataggtggttgtggttgccttgttgcaggattgagttgcctaagctgcaggcgacaacttcgtccaggggacaggttgattctaagtacacagagactactgcttgtgctttcaggtcaaccaccgcccgatcacggagcccttcttgttggggtcatggaaaggccggatctgtagagtgtttgggtcctccgctgaccactcagtttttgactcctcccaggtgtaagtggagcaggttgtttctgaactgtcttaggtctcaacgagttaggctacagaggtaggtaggaatcagcacatcttgtaaggggagcggggggtctgaggtggcgccccccactgtccaactaaaggctgagacagcagttagtgtcccttattttctagttttcctgttttttttt

SEQ ID NO: 7239 - DNA, 704 bp, Canis familiaris
gtaaactccaccccaccaccccacggtctccgtgtcccgccggatcgttaagagaacaactgccctgtccgtaccccttccctggccctccttctctgggacaggctgagaccttgagcaaggtaataccttccttcactatccattatagtccgtgtacctgttcctcactcagggatgagggcagaagcaaccgggcttgtttcagcaggtcccacagttaacaagactgtaggaagccttctttgagggagggacacgagtgggtgtgtccccagctgctggagagggcaggaaagaccgttctccattggatgaggagtgtcctgggaaacatcaccagttcctccaccatttattagcactcaattcctggtgggagaggggcttaaaagtggtccctggaaaggagggtctgcatagatttcagatcgtggctattggctctcggacttactgctctggccaagggctcagcttcttagaacttcagcttgtcttctttctgaaagaacccaatctgactaatgcaaccagcaacgcggggaccgtcaagtatggctttgtccctagactcaaaaggaagtttgctgggcacgttcaggtggatgaagtatgtgagcgtgtgtgtgcatgtgagtgcatgtggcaccgggtgtcatctctacagactagaaataaaacagacaacttaaaaaaaaaaa

SEQ ID NO: 7240 - DNA, 593 bp, Canis familiaris
tgtttgaatccggttgaacctatttaagtctctgcctaatgtatcagagcagctggctttgggataataaaaagcttgaagacagccccatgttcgctttgtcaccgaacatgactgtctctccatgtctgttttgcatgaagcacaagcacttgcagagtatttgttagatctgtagctaaataagcaaagaccccgtgctctattcatcgtgtacatccagttgatactggtgatggtaataattagatggcagagtgtagtacttcattcagtgagcatttgcttcttgagcacttgctgatgtgccaggtagggatgatttatgattagaacctagcctctttcctggactcacagtctagtgggtgacagatgtgtccataaaacaaatgacctgtgtacccccttccccacccccactgcatgctcgcctcactcatctgtgtcaccaccagtccccagcacaccacccagctctgggtggctgcacacatgcttggtgagcacaagatagagcgtcacagagtgtctttgcatgtcccagaaggggtcagtgttacacagagagttaacagattgtgttctggtgt

SEQ ID NO: 7241 - DNA, 593 bp, Canis familiaris
ctgcgcaatccttcccagcttacttctgtgttctccaaggctccctgttgaaaagtcgatatattattgtgctggtaatgcaaccctggtgtctaaagccttggattagccccccacttctgcaccaaactcgcactttggcaatctctgcccctcggacgaggccctcaggggagcacagctcctgggtcccttgagggcagggggcatttctgctcctgcaaaatctaaactgttttgtttcagcagcattactacaccatcatcccattgccccatctagatgcagtctgcttccgcgttgctccctgcggctgtaagccagaggggattcaggggaagttcactttacagcaaatcccctgctcccctctgcccagtgctgacggaagcccctcctccataagcaagttcattctttcagtgccattggcatctacatagacaggtgtgagagtagatgtgtaggttactctacatgtatctgttctttcttcaaaaccatgttaactttgtgaaacgacttttacactccacacgctttacagcagaagaaataaaggaatatgaaaaatatcctgcttgaaaaaaaa

SEQ ID NO: 7242 - DNA, 611 bp, Canis familiaris
caggagcgtgaactggagagccctgtgctgagcagctgagaccttttccctgtgattcttgggggatttgtgggtaaggggaccttggagactgtgggcctagataattaaactcctctctgccagcaccacacgattcccctgtctgtacctgcctcacctctgcaagggccaggcctcagcagcccttcccggggtctctgagagctccccagaggcccccgctgaggggggcgggtgggggccaggtatggattcggtgagaggctggggggacaaggatggtgtagggctgagtgattgggttacagaggagggcagcggggagctgggctactggaaatgttttgaagcagggggttagaggtttggtactcagaagggcctctgagaacctgcccttccagatctcttccccaacccacacggtagctgtctgtccagtgctacaccttcctgcctcccgctctgcccctgggcaggaaaagagagagcaggctgaggagggtgtgactttggggaggatcaacagggtgcttgggcatttaaagaagtatggttgttttgtatcatttgatgaataaaaaaatggaaaaagtgaaaaaaaaaaa

SEQ ID NO: 7243 - DNA, 964 bp, Canis familiaris
  misc_feature (87)..(87): n comprises a, c, g, or t, or includes no nucleotide
tttttttttttttttttttttcttttttttttttttttttttttgttttttttttttttgtttttgttttttttgttttctgtttanaggcgcgtcgggcgaaaggacaaaaaagagacagagacatcgtacgtctgttctccattcctaaggacctatgtgtttcaatatctttcccggttgagaccgggagcccctctcagggctctcaagcatagttcgtttcttctttgtcccacttgcctcctttatttaggcatccctttatttcagagcttctttgtcccagaagagaaacctctttgggagaagcaggtgctacatctcagaatggacatttaccaaagagctaacatggcacgacaggtcaccagaactagaccacagctctcgaaacctctcgctgcagaggcctccttattcgataaatggggacttgggcacgcgcactgaaggcagttctgcgcaaggcagggccccctgagggtcagatcagaactgcccacacgcgctttttaactaggaccagatgcagcatgctggtcttgattggagagccttgacaggatgctaattaccaaacagtgggctttgtcaacgccttgttccagcaaaataatactaattgaggagtcaaaaatttggaagcagctctttgccaatttacattgaatcttccctcaagaaccaccgtctgcctaggctgtagataaaatttaaactaaaatctttctaaggagcggccctcaagcaatatttttgatacagcagatattcttaacacaacttttttaaaatatataaataccagggctcctgatttccaggtttctaaaaaaaggaactgaggtaaaacagatgccttgactattttagaggatcttttttgaatgttttatgaccgcctgcctgtttgaatattggcaaagggataaataataaattgacatcaaaaaataaaaaa

SEQ ID NO: 7244 - DNA, 524 bp, Canis familiaris
gcacctgcccgcacgaccgcggggctggtctccccatcctggacccccgcggactgcccgtggattgctgtctcgggtgacgacctggggcctggcatccgcaccgcatctgccgggctgctcagaggggccacagcagcgggcggggggggcgggcaggcagcggtcatcccagcaccagcgcgtggctgtgcgccgtcagtcctcactcacaaaaactggtggtgacggttggggccgtgcggtctgtgtgcccagggccaggtgagggcacgaccctgggtccctgttgtcacccctggtccccaagagtctccgctcgtcctggcgtgcaggccgtccggtcccggcttcccaggattgctgagcgcgtgcggccgggactcggcgcccgtggagaacggggaggggatggggtgctcatcctggccgctcccccaccagagcagaagcccctcccacgctggccccgcggccccccgcggcccccgctcgccctcctctctcagtcccggctacggcta

SEQ ID NO: 7245 - DNA, 752 bp, Canis familiaris
tcttgatttcgaaggaagcagaatggaagcatggaagcactggtgattcaagccccagcccaactatgcaggagtatattgcagtagttaaagagattagatccaggttggaatctcagtcaccagagaagaaaggaaaagaagcaataccggttttggtggacctgttgttagttctctgtatcatgaagaaatcatcagggaagaagacaaaacatatttgactactgcagggaaaacaacattgatcatgtaaccaaagtcatcagatcgaaaaatgtggatgtgaatatgaaagatgaagagggtagaactctactccattgggcgtgtgatcgaggacataaagaactagttacagtcttgctacgatataaagctgatattaactgtcaggctcaactaccatctgactgtgggatgatgaaggtcaaacagctctacattatgctgctgcctgtgagtttttggacattgtagagctgctgctccagtctggcgctgaccccactctccgagaccaggatggctgcctgccagaagaggtgacaggttgcaaagctgtttgtttggtgttgcagcaacacacgactggcaaggcttaatcaaaagactggaaaaccacagtctgtaacagcatagagcttcaataatgaaggaaaactgcaaagataatacttcttttaccacccatctttggtatacattggctaataaaatcagttctgaggaactgagaaaaaaaaaaaaaa

SEQ ID NO: 7246 - DNA, 455 bp, Canis familiaris
gacttttggaaggaggcccggaacaactccccctgaatggataatattgaatgccagttatacatggtatgattgcgttttaagtgattctttttcttttgtaaatcaggtgaaattcttaaatcctttgccactgatgtgttgaaaccttattgtacagtcaattaaggcaaacttttataattgtccttttgttttcaatgaccttgaaatgttacagcatggtattctatgcaactagttctcctccggggttgacactgtatttttcacattgatttaatggttgagtgtaggttttcttgcccggcagggttctcatacggtgtgtaaccatagatgcatgtacttgtgttttgtgtaagtgttgaagtgccatgatgtataaaaaagtggactcacctgtttttaaaaataaaacattgataaaaggtgaaaaaaaaaataaaaaaaaa

SEQ ID NO: 7247 - DNA, 722 bp, Canis familiaris
gtttttgacctttccttgtttgtccaattctgaatttcgatccatcgccaataaccctgttctacaccctccacctctggaatataaaattgcagcatgttctgaattccattgtttcagagtaatgattgaactggggcagctggtacaagaaccttggagcttcagctggacaatgccatcttcaaagcctttatagataacatctccgccatcttcctgcacagttggccgtattctagtatctaacaattccttaatcattgccacaacttcatcatcttcttcagatcctgcttctcctgaagatgtttcctcagtaactaagggtaagccagaagcaaagaaatccatgattgttgcataaatatctggtttcagtaaattccagtctaactcttcgctttcctttgtgacagtgatgaaatctggtccaaaaaagacactttttacaccttcaatcctaaataactgtctagccagaggggagcgaaatgctgcagactggtgctgggaaaactccatggtccttgtctcaagaactggttttccctggaataaactttaaactgttgggatttggggtatcttgtgtttgaataaacatgtgtctcactgtgttacataaggttgcaggcagtgggaaaagtggtctttgcacaaactgatgcagaggctgtttcttaatggtgtctggattcatcatcgcacagaatcgccca

SEQ ID NO: 7248 - DNA, 674 bp, Canis familiaris
ttcccagaagatgagtgccttagaattcatcaatccctgaggaggccaggcaaaactgccggactattttccatgcatggatcttacccgggacacaagggctccatggtcaaaaaaatggcagaccatgattgaagctcatgttgatgtaaagactaccgatggttatttgcttcgtctattttgtgttggttttactaaaaaaacgccataatcagattcggaagacctcttacgctcagcaccaacaggtccgcccaattcggaaaagatgatggaaatcatgacccgagaggtgccaaaccaatgacttgaaagaagtggtccaataaactgattcccagacagcatcggaaaagatatagaaaagcttgtcagtctatttatccactccatgatgtttttgttagaaaagtaaaatgctgaagaagccccagtttgaattggggaaactcatggagcttcatggtgaaggtagtagttctgggaaagctacgggggatgagaccggtgctaaagttgaacgagctgatggatatgaaccaccagtccacagaatctgtttaaaattcagacatttaatggtgacccataaaaacatatttgtgatgtttaaaaaaaaaaaaaaaaaaaaaaaaaaaaaaaaaaaaaaaaaaaaaaaaaaaaaaaaaaaa

SEQ ID NO: 7249 - DNA, 684 bp, Canis familiaris
acattcacccagaacagctatgaccattaggcctattaggtgacactatagacaagttgtaccaaaagcaggctggtaccgtccggaattcccgggatccgaatccgggttcatccgacaccagctgcctccgccatgccgcctaagttcgaccccaacgagatcaaagtcgtgtacctgaggtgcaccggtggcgaggtcggtgccacgtctgccctggccccgaagatcggcccgctgggtctgtctccaaaaaaggttggtgatgacatcgccaaggcaaccggtgattggaagggtctaaggattacagtgaaactgaccattcagaacagacaggcccagattgaagtggtaccttctgcctctgccctgattatcaaagccctcaaggaaccaccaagagacagaaagaagcagaaaaacattaagcacagtggaaatatcacttttgatgagattgtcaatattgcccgacagatgcgacaccgatctttagccagagaactttctggaaccattaaagagatcctggggactgcccagtctgtgggctgcaatgttgatggccgtcaccctcatgacatcatagatgacatcaatagtggtgcagtggaatgcccagcgagttaactacaaggaaaatatttcaataaaggatcatttgacaaccagtgaaaaaaa

SEQ ID NO: 7250 - DNA, 503 bp, Canis familiaris
cccggtagctccgcagctcaccggctgggaccagttatgtggcatgatatgcagtatctatgttaggcccagctctgggcacggcgctgaatggccttatccccttcgggggcgcttcccacgcgaagggaatcgtgctggagaagttgtggggttgaagcccaacagcccaattctgccatcaggaagtgcgtccgggtccagctgatcaagaacggcaaaatagatcacagcctttgtaccccatgatggttgtttgaactttattgaggaaaatgatgaggttctggtggctggatttggtcgtaaaggtcatgctgtcggtgacattcctggagttcgctttaaagtggtcaaagtagcccatgtctctctcctggccttgtaccaaggcaagaaggaaagacccagatcataagttttggtggtaaaaacaggacaataaattttcatataccagaaaaaaaaaaaaaaaaaaaaaaaaaaaaaaaaaaaaaaaaaaa

SEQ ID NO: 7251 - DNA, 635 bp, Canis familiaris
gaggattacattcatataagaatccagcaacggaacggcagaaagacactgactactgtccagggcattgcagatgattatgacgaaaagaaacttgtgaaagctttcaaaaagaaatttgcctgtaatggtactgtgattggacatcctgaatacggagaggttattcagcttcaaggtgaccacaagaaaaaacatttgccagtttcttttggaggttggcattgtcaaagaggaacagcttaaggttcatggattctaaaatgaacctaaatgcgtggagaatttcttgaataattttgttctctaaacccacgtttggctgccttgtgaaatgattctctgcagtaaacggacttttcatgtatttaatcattcaaactcccattcacatctgcatgattacagaaaacatggggtatgtaggctagtaacacataagaaaattgcagtaagatggtaatgagaccccgtattcatcttaacatgtttccaatggaaaatattttgttttgagtgtttatttgttcggtttattatttttcacttgattaaatgtttttttgttgtattaaaccatgtatgttgcagcttaacaataaagaaacatctatgaaaaaaaaaaaaaaaaaaaa

SEQ ID NO: 7252 - DNA, 616 bp, Canis familiaris
gtgacttttactaatagaaaataagtctgcctgtaaattatcttgaagtcctttacccggacaagcactctctttttcaccacacagttttaacttggttttcaagataattttcaggtgtttttctttctttttttcctggcagggaaggggagggatgcgtgggaagtggctaacataacttttctcaagtcactttactaaaccaacttttgtaaatagacttaacattctattttcaagtttcatttctattttgcagtgtagccagcctcatcaaagccctgacttacccatttgaattttgcactgactatattatctaggtatttggttggcctgtggctgcacttcatgataaagtggatttgaactacctggtggctcttcataaaatgcagattttcctcatgtactgtgatgtctgatgcaatgcatcctagaaccaactagcaatttgctagtttactctaatgactaaacatagtctggtgtgtgtggtctttctcatcttctagtatctttaaagatgaatcctaagaacttggacatttgccaataaaggaattttcttttaaaaaaaaaaaaaaaaaaaaaaaaaaaaaaaaaaaaaaaa

SEQ ID NO: 7253 - DNA, 591 bp, Canis familiaris
acccatgagaattcataatcaactttgtgaaactggtcttctaaataaggtgtatcccccccacaagcctacccaccacctcttacaagaacaattgaaggcccatgccatcccttcccataacaagtgcaggctcacacggtaataaggagcccaacacacttttagattgcattctggctgaggtgactgatgtttaaatcaacagcctgcctgattcaacttactttgagcttcttcttgtcagggtcatgcacgacagcatgcctagtgagactttgctaccatgaaggaaaaaaaaaacagttatattttaaaaaccctgccattttggtgtctattcatatgaaaactccatgagttatttaaattaactgtcaacaggcagcctgggtggctcagcggtttagcaccaccttcagcccagggcgtgatcctggggactcgggcccacgtcaggctccctgcatggagcctgcttctccctctgcctgcctgtgcccttctctctctgtgtgtttctcatgaataaataaataaaaatctttaataaataaataaactaaaaaaaaaaaaaaaaaaaaaaaaaaa

SEQ ID NO: 7254 - DNA, 677 bp, Canis familiaris
tgtcgacattccagaaaagtcgacatcaccctgaaggacgccctgtgatcggtgaagggccccagaaggaccctgcgaagggacttcaatcacatccacgtagactcagttcttctcggaagaagaagaagagggtcccgagttgacacaatgggtgggggaaatagaaaagacttggctaccgtttcgcacgatctgtagtcacgttcagaacatgatcaagggcgtgacactgggctttccgttacaaagatgagggtcggtgttatgctcacttcccccatcaacgttgttattcaggagaatggttctcttgtttgaaatccgaaatttcttaggtgaaaaatacattcgcagggttcggatgaggccaggtgttgcttgttcggtatctcaagccccaaaagatgagttaattcttgaaggaaatgacattgaacttgtttcaaactcagctgctttgatccagcaagcaacaactgttaaaaacaaggatatcagaaaatttttggatggtatctatgtttctgaaaaaggaacagttcagcaggctgatgaataagctctgagttgtccagcaacagaaacagcagatgccagatgatttttcagacttatttgtgataccttaagaatgcaataaaaactacactgaaaaaaaaaaaaaaaaaaaaaaa

SEQ ID NO: 7255 - DNA, 669 bp, Canis familiaris
ggcccgcgactcctgaagggccggggaagggggtgcgaaaacgtgctcccagattcgcctcctccagagcatcttccggaagtttaacggcacccagctcttggtcagccccagtcaattctctcgacccccgtctgtgcatcacaaattcctgtgagcctggtctgtgagctgagccctgttttcgggtctgcccccttgtgttacaggcagagatgcgtgtgttgtctccttcggccaggcaggctctccccgggctccgggcgcagcctctgcacacgaaggggccagtgaatgaatacgcggtaggactgcctcacccaggaccctgaccctttcggttccccaggtacgagtgttggcctgtgcgaagcagctgggcacatggttttatcccgggtatgggcaccggcaccctacggagagcctgaggtacggcggtatgcttggtgaggagcagcagtcgcccacctccgcgccatggccaggggccccaggtgtcaccccccccccccccagcctggggcagagtgagactccctggacctctctcccggggtcccgggtggcttggggccaagtgtccccaggtgggggactggactctggacgtacctgggcagtgcacagtacgggtaggtctgcttggcacgagcagagaaggtgctg

SEQ ID NO: 7256 - DNA, 592 bp, Canis familiaris
accagtcttccagttccaaaaatcagagtcacttaccatgcagccattctactcctagatacatactcaagagaactttaccacacacatgttcacacagaaatatattacccaatgttcagagcagcactatcccttaatagcccaaaagtagaaagcgccccaatgtccagctgaagaatggataaatgtggtcctgtacaccaaacgaagtattattcagcccagagaagaaatgaagtactgatacatcattctaccacatagatgaaccatgaacacatcatgcaaagtgaaaactcaatcacagaagactacatatagtatgattccatttcagtgaaatgcccagaacaggcaaatctataaagacagagttttggttgcctgggactgcaggggtggggaagagagggaatgtggaaaaatgttctaaaattgactgtggtgatggctgtacaaatctaaaaatactaaaaatgattcatagatttttaaagggtgaactgcatgagatgtgaattgtctccaataaagctgttaataaaaagttaaaaaaaaaaaaaaaaaaaaaaaaaaaaaaaaaaaaaaa

SEQ ID NO: 7257 - DNA, 642 bp, Canis familiaris
cgggacggataacaatttcacacaggaaacagctatgaccattaggcctatttaggtgacactatagaacaagtttgtacaaaaaagcaggctggtaccggtccggaattcccgggatgaaggccttgtctcaccatccacctctttggcccaggcctctgccccagcagcaggtggaaggccagtgatggtgggcaagcttcagggagctgctgcaccctggacacctgggagttgagtgggattacccactactgattcctacagaatggactgcagaaaaatctctaaataatgccatgattccttccttctccaagaaggcaaaggattgatttacttttgttcagagaaagtcctaatcaggagatccacaggtgagggactgggtgtgtgtatgggagtattttttatggttacctcgtgtaaagtacctagcacagtatgtggaattcagcagcccacaagggtgccacgttgggggcagggaagctttgtgaacttgggccctaccttgactacccttgagataattagctcaggtctacttttccctcagggtactgggttctctgcttctttaggtggggtgctttcagctaatcaaataaatgaatgatgaataagaaaaaaaaaaaaaaa

SEQ ID NO: 7258 - DNA, 599 bp, Canis familiaris
cttccccgagcgccacactctttacacgcagcaaagcaagaacccaaccccaggcctcctgaaagcagcgcctgtaagctgtgtcccccgcgacagccccttgaacgtgaacgcgctccctacccgggccgcgccctgccatgccccgcgccgtctctaaacctagagatctaaacattctccttcgtgtactttagcagaacgcttggcacgctttcttactacaccggtgtgatccgagacgtgaaaggtaccgagtccgacggctcagactcttctggttgggaattattattattgtttttttaaagagggctttaaaaagtgaccccaaagaattctaattttaaggaaatccaaccaaacttgatcaagtgaaacacgcgtgtgcgtagtggacccacctcgagatgttgaggtccattttagaaatgtcgtttccacctggagagagacttgcttagctgcagcgtgtgccgtgagccctggacacgtcgcacctgtcggggccgtcggggtcacggagtccttgagcatccccgggctgaataaaggccagtcacttgcccttcactgtcaaaaaaaaaaaaaaaaaaaaa
